United States Patent Application Publication US 2004/0029129 A1 - sequence listing, part 10

SEQ ID NO: 26510 - DNA, 1338 bp, Mycobacterium bovis
atggaccgacagaaggaattcgttcttcgtaccctggaagaacgcgacatccgcttcgtccggctgtggttcacagacgtgctcggtttcctcaagtcggtcgccatcgccccagccgaactcgagggcgccttcgaggaaggcatcggcttcgacggatcctcgatcgagggctttgcgcgggtctcggaatccgatacggtggcgcacccggacccgtcgaccttccaggtgctgccctgggccaccagttccggccaccaccactcagcgcggatgttttgcgacatcaccatgccggacggctcgccgtcgtgggcggacccgcggcacgtgttgcggcggcagctgacgaaggccggcgaactcggcttctcctgctacgtgcatcccgaaatcgagttcttcctgctcaagcccggacccgaggacgggtcggtgcccgtcccggtcgacaacgccggctatttcgaccaagcggtgcacgactccgccttgaactttcgccgccacgcgatcgatgccctggaattcatgggcatctcggtggagttcagccatcacgaaggcgcacccggccagcaggagatcgacctgcggtttgccgacgctctgtcgatggctgacaacgtgatgaccttccgctacgtcatcaaagaagtcgcgctggaagagggcgcccgggcgtcgttcatgcccaagccattcggccagcacccgggctcggcgatgcacacccacatgagcctgttcgagggtgatgtcaacgcgttccacagcgctgatgatccgctgcagctgtcggaagtgggtaaatcgttcatcgccgggatcctggagcacgcttgcgagatcagcgcggtcacaaatcagtgggtcaactcttacaagcggctggtgcagggcggcgaagcgcccacggccgcgtcgtggggggccgccaaccgatccgccctagtgcgggtgccgatgtacacgccgcacaagacctcgtcgcggcgggtcgaagtacgcagccctgattcggcgtgcaatccctatctgacattcgccgtgctgctggccgcgggattgcggggtgtagagaagggttacgtgctgggcccgcaggccgaggacaacgtatgggacctcacacccgaggaacgccgagcgatggggtaccgagaattgccgtccagtttggatagtgcgctgcgcgccatggaggcctccgaactcgtcgcggaggccttgggggagcacgtttttgactttttcttgcgcaacaagcgcacggagtgggcgaactaccgcagccacgtcacgccatacgagctgcgcacctacctgtcgctg

SEQ ID NO: 26511 - DNA, 798 bp, Mycobacterium bovis
gtgtcaatcgtgacgccatacgaggacctgctgcgcttcgtgctcgaaacgggtacgcccaaatccgaccgcaccggcaccggaacccgcagcctgttcggccagcagatgcgctatgatttgtcggccggtttcccgctgctcactaccaagaaagtccatttcaaatcggtagcctacgagctgctgtggtttttgcgcggcgattccaatatcggttggctgcacgagcacggagtcaccatctgggacgaatgggcaagtgatacaggcgaactcgggccgatctacggtgtacaatggcgatcgtggccggctccatccggtgagcacatcgaccagatcagcgcggcgctggatttgctgcgcaccgatcccgattcccggcgcatcatcgtgtcggcctggaacgtcggcgaaatcgagcggatggcgctgccgccctgtcatgcgttcttccagttctacgtcgccgatggccggctgagctgtcagctctaccaacgcagcgccgacctgtttctgggtgtgccgttcaacatcgccagctatgcgttgctcacccacatgatggccgcccaggccggcttgtcggtcggcgagttcatctggaccggtggcgactgccacatctacgacaatcacgtcgagcaagtacggctgcagctcagccgcgagccgcggccatatccgaaactacttctagccgaccgggattcaatcttcgagtacacctatgaagacatcgttgtgaagaactacgatccgcatccggcgatcaaagctccagtcgcggta

SEQ ID NO: 26512 - DNA, 1317 bp, Mycobacterium bovis
gtgcagcagctacgacgcaaggagaacccagtgccgattatcgagcaggttggggcccgagagatcctcgattcccgcggcaacccgacggtggaggtcgaggtggcgcttatcgacgggacattcgcccgggccgcggtgccgtcgggcgcctcgaccggggagcacgaggccgtcgagttgcgcgacggcggcgatcgctacggcggcaaaggcgtgcaaaaagccgtgcaggctgttcttgatgagatcggcccggccgtcatcggactcaacgccgacgaccagcgattggtcgaccaggcgctggtggacctagacggcacccccgacaagtcccggctgggcggcaacgcgatcttgggtgtctcgctcgctgttgccaaggcggcggcggattcggcggagctgccgttgttccgttatgtcggggggccaaacgcgcacattctgccggtaccgatgatgaacatcctcaacggcggcgcacacgccgataccgctgtcgacattcaagagttcatggtggcgccaattggcgcgcccagcttcgtcgaggcgttgcgctggggcgctgaggtgtaccacgcgctcaagtcggtcctgaaaaaggaggggctgtccaccggcctgggcgacgaaggcggcttcgccccggatgtggccggcaccaccgcggcgttggacctgatcagccgggccatcgagtcggcgggcttgcgacccggcgccgacgtggcgctggccctggacgcggcggccaccgagttcttcaccgacggcaccggctacgtcttcgagggcaccacccgtaccgcagaccagatgaccgagttctacgcgggcctgctcggcgcctacccgctggtgtcgatcgaagacccactgtccgaagacgattgggacggctgggccgcgctgacggcctcgatcggtgaccgggtgcaaatcgtcggcgacgacatctttgtcaccaatcccgagcggctcgaggagggcatcgaacggggcgtggcaaatgcgttgctggtcaaggtgaaccagatcgggacgttgaccgagacactcgacgcggtcacgctggctcaccacggcggataccgcacgatgatcagtcaccgcagtggcgagacggaggacaccatgatcgccgacctcgcggtggccatcggcagcgggcagatcaagacgggcgcgcctgctcgcagtgagcgcgtcgcaaaatacaaccagctgctgcggatcgaagaggcgcttggcgacgcggcccgctacgcgggcgacctggcatttcctcggttcgcgtgcgagacgaaa

SEQ ID NO: 26513 - DNA, 1263 bp, Mycobacterium bovis
gtggcgctcgtcgtgcagaagtacggcggatcctcggtggccgacgccgaacggattcgccgcgtcgccgaacgcatcgtcgccaccaagaagcaaggcaatgacgtcgtcgtcgtcgtctctgccatgggggataccaccgacgacctgctggatctggctcagcaggtgtgcccggcgccgccgcctcgggagctggacatgctgcttaccgccggtgaacgcatctcgaatgcgttggtggccatggccatcgagtcgctcggcgcgcatgcccggtcgttcaccggttcgcaggccggggtgatcaccaccggcacccacggcaacgccaagatcatcgacgtcacgccggggcggctgcaaaccgcccttgaggaggggcgggtcgttttggtggccggattccaaggggtcagccaggacaccaaggatgtcacgacgttgggccgcggcggctcggacaccaccgccgtcgccatggccgccgcgctgggtgccgatgtctgtgagatctacaccgacgtggacggcatcttcagcgccgacccgcgcatcgtgcgcaacgcccgaaagctcgacaccgtgaccttcgaggaaatgctcgagatggcggcctgcggcgccaaggtgctgatgctgcgctgcgtggaatacgctcgccgccataatattccggtgcacgtccggtcgtcgtactcggacagaccgggcaccgtcgttgtcggatcgatcaaggacgtacccatggaagaccccatcctgaccggagtcgcgcacgaccgcagcgaggccaaggtgaccatcgtcgggctgcccgacatccccgggtatgcggccaaggtgtttagggcggtggccgacgccgacgtcaacatcgacatggtgctgcagaacgtctccaaggtcgaggacggcaagaccgacatcaccttcacctgctcccgcgacgtcgggcccgccgccgtggaaaaactggactcgctcagaaacgagatcggcttctcacagctgctgtacgacgaccacatcggcaaggtatcgctgatcggtgccggcatgcgcagccaccccggggtcaccgcgacgttctgtgaggcgctggcggcggtgggggtcaacatcgagctgatctccacctcggagatcaggatctcggtgttgtgccgcgacaccgaactggacaaggccgtggtcgcgctgcatgaagcgttcgggctcggcggcgacgaggaggccacggtgtacgcggggacgggacgg

SEQ ID NO: 26514 - DNA, 1344 bp, Mycobacterium bovis
ttgaccggccccgaacatggctccgcctcgaccatcgagatcctgcccgtcatcgggctgcccgaattccgtcccggcgacgatctgagcgccgccgtcgccgcggcggcaccgtggctacgcgacggtgacgtcgtggtggttaccagcaaggtggtgtccaaatgcgagggccggctggttccggctcccgaagaccccgagcaaagagaccgattgcgccgcaagctgatcgaggatgaggcagtgcgcgtgttggcgcgcaaggaccgcacgttgatcaccgagaatcgactcgggctggttcaggcggccgccggcgtggacggatccaacgtcggccggtccgagttagcgctgctgccggtcgatcctgacgccagtgccgcaaccttgcgcgccgggctgcgcgagcggctcggcgtcaccgtcgccgtggtcatcaccgacaccatgggacgcgcctggcgcaacggccagaccgatgccgcagtcggcgctgccggtctggcggtgctgcgcaactatgccggtgtccgcgacccatacggcaatgagttggtggtcaccgaggtcgcagtcgccgacgagatcgccgcggccgccgacttggtcaaaggcaaactgaccgcgacgccggtggcggtggtgcgtgggttcggcgtgtccgacgacggctcgacagcccggcaactgctgcggccgggcgccaacgacctgttctggctcgggaccgccgaagcgctcgagctgggtcgccagcaagcccaactgttgcgcaggtccgttcgccggtttagcaccgatccggtgccgggcgacctcgtcgaggctgcggtcgccgaggccctcaccgcgccagccccacatcacacccggccgacccgattcgtgtggctgcagacaccggccatccgcgcgcggctgctagatcggatgaaagacaagtggcggtctgatctcaccagtgacggcttgcccgccgacgcgatagaacgccgggtggcacgcggccagatcctctatgacgcacccgaagtcgtcataccgatgctggtgcccgacggagcacacagctaccccgatgccgcccgcaccgacgccgagcacaccatgttcacggtcgccgtcggagcggccgtacaagccttgctggtcgcgctggccgtgcgcgggctgggcagttgctggatcggctcgacgatctttgccgctgacctggtccgcgacgagctggacctgccagtcgactgggagccgttgggcgccatcgcgatcggatatgccgacgagccgtccgggttgcgcgacccggtgcctgccgccgatttgctgatcctgaag

SEQ ID NO: 26515 - DNA, 1137 bp, Mycobacterium bovis
gtgtgccagcagggacgcccattagggtgggacgccgtgagcgatgtgccagagctgatacacggaccgctggaagaccgccatcgcgagctgggtgcgagtttcgccgagttcggcggctggctgatgccggtctcgtatgccggaaccgtcagcgagcacaacgccacccgcaccgccgtcggccttttcgacgtcagccacctgggcaaggcactggtccgtggaccgggtgcggcgcagttcgtcaactccgcgctcaccaacgacctgggtcgtatcgggcccggcaaggcgcaatacaccttgtgctgcaccgaatccggcggtgtgatcgacgacctgatcgcctactacgtcagcgacgacgagatctttctggtgcccaacgccgccaataccgccgcggtggtcggcgcgctacaagctgccgcaccgggcggtctgagcatcaccaatctgcatcggtcctacgcggtgctggccgtacaggggccgtgttcgaccgacgtgctcaccgcgttggggctgccaaccgagatggactacatgggctacgccgacgcttcgtactcgggggtgccggtgcgtgtctgtcgcaccggctacaccggtgagcacggttacgaactgctgccgccatgggagtcggcgggtgtggtgttcgacgcactgttggcggcggtatcagccgcgggcggcgagcccgccggcctcggtgctcgcgacacactgcgcactgaaatgggctatccgctgcacgggcacgagctttcgctggacatctcgccgctgcaggcccgatgcggctgggcggtcggctggcggaaggacgccttctttggtcgtgcggcgttgttggccgagaaagcggccgggccgcggcggctgctgcgggggctgcgcatggtcggtcgcggtgtgctgcgccccgggctggctgtgcttgtcggggatgagacggttggggtcaccacgtcgggaacgttttctcccacgttgcaggtcggcatcgggctggcgctgatcgacagtgatgccggcatcgaagacggccagcaaatcaatgtcgacgtccgcggccgtgctgtcgaatgtcaagtggtgtgtccgccgttcgttgccgtgaaaacgcgc

SEQ ID NO: 26516 - DNA, 1059 bp, Mycobacterium bovis
atgtccgtggtgcgcgggaccgctctggctaactacccgagcctggttgccgggttgggcggtgacccggccactctgctacgggccgcgggtgttcgggatcaggatgtcggcaactatgacgcgttcatttcgatccgggcagcgattcgggcaatcgaatcggccgcagcggtcaccgccacaatggatttcgggagacgattggcacagcggcaagggattgagatcctgggaccggtcggtgtggcggcccgcacggccgccacggtcggtgacgctctggcgatcttcaacaccttcatggcggcctacagcccagttatcgccatccggatcacgccgctggccggacagcggtcatttattgcactcgagttcctgctcgacgagccggcgtcgtatccgcagaccatggagctggcgctcggggtggcgctcggggtgatccggttgttgttgggcgctgactacgccccactggccgtgcacttaccccacgacccactcacacccgaagccttctacctgcagtacttcggctgccggccttacttcgccgaacgtgttggtggtttcaccatgcgcaccgcggacctgagccgtcccctcaaccgcgacgatgtcgcccaccgggtggtcgtcgactacctgagcagcatcacgccgctgggcgaggggatcgtggaatcggtgcgcaccatcgtgcgccagctgctgcccaccggagcggcgacgctcaacgtggtcgccgagcagttccacctgcacccgaaaacgctgcaacgtcgacttgcggaggagaacaccacattcgttattctggtcgatcgggtccgcaaggatgtcgccgatcgctacctaaggaccaccgggatcggccttacccatttggcacgtgaactgggctacgccgaacaaagcgtgttgacccgctcgtgcaaacgctggttcggaaccggaccggccgcctaccgcaaccaggccaggttacagacaaccgtgagcgcacctggcagcgggcgtggtccgaatccaggtaacgtctcagtatcctgc

SEQ ID NO: 26517 - DNA, 2514 bp, Mycobacterium bovis
atgacagacacgacgttgccgcctgacgactcgctcgaccggatcgaaccggttgacatccagcaggagatgcagcgcagctacatcgactatgcgatgagcgtgatcgtcggccgcgcgctgccggaggtgcgcgacgggctcaagcccgtgcatcgccgggtgctctatgcaatgttcgattccggcttccgcccggaccgcagccacgccaagtcggcccggtcggttgccgagaccatgggcaactaccacccgcacggcgacgcgtcgatctacgacaccctggtgcgcatggcccagccctggtcgctgcgctacccgctggtggacggccagggcaacttcggctcgccaggcaatgacccaccggcggcgatgaggtacaccgaagcccggctgaccccgttggcgatggagatgctgagggaaatcgacgaggagacagtcgatttcatccctaactacgacggccgggtgcaagagccgacggtgctacccagccggttccccaacctgctggccaacgggtcaggcggcatcgcggtcggcatggcaaccaatatcccgccgcacaacctgcgtgagctggccgacgcggtgttctgggcgctggagaatcacgacgccgacgaagaggagaccctggccgcggtcatggggcgggttaaaggcccggacttcccgaccgccggactgatcgtcggatcccagggcaccgctgatgcctacaaaactggccgcggctccattcgaatgcgcggagttgttgaggtagaagaggattcccgcggtcgtacctcgctggtgatcaccgagttgccgtatcaggtcaaccacgacaacttcatcacttcgatcgccgaacaggtccgagacggcaagctggccggcatttccaacattgaggaccagtctagcgatcgggtcggtttacgcatcgtcatcgagatcaagcgcgatgcggtggccaaggtggtgattaataacctttacaagcacacccagctgcagaccagctttggcgccaacatgctagcgatcgtcgacggggtgccgcgcacgctgcggctggaccagctgatccgctattacgttgaccaccaactcgacgtcattgtgcggcgcaccacctaccggctgcgcaaggcaaacgagcgagcccacattctgcgcggcctggttaaagcgctcgacgcgctggacgaggtcattgcactgatccgggcgtcggagaccgtcgatatcgcccgggccggactgatcgagctgctcgacatcgacgagatccaggcccaggcaatcctggacatgcagttgcggcgcctggccgcactggaacgccagcgcatcatcgacgacctggccaaaatcgaggccgagatcgccgatctggaagacatcctggcaaaacccgagcggcagcgtgggatcgtgcgtgacgaactcgccgaaatcgtggacaggcacggcgacgaccggcgtacccggatcatcgcggccgacggagacgtcagcgacgaggatttgatcgcccgcgaggacgtcgttgtcactatcaccgaaacgggatacgccaagcgcaccaagaccgatctgtatcgcagccagaaacgcggcggcaagggcgtgcagggtgcggggttgaagcaggacgacatcgtcgcgcacttcttcgtgtgctccacccacgatttgatcctgttcttcaccacccagggacgggtttatcgggccaaggcctacgacttgcccgaggcctcccggacggcgcgcgggcagcacgtggccaacctgttagccttccagcccgaggaacgcatcgcccaggtcatccagatccgcggctacaccgacgccccgtacctggtgctggccactcgcaacgggctggtgaaaaagtccaagctgaccgccttcgactccaatcgctcgggcggaatcgtggcggtcaacctgcgcgacaacgacgagctggtcggtgcggtgctgtgttcggccgacgacgacctgctgctggtctcggccaacgggcagtccatcaggttctcggcgaccgacgaggcgctgcggccaatgggtcgtgccacctcgggtgtgcagggcatgcggttcaatatcgacgaccggctgctgtcgctgaacgtcgtgcgtgaaggcacctatctgctggtggcgacgtcagggggctatgcgaaacgtaccgcgatcgaggaatacccggtacagggccgcggcggtaaaggtgtgctgacggtcatgtacgaccgccggcgcggcaggttggttggggcgttgattgtcgacgacgacagcgagctgtatgccgtcacttccggcggtggcgtgatccgcaccgcggcacgccaggttcgcaaggcgggacggcagaccaagggtgttcggttgatgaatctgggcgagggcgacacactgttggccatcgcgcgcaacgccgaagaaagtggcgacgataatgccgtggacgccaacggcgcagaccagacgggcaat

SEQ ID NO: 26518 - DNA, 1521 bp, Mycobacterium bovis
ttgaccgatgaccccggttcaggcttcaccacagtgtggaacgcggtcgtctccgaacttaacggcgaccctaaggttgacgacggacccagcagtgatgctaatctcagcgctccgctgacccctcagcaaagggcttggctcaatctcgtccagccattgaccatcgtcgaggggtttgctctgttatccgtgccgagcagctttgtccaaaacgaaatcgagcgccatctgcgggccccgattaccgacgctctcagccgccgactcggacatcagatccaactcggggtccgcatcgctccgccggcgaccgacgaagccgacgacactaccgtgccgccttccgaaaatcctgctaccacatcgccagacaccacaaccgacaacgacgagattgatgacagcgctgcggcacggggcgataaccagcacagttggccaagttacttcaccgagcgcccgcgcaataccgattccgctaccgctggcgtaaccagccttaaccgtcgctacacctttgatacgttcgttatcggcgcctccaaccggttcgcgcacgccgccgccttggcgatcgcagaagcacccgcccgcgcttacaaccccctgttcatctggggcgagtccggtctcggcaagacacacctgctacacgcggcaggcaactatgcccaacggttgttcccgggaatgcgggtcaaatatgtctccaccgaggaattcaccaacgacttcattaactcgctccgcgatgaccgcaaggtcgcattcaaacgcagctaccgcgacgtagacgtgctgttggtcgacgacatccaattcattgaaggcaaagagggtattcaagaggagttcttccacaccttcaacaccttgcacaatgccaacaagcaaatcgtcatctcatctgaccgcccacccaagcagctcgccaccctcgaggaccggctgagaacccgctttgagtgggggctgatcactgacgtacaaccacccgagctggagacccgcatcgccatcttgcgcaagaaagcacagatggaacggctcgcgatccccgacgatgtcctcgaactcatcgccagcagtatcgaacgcaatatccgtgaactcgagggcgcgctgatccgggtcaccgcgttcgcctcattgaacaaaacaccaatcgacaaagcgctggccgagattgtgcttcgcgatctgatcgccgacgccaacaccatgcaaatcagcgcggcgacgatcatggctgccaccgccgaatacttcgacactaccgtcgaagagcttcgcgggcccggcaagacccgagcactggcccagtcacgacagattgcgatgtacctgtgtcgtgagctcaccgatctttcgttgcccaaaatcggccaagcgttcggccgtgatcacacaaccgtcatgtacgcccaacgcaagatcctgtccgagatggccgagcgccgtgaggtctttgatcacgtcaaagaactcaccactcgcatccgtcagcgctccaagcgc

SEQ ID NO: 26519 - DNA, 1029 bp, Mycobacterium bovis
atgcggattggagttcttaccggaggcggcgactgtcccggccttaacgccgtcatccgtgcggtggtgcgtacctgccacgcccgatacggctcgtcggtggtcggatttcagaacggctttcgcgggctgctggagaaccgccgtgttcaactgcacaacgacgaccgcaatgaccggctgctggccaagggcggcacgatgctgggcacggcccgggtgcaccccgacaaactgcgggcggggctgccccaaatcatgcagaccttggacgacaacgggatcgacgtcctgatcccgatcggcggtgagggtacgctgaccgccgcgagttggctctccgaagagaatgtgccggtggtcggggtgccaaagacgatcgacaacgacatcgactgcaccgatgtgaccttcggccacgacaccgcgttgaccgtggccaccgaggccatcgaccggctgcacagcaccgccgaatcccacgagcgggtgatgctggtggaggtgatgggtaggcatgccggctggatcgcgctgaacgccgggctggcctccggtgctcacatgaccctgattcctgagcagccgttcgacatcgaagaggtgtgccgactggtcaaaggccgtttccagcgcggggactcgcatttcatctgcgtggtcgccgaaggcgccaaaccggctccggggacgatcatgctgcgcgagggtggtctcgacgagttcgggcacgagcgtttcacaggtgtagcggcgcagctggcggtcgaggtcgagaagcgcatcaacaaggatgtccgggtgacggtgttgggccacatccagcggggtggtactccgaccgcctacgaccgagtgctggccacccgattcggggtgaacgccgccgacgccgcgcatgcgggcgagtacggccagatggtgacgttgcgcggccaggacatcggtcgggttccgctggcggatgcggttcgcaaactcaaactggtgccgcagagccgttacgacgacgccgccgccttcttcggt

SEQ ID NO: 26520 - DNA, 930 bp, Mycobacterium bovis
atgagcatcgccgaggacatcacccaactcatcgggcgcacaccgctggtccgactgcgccgagtcaccgacggcgccgttgccgacatcgtcgccaagctggaattcttcaacccggccaacagcgtaaaagaccgtatcggggttgccatgctccaagcggccgagcaggcaggtttgatcaagccggacacgatcattctcgaacccacgagcggtaacaccggcatcgccctggccatggtttgcgcggcacgcggctaccggtgcgtgctgaccatgcccgagacgatgagtctggagcgccggatgttgctgcgcgcatacggtgctgaactcatcctcactccgggtgcggacggcatgtcaggtgccatcgccaaggctgaggagctggccaagaccgatcaacgctacttcgtgccccagcaattcgagaacccggcgaacccggccatccatcgcgtcacgaccgccgaggaggtctggcgtgacaccgacggcaaggtcgacatcgtcgtcgcgggagtcggcaccggtggcaccatcaccggcgtcgcgcaggtcatcaaggaacgcaagccgtcggcccggttcgtggccgtagagccggccgcgtcgccggtcctttctggtggccagaagggaccgcacccgatccagggcatcggcgccgggttcgtcccgccggtactcgaccaggacctagtcgacgagatcattaccgtcggtaacgaagacgcgctcaacgtggcgcgccggctggcccgggaagagggcttgctggtcggcatctcctcgggcgccgccacagtggccgctcttcaggtggcccgccggccagagaacgccgggaagctaatcgtcgtagtgctccccgacttcggcgaacgatatctgagcacaccgttgttcgccgacgtggctgac

SEQ ID NO: 26521 - DNA, 1038 bp, Mycobacterium bovis
atgagcactgttgccgcctacgccgccatgtcggcgaccgaacccctgaccaagaccacgatcacccgtcgcgacccgggcccgcacgacgtggcgatcgacatcaagttcgccggaatctgtcactcggacatccataccgtcaaagccgagtggggccaaccgaattaccctgtggtccctggccacgagatcgccggcgtggtgaccgccgtgggctcggaggtgaccaagtaccggcagggcgaccgcgttggggttggctgtttcgtggactcgtgccgcgagtgcaacagttgcacgcgcggcatcgaacagtactgcaagccgggcgcaaacttcacctacaactcgatcggcaaagacggccagccaacccagggcggctacagcgaagcgatcgtcgtcgacgaaaactacgtgttgcgcatacccgacgtgctgcccctggatgtggcggcgccgctgttgtgcgcgggcatcacgctgtactcgccactgcgccactggaatgccggggcgaacacgcgggtggcgatcatcggcctaggcggactgggtcacatgggcgtcaagctgggcgccgcgatgggcgccgacgtgacggtgctgtcccaatcgctgaagaaaatggaggacggtctgcgcttgggggccaagagctactacgcgaccgccgacccggacaccttccgcaagctgcgcggcggcttcgacctgatcctgaacaccgtctcggctaacttggacctcggccagtacctgaacctgctggacgtcgacggcacactcgtggaactgggtatccccgagcaccccatggccgtgccggcgttcgcgctagcgctcatgcgacgcagcctggccgggtccaacatcggcgggatcgccgagacccaggagatgctcaatttctgtgccgagcacggcgtgacacccgaaatcgagctgattgaaccggactacatcaacgacgcctacgagcgcgtgctggccagcgacgtgcgctaccgcttcgtcatcgacatctcagccctg

SEQ ID NO: 26522 - DNA, 1269 bp, Mycobacterium bovis
atgaatgaccaagctcccgttgcttatgcaccactatggcgcacggcgtggcgtcggctgcgtcagcggccgtttcaatatattctgctggtcctgggaattgcgctaggcgttgccatgatcgtggctatcgatgtatccagtaattcggcgcaacgtgccttcgatctctctgccgcggccatcaccggaaaatctactcaccggctggtcagtggccccgccggggtggaccaacagctttatgtcgatctgcgccgacacgggtacgatttttccgctccggtaatcgaaggctatgtgttggcccgcggactgggaaaccgagctatgcagttcatgggcaccgacccatttgcggagtcagcttttcgctcgcctttatggtccaaccaaaatatcgccgagttgggtggctttttgactcgacccaacggtgtcgtgttaagccgacaagtggcacagaagtatggcttggctgtgggcgatcgcattgctctgcaagtgaaaggtgcgcctaccacagtaaccctggtgggattgctgacacctgcagatgaagttagcaatcaaaaattgtccgaccttatcattgctgatatttccacggcccaagagttgttccatatgcccggaagactgagccacatcgatttgatcatcaaagatgaggccactgcaacacgcatccaacaaagactgccggccggtgtgcgtatggaaacgtcggatacccaacgggacaccgtcaaacagatgacggacgcttttacggtcaatttaaccgctctcagtttgattgccttgttggtgggtatctttttaatctacaataccgtgacatttaatgtcgtgcaacggcgaccgtttttcgccatattgcgctgtttgggtgtaacccgagagcagttattttggctgataatgacggaatccctcgttgccgggctgattggtacgggcttgggcctcttgattggaatttggctcggcgaaggtttgatcggcctggtgactcaaaccatcaatgatttctattttgtcatcaatgttcgcaatgtgtccgtctccgccgaaagcttgttgaaggggctgatcatcggcatctttgccgccatgttagccacactgccaccggctatagaagcgatgcgcaccgtccctgccagcacattgcggcgctcctccctggaaagcaagataaccaagctcatgccgtggttgtgggtggcgtggtttggtttgggtagctttggtgtattgatgctg

SEQ ID NO: 26523 - DNA, 1401 bp, Mycobacterium bovis
atgcctacgtctgatccgggactgcgccgggtcaccgtacatgccggcgcccaggccgtcgacctgaccttgcccgccgcggtgcccgtcgcgactctgatcccgtcgatcgtcgacatcctgggtgaccgtggcgccagcccggcgacggcggcgcgctaccagctgtctgccctgggggcgccagctctgccaaacgcaacgacattggcgcaatgcggtatccgcgacggcgccgtcctggtcttgcataagtccagcgcccagccgcccaccccccgctgtgacgatgtggccgaagcggtggcggcggcgcttgacaccacagcccggccccaatgccagcgcacgacccggctcagcggtgcgctggcggcaagctgcatcaccgccggcggcggcctgatgctggttcgaaacgccctcggcaccaacgtaacccgctactccgacgccacggccggagttgtagcggcggccggcttggctgccttgctgtttgcggtgattgcatgccggacatatcgggacccgatcgccggcctcacgttgagcgttatcgccaccatattcggtgctgttgccggcctactggcggtgcccggggtccccggtgtccatagcgtgctagttgccgcgatggcggcggccgccacgtcggtgctggcaatgcgcataacgggttgtgggggtatcacgttgaccgcggtggcgtgctgcgcggtagtcgtcgcggccgctacgctggtcggcgcgatcactgcggccccggtgcctgccatcggttcgctggacacgctggcatcctttggtctgttagaggtatccgcgcggatggcagtcctgttggcggggttgtcgccacgattgccgcccgcgctgaaccccgacgacgccgatgccctgcccaccacggatcggctgaccacccgagcgaaccgtgcagatgcttggttgacgagcctgctggcggccttcgcggcctcggcgaccatcggtgccatcggaaccgccgtcgcaacccacggcatccacaggtccagcatgggcggtatcgcgttggccgccgtcaccggtgcgctgctgctgctacgagcacgttcagcagacaccagaaggtcactggtgtttgccatctgtggaatcaccaccgttgcaacggcatttaccgtcgccgcggatcgggctctggaacacgggccgtggattgccgcgctgaccgccatgctggccgccgtggcaatgtttttgggcttcgtcgctcccgcgttgtcgctctcgcccgtcacgtaccgcaccatcgaattgctggagtgtctggcgctgatcgcaatggttccattgaccgcttggctatgcggcgcctacagcgccgttcgccacctcgacctgacatggaca

SEQ ID NO: 26524 - DNA, 1992 bp, Mycobacterium bovis
gccttcgccggtgcctgctcgtccggcgacggcaaagctttgcggacttgctcgaccgacattgcgtgccattcatgagcgggtgccggtcgcggtgcttgcgcgtcgacgaccttgcgtgccagcaggtatcccgagagcagtccggccgccgcgccggtggtcaccgggccgggccccagtccgcggacccctggcagcatcaacagggctcccaaagccgatgcaccaccggaaatttcgttacctcgctggcgtgcggccctggccgccggaatcgcgtgcagcaccctccaggcggctccaagatcgggcagcaggacatctgcgtaccagggcggtgcaccggctccaggtggtggcagcacaccaagcgccacatcggcagccgaaagcgcttgcttaccaaccgatgacaacaccgcgacggtgcggcccgcctggcgcagctcggccaccgcacgggctagggcttcgtcgagggacccgctggcaccgtcgtcgaggggccggatgtcgtcgaacaccggtcgcaactcgcccagggcgtcgacatcgaccgaaaccaggtccgccccggtgcgatgtgcctcggcaaccaccgcggaggccagccggtcgtgcatggggcggaaaagtgcctcgactgccgaatccgaaccgctggccgagacaccgggtactcggtgccagcctgggcgcaggccactctccgtcaaaacgagttgcgcccgattccacgctgtggacagctcgtctgcgccgcaaccgcggatgcgcgccacgcgcaggtcatcggtgcacagcacgcgggggtcgatgacgatcgcatcgacccgatccaatcggcgcaaactctccggccgtaacggcaacaccgcgtgctgatcagccaaaccttggccgagcgccgcggcgaacgcctccggcgtggtccggctggctttgggggtggccaccagcgtcgcggtcgcggccatgtccgcgtcgcgggtcccggcgcccacgagcaccgcgctcagcgcttggatcagcgcgaaacgcgcgacgctgcgttggacaggttgcgtcgaccgtgcgggacgcggccaaagggattggggttggtcggccggttcgtcggcgtgcagcgcgagctgtggttcatgccggcgccaggctctggctccggcacggcattccgcggctttcagcgcctggatcgtcagatccaccgacaacgccgccggcgacagcgtgaccgtgtgtgcggcggccatggccagctcaaggacggtggcggtcgccgccgtgcctattcgatcctcgagtaggcggcgcagcaacggctggtggtccacggccgccaccgctgcctcgatgacgagcggaaatcggggccagcgcagcgcccggccgccgagcgctaagcccagcccggccgcggtggcggctaccgttacagctctgaccgccagcagcacgccgtcgcccggcaggctccccggtgattgcgccagctgatcggcggcttgatctgggtggcggtgtctttcggctttttcggcgtcatcgacaatgcggcaaagttcgcgcagtgatgtgtcgggatcgtcgatagcgacgacgacacgggacaacgggtagttcaggctggccgacccgaccccggggtgggcttggattgcgttgagcacgacgcgcccaagttcgtcgtcgcctccgctgcgcaagccgcgcacttcgatccaggcgcgacgctcgccacgccaacagttccggccgagtgtctcgcgggacagctcgccggaaagtgccttggctcctgcgcgcagcgggatgatggcgaccttcataccggttccgaccccggtcttggccagggttgccgagaccgctgtcgcggcagtgatcgatgcgccggtaagggtggcggtcgcccggaagcccgtggcgacagcacgcaccggcatagcccgtgcgatggatgcagcaatgctcaagagttgctca

SEQ ID NO: 26525 - DNA, 264 bp, Mycobacterium bovis
gtgtggtcgcaggtctgcctgctatggcaagccgttgagtccgttctcgccgagcagcagcccgccggtgccgccggcaccgggcgtggccccggctttgccggcgttgccgccgttgccgccgttgccgatcagcacggcgttgccgccgacaccaccgctgccgccggtaccggcgccaaacccgccggcacccccgtcaccggcgttgccgaacacccctgcgtggccaccgtcaccgccggtgccgccggtaccggcgcc

SEQ ID NO: 26526 - DNA, 1014 bp, Mycobacterium bovis
atgctggcccgtgccggtgaagtcggccgcgctggcccggccatccggtggttgggtgggataggtgcggtgatcccgctgcttgcgctggtcttggtgctggtggtgctggtcatcgaggcgatgggtgcgatcaggctcaacgggttgcatttcttcaccgccaccgaatggaatccaggcaacacctacggcgaaaccgttgtcaccgacggcgtcgcccatccggtcggcgcctactacggggcgttgccgctgatcgtcgggacgctggcgacctcggcaatcgccctgatcatcgcggtgccggtctctgtaggagcggcgctggtgatcgtggaacggctgccgaaacggttggccgaggctgtgggaatagtcctggaattgctcgccggaatccccagcgtggtcgtcggtttgtggggggcaatgacgttcgggccgttcatcgctcatcacatcgctccggtgatcgctcacaacgctcccgatgtgccggtgctgaactacttgcgcggcgacccgggcaacggggagggcatgttggtgtccggtctggtgttggcggtgatggtcgttcccattatcgccaccaccactcatgacctgttccggcaggtgccggtgttgccccgggagggcgcgatcgcgctggggatgtcgaattgggagtgtgtccgcagggtcaccctgccgtgggtgtccagcggcatcgtcggtgcggtggtgctagggcttggccgtgcgctgggggagacgatggcggtagccatggtgtccggcgcggtgctgggggccatgcccgccaacatctacgcgaccatgaccaccatcgccgccaccatcgtgtcgcagctggattcggcgatgaccgattccaccaacttcgcggtgaagacgctcgccgaggtgggtttggtgctgatggtgatcacgttgctgactaatgtggccgcgcgcgggatggttcgtcgggtgtcacgcaccgcgcttccggtgggacgcggcatc

SEQ ID NO: 26527 - DNA, 2376 bp, Mycobacterium bovis
atgaccactgacgttctttctgacaccgacgtctcgctgaaggtggtctccaacgcgtcggggcggatgcgcgtgtgcgtcaccgggttcaatgtcgatgcggttcgggccgtcgcgattgaggagacggtctcccaagtgaccggggtgcacgccgtgcacgcctatccgcgaacagcgtcggtggtgatctggtactcgccagagctcggtgacaccgccgccgtgctgtcggcgatcaccaaagcgcagcacgtcccggcagaattggtgcccgcccgtgccccgcactcagcgggtgtgcgcggcgtgggcgtggtgcggaaaatcaccggcgggatccgccgcatgctaagtcgcccgccgggcgtcgacaagcccctgaaggcgtcgcgttgcggcggccgcccgcgcgggccggtccgcgggagcgcctcgtggccgggcgagcagaaccggcgcgagcggcggacgtggttgccgcgggtgtggttggccttgccgttggggctactggcgctgggttcgtcaatgttcttcggtgcttacccgtgggcggggtggctggccttcgccgcgacgctgccggtgcaattcgtggccgggtggccgattctgcggggggcggtgcaacaggcgcgggcgttgacctcgaacatggacacgctgatcgcgctgggtacgctgaccgcgtttgtctactccacgtatcagttgtttgccggtggacctctgttcttcgacacctcggcgctgatcatcgcgttcgtggtgttgggccgccatctcgaggccagagcaaccggaaaagcgtccgaggcgatcagcaagctgctggagctgggcgccaaggaagccacgctgcttgtcgacggccaagagctcctggtgccggtcgatcaggtccaagtcggagacctggtgcgggtgcggcccggagagaagatcccggtcgacggtgaggtcaccgatgggcgcgccgccgtcgacgagtcgatgctcaccggcgaatccgtcccggtcgagaagacggcgggtgaccgcgttgccggcgcaacggtcaacctcgacgggctgttgaccgtgcgcgccaccgccgtcggggcagacaccgcgctggcgcagattgtgcgactggtcgagcaggcacagggcgacaaggcgccggtgcagcggctggccgaccgggtttcggcggtgtttgtcccggccgtcatcggcgttgccgtcgcgacctttgcgggatggacactgatcgccgccaacccggtggctggtatgaccgccgcggtcgcggtgctgatcatcgcgtgcccgtgtgcgttgggcctggctacccccacggccatcatggtcggcaccggccggggcgccgaactggggatcctggtcaagggaggcgaggtgctggaagcgtcgaagaagatcgacaccgtggtgttcgacaagaccggcaccctcacccgcgcccggatgcgggtgaccgatgtgattgccggccagcggcgccagcctaatcaggtgctgcggctcgccgccgcggtcgaatcgggctccgaacaccccatcggtgcggcgatcgttgccgctgcacacgagcgcgggttggcgataccggccgccaatgcgttcaccgccgtcgccgggcacggggtgcgggcgcaggtcaacggcgggccggtggtggtcggacggcgcaagctcgtcgacgaacaacatttggttctgcccgaccacctcgctgcggcggccgtggagcaggaagagcgcggccgcaccgcggtgttcgtcggccaagacggccaggttgtgggtgtgctcgcggtagcggacacggtcaaagacgacgccgcggacgtggtcggtcggctgcacgccatggggctacaggtagccatgatcaccggcgacaacgcccgcacggctgccgcgatcgccaagcaggtcggcatcgagaaggtgctggccgaggtgttgccgcaggacaaggtagctgaggttcggcggctgcaggaccagggccgggtggtcgcgatggtgggtgacggcgtcaacgacgcgcccgccttggtacaagccgatctgggcattgcgatcggcaccggtaccgacgtggccatcgaggcctccgacatcacgctaatgtccggccggctcgatggtgtcgtgcgcgcgatcgaactctccaggcagaccctgcgcaccatctaccagaatctcggctgggccttcggctacaacaccgccgcgatcccactggccgcgctgggcgcgctgaacccggtcgtggcgggcgcggcgatggggttctcctcggtcagcgtggtgaccaactcactgcggttacgccgcttcggccgcgacggccgaaccgca

SEQ ID NO: 26528 - DNA, 780 bp, Mycobacterium bovis
gtgctcaccgaacgctcggccagggtggccacggcggtcaaactgcatcgtcacgtaggccggcgccgggcgggacgttttctcgccgaaggccccaacctggtagcggcggcgttggcgcgcgggctggtacgggaggtattcgtcaccgaagttgcggcgcggcggcacgagctcttgttggccgcgcacgaggcttcggttcatctggtgactgagcgggccgcgaaggcgctctctgatacggtcacgccggccgggttggtggcggtgtgcgatctgccggcgacccgacttgaggatgtattggccggctcacctcagctgatcgcggtgaccgtcgagatccgcgagccgggcaacgcgggcacggtaatccgcatcgccgacgccatgggtgccgcggcggtgatcctcgccgggcgcagcgtcgacccatacaacggcaagtgtctgcgcgcgtccaccggtagcatcttcgcgatcccggtcgtcgtcgcgcccgatgtcggtgccgccatcgccgacctgcgagcggccggactgcaggtgctggccaccgcagtggacggcgagatggctctcgacgatgccgatcggctgcttgccgagccgacggcatggctgttcgggcccgaagcacacgggttgtcggccgagatcgcggccttggcggaccaccgcgtacacatcccgatgtcgggaggggcggagagcctcaacgtcgcggccgcggccgcgatctgtctgtatgagagcgctcgggcgttgggccgccgc

SEQ ID NO: 26529 - DNA, 1056 bp, Mycobacterium bovis
gtgggtgatccccccctcgagtcgattgtgtcgatgttgtcgccggaggcattgaccacggcggtcgacgccgcccagcaggccatcgccctagcggacaccctggacgtcctggcgcgcgtcaagacggagcatctcggcgaccgctcgccgttggcgctggcgcggcaggcgctggccgtgctgcccaaagaacagcgagccgaggccggtaagcgcgtcaacgccgcccgcaatgccgctcagcgcagctacgacgaacggctggcgacgctgcgtgccgagcgcgacgcggccgtgctggtggccgaaggtatcgatgtcacattgccctcgactcgggtgccggccggcgcccggcacccgatcatcatgttggccgaacacgtcgccgacacgttcatcgcgatgggatgggaactggccgaggggcccgaggtggagaccgagcagttcaacttcgacgccctcaacttccctgccgaccaccctgcgcgcggcgaacaagataccttctacatcgcgccggaggattcgcggcagctgctgcgcacccatacctcaccggtgcagattcgcaccctgctagcgcgtgagctgccggtctacatcatctcgatcggtcgtacctttcgcaccgacgaactcgacgccacccacacgcccatcttccatcaggtggaaggcctagcggtggaccgcggtctgtcgatggctcacctacgtggaacgctggacgcttttgcgcgcgccgagttcgggccgtctgcgcggacccggatccggccacacttcttccccttcaccgaaccgtccgccgaggtcgatgtgtggtttgccaacaagattggcggcgccgactgggtggagtggggcgggtgcggaatggtgcatccgaacgtgttgcgggccaccggcattgatcccgatctctactccggtttcgcgttcgggatggggttggaacgcaccctgcagtttcgcaacggcattcctgacatgcgcgacatggtcgaaggcgacgtccgattctcgttgccgttcggggtgggtgcc

SEQ ID NO: 26530 - DNA, 552 bp, Mycobacterium bovis
ttgatcggcccagggggggagcaggtaggcattgtgcgtatcgaagacgcacttcgcgtcgccgcggacgcagatctcgaccttgtcgaagttgctcccaatgccagaccgccggtctgcaagatcatggactacggcaagtacaagtacgaggccgcgcagaaggcgcgcgaatcccgcagaaaccaacagcagaccgtcgtcaaagaacaaaagctgcgaccaaagattgacgatcacgattacgagaccaaaaagggtcacgtcgtccgcttcttggaggcgggatcgaaggtcaaggtcaccattatgttccgtggacgtgagcagtcgcggccggagttgggctatcgattgctgcagcggctgggtgcggacgtcgccgattacggattcatcgagacgtccgccaagcaggacggacgcaacatgacgatggtgctggcaccgcaccgcggtgcgaagacccgcgctagggcccgccacccgggtgaaccggccggcgggccgccgcccaagcccacggccggtgacagcaaagccgcaccgaac

SEQ ID NO: 26531 - DNA, 1065 bp, Mycobacterium bovis
gtgaccaacggtctgcgaaattaccggctcggggtcggctacaccgtcgagcgacgcggtcgccgccgcgccgagcccctcggtacggtggcagacatgaaatatctggacgtcgacggaatcggacaggtcagccggatcgggttgggcacttggcagttcggctcgcgtgaatggggatatggggaccggtacgccaccggcgccgcccgcgacattgtcaaacgcgcacgcgccttgggggtcacgctgttcgataccgccgagatctacggcctgggcaaaagcgagcgtattctcggggaggccctcggcgacgaccgcaccgaggtggtggtggctagcaaggtcttcccggtcgcgccgtttccggcggtgatcaagaaccgcgagcgcgccagtgcgcggcggctgcagctgaaccgtatcccgctgtatcagatccaccagcccaacccggtggtccccgattcggtgatcatgccggggatgcgtgacctgctggacagcggcgacattggcgcggccggtgtctccaactactcactggcgcgatggcggaaggccgacgccgcgcttgggcgcccagtcgtcagcaaccaggtacatttctcgctcgcccaccctgatgcgctcgaagatctggtgccgttcgccgagctcgagaaccgcatcgtgatcgcctacagcccgctggcgcaaggactattgggtggcaagtacggactcgagaatcgtcccggtggcgtgcgcgcgttgaacccgctgttcggcaccgagaacctgcgccggatagagccgctgctggctacgttgcgcgccatcgccgtcgacgtcgacgccaagcccgcccaggtggcactggcctggctgattagcctgccgggggtggtcgccattcccggagcgtccagtgtcgagcaactcgagttcaacgtcgcggccgctgacatcgagctcagcgcgcaatcccgcgacgcgctcaccgacgccgcccgggcgtttcgcccggtttccaccggccgcttcctcaccgacatggtgcgtgagaaggtcagccgtcgt

SEQ ID NO: 26532 - DNA, 1653 bp, Mycobacterium bovis
atggcgggcatgagcgtcccagcagcgccgctgttgtcggtggagggcctggaagttacgttcggcaccgatgctcccgccgtgtgtggggtggatctggccgtccggagcggtcaaaccgtcgccgtggtgggtgagtccgggtcgggcaaatccacgacggccgcggcgattcttgggttgcttccggctggtggacggatcaccgctggacgcgttgtgttcgacgggcgcgacatcaccggggccgatgccaagcggctacggtcgataaggggacgggagatcggctatgttccccaggatccgatgaccaacctcaatccggtttggaaggtcggctttcaggtcacagaagcgttgcgggccaataccgacggtcgcgcagcacgacgacgggcggtggagctactcgctgaggcgggcctgccggatccggcgaagcaagccggacgctacccgcatcagctgtccggcggcatgtgccagcgggcgttgattgcgatcggcttggcgggcaggccgcggctgctgatcgccgatgagccgacgtccgcgttggatgtcaccgtgcagcggcaggtgctcgatcatcttcagggactcaccgacgaactaggcaccgcgctgctactgatcacccacgatctggcgttggccgcgcagcgggccgaggctgtcgtcgtcgtccgtcgtggagtggtggtggaatccggtgcggcgcagtcaatcctgcaaagccctcagcacgagtacacccggcgcctggtggccgcggctccatcgctgacggcgcgcagcagacgtccgccggaatcccggtcacgggcaaccacgcaggccggcgacattctcgtcgtctcggagctgaccaagatttaccgggagtcccgcggcgcaccgtggcggcgggtggagtctcgcgccgtcgacggagtgtcattccggctaccgcgggcgagcaccctggcaatcgtcggcgaatccgggtcaggcaagtcgacgctagcgcggatggtgcttgggctgctccaacctacctcgggcacggtcgttttcgacggcacctacgacgtcggcgcgctggcccgggaccaggtgctggcctttcgccgccgggtccagccggtgttccaaaacccatacagcagcctggatcccatgtactcggtgtttcgcgccatcgaggaaccgttacgcgtccatcacgtcggtgaccgccggcagcggcaaagggcggtgcgtgagctggtcgatcaggtggcgctgccgtcgtcgatactgggccggcggccccgtgagctgtcgggtggtcagcggcagcgggtagcgatcgcgcgtgcgctggcgctgcgcccggaggtattggtgtgcgacgaagcggtgtcggcgctcgacgtattggtgcaggcacagatcctggatctgctggccgatctgcaggccgacctgggtttgacgtatttgttcatcagccatgatctggcggtgatccggcagattgccgacgacgtcctggtcatgcgggccggccgggtggtggagcacgcctctaccgaggaggtgttcagccggccccgccacgagtacacccgccagttgcttcaggccattcccggtgccccctcagctccccgaaaggttggcaacctg

SEQ ID NO: 26533 - DNA, 2652 bp, Mycobacterium bovis
atggcaccctcagcttctgccgctaccaacggctacgacgtcgaccgcctgctggccggataccgcaccgcgcgtgcccaggaaacactgttcgacctgcgggacggcccgggagccggctatgacgaattcgtcgacgacgacggcaacgtgcgaccgacctggaccgagctcgccgacgcggtcgccgaacgtggcaaggcggggctggaccggctgcgctcggtggtgcacagcctgatcgaccacgacggcatcacctacaccgcaatcgatgcacaccgggacgcgctgaccggcgaccatgatctggaaccggggccgtggcgcctggacccgctgccgctggtgatttccgcggccgattgggaagtgctggaggccggcttggtgcagcgatcgcgcttgcttgatgccatcctcgcggacttgtacgggccccgcagcatgctcaccgagggtgtcctgccgccagagatgctgttcgctcatcccggctacgtgcgtgccgctaacgggatccagatgcctgggcgccaccaacttttcatgcacgcctgtgatctcagccggttgcccgacgggacttttcaggtcaacgccgactggacgcaggcgccctcgggctccggctatgcgatggccgatcgacgtgtcgtcgcgcacgccgttcccgatctgtacgaggaactggcgccgcgacccaccacaccgttcgcccaggcgctccggctggcactgattgacgcggcacccgatgtcgcccaagaccccgtcgtggtggtgctcagcccgggcatctattcagaaaccgctttcgaccaggcgtatctcgcaacgctgctgggtttcccgctagtggaaagcgcggacttggtggtgcgcgacggcaagctgtggatgcgttcgctgggcacgctgaaacgcgttgacgtcgttcttcgccgcgtcgatgcccactacgcggatccactggatctacgcgccgattccaggctcggtgtcgtcggtttggtggaagcgcagcaccgcggaacagtgaccgtcgtcaacacgctgggcagcggcatcctggagaacccaggcctgttgcgcttcctgccgcagctatccgagcgcctgctcgacgaaagcccgctgctgcacaccgctccggtctactggggcggcatcgccagcgaacgctcacacctactggccaatgtctcgtcgctgctgatcaaaagcactgtcagcggggaaactcttgtcggaccgacactttcgtctgcacaactggccgatctggcagtgcgtatcgaggcgatgccgtggcagtgggtgggccaggagctgccgcagttctcgtcggcgcccaccaaccatgccggggtgttgtcgtccgccggggtaggcatgcgactgttcaccgttgcccagcgcagtggttacgcgccgatgatcggcggcctcggctatgtactggcgcccggtcctgccgcatatacgctgaaaaccgttgcagcaaaagatatctgggtgcgcccaacggagcgtgcgcatgccgaggtgataacggtgccggtgttggcgccgccggccaaaaccggagcgggcacctgggcggtcagctctccgcgcgtgctgtccgatctgttctggatgggccgctacggcgagcgcgcggagaacatggcccggctgctgatcgtcacccgcgagcgctaccacgttttccggcaccagcaggacaccgatgaaagcgagtgcgtgccggtgctgatggccgcgctgggcaagatcaccggatatgacaccgcaactggcgccggcagcgcttacgaccgggccgacatgatcgcggtcgccccgtcgacactgtggtctttgaccgtggatccggaccggccgggttcccttgttcagtcggtggaggggctggcacttgccgcccgggcggtgcgcgaccagctgtccaacgacacctggatggtgctggccaatgtggaacgcgcggtggagcacaagtccgacccgccgcagtcgctggcagaggcggacgccgtgcttgcgtcggctcaggcggagacgctagccggcatgctgacgttgtccggggtggccggcgagtcgatggtgcacgacgtgggctggacgatgatggacatcggcaagcgtatcgaacgcggcctgtggctgaccgcgttgctacaagccacgttgagcaccgtgcgccaccccgccgccgagcaagccatcatcgaggcaaccctggtggcgtgtgaatcgtcggttatctatcggcgccgcaccgtaggcaagttcagtgtcgccgctgtgaccgagctgatgttgttcgacgcccagaacccgcgctcgctggtgtatcagctggaacggctgcgcgccgacctgaaagacctgcctggctcgtcgggatcgtctcgtccggaacggatggtggacgagatgaacacccgcctgcgccgctcacacccagaagagttggaagaggtctccgccgacgggctgcgcgccgagttggcggaactgctggccgggatacatgcctcgctgcgtgacgtggccgacgtcctcaccgccactcagttggcgttgcccggcggcatgcaaccgctgtggggtccagaccaacggcgggtgatgccggcc

SEQ ID NO: 26534 - DNA, 417 bp, Mycobacterium bovis
atgaagacgcaggacaagctgcggaccgcgaccatacgcatgctgctggccgcgatccagaccgaggaggtctctggcaagcaggcaagagagctctccgacgacgaggtgatcaaggtgttggccagggaatcgcgcaagcgtggtgaggcggcggagatctacacccaaaacggccgcggtgagctcgccgccaccgagcatgccgaggcacggatcattgacgagtacctcccgacgccgctcaccgagggggaactggccgatgtcgccgacaccgccatagccgaggtggccgaagaactcgggcatcggcccagcatgaaacagatgggtctggtaatgaaggcggccaccgtgatcgccgccgggaaagccgacggcgcacgcttgtcggcggcggtcaaggaacgccta

SEQ ID NO: 26535 - DNA, 795 bp, Mycobacterium bovis
atgaccagcaccggccccgagacgtccgaaacaccgggtgccacgacacagcgtcatggcttcggcatcgacgtcggcggcagcggcatcaagggcggaatcgtcgacttggacaccggccagctgatcggcgaccggatcaagctgctgaccccgcaaccggccactccgttggcggtcgccaaaaccatcgccgaggtcgtcaacggtttcggctggcggggtccgctgggggtgacctatcccggcgtcgtcactcacggcgtcgtccggaccgcggctaacgtggacaagtcctggatagggaccaacgcacgcgacactatcggcgccgagctgggcggtcagcaggtcaccatcctcaacgacgctgatgccgccgggctggccgagacacgctacggggccggcaagaacaaccctggcttagtggtactgctcacattcggaaccgggatcgggtccgcggtcatccacaacgggacgttgatacccaacaccgagttcggacatcttgaggtcggcggcaaggaagcggaggaaagggccgcctcctcggtaaaggaaaagaacgactggacctatccaaagtgggccaagcaggtgacacgcgtgctcatcgccatcgagaacgcgatctggcctgacctgttcatcgccggcggcggcatcagccgcaaggccgacaaatgggtgccgctactggaaaaccgcacaccagtagtgcccgcggccctgcagaacaccgccggaattgtcggtgcggccatggcctctgtcgcagatacgacgcac

SEQ ID NO: 26536 - DNA, 819 bp, Mycobacterium bovis
atgagtgctgggggtacccccctgcaagcgggagcgacccccaccggttcacgggggacggttgccctgcggcctgatgccggcccgtcctggctgcgtccactggtcgacaacgttggccagatacccgacgcctaccggcgtcggttgcccgccgatgtgctagcgatggtgacggccgccggggctgtgtcggcaatgacatcgtcgcgccgggatcaccgcgaggcggccgttctggtgctgttttctggcccggaggccgggccaggcgacggtggtgtcccagacgacgccgacctactgctgaccgtgcgggcctcgacattgcgccaccatgccggccaggcggcttttcccggcggtgtggtcgaccccgccgacgacgggccggtggccaccgccttgcgtgaggcgaacgaagaaaccgggattgacccgtccaggctgcatccgctggccaccatggagcggacgttcattgcgccgtcgcggttccatgttgtcccggtgctggcgtactcgccggatcccgggccggtggccgtcgtcaacgaggccgaaacggcgatcgtcgcgcgggtaccggtgcgcgccttcatcaatccggccaatcggctcatggtgtaccgccgcccgcacactcgtcgctgggccgggccggcgttcctgttaaaccagatgctggtatggggcttcactggccaggtgatttccgcggtgctcgatgtcgcgggctgggcacaaccctgggacaccggtgacatccgcgagttggacgcggcaatggtgctgatcgacgacgagagtgacccgcga

SEQ ID NO: 26537 - DNA, 1104 bp, Mycobacterium bovis
atgaccagcggctcccttcaattcacggtgttacgtgcggtcaatccggccaccgacgcgcagcgtgaatcgatgctgcgggcgccgggtttcggcaaataccacaccgaccatatggtgtcgatcgactatgccgagggccgtggttggcacaacgcgcgggtaatcccttatggcccgatcgagctggatccctcggcgatcgtgctgcactatgcgcaggaggtgttcgaagggctcaaagcctaccgctgggccgacgggtccatcgtgtcgtttcgcgccgacgccaacgccgccaggttgcgttcgtcggcgcggcggttggcgattcccgaactgcccgacgcggtgttcatcgaatccctgcgccagctaatcgctgtcgacaaagcttgggtgcccggtgccggcggtgaggaggcgctgtatctgcggccgttcatcttcgccaccgagccgggactgggcgtgcggcctgccacccaataccgttacctgttgatcgcctcgccggccggtgcgtacttcaagggcggcatcgcccctgtcagcgtctgggtttcgacggagtatgtacgggcctgtccgggcggcaccggtgcggccaagttcggcggcaactacgccgcctcgttgctggcgcaggccgaagccgccgagaacggatgcgaccaggtggtgtggctggacgctgtggaacgccgctatatcgaagagatgggtggcatgaacatcttcttcgtgctcggcagcggcggatcggcgcggctggtcaccccggagctgtccggttccctgctgcccgggatcacacgggattcgttgttgcagttggctattgatgccggatttgcggtcgaggaacgcaggattgatatcgacgagtggcagaagaaagccgccgccggcgagatcaccgaggtgtttgcgtgcggcaccgccgctgtcatcaccccggtcgcgcgggtgcggcacggtgccagcgagttcagaatcgccgacggtcagccgggtgaggtgaccatggcactacgcgatacgctgaccggcatccagcggggcaccttcgcggacacccacggctggatggcgcggctgggg

SEQ ID NO: 26538 - DNA, 660 bp, Mycobacterium bovis
atgaaagtagctgtcgccggagcgggtgcggtgggccgctcggtcacccgcgaactcgtggaaaacggacacgacatcaccctgatcgagcgcaaccccgaccacctcgacgccgccgccatcccggaggcgcattggcggcttggcgatgcctgcgaactgagcctgctggagtcgattcacctcgaagagttcgacgtggtcgtcgccgccaccggggacgacaaggtcaacgtggtgctcagcctgctagccaagaccgaattcgcggtgccgcgggtggtggcccgggtcaacgatccccgcaacgagtggctgttcaacgacgcctggggggtcgacgtcgcggtgtccacaccccgcatgctggcgtcgctgatcgaagaggccgtcacggtcggcgacttggtgcggctgatggagttccgcacgggtcaggccaatctggtagagatcaccctgcccgacaacacgccgtggggcggcaaaccggtgcgcaaacttcagctgccgcgggatgccgcgctggtgacaatcctgcgcgggccacgagtcatcgtgccggaggccgacgagccgctggaaggcggcgacgagttgctcttcgtcgcagtcaccgaagccgaggaggagctgagcaggctgctgctgccgtccatg

SEQ ID NO: 26539 - DNA, 708 bp, Mycobacterium bovis
atggcccatggtagcaccgcccacgaagtgctggccgtcgtctttcaagtgcgcggagttggcatgagccgcggtgcggcaaaaccccagctcaatgtgctgctgtggcaacgtgcgaaggagccgcagcgcggcgcgtggtcgctgccgggcggacggctacgcaacgacgaagacatgaccagctcggttcggcgccaactggccgagaaagtcgacctgcgagagttggcccatctagaacagctcgcggtgttttccgacccacaccggctgccaggcatccggatgatcgcgtcgacctacctgggggtggtgccctcccccgccacccccgagctgccagcagacacccgctggcacccggtgagttccttgccgccaatggcgttcgatcacggtccgatggtgacccatgcccgcacccggctgattgccaagatgtcctatacaaacatcggattcgctttggctccaaaagaattcgcgctctcaacgctgcgcgacatctacggcgccgcactgggctaccaggtcgacgcaaccaacctgcagcgggtactggcccgtcgcagagtcatcacccaaaccggaaccatcgcgcagtccggccgcagcggtggccgcccggcggcgttgtaccggtttaccgactcgcagctaagagtcactgacgagttcgccgcactgcggcctcccggccagctt

SEQ ID NO: 26540 - DNA, 1065 bp, Mycobacterium bovis
atgagcgcttcgctgctagtcaggacggcctgcggcggccgtgcggtcgcccaacggttgcgcaccgtgctgtggccgatcacccagacatcggtcgtcgccggcctcgcgtggtatctcacccatgacgtgttcaaccatccgcaggcgttcttcgcgccgatttcggctgtggtgtgcatgtcggcgaccaacgtgctgcgcgcacgacgtgcccaacagatgatcgtcggggtggcgctggggatcgtgctgggtgctggcgtgcatgctctgcttggttccggaccgatcgccatgggtgtggtggtgttcatcgcgttgtcggtcgcggtgctgtgcgcacgcgggttggtcgcgcaaggcttaatgttcatcaaccaggccgccgtctccgcggtgctggtcttggtcttcgcgtccaacggcagtgtggttttcgaacgcctcttcgacgcgctggtcggtggtgggctggctatcgtgttcagcattctgctcttcccgcccgacccggtggtcatgctgtgcagtgcgcgcgccgacgtgttggccgctgtgcgcgacatcctcgccgagctggtgaacacggtgagcgatcccaccagcgccccgcccgactggccgatggcagccgctgatcgactgcatcagcagctgaacgggctcatcgaggtgcgcgccaacgctgccatggtggcgcggcgagcgccccgccgatggggggtgcgcagcactgtccgcgatctcgatcaacaggccgtctacctggccctgctggtcagttcggtgttgcatctggctcgcaccattgccgggcctggtggcgataagctgccaacgcccgtgcacgccgtgctcaccgacctcgccgcgggaaccggcctggccgacgcggatccgacggcagcgaacgagcacgcggccgccgcccgcgcaaccgcgtcgacactgcaatcggctgcttgtggcagcaacgaagtggtgcgcgccgatatcgtccaagcgtgtgtcaccgatctacaacgggtaatcgaacgcccgggcccgtcgggcatgtcagcc

SEQ ID NO: 26541 - DNA, 1188 bp, Mycobacterium bovis
gtggccgaagcgtggtttgaaacggtagccatcgcgcagcaacgcgcgaagcggaggctgccgaaatcggtttactcgtccctgattgcggccagtgaaaagggaatcacggtcgccgacaatgtcgcagcattcagcgagctcgggttcgcgccgcacgtcatcggggcgacagataaacgtgacttgtcgacgaccgttatggggcaagaagtttcgttgccagtgattatttcgccgaccggtgttcaggcggtcgatcccggcggtgaagtcgccgtcgcgcgggccgcggccgcccggggtactgtgatgggattgtcctcgtttgccagcaagccgatcgaggaggtcattgccgccaaccccaagaccttcttccaggtctactggcagggcgggcgcgacgcgctcgctgaacgcgtcgaacgggcgcggcaggccggcgcggtcggcctggtcgtcaccaccgactggacgttctcgcacgggcgcgactggggcagccccaagatccccgaagagatgaacttgaagaccatcctgcggctatccccggaggcgatcacccggccgaggtggttgtggaagttcgccaagacgctacggccaccggacctacgggtgcccaaccagggccggcgcggcgagcccggcccaccgttcttcgcagcctacggcgaatggatggcaacacctccgccgacctgggaagatatcggctggctgcgcgaactgtggggcggaccgttcatgctcaagggcgtcatgcgggtcgacgatgccaaaagagctgtggatgccggggtttcggcgatctcggtatccaaccatggtggcaacaatttggatgggacgccagcatcgatccgggccctgcccgcggtctcggcggcggtcggcgatcaggtcgaagtgttgctcgacggcggcatccggcggggcagcgatgtcgtcaaggcggtggcgctgggcgcgcgcgcggtaatgattggtcgcgcttacctgtggggcttggccgccaacggccaagccggggtcgagaatgtactcgacatcctgcgcggtggtatcgactcggctctgatgggtctcgggcatgcctctgtccatgacctcagcccagccgacatcctcgttcccaccgggttcatccgcgacctgggtgtgccctcccgacgggacgtt

SEQ ID NO: 26542 - DNA, 894 bp, Mycobacterium bovis
ttgctttcgcgcgtcggcgccgaccgggccgaccggctgaggaccgacatggaggcggccgccgcgggatggccaggcgcggcattgctgcgggtggattcccgcaatcgcgtgctggtcgccaacggccgggtgttgcttggcgcggccatcgagctggccgacaagccaccgccagaggcggtattcctgggtcgcgtcgagggcggccgccacgtctgggcggtgcgggcagcgctgcagccgatcgctgatcccgacataccagccgaggcggtggaccttcgtgggctcggccgaatcatggacgacaccagcagccaactggtgtcgtcggcatcggcgctgttgaactggcatgacaacgcacgattcagcgccctagacggcgcgccgacgaaaccggccagggccggctggtcacgggtcaacccgatcaccggtcatgaggagttcccccgtatcgacccggcggtgatctgcctggttcacgacggcgctgatcgtgccgtgttggctcgccaggcggcgtggccggaacggatgttctcgctgttggctggctttgtcgaggccggagagtcgttcgaagtctgcgtcgcccgggagatccgcgaggaaatcggcctgaccgttcgcgatgtgcgctatctgggcagccagccgtggccgttcccgcggtcgttaatggttggctttcatgccttgggtgacccggatgaggagttctcgttcagcgacggcgaaatcgccgaagccgcgtggttcacccgcgatgaggtgcgcgcagcgcttgccgccggcgattggtccagtgcgtcggagtcgaaactgctactgcccgggtcgatctcgatcgcccgcgtgatcatcgaatcgtgggcagcgtgcgaa

SEQ ID NO: 26543 - DNA, 882 bp, Mycobacterium bovis
ttgcggtggggtgtcgagtcgatctgcacacagctgaccgagctgggtgtgccgatcgccccatcgacctactacgaccacatcaaccgggagcccagccgccgcgagctgcgcgatggcgaactcaaggagcacatcagccgcgtccacgccgccaactacggtgtttacggtgcccgcaaagtgtggctaaccctgaaccgtgagggcatcgaggtggccagatgcaccgtcgaacggctgatgaccaaactcggcctgtccgggaccacccgcggcaaagcccgcaggaccacgatcgctgatccggccacagcccgtcccgccgatctcgtccagcgccgcttcggaccaccagcacctaaccggctgtgggtagcagacctcacctatgtgtcgacctgggcagggttcgcctacgtggcctttgtcaccgacgcctacgctcgcaggatcctgggctggcgggtcgcttccacgatggccacctccatggtcctcgacgcgatcgagcaagccatctggacccgccaacaagaaggcgtactcgacctgaaagacgttatccaccatacggataggggatctcagtacacatcgatccggttcagcgagcggctcgccgaggcaggcatccaaccgtcggtcggagcggtcggaagctcctatgacaatgcactagccgagacgatcaacggcctatacaagaccgagctgatcaaacccggcaagccctggcggtccatcgaggatgtcgagttggccaccgcgcgctgggtcgactggttcaaccatcgccgcctctaccagtactgcggcgacgtcccgccggtcgaactcgaggctgcctactacgctcaacgccagagaccagccgccggc

SEQ ID NO: 26544 - DNA, 2546 bp, Mycobacterium bovis
  misc_feature (400)..(400): n=g, a, t or c
atggcgccgttggcggtcgatcccgcggcccttgatagcgcgggcggcgcggtggtggctgcgggtgcgggtttgggtgcggtgatctcgtcgctgaccgcggcgctggccgggtgtgcggggatggccggtgatgatccggctggggcggtgttcgggcgctcctatgacggttcggcggccgcgctggtgcaggcgatgtcggtggcgcgcaacggattgtgcaacctcggcgatggggtgcgcatgagcgcgcacaactactcgttggccgaggcgatgtcggatgtcgctgggcggggcggcgccgttgccggcgccgccgccgagcggctgtgtcggcgtgggtgcgccgccgtcggcggtcggtggcggcggtggcgccccgaagggctggggngtgggtggccccgtatatcgggatgatctggccgaacggggattcgacaaagctacgtgcggcggctgtggcgtggcgcagcgcgggcacgcagttcgcgctgactgagattcagtcgacggcggggccgatgggcgttattcgcgcccagcagctcccggaggcggggctgatcgagtcggcgtttgctgacgcgtacgccagcaccaccgctgtcgtgggccaatgccaccagctggcggcccagctagacgcctatgccgcccgcatcgacgcggtgcatgcggcggtcctggatttgttggcccgcatctgcgatccgctgaccgggatcaaagaggtgtgggagtttctgaccgaccaggacgaagacgagatccagcgcatcgcccatgacatcgcggtggtggtcgaccagttcagcggggaagtggacgcgttggctgcggagatcaccgcggtggtgtcgcacgccgaggcggtgatcaccgcgatggcagaccacgcaggcaaacaatgggatcggttcttgcacagcaacccggtgggtgtggtcatcgatggcaccgggcagcagctcaaaggcttcggcgaggaggccttcgggatggccaaggactcctgggacctagggccactgcgcgcctcgatagacccgttcgggtggtatcgctcctgggaggagatgctgactgggatggcgccgctggcgggcctgggcggcgagaacgctcccggcgttgtggagtcgtggaagcagttcggcaaaagcctcatccattgggatgagtggacgaccaaccctaatgaggcgctaggcaagaccgtattcgacgccgcgacgctagctttgccgggcgggccgctgtcgaaacttggcagcaagggccgcgacattctcgcgggcgtgcgaggcctcaaggagcggcttgagccgacgacaccgcaccttgagcccccagcaacgccgccgcggccaggaccgcaaccaccacggatcgaaccaccagaatcgggccacccggcacccgcgcccgcggcgaaaccggcgcccgtgcccgccaacggtccactgccgcacagccccaccgaatccaaaccgccgcccgtcgacagaccggctgaaccggtggcgccgtcgtcggcgtcggcaggccagccccgggtatccgcagccaccacgcccggcacacatgtgccgcatggcctgccgcaaccgggtgaacatgtcccggcgcaagcaccaccggcgacgacgttgcttggcggacctcctgtcgagtcagcgcccgctaccgcgcaccaaccccagtgggcgaccacaccagcagcacccgcggcggcgccgcattccacgcccggaggcgttcactcaaccgaatcggggcctcacggccgatcactgagcgcacacggatccgagccgacccacgacggtgcgtctcacgggtcaggccacggtagcggtagcgagccacctgggctgcatgcgccgcatcgcgagcagcagcttgcaatgcattcgaacgaaccagctggagagggttggcatcggttatccgacgaagcggttgacccgcagtatggcgagccattatcgcgccactgggactttacagacaatccggccgatcgcagtcggataaacccggttgtggcccagctcatggaggaccccaacgccccattcggccgcgatcctcagggacagccctatacccaagaacggtatcaagagcgatttaatagtgtaggcccatggggccagcagtactctaattttccgcctaacaatggtgcggttccagggacaaggatcgcctacactaatctcgaaaaatttcttagtgactacggcccccagctagatcgtataggcggcgatcagggcaagtacctggcgatcatggaacatgggcgcccggcatcatgggaacaacgtgccctgcacgtgacgtcgttacgcgacccctaccacgcgtataccattgattggttgcctgagggatggttcatcgaagtatctgaggtcgcgccggggtgcggccagccgggcggatccatccaagtgcggatattcgatcatcagaacgagatgcgcaaagtggaagagttaataaggcgcggggtgttgcgacagtgacaa

SEQ ID NO: 26545 - DNA, 726 bp, Mycobacterium bovis
atgagcggccaggccgacaccgccaccaccgcggaagcaaggacgccggcccacgctgcccaccacctcgtcgaaggtgtcgcccgtgtcctgaccaaaccgcgcttccgcggctggatccacgtgtattccgccggcaccgcggtgttggccggtgcgtcgctggtcgcggtgtcgtgggcggtgggttccgccaaggcgggcctgacgacgctggcctacaccgcggccacgatcaccatgttcaccgtcagcgccacttatcaccgggtcaattggaaatccgcgacggcccgcaactggatgaagcgggccgaccactcgatgatcttcgtgttcatcgccggcagctacacgccgttcgcgctgctggccttgccggcccacgacgggcgcgtggtgttgtcgattgtttggggcggtgcgatcgccggaatcttgctgaagatgtgttggccggcggcgccgcgctcggtcggggttccgctgtacctgttgctgggttgggtggcggtctggtacaccgcgacgatcctgcacaacgccggggtgaccgcgttggtgttgctgtttgttggcggcgcgttgtacagcatcggcggcattctctacgcggtacgctggcccgacccgtggccgacgacgttcggctaccacgagttcttccacgcctgcaccgcggtggcggcgatctgccactacatcgcgatgtggttcgtggtgttc

SEQ ID NO: 26546 - DNA, 1161 bp, Mycobacterium bovis
atgaccggctccctgatcgaacgcgtccgcgaacggctggcatccgaatccggcccgctgcggcccagtgtggtggccgccgcgatccgggccgagtccggggggatgctcggcgacaccgaagtgctggcgaatcttcgtgtgctgcagacagaactgaccggcgctggcatcctcgaaccgctgctatccgcagacggcaccaccgacgttctggtcaccgcgcccgactcggtgtgggtggacgacggaaacggattgcgacgcagccagattcggtttgctgacgagtcagcggtgcgaaggttggcacaacggctggctttggcggccggccgtcggctcgacgacgcgcaaccctgggtggacggtcaactaaccgggatcggcgtcggagggttcgcggtgcggctgcatgcggtgttgccgcccgtggcgacccagggcacttgcttgtcgttgcgggtgttgcgtcccgcgactcaggatctggccgcgttggctgcggcgggcgcgatcgaccccgcggccgccgcgctggtcgccgacatcgtcaccgcccggctggcattcctcgtgtgcggcggaaccggtgccgggaagacaacgttgctggcagcgatgttgggcgccgtgtcgcccgatgagcggatcgtgtgcgtcgaggatgccgccgagctggcccctcggcatccacatctggtcaagctggttgcgcggcgtgcgaacgtcgaaggaatcggtgaggtaaccgtgcgtcaactcgtccgacaggcgctgcggatgcggcccgaccgcatcgtggtcggtgaggttaggggagccgaggtggtggatctgttggcggcgctcaataccggtcacgagggcggcgcgggcaccgtacacgccaacaacccgggtgaggtccctgcacgcatggaagcgttgggggcgctcggcggccttgaccgcgctgctctgcacagccagctcgccgcggcagtccaagtcctgctgcacgtcgcgcgcgatcgggcaggccgtcgccggctcgccgagatcgccgtgctgcgccaagctgaagggcgggtccaggcggtgacggtgtggcacgcggaccgtgggatgagtgacgacgcggccgccctgcacgatttgctgagaagccgggcatcggca

SEQ ID NO: 26547 - DNA, 819 bp, Mycobacterium bovis
gtgtcggatccgcaccatccccatatccagacgcacaacgcgtgggtggagttccctatcttcgacgccaagtcacgttcgctgaagaaggcggtcctgggtaaagcgggcggcaccatcgggcgcaacaactccaacgtcgtcgtcatcgaagcgttgcgcgacatcaccatggagctgaacctgggtgaccgggtcggtctggtcggacacaacggagccggcaaatcgacgctgctacgcctgctttcgggcatctacgagcccacccgcggctgggcgaaggtcaccggaagggtggcgccggtcttcgatctgggcatcggcatggaccccgagatctccggctacgagaacatcatcattcgtgggctgtttctgggacagacccgcaaacagatgcaggcgaaagtggatgagatcgccgaattcaccgaattgggcgagtacctttcgatgccgctgcgcacctattccaccgggatgcgagtccgcctggcgatgggcgtggtcaccagcatcgacccagagatcctgttgctcgacgaaggcatcggcgccgtggacgccgacttcctgaggaaggcccagtcccggctgcagaatttggtcgaacgttccgggatcctggttttcgcaagccattccaacgagtttttggctcgactatgcaagaccgcgatatggattgaccatggcgtcatcaggctcgccggtggtatcgaagaggtggtacgggcctacgagggtgaggacgccgcccggcacgtgcgcgaagtactggccgagacccaggccgacagacagaacgtccaggga

SEQ ID NO: 26548 - DNA, 2124 bp, Mycobacterium bovis
atgatcgcacgcatggagacctccgcaaccgccgcggcagcgacgtcggcaccccggctccggctggccaagcgctcgctgttcgatccgatgattgtgcgctcggcgctgccccagagcctgcgcaagctggctccgcgggtacaggcccgtaacccggtcatgttggtcgtgctggtcggtgccgtgatcaccacactggcgttcctgcgcgacctcgcatcctcgacagcccaagagaacgtcttcaacggtctggtcgccgcgttcctctggttcaccgtcctgtttgccaactttgccgaggccatggccgaaggacgcggcaaggctcaggcggcggcgctgcgcaaagtccggtccgaaacgatggccaaccggcgcacggctgcgggcaacatcgaatcggtcccttcgtcgcggctggacctcgacgacgtggtggaggtttcggctggcgaaacgatcccgtcggacggcgagatcatcgaaggcattgcctccgtcgacgagtctgcgatcaccggcgaatcggcaccggtgatccgcgagtcgggcggcgaccgttccgcggtgacgggtggcaccgtggtgctgtcggatcggatcgtcgtgcggatcaccgccaagcagggacaaacattcatcgaccggatgatcgcgctggtggagggcgccgcacggcagcagacaccgaacgagatcgcgctgaacatcctgctggctgggctgacgatcatctttttgctcgcggtggtgacgctgcagccgttcgccatctattccggcgggggacagcgggtggtcgtgctggtggcgttgctggtgtgtctcattccgaccacgatcggtgcgctgctgtccgcgatcggcatcgcggggatggaccggctggtgcaacacaacgtgctcgccacatctgggcgggcggtggaggcggccggcgacgtgaacacgctgctgctggacaagaccggcaccatcaccctcggtaaccggcaggccaccgagttcgtgccgatcaacggtgtgagtgccgaggcggtcgccgacgccgcccagctgtcgagcttggccgacgaaactccggagggccgctcgatcgtcgtgctggcgaaggacgagttcgggctgcgcgcccgcgacgagggcgtgatgtcacacgccaggttcgtgccgttcaccgccgaaacccggatgtccggggtcgatctcgccgaggttagcggcatccgtcggatccgcaagggtgccgcggctgcggtgatgaagtgggttcgcgatcacggtggccaccccaccgaggaggtgggtgccattgtcgacggcatcagctccggcggggggacacccctagtcgttgcggaatggaccgataacagcagcgcgcgggccatcggcgtcgtccatctgaaggacatcgtcaaggtgggcatacgggaacgcttcgacgaaatgcgccgaatgagcatccgcaccgtgatgatcaccggtgacaacccggcgaccgccaaggcgattgcacaggaggccggcgtcgacgatttcttggccgaggccacgcccgaggacaagcttgcgctcatcaagcgcgaacagcagggcggtcggctggtcgccatgacgggtgacgggaccaatgacgcacccgcgctcgcgcaagccgatgtcggggtggcgatgaataccggcacccaggcggcccgggaagccggcaacatggtcgatctcgactccgaccccaccaagctcatcgaggtcgtggagatcggcaagcagctgctgatcacgcggggcgcgctgacgacgttttcgatcgccaacgacgtcgcgaagtacttcgccatcatccctgccatgttcgtcggcctgtatccggtgctcgacaagctgaacgtcatggcgctgcactcaccaaggtcggcgattctgtcggcggtcatcttcaatgcgctggtgatcgtcgccttgatcccattggcgttgcggggcgtgcggtttagggcggaaagcgcgtcggcgatgctgcggcgcaacctgctgatctatgggctgggcggtctcgtcgtcccgtttatcggcattaaactggtcgatctcgtcatcgtcgccctcggggtgtcc

SEQ ID NO: 26549 - DNA, 1674 bp, Mycobacterium bovis
gtggatgtagaccttcccccgccaggtcccctgacctccggcgggttgcgggtcaccgcgctgggcggcatcaacgaaatcggccgcaacatgacggttttcgaacacctgggccgactgttgattatcgactgcggtgtgttgtttcctggccacgacgagcccggtgtcgatctgatcctgccggacatgcgccatgtcgaagaccggcttgacgacatcgaggcgctggtgttgacccacgggcacgaggaccacatcggggcgattccgtttctgctcaagctgcgacccgacatcccggtcgtcggctcgaagttcaccttggctctggttgcagagaaatgtcgtgagtaccgcataacaccggtgttcgtcgaggtccgcgagggccagagcacccggcacggcgtgtttgagtgcgagtacttcgccgtcaaccattccactccggacgcgttggccatcgcggtgtataccggcgcgggaaccatcctgcacaccggcgacatcaagttcgaccaattgccaccggacggccgtcccaccgatctaccgggcatgtcgcggctcggcgacaccggcgtggacctgttgctgtgcgactcgacgaacgccgagatccccggtgtcgggccatcggaaagcgaagtgggcccaacgctgcaccggctcatccggggtgccgacggacgggtgatagttgcgtgtttcgcctccaacgtggatcgggtacagcagatcatcgatgccgcagtggcattgggccggcgagtgtcgttcgtcggccgatcgatggtgcgcaacatgcgcgtcgcaaggcaactgggcttcctacgagtggctgattccgatctcatcgacatcgccgccgccgaaacgatggcgcccgaccaagttgtgttgatcaccaccggcacccaaggcgagccgatgtcggcgttgtcgcgaatgtcgcgtggggagcatcgcagcatcacgttgactgctggtgatctcatcgtgttgtcgtcgtcgctgatccccggcaacgaggaggcggtcttcggagtcatcgatgcactgtccaagatcggcgccagagtcgtcaccaacgcccaagcaagggtgcatgtttccggccacgcgtacgccggtgagctgctgttcctctacaacggggtgcggccgcgcaacgtgatgccggtgcacggaacctggcggatgctgcgcgccaatgccaagctggccgccagtaccggcgtaccgcaagagtcaattctgttggccgagaacggtgtcagcgtcgacctggttgccggcaaagccagtatctccggtgcggtgccggtgggcaagatgttcgtcgacggcttgatcgccggcgacgtcggcgatatcaccctgggcgagcggctcattttgtcgtcgggctttgtcgcggtgaccgtcgtggtcagacgtggcaccggccagccgttggctgcgccacatctacactcgcggggtttctccgaagatcccaaggcgctcgaacccgccgtgcgcaaggtggaggcagagctggaatcgttggtggccgccaacgtcaccgatccgatccggatcgctcaaggggtgcgccgcacggtcggcaagtgggtgggggaaacctatcgccgccagccgatgattgtgccgacggtcatcgaggtg

SEQ ID NO: 26550 - DNA, 2142 bp, Mycobacterium bovis
atgggtaaaaacgaggccagaagatcggccctggcgcccgatcacggtacagtggtgtgcgaccccctgcggcgactcaaccgcatgcacgcaacccctgaggagagtattcggatcgtggctgcccagaaaaagaaggcccaagacgaatacggcgctgcgtctatcaccattctcgaagggctggaggccgtccgcaaacgtcccggcatgtacattggctcgaccggtgagcgcggtttacaccatctcatttgggaggtggtcgacaacgcggtcgacgaggcgatggccggttatgcaaccacagtgaacgtagtgctgcttgaggatggcggtgtcgaggtcgccgacgacggccgcggcattccggtcgccacccacgcctccggcataccgaccgtcgacgtggtgatgacacaactacatgccggcggcaagttcgactcggacgcgtatgcgatatctggtggtctgcacggcgtcggcgtgtcggtggttaacgcgctatccacccggctcgaagtcgagatcaagcgcgacgggtacgagtggtctcaggtttatgagaagtcggaacccctgggcctcaagcaaggggcgccgaccaagaagacggggtcaacggtacggttctgggccgaccccgctgttttcgaaaccacggaatacgacttcgaaaccgtcgcccgccggctgcaagagatggcgttcctcaacaaggggctgaccatcaacctgaccgacgagagggtgacccaagacgaggtcgtcgacgaagtggtcagcgacgtcgccgaggcgccgaagtcggcaagtgaacgcgcagccgaatccactgcaccgcacaaagttaagagccgcacctttcactatccgggtggcctggtggacttcgtgaaacacatcaaccgcaccaagaacgcgattcatagcagcatcgtggacttttccggcaagggcaccgggcacgaggtggagatcgcgatgcaatggaacgccgggtattcggagtcggtgcacaccttcgccaacaccatcaacacccacgagggcggcacccacgaagagggcttccgcagcgcgctgacgtcggtggtgaacaagtacgccaaggaccgcaagctactgaaggacaaggaccccaacctcaccggtgacgatatccgggaaggcctggccgctgtgatctcggtgaaggtcagcgaaccgcagttcgagggccagaccaagaccaagttgggcaacaccgaggtcaaatcgtttgtgcagaaggtctgtaatgaacagctgacccactggtttgaagccaaccccaccgactcgaaagtcgttgtgaacaaggctgtgtcctcggcgcaagcccgtatcgcggcacgtaaggcacgagagttggtgcggcgtaagagcgccaccgacatcggtggattgcccggcaagctggccgattgccgttccacggatccgcgcaagtccgaactgtatgtcgtagaaggtgactcggccggcggttctgcaaaaagcggtcgcgattcgatgttccaggcgatacttccgctgcgcggcaagatcatcaatgtggagaaagcgcgcatcgaccgggtgctaaagaacaccgaagttcaggcgatcatcacggcgctgggcaccgggatccacgacgagttcgatatcggcaagctgcgctaccacaagatcgtgctgatggccgacgccgatgttgacggccaacatatttccacgctgttgttgacgttgttgttccggttcatgcggccgctcatcgagaacgggcatgtgtttttggcacaaccgccgctgtacaaactcaagtggcagcgcagtgacccggaattcgcatactccgaccgcgagcgcgacggtctgctggaggcggggctgaaggccgggaagaagatcaacaaggaagacggcattcagcggtacaagggtctaggtgaaatggacgctaaggagttgtgggagaccaccatggatccctcggttcgtgtgttgcgtcaagtgacgctggacgacgccgccgccgccgacgagttgttctccatcctgatgggcgaggacgtcgacgcgcggcgcagctttatcacccgcaacgccaaggatgttcggttcctggatgtc

SEQ ID NO: 26551 - DNA, 5496 bp, Mycobacterium bovis
ctcgattcactgagtaaggttttcagcgatcgagcgggttcggatcagttggtgattggatcggtgaagaccaatctcggtcacctggaagcggcggccggtgtcgccgggctgatgaaagccgtgctcgcggtacacaacggctacattccgcggcatcttaacttccaccagctgacaccacatgcaagtgaggccgcatctcggctgaggatcgccgccgatggtattgactggccaaccaccggtcgacctcgccgggcgggggtgtcgtcgttcggcgtcagtgggacgaatgcacacgtggtgatcgagcaggcacccgatccgatggccgctgcgggaacggagccgcagcgcggccccgttcccgcggtgtcgacgctggtggtgttcggcaagaccgcaccgcgggtggctgcgacggcatcggtgctggcagattggctggacggccccggcgcggcggtgccgctggccgatgtcgcgcacaccctcaaccatcaccgggcccgtcagaccaggttcggcacggtagccgctgtcgatcggcgccaagcggtgatcgggttacgcgcgctggccgcgggtcaatccgcccccggggtggtggcaccccgcgaaggctccatcggaggcggcacggtgttcgtctactcgggacgaggatcgcagtgggccggaatggggcgccaactgctggccgacgagccggcattcgccgctgccatcgccgaactggagccggaattcgttgctcaaggcgggttttcgctgcgcgacgtgatcgccggcggaaaagagttggttggcatcgaacagatccagctgggactgatcgggatgcagctggcgctgaccgcgttgtggcgctcatacggcgtgacacccgatgcggtgataggtcactcgatgggcgaagtggccgccgcggtggtggccggggcgctgaccccggcccagggattacgggtgaccgcggtccggtcgaggctgatggcgccgctgtccgggcagggcacgatggcgttgctggaactcgacgccgaagccactgaggcgctgattgccgactaccccgaggtgagcctggggatctatgcctccccacgccaaaccgtgatttccgggccgccgctattgatcgacgagctcatcgacaaggtgcgccaacagaacggcttcgctacccgagtcaacatcgaggtggccccccacaacccggccatggatgcactgcaaccggcgatgcgttcggaattggccgatctcaccccgcaaccgccgaccatcccgatcatctccaccacctacgccgacctcggcatttccctgggttccggccccaggttcgacgccgagcactgggcaaccaacatgcgcaacccggtacggttccaccaggccatcgctcatgccggcgccgatcaccacaccttcatcgagatcagcgcccacccgctgctgacccactcgatcagcgacaccctgcgcgccagctacgatgtcgacaactatctgagcatcggcaccttgcaacgcgacgctcacgacaccctcgagttccacacgaacctcaacacgacccacaccacccatcccccccagactccccacccccccgaaccccaccccgtgctgcccaccaccccatggcagcacacccagcactggatcaccgccacgtcggccgcttaccacaggcccgacacccacccgttgcttggcgtcggtgtcaccgaccccactaacggcacccgggtttgggaaagcgagctcgaccctgatctgctgtggctcgccgatcacgtcatcgacgatctcgttgtgctgcccggggcggcctacgctgagatcgcgctggcggccgcgaccgacaccttcgcagtcgagcaagatcagccctggatgatcagcgagctcgaccttcggcagatgctgcatgtgaccccaggcaccgtgttggtcaccacgctcaccggcgacgagcagcgatgccaggtcgaaatacgcacccgcagcgggtcttcgggatggaccacccacgccaccgccaccgttgcccgcgccgagccgttagcaccgctggatcacgaaggacagcggcgcgaggtaaccactgccgacctcgaggaccaactggatcccgacgacctgtatcagcgcctgcgcggcgccggccaacagcacggacccgcgtttcaaggcatcgtggggctggccgtcacgcaagctggcgtggcccgtgcgcaagtacggctacccgcatcggccagaacgggttcccgtgagttcatgctgcacccggtgatgatggatatcgcgttgcagacactgggagccacccggacggcgaccgatctggccggcggccaggacgcccggcagggcccatcttccaactcggccttggtggtaccggtgcgtttcgccggtgtccacgtgtacggcgatatcacccgcggggttcgcgcggtcggctctctggccgcagccggtgaccggctggtcggcgaggtagtcctgaccgacgcgaatggccaaccgctgctggtcgtcgatgaagtcgagatggcggtgctcggatccggcagtggcgcaacggaactcaccaaccgcctattcatgttggagtgggagcccgcaccgctggaaaagaccgccgaggctacgggtgccctgttgctgatcggtgaccccgccgcgggtgacccgctgctgcccgcgctgcagtcgtcgctgcgcgaccgcatcaccgacctcgagctggcatccgcggccgacgaagccacgctgcgcgcggcgatcagccgaacctcctgggacgggatcgttgtggtctgtccgccccgagcgaacgacgaatcgatgccggacgaggctcaactggagttggcacgcacacgcacgctgctggtcgccagcgtggtcgagaccgtgacgcgaatgggtgcccgcaagagcccccgactgtggatcgtcacccgtggcgctgcacagttcgacgcaggcgagtcggtcacgttggcgcagaccggcctacgtggcatcgcacgggtgctgacatttgagcattcggagttgaataccaccctcgtagatatcgaaccggacggcaccggctcgctggccgccctggccgaggagttgcttgccggttccgaggccgacgaggtcgccttgcgcgacggtcaacgctatgtcaaccggctggtgcccgcacccaccacgaccagtggtgatctcgccgccgaagctcgccaccaggtggtgaacctggacagctcgggcgcttccagggcagctgtccgactgcagatcgatcaacccggacggctggacgcactaaacgttcacgaggtgaaacggggcagaccgcaaggcgatcaagtcgaggttcgcgtcgtcgccgccggactcaacttcagcgacgtgctcaaagcgatgggcgtgtatccgggactcgacggtgccgcgccggtgatcggcggcgaatgtgtcggctacgtgacggccatcggtgacgaggttgacggcgtcgaggtcggacagcgagttatcgcattcggccctggcacattcgggacccatctggggaccatcgccgatctcgtcgtcccaattccggacacgctagccgacaacgaggcggccacgttcggcgtcgcctatctcaccgcctggcactcgctgtgcgaggtcgggcgcctatcccccggcgaacgcgtgctcatccattccgccaccggcggtgttggaatggcggcggtctcgatcgcgaagatgatcggcgcccgcatctacacgacggccggttcggacgccaaacgggaaatgctttccaggctcggtgtcgagtacgtcggcgactcgcgaagcgtggatttcgctgacgagatcctcgagctgacagacggctacggtgtggacgtcgttctcaattcgctggcgggcgaggcgattcaacgcggcgtgcagatccttgcgcccggtggccggttcatcgaactgggcaagaaggacgtctacgccgatgccagcttgggcttggccgcgctagccaagagcgcgtccttctccgtggtcgacctcgacctgaatctcaagctgcagccggcgcgctaccgccaactcctgcaacacatcctgcagcacgtggcggatggcaaactcgaggtacttcccgtcaccgcatttagcctgcacgatgcggccgacgcattccggcttatggcatccggtaaacacaccggaaagatcgtcatctcgataccccagcacggcagcatcgaggcgatcgctgccccgccaccacttcctctggtcagccgcgacggcggctacctcatcgtcggcggtatgggtggtctcggattcgtcgtcgcgcgctggctggctgagcaaggtgcgggactgattgtcctcaacggacgctcggcccccagcgacgaggtggcagccgctatcgcggagctgaacgcctccggtagccggatcgaggtgatcaccggcgacatcaccgagccagacaccgccgagcggctggtgcgggcggtcgaagacgccgggttccggctggccggggtggtgcacagcgcgatggttctcgccgacgagatcgtgttgaacatgaccgattccgccgctcggcgagtgttcgccccgaaggtcaccggcagctggcggcttcatgtggccaccgccgcgcgcgacgtcgactggtggctgaccttctcctcggccgccgcgctgctgggcactcccgggcagggcgcgtacgccgccgccaactcgtgggtcgacggcctggtcgcgcatcggcgctcggccggacttcccgctgtcgggatcaactggggcccgtgggccgacgttggacgcgcgcagttcttcaaagacctcggggtggagatgatcaacgccgagcaggggcttgccgccatgcaggcggtactcaccgccgatcgcgggcgcaccggtgtgttcagcctcgacgcgcggcagtggttccaatcgttccccgctgtggcggggtcctcgctgttcgcgaagctgcatgactcggcggcccgcaaaagtgggcagcggcgcggcgggggcgcgattcgcgctcagctagacgccctcgacgcggccgaacgcccaggccacctcgcgtccgcgatcgccgacgagatccgtgcggtgctgcgctcaggcgatcccatcgatcaccaccgaccgctggaaaccctgggactcgactcgctgatgggcctggaattgcgcaatcggctggaagcaagtctgggcatcacgttgccggtcgcgttggtgtgggcatacccgacgatcagcgatctcgcgaccgccctgtgcgaacgaatggactacgcgacacccgcggctgcgcaggagatttccgatacagaacccgaactgtccgacgaggagatggatttgctcgccgatctggttgacgccagcgagctggaagctgcgacgcgaggcgagtca

SEQ ID NO: 26552 - DNA, 2517 bp, Mycobacterium bovis
atggcggttcgtcaggtcaccgtcggctattcggacggcacgcacaagacgatgccggtgcggtgcgaccagacggtcctggatgccgccgaggaacacggcgtggccatcgtcaacgaatgccaaagcgggatatgtggcacctgtgtggccacctgcaccgccggccgctaccagatgggacgcaccgagggactgtccgatgtcgagcgggcggcgcgaaagatcctcacctgccagacgtttgttacctccgattgccggatcgagctgcagtatccggtcgacgacaacgccgccctgctggtcaccggtgacggtgtggtgaccgcggtcgagttggtgtcgcccagcaccgccatcctgcgggtggacacctctggcatggccggcgcgctgagataccgggccggccagttcgcccaattgcaggttcccggtaccaacgtatggcgcaactactcctacgcccatccggccgacggccgcggtgagtgcgagttcatcatcaggttgctgccggacggcgtgatgtcgaattatcttcgcgaccgcgcccagcccggtgaccatatcgcgctgcgctgcagcaagggcagcttttatctgcgcccgatcgtgcgaccggtgatcctggtcgccggaggaaccggcctgtcagcgatcctggcgatggcccagagcctggatgccgatgtcgctcacccggtctacctgctctacggggtcgagcgcaccgaagacctgtgcaagctcgacgaactcaccgagctgcgccgccgcgttggccgcctggaggtgcacgtcgtcgtcgctcgcccggaccccgactgggatgggcgcaccgggctggtcaccgacctgctcgacgagcggatgctggcgagcggtgacgccgacgtgtatctgtgcggtccggtcgccatggtcgacgcagcccgaacctggctggaccacaatggctttcaccgtgtcgggttgtactacgagaagttcgtggccagcggggcggcgcgccgccgcaccccggctcggctggattacgcgggcgtggacattgccgaggtgtgccgccgcggccgcggcaccgcggtggtcatcggcggcagcatcgcgggcatcgcggcggcgaaaatgctcagcgagaccttcgatcgcgtcatcgtgctggagaaggacggcccgcaccgtcgccgcgagggcaggccgggcgcggcacagggttggcacctgcaccacctgctgaccgccgggcagatcgagctggagcgcatcttccctggcatcgtcgacgacatggtgcgcgagggagcgttcaaggtcgacatggccgcgcagtaccgtatccggctgggcggcacctggaagaagcccggcactagtgacatcgagatcgtctgcgcgggaaggccgctgctcgaatggtgtgtgcgccgccggctcgacgacgaaccgcgcatcgacttccgctacgaatcggaggtggccgatctcgccttcgaccgcgccaacaatgccatcgtcggcgtcgccgtggacaatggcgacgccgacggaggcgacggtttgcaggtggtgcccgccgagttcgtcgtggacgcgtcgggcaagaacacccgcgtgccggagttcttggagcgtctcggtgttggcgctcccgaggccgagcaggacatcatcaactgcttctactccacgatgcagcaccgggttccgccggagcggcggtggcaggacaaggtgatggtgatctgctatgcgtaccgccctttcgaggatacctacgccgcgcagtactacaccgacagctcccgcaccatcctgtccacctcactggtggcctacaactgctattcgccgccgcgtaccgcccgagaattccgcgcgttcgccgacctgatgccgtccccggtcatcggggagaacatcgacgggctggagccggcatcgcccatctacaatttccgctatcccaacatgctgcggctgcgctacgagaagaagcgcaacctgccgcgggctttgctggcggtgggcgatgcctacaccagcgccgacccggtgtcgggtctgggtatgagcctggcgctcaaggaagttcgggagatgcaggcgctgctggctaaatacggcgccggtcaccgggatctgccgcgccggtactaccgggcgatcgccaagatggccgacacggcctggttcgtgatccgcgagcagaacctgcgcttcgactggatgaaggacgtcgacaagaagcgcccgttctatttcggtgtgctgacctggtacatggaccgcgtgctggagctggtgcatgacgatctcgacgcgtaccgggaattcttggccgtcgtccatctggtcaagccgccgtcggcgctgatgcgacccaggatcgccagccgcgtcctcggcaaatgggcacgaacccgattgtcgggccagaagacgttgattgcccgcaactacgaaaatcatccgataccagccgaacccgcggaccaacttgtaaacgct

SEQ ID NO: 26553 - DNA, 1308 bp, Mycobacterium bovis
atgcgtgcccgtggcgccaaggcgaccgatatcgccattttggtggtcgccgctgacgatggagtgatgccgcagacggtcgaggccatcaaccacgcgcaggccgccgacgtgccgatcgtggtggcggtcaacaagatcgacaaggagggtgccgacccggccaagattcgcgggcagcttaccgaatatggtttagtgccagaggaattcggcggtgacacgatgttcgtcgacatctcggccaagcagggcaccaatatcgaggcgctggaggaggccgtgttgctgaccgccgacgccgcgctggacctgcgggcaaaccccgacatggaagcccagggtgtggcgatcgaggcgcacttggaccgtggtcgcggcccagtggctaccgtgctggtgcagcgcggcaccctgcgggtcggtgactcggtggtcgccggcgacgcctatggccgtgttcgccgcatggtcgacgaacacggcgaagacgtcgaggttgcgctgccgtcgcggcctgtgcaggtcattggcttcacgtcggtgcccggcgccggcgacaacttcctcgtcgtcgacgaggaccgtatcgcccgccaaatcgccgaccggcgtagcgctcgcaagcgcaacgccctggcggcgcgctcacgcaagcggatcagcctggaggacctggactcggcgctgaaggaaaccagccagctgaacctgatcctcaagggcgacaacgccggtaccgtcgaggcgctggaagaggccctgatgggtatccaggtggacgacgaggtggtgctgcgggtgatcgaccgcggtgtcggcggcattaccgaaaccaacgtcaacctggcgtcggcttccgatgcggtgatcatcggtttcaatgtgcgcgccgaaggcaaggcgaccgagctggccagccgcgaaggcgtggagatccgctactactcggtcatctaccaggcgatcgacgagatcgagcaggcgctgcgtggcctgctcaagccgatctacgaggaaaaccagctgggtcgggctgagatccgggcgttgttccggtcttcgaaggtcggcctcatcgccggctgcctggtcacctcgggtgtgatgcggcgcaacgccaaggcgcggctgttgcgggacaacatcgtggtcgccgagaacctttcgatcgcttcgctgcgccgggagaaggacgacgtgaccgaggtgcgcgacggcttcgagtgtggcctgacactgggttacgccgacatcaaggagggcgacgtcatcgagtcctacgagctggtccagaaggaacgcgcc

SEQ ID NO: 26554 - DNA, 1245 bp, Mycobacterium bovis
gtgacccagaattcggcggagaatccgttcccggttcgcgcggtggcaatccgggtcgcgggctggatcgacaagctgggcgcggtctgggtggaggggcaattggcccagatcacaatgcgcccagacgccaagacggtgttcatggtattgcgcgatcctgcggccgacatgtcgctgaccgtgacgtgttcccgcgacctggtgctgtccgcgccggtgaagctggccgaaggcgttcaggtagtggtctgcggcaagccctcgttctacaccggacgtggcacattctccttgcggctcagcgagattcgcgctgtcggcatcggcgagctgctggcacgcatcgaccggctgcgccggctgctggacgccgaggggctcttcgacccccgcctcaagcggccgatcccgtacctgcccaacatgatcggtctgatcaccggccgtgcgagtgccgccgaacgtgacgttacgacggtggcctcggcgcgctggccagcggcacgtttcgccgtccgcaacgtcgccgtgcagggccccaacgccgtcggccagatcgtcgaggcgctgcgcgagctcgatcgagacccggacgtcgacgtgatcgtgctggcccggggcggcggctccgtcgaggacctgctgccgttttctgacgagacgttgtgccgcgcgatcgcggcctgccgtacgcccgtggtcagcgccgtcggtcacgaacccgacaatccgctgtgcgatctggtcgtcgacctgcgcgccgccacccccaccgacgccgccaagaaagtggttcccgataccgcagccgagcagcggctgatcgacgatctgcgccggcgcagcgcccaggcgttgcgcaactgggtttcccgcgagcaacgggcagtcgcgcagttgcgtagccgcccggtgctggccgatccgatgacgatggtcagcgtgcgcgccgaggaggtccaccgagcccgctcgacgcttcgtcgcaacctcaccctgatggtcgccgccgagaccgaacgcatcggtcatctggccgcacgcctggccacgctgggtccggccgccacgctcgcccgcggctatgccatagtgcagaccgttgctcagacgggacccgagggcggatccgaaccacaggtgctgcggtcggtccacgacgcaccggaaggcaccaagctgcgcgtgcgggttgccgacggagccctagcggcggtcagtgaaggacaaaccaatggtctg

SEQ ID NO: 26555 - DNA, 1110 bp, Mycobacterium bovis
atgcttcgccgcatgggtgatgcatcgctgacaaccgagctcggccgcgttctggtcaccggcggcgcgggcttcgtgggcgccaacctggtgaccaccttgctggaccgcgggcactgggtgcgttccttcgaccgcgcgccgtcgctgttgcctgcgcatccgcaactggaggtgctgcaaggggacatcaccgacgcggacgtctgcgccgcggccgtggacggcatcgacacgatcttccacaccgcagcgatcatcgagctgatgggcggcgcgtcggtcaccgacgagtaccgccaacgtagctttgcggtcaacgtcggcggcaccgagaacctgctgcacgccggccagcgggccggggtgcagcggttcgtctacacgtcatccaacagtgtggtgatgggcggccagaacatcgccggcggtgacgagacgctgccctataccgaccggttcaacgacctctacaccgagaccaaggtggttgccgagcgattcgtgttggcccagaacggtgtcgacggcatgctgacgtgcgcgatccggcccagcggcatctggggaaacggcgatcagacgatgttccgcaagctgttcgaaagtgtgctcaagggccacgtcaaggtgctggtcgggcgcaagtcggcccggctggataactcttacgtgcacaacctgattcacggtttcatcttggccgctgcccatctggtgccggacggcacagcgcccgggcaggcttacttcatcaacgacgcagagccgatcaatatgttcgagttcgctcggccggtgctcgaggcgtgcgggcagcgctggccgaagatgcggatttccggccccgcggtccgctgggtaatgacggggtggcagcggctgcacttccggttcggattccccgcgccgctgctcgagccgctggccgtcgaacgactgtacctggacaactacttttcgatcgctaaggcacgccgcgacctgggctatgagccgctgttcaccacccagcaggcgctgaccgaatgcctgccgtactacgtgagtctgtttgagcagatgaagaacgaggcccgggcggaaaaaacggccgccacagtcaagccg

SEQ ID NO: 26556 - DNA, 1086 bp, Mycobacterium bovis
atgacagctgagggatccggttcgtcgacggccgcggtggccagccacgacccgtcgcacaccaggccatcgcgccgggaagccccggaccgcaacctggccatggagctggtccgggtgaccgaggccggagccatggccgcgggccgctgggtaggccgcggcgacaaggagggcggcgacggcgcggcggtcgacgcgatgcgcgaactggtcaactcggtttccatgcgcggggtggtggtcatcggcgaaggcgaaaaggaccacgcaccaatgctctacaacggcgaagaagtgggcaacggcgacggaccggaatgcgactttgccgtcgaccccattgacggcaccacgctgatgagcaagggcatgaccaacgccatctcggtgctggcggtagccgatcgcggcaccatgttcgacccgtcggcggtgttctacatgaacaaaatcgccgtcggccccgatgccgcacacgtgctggatatcaccgcgccgatctcggaaaacatccgagcggtcgccaaggtcaaggacctgtcggtgcgagacatgacggtgtgcatcctggacaggccgcggcacgcgcaactcatccacgacgtccgcgccaccggggcccggatccggctgatcaccgatggcgacgtcgccggcgcgatctcggcgtgccgaccgcactccggcaccgacctgctagctgggatcggcggcaccccggagggaatcatcgccgccgcggcgatccgctgcatgggcggggcgatccaggcgcagctcgccccgcgcgacgacgcggaacgccgcaaggccctagaagccggttacgacctgaaccaggtcttgaccaccgaagatctggtgtccggggaaaacgtcttcttctgcgccactggggtcaccgacggcgacctgctcaagggagtgcgttactaccccggcggctgcaccacccattcgatcgtgatgcgctcgaagtccggcaccgtccggatgatcgaggcctaccaccggctttcaaagctcaacgaatactccgcgatcgacttcaccggcgacagcagcgccgtgtacccattgccc

SEQ ID NO: 26557 - DNA, 1470 bp, Mycobacterium bovis
atgactcgtatcacccgagccaatggttgccccgacggaactctcgaaaacgccgttgtggcgctggacggcggcgcgaactacccacgcgagatcctgggcaacaaaggccacggcatcgacatgatgcgccggcaccatctgccggtgccgcctgcattctgcattaccaccgaggtgggcgtgcgctatctcgccgcgcccgaatccacgatcgccgcgatctgggatgacgtgctggatcggatgagctggctggaaacagaaacctcgtgcacgttcggccgtggcccgaatccgctgctggtcagcgtgcgctcgggagccacccagtcgatgcccggcatgatggacacgattctggacgtgggcatgaccgacgcggtcgaacgagtacttgccaggccgggtgccgccgacttcgcccacgacaccagacggcgattcaccagcatgtatcggcgcatcgtcggcagcgccggtcccattaccgacgacccgtatgcccagttgcgcgcgagcatcgaggcggtattcgcctcctggaactcacctcgcgccgttgcctatcgcgaccatcacggcctcgacgaccaaggcggtacggcggtggtggtgcaggcgatggtattcggcaacctcaccgcgaactcgggcgccggggtgctgtcctcacgcaacccgatcaccggagccaacgaaccgttcggcgaatggctacccggcggccaaggcgacgacgtggtgtccggattggtcgccgtcgcaccgatcaccgccctgcgcgaccagcagccggccgtctacgaccaactgatggcggccgcccgcagtttggagcgcatggcaggcgacgtccaggagatcgaattcaccgtggaggacagccagctgtggctgctgcagacccgcggggcggaacgctcggcgcaggccgccgtgcgactggcgctgcaactgcatcacgagggactcatcgacgacaccgagacactgcgccgggtgactccgacgcacatcgagactttgctacggccgtcgctgcagccggaaacacggttggccgcaccgcttttggccaagggcctgcccgcttgcccgggcgtggtatccgggaccgcctacaccgaggtggacgaggcgctggacgctgcggaccggggcgagccggtcatcttggtgcgagatcacaccagaccggaggacgtcatgggcatgcttgccgcgcaaggcattgtcaccgaggtggggggtgccgccagtcatgcggcggtggttagccgcgagctcggtcgagtggccgtggtgggttgcggtcccggggtcgcggcggcactggccggcaaggagatcaccgtcgacggctatgaaggcgaagtgcgccaaggcgttctggcattgtctgcctggtcggaaagtgacacgccggagttgcgcgagctggccgacatcgcgcaacggatcagttca

SEQ ID NO: 26558 - DNA, 585 bp, Mycobacterium bovis
atgccactgctaaccattggcgatcaattccccgcctaccagctcaccgctctcatcggcggtgacctgtccaaggtcgacgccaagcagcccggcgactacttcaccactatcaccagtgacgaacacccaggcaagtggcgggtggtgttcttttggccgaaagacttcacgttcgtgtgccctaccgagatcgcggcgttcagcaagctcaatgacgagttcgaggaccgcgacgcccagatcctgggggtttcgattgacagcgaattcgcgcatttccagtggcgtgcacagcacaacgacctcaaaacgttacccttcccgatgctctccgacatcaagcgcgaactcagccaagccgcaggtgtcctcaacgccgacggtgtggccgaccgcgtgacctttatcgtcgaccccaacaacgagatccagttcgtctcggccaccgccggttcggtgggacgcaacgtcgatgaggtactgcgagtgctcgacgccctccagtccgacgagctgtgcgcatgcaactggcgcaagggcgacccgacgctagacgctggcgaactcctcaaggcttcggcc

SEQ ID NO: 26559 - DNA, 1245 bp, Mycobacterium bovis
atgaccgtgccagcaccgtcgcagctcgacttgcgtcaagaggtgcacgacgccgcacgccgcgcccgggtggccgcccgccggctggcatcgctgccgacgactgtcaaagaccgcgcgctgcacgcggctgccgacgagctactggctcaccgcgaccagatcctggcggccaacgccgaagacctgaacgcggcgcgcgaggcggacaccccggccgccatgctggaccggttgtccttgaacccgcaacgagtcgacggtatcgccgccgggttgcggcaagtcgcgggactgcgcgatccggtcggtgaagtgctgcgtggctataccctgcccaacgggctgcagctgcgccagcagcgcgtccccctgggcgtggtcggcatgatctacgagggccgccccaatgtcaccgtggatgccttcgggctgacactcaagtcgggtaacgctgcattgctgcgcggcagctcgtcggccgcaaagtccaacgaggccctggtggcggtgttacgcaccgcgctggtcggcctggagctgccggccgacgcggtccagctgctgtcggctgccgaccgcgccaccgtcactcacctgattcaggcccgcggcctggtcgatgtggtgattccacgcgggggagcgggcctgatcgaggcggtcgtacgcgatgcccaggtgcccaccatcgagaccggcgtcgggaactgccatgtctacgtgcaccaagcggccgacctggacgtggccgagcgtatcttgctgaactccaagacgcggcggcccagcgtctgcaacgccgccgagacgctgctggtcgacgcagcgatcgccgaaacggcgttgcctcgattgctggccgccctgcagcacgccggtgtcaccgtacatctcgacccggacgaggccgacctgcgccgcgaatacctgtcgctggacatcgcggtggcggtggtcgacggtgtcgacgctgccatcgcccatatcaacgaatacggcaccgggcacacagaagcgattgtgaccaccaatcttgatgcggcccaacgctttaccgaacagatcgatgcggccgcggtgatggtgaacgcatcaacggcgttcaccgacggcgagcaattcggcttcggcgccgagatcggcatctccacccagaaactgcatgcccgcggaccgatgggactaccggaattgacgtcgaccaagtggatcgcatggggagccggccacacccgtccggcc

SEQ ID NO: 26560 - DNA, 1410 bp, Mycobacterium bovis
gacgtacgcctggtcccggcggcgctggtcagctggattgtgacggcggccgggatcgtgtggccgatcggcaacgtgtgtgccttgtgctgcgtcgtggtggccctcggcggcggcgcactgtggtggtgtgtggcgcgccggtcgtggcacgctccgcgactgggttcgatcagcgccggcctggtcgcggtcggtatggtgggcgcggggtacgggcttgcggtcgcgttgcgctccgaggcggtcgatcgccacccaatcaccgtggcatttggcacctccgcgctggtcacggtcacccccagcgagagcccagtgtcgctggggcggggccggttgatgttccgggcgacggttcaacggctgcgggatgacgagacatccggccgggtagtggttttcgcgcgagcgctggacttcggcgagctgatggtcggacagcccgtccagttccgcgcgcgtatcagtcgcccggcgcgtcacgacctgacggtcgcggtgttcaatgcgaccggtcggccgaccgtgggccgtgccggcccggtacaccgcgccgctcacatcgtccgccatcgattcgcggccgcggttcgtgaggtgctgcccgctgaccaggccacgatgttgccggccctggttctcggcgatacctcgacggtcaccgccttaaccagccgcgagttccgtgcggcgggcctgacgcacttgacggcggtctcgggggccaatgtcacgatcgtgtgtgcggcggcgctggtttcggcacggttgatcggaccgcgtgcggccgtggtgtgcgcggccgtcgcgttggtggcattcgtcatcctggtgcagccgacggccagcgtgttgcgggcagctgtgatgggcgccattgccctcgtggggatgctgtctgcgcgccggcggcaggcgattccagctttgtcgggtagcgtgctggttttgctggctgccgctccccatcttgctgtggacatcggcttcgcgctgtccgtggcggccacgggtgcactggtcgtcatcgcgccggtttggtcacgccgcttggtcgaccgcggatgtccgaaggtgctggccgatgccctcgcagtcgcggcggccgcgcagctggtgacggcgccactggtggccgccatctccggccgggtcagtctggtggccgtggtggccaatctggcggtggcggccgtgatcgcgccgatcaccgtgctgggcagcgttgcggccgtgctggtcgtgccgtggccggccggcgcgcaggtgctgatccggttcaccgggcccgaagtgtggtgggtgttgcgcgtggcgcattgggcgtcgggtgtgcccgcggcgaccgttccggtggccgcaggtctgcccggcgtactgctggtcggtggcgccaccgtgttcacg

SEQ ID NO: 26561 - DNA, 264 bp, Mycobacterium bovis
ttgcacgtggccaacatcaagtcgcagcagaagcgcaaccgcaccaacgagcgcgcccggctgcgcaacaaggcggtgaagtcctcgcttcgtaccgctgtccgtgccttccgcgaagctgcccatgcaggcgacaaggcaaaggccgcggaactgctggcgtcgaccaaccgcaagctggacaaggcggccagcaagggcgtgatccacaaaaaccaggccgccaacaagaagtcggcactggcccaggcgctcaacaagctc

SEQ ID NO: 26562 - DNA, 312 bp, Mycobacterium bovis
atgatggcgacctacgcaatcgtcaagaccggcggcaagcagtacaaagtcgctgtcggagatgtggtcaaggtcgaaaagctggaatccgagcagggggagaaggtgtccctgccggtggctctggttgtcgacggcgccaccgtcaccaccgatgcgaaggcactggccaaggtcgcggtgaccggtgaggtgctcgggcacaccaagggccccaagatccgtatccacaagttcaagaacaagactggctaccacaaacggcagggacaccgtcagcagctgacggtcctgaaggtcaccggcatcgca

SEQ ID NO: 26563 - DNA, 258 bp, Mycobacterium bovis
atggcacacaagaagggggcttccagctcgcgcaacggtcgcgattccgccgcccagcggctgggggttaagcggtacggcggccaggtcgtcaaggccggcgagatcctggtccgccagcgcggtaccaaattccatcccggcgtcaacgtcgggcgtggcggcgatgacaccttgttcgccaagacggccggggcggtcgagttcggcatcaaacgcggacgtaagacggtgagcatcgtcggttcgaccactgcc

SEQ ID NO: 26564 - DNA, 1452 bp, Mycobacterium bovis
atgaaggggagctcggtgcctcggtttgtcgatcgggtcgtcatccacaccagagcgggttcgggcggtaacggctgcgcttcggtccatcgcgagaaattcaagccgctgggcggccccgatggcggaaatggcggccggggcggcagcatcgtcttcgtcgtcgatccgcaagtgcacaccctgctcgacttccatttccgcccgcatctcaccgcggcttcgggcaagcacgggatgggcaataaccgcgacggggccgccggcgcggatttggaagtgaaagttcccgaaggcaccgtggtattggacgagaacggccggctactggccgacctggtcggcgcgggcacccgctttgaagccgccgccggaggccgtggcggtttgggcaacgccgcgctggcttcccgcgtgcgtaaggcccccggtttcgcactcctcggcgaaaagggacagtcccgagacctcaccttggaactcaagaccgtcgccgacgtcggcctggtcgggtttccgtcggccggaaaatcctcgctggtgtcggcgatttcggcggccaagccgaagatcgccgactacccgttcaccaccctggtgcccaacctcggtgtggtctcggctggcgagcacgcgttcaccgtcgccgacgtgccggggttgatcccgggcgcatcccggggccgtggtctggggctggactttctgcggcacatcgagcgctgcgctgtactggtgcatgtggtggattgcgctaccgccgagccgggccgcgaccccatctcggacatcgacgcgctggaaacggaactcgcgtgctacacgcccacgctgcaaggggacgcggctctgggcgatctcgccgcacggccgcgtgcggtggtcctcaacaaaatcgatgtgccggaggcccgcgagctcgcggagttcgtccgtgacgacatcgcccagcgcggctggccggtgttctgcgtgtcgaccgcaacccgggaaaacctgcagccgttgatctttgggctgtcgcagatgatctcggactacaacgctgcgcggccggtggcggtgccacggcggccggtgattcgtccgattccggtggacgacagcggttttaccgtcgaacccgacgggcatggtggctttgtcgtcagcggtgcccggcccgagcgttggattgaccagaccaacttcgacaacgacgaggccgtcggctatctcgccgaccggctggcgcgcctgggtgtcgaggaggaattgctgaggctgggtgcgcggtcaggatgcgcggtgaccatcggcgagatgacgttcgattgggagccgcaaacgcctgcgggtgagccggtcgcgatgtccggccggggcaccgatccgcggctggacagcaacaagcgggtgggcgcggccgagcgaaaggccgctcggagtcggcgtcgcgaacacggggatggc

SEQ ID NO: 26565 - DNA, 1551 bp, Mycobacterium bovis
ttgcccgtgaccaccgaaccgggttacctatccccctccgtcgccgtcgcgacctcgatgccgaaacgtggtgtcggcgctgcggtgttgatcgtgccggtcgtctcgaccggcgaagaggatcggcccggcgcggtcgttgcctcggccgagcccttcctgcgcgccgacacggttgccgaaatcgaggcgggcctgcgagcgctggacgccaccggcgccagtgaccaggtgcaccggctggcggtgccgtcgttgccggtgggcagcgtcctgacggtcggcctgggcaaaccgcggcgcgaatggccggccgataccatccgctgcgccgccggcgtggccgcgcgtgcgctcaacagttcggaggcagtgatcaccacgctagccgaattacctggcgacggcatctgctcggccaccgtcgaggggctgatcctgggcagctaccgattcagcgccttccgcagcgacaagaccgcgcccaaagacgccggactccgcaaaatcaccgtgctctgctgtgcaaaggacgccaagaagcgcgcgttgcacggtgcggccgtcgcgaccgcggtggccaccgcccgggacttggtcaacactcccccaagccacctgtttcccgccgagttggctaagcgcgcaaagactttgagcgaatctgtcggcctcgacgtggaagttatcgacgaaaaggcgctgaagaaggccggctatggcggggtgattggtgtcggccagggctcgtcgcggccgccgcgactggtgcggttgattcatcggggatcgcggctggccaagaacccccaaaaggccaagaaggtggccttggttggcaaggggatcaccttcgataccggcggcatctcgatcaagccggcagcgtcgatgcaccacatgacctcggacatgggcggagcggccgcggtgatcgccactgtcacgctggctgcccggctgcgactgccgattgacgtgatcgccacggtgccgatggccgagaacatgccgtcggcgacggcgcagcgcccgggcgacgtgctgacccaatacggtgggaccaccgtcgaggtgctcaacaccgacgcggagggccggttgatcctggccgacgccatcgtccgggcatgtgaggacaagccggactatctgatcgagacatccacgttgaccggtgcgcaaacggtggcgctggggacgcgcataccgggtgtgatgggcagcgacgagttccgcgaccgggtcgccgcgatctcgcagcgggtgggcgagaacggctggccgatgccgctgcccgatgacctcaaggatgacttgaaatccacggtggccgacctggccaatgtgagtggccagcgtttcgcaggcatgctggtggccggggttttcctgcgtgagttcgtcgccgaatcggtggattgggcgcacatcgacgtggccggcccggcctacaacaccggcagcgcctggggttacacgcccaagggcgccaccggtgtgcccacccgcaccatgttcgcggtgctcgaggacatcgcgaagaacggg

SEQ ID NO: 26566 - DNA, 432 bp, Mycobacterium bovis
atggccgagaagatgttcgcccaacagcttcgccaccgtggcctgggtgacgcggtgcgagtgaccagtgcgggcaccgggaactggcatgtaggcagttgcgccgacgagcgggcggccggggtgttgcgagcccacggctaccctaccgaccaccgggccgcacaagtcggcaccgaacacctggcggcagacctgttggtggccttggaccgcaaccacgctcggctgttgcggcagctcggcgtcgaagccgcccgggtacggatgatgcggtcattcgacccacgctcgggaacccatgcgctcgatgtcgaggatccctacaatggcgatcactccgacttcgaggaggtcttcgccgtcatcgaatccgccctgcccggcctgcacgactgggtcgacgaacgtctcgcgcggaacggaccgagt

SEQ ID NO: 26567 - DNA, 1659 bp, Mycobacterium bovis
atggccttctccgtccagatgccggcactcggtgagagcgtcaccgaggggacggttacccgctggctcaaacaggaaggcgacacggtcgaactcgacgagcccctcgtggaggtgtcgaccgacaaggtcgacaccgaaatcccctcgccggccgcgggtgtgctgaccaagatcatcgcccaggaggatgacacggtcgaggtcggcggcgagctcgctgtcattggcgacgccaaggatgccggcgaggccgcggccccggcacccgagaaagtccctgcggcccaacccgagtccaagccggcacccgaaccaccaccggtccaaccgacgtccggagcgcctgctggtggcgatgccaagccggtgctgatgcccgagctcggcgaatcggtgaccgaggggaccgtcattcgttggctgaagaagatcggggattcggttcaggttgacgagccactcgtggaggtgtccaccgacaaggtggacaccgagatcccgtccccggtggctggggtcttggtcagtatcagcgccgacgaggacgccacggtgcccgtcggcggcgagttggcccggatcggtgtcgctgccgacatcggcgccgcgcccgcccccaagcccgcacccaagcccgtccccgagccagcgccgacgccgaaggccgaacccgcaccatcgccgccggcggcccagccagccggtgcggccgagggcgcaccgtacgtgacgccgctggtgcgaaagctggcgtcggaaaacaacatcgacctcgccggggtgaccggcaccggagtgggtggtcgcatccgcaaacaggatgtgctggccgcggctgagcaaaagaagcgggcgaaagcaccggcgccggccgcccaggccgccgccgcgccggccccgaaagcgccgcctgcccctgcgccggcgttggcacatctacggggcaccacccagaaggccagccggattcgtcagatcaccgccaacaagacccgcgaatctttgcaggcaacggcacagctgacacaaacccatgaggtcgacatgaccaagatcgtggggctacgggcccgggccaaggcggcgttcgccgagcgtgagggcgtgaacctgaccttcctgccgttcttcgccaaggccgtgatcgatgccctcaagattcacccgaacatcaacgctagctacaacgaggacaccaaggagatcacctactacgacgccgagcacctaggattcgctgtcgacaccgagcagggcctgctctccccggtcatccacgacgccggcgatctgtcactggccggtctggcgcgggcgatcgccgatatcgcggcccgtgcccggtcgggcaacctgaaacccgacgagttgtccggcggcaccttcaccatcaccaacatcggtagccagggcgcgttgttcgacaccccgatcctggttccgccgcaggccgccatgctgggcaccggggcgatcgtcaagcggccgcgggtggtcgtcgatgccagcggcaacgagtcgatcggggtgcgctcggtctgctacctcccgttgacctatgaccatcggctcatcgacggcgccgacgccggacgtttcctcaccacgatcaagcaccgcctcgaagagggagcgttcgaggccgatttaggactg

SEQ ID NO: 26568 - DNA, 906 bp, Mycobacterium bovis
gtgatggccaacgccgttgtcgcgatcgcgggttcgtctggcttgatcggctctgccctgaccgcggcgctgcgcgcggccgaccacacggtgctgcggatcgtgcgccgggcacctgcgaattccgaagaactgcactggaatcccgaaagcggcgaattcgatccgcacgcgctcaccgatgtcgacgccgtggtcaacctctgcggcgtcaacatcgcccagcgtcggtggtcgggggctttcaaacagagcctgcgcgacagccggatcacacccaccgaggtgctatccgccgcagtcgccgacgccggcgtcgctaccttgatcaacgccagcgcggtgggctactacggaaacaccaaggaccgggtggtcgacgaaaacgactcggcgggaacaggttttctggcccagctgtgcgttgactgggaaaccgccacgcggccggcgcagcagagcggtgcccgcgtggtgctggcccggaccggagtggtgctgtctccggcggggggcatgctgcgacgcatgcggccactgttttcggtgggcctgggcgcgcggctgggcagcggccggcaatatatgtcatggatcagcctggaggacgaggtgcgggcgctgcagttcgctatcgcgcagcccaacctgtccggcccggtgaacttgaccgggccggcccccgttaccaacgccgaattcaccaccgcgtttggccgcgccgtcaaccgccctaccccgctgatgttgcctagcgtcgcggtacgcgcggcgtttggtgagttcgccgacgaggggttgctcattggtcagcgcgccatcccctccgcgctggagcgagccggatttcagttccaccacaacaccattggcgaggcgctcggctacgccaccacccggcccggc

SEQ ID NO: 26569 - DNA, 843 bp, Mycobacterium bovis
atgtctgagcagactatctatggggccaatacccccggaggctccgggccgcggaccaagatccgcacccaccacctacagagatggaaggccgacggccacaagtgggccatgctgacggcctacgactattcgacggcccggatcttcgacgaggccggcatcccggtgctgctggtcggtgattcggcggccaacgtcgtgtacggctacgacaccaccgtgccgatctccatcgacgagctgatcccgctggtccgtggcgtggtgcggggtgccccgcacgcactggtcgtcgccgacctgccgttcggcagctacgaggcggggcccaccgccgcgttggccgccgccacccggttcctcaaggacggcggcgcacatgcggtcaagctcgagggcggtgagcgggtggccgagcaaatcgcctgtctgaccgcggcgggcatcccggtgatggcacacatcggcttcaccccgcaaagcgtcaacaccttgggcggcttccgggtgcagggccgcggcgacgccgccgaacaaaccatcgccgacgcgatcgccgtcgccgaagccggagcgtttgccgtcgtgatggagatggtgcccgccgagttggccacccagatcaccggcaagcttaccattccgacggtcgggatcggcgctgggcccaactgcgacggccaggtcctggtatggcaggacatggccgggttcagcggcgccaagaccgcccgcttcgtcaaacggtatgccgatgtcggtggtgaactacgccgtgctgcaatgcaatacgcccaagaggtggccggcggggtattccccgctgacgaacacagtttc

SEQ ID NO: 26570 - DNA, 933 bp, Mycobacterium bovis
atgagtgtcgctgccgagggccggcgcctgttacgcctggaggtgcgcaacgcgcagaccccaatcgagcgcaaaccgccgtggatcaagacacgagcccgcatcgggccggagtacaccgagctgaagaacctggtccgccgcgaggggctgcacacggtctgcgaggaggccggctgccccaacatcttcgaatgctgggaggaccgagaagccaccttcctgatcggcggtgaccagtgcacccgccgatgcgatttctgccagatcgacaccggaaagcccgccgagctggaccgcgacgagccacgccgagtcgccgacagcgtgcgcacgatgggcctgcgctatgccaccgtcaccggcgtggctcgcgacgacctgcctgacggcggggcctggctgtacgccgcgaccgtgcgcgccatcaaggaactcaatccgtcgaccggcgtcgaactgctgattcccgacttcaacggcgaaccaacccggctggccgaggtcttcgagtccggcccggaagtcctggcacacaatgtcgaaaccgtgccccgtatcttcaagcggatccggccggcgttcacgtaccggcgcagcctgggtgtgcttaccgctgcgcgcgacgccggcctggtcaccaagagcaacctcatcctcggcctgggcgaaacctccgacgaggtgcgcaccgccctgggcgatctgcgcgacgccggctgcgacatcgttaccatcacccaatacctgcggccgtcggcgcgccaccatccggtcgagcgctgggtgaagcccgaggagttcgtccagttcgcgcgattcgccgaagggctgggcttcgccggggtattggcgggacccctggttaggtcgtcatatcgggcgggccggctctacgaacaggcacgtaactcacgggccttggcatcccgc

SEQ ID NO: 26571 - DNA, 720 bp, Mycobacterium bovis
atggcgctgcagccggtgactcgccgatcggtgcccgaagaggtcttcgagcagatcgctaccgatgtgctcaccggcgagatgccgcccggcgaggcgttgcccagcgagcgtcggttggctgagttgctcggagtgtcgcgacccgcggtccgcgaggcgctcaaacggctgtcggccgcaggtctggtcgaggtgcgtcagggcgacgtcaccaccgtgcgtgacttccggcggcacgccggcctggatctgttgccccgattgttgtttcgcaacggtgagctggatatctccgtcgtccgcagcatcctcgaggcccggctgcgcaattttccgaaggtcgcggaactagcggccgaacggaacgagcccgagttggcggaattgctgcaggattcgctgcgtgcgctggacactgaggaagatccgatcgtgtggcaacgccacacgctcgacttttgggatcatgtggtcgacagcgccggttcgatcgtagatcgattgatgtacaacgcatttcgtgctgcttacgagccgacgctagctgctctgaccaccacgatgaccgctgcggctaagcgtccgtcggactaccggaaactcgcggatgcgatctgctcaggtgatcccaccggagcgaagaaagccgcccaagacctactcgaacttgcgaacacatcgttgatggccgtactcgttagccaggcgagtcggcaa

SEQ ID NO: 26572 - DNA, 642 bp, Mycobacterium bovis
gtgctaatcgcgattgagggcgttgacggcgctggcaagcggacgttggtggaaaagctgtccggggcctttcgagcagccgggagatcggtggccacactggcgttcccgcgctacggacagtcggtggccgccgacatcgcagcggaggcgctgcacggcgagcacggtgacctcgcatcgtcggtgtatgcgatggcgacgctgttcgcgctcgaccgcgctggcgcggtccacacgatccaggggctgtgtcgcggctacgacgtggtgatcctggatcgctacgtcgcctccaacgcggcctacagcgcggcgcgcctacatgaaaacgcggccgggaaggcagcggcctgggttcagcggatcgaatttgcaagactcgggttgcccaagcccgactggcaggtgctccttgcggtctctgccgagctcgccggggaacgatcccgcggccgtgcccagcgtgaccccggtcgggcgcgcgacaattacgaacgcgacgctgaacttcagcagcgcaccggtgcggtctacgccgagttggcggcccaagggtggggcggccggtggctggttgtcggcgccgatgttgatccgggccgactagcggcgactttggcgcctccagacgtgccaagt

SEQ ID NO: 26573 - DNA, 1170 bp, Mycobacterium bovis
gacgtggtggtcgtgggcgccggaccggccgggtcagctgcggccgcctgggctgcccgcgcgggccgcgacgtcctcgtcatcgacaccgccaccttcccccgcgacaagccttgcggcgacgggctgacaccacgcgcggtcgccgaactgcaccagctgggactaggtaagtggctggcggaccacatccggcatcgtgggttgcggatgagcggcttcggaggcgaggtggaagtggactggcccggtccgagcttcccgtcgtacggcagcgcggtggcccgtctcgagctggacgaccggatccgaaaggtcgccgaggacaccggtgcgcgcatgctacttggcgctaaagccgttgctgttcaccatgattcatcgaggcgggtggtatcgctgaccctggccgacggcactgaggtgggctgccgccagctgatcgttgccgacggggcccgatccccgctgggacgcaagctgggccggcgatggcatcgggagacggtctatggcgtcgcggtccgggggtacctgagcacggcgtacagcgatgacccgtggctgacgtcgcatctggaactgcgctcccccgacggcgccgtgctacccggctacggctggatctttccgctgggcaacggcgaagtgaacatcggcgtgggagcgttgtcgacctcaagacggccagccgatctggccctgcgcccgctgatctcctactacaccgacctgcgccgtgacgagtggggcttcaccggccagccgcgcgcggtgtcgtcggcgctgttgccgatgggcggcgcggtttctggagtggccgggtccaactggatgctcatcggcgacgccgcggcctgcgtcaacccgctcaatggcgagggcatcgactacgggctggaaaccgggcggctggccgccgaactgctggattcgcgtgacctggcacggctgtggccgtcgctgctggccgaccgctacggtcgcggcttctcggttgcgcgccggctagcgttgttactgaccttcccacggttcctacccacgactgggcccatcacgatgcgctccaccgcattgatgaacatcgccgtgcgggtgatgtccaatctggtcaccgacgacgaccgcgactgggtggcgcgggtgtggcgcggtggcggtcaattg

SEQ ID NO: 26574 - DNA, 723 bp, Mycobacterium bovis
atgtcaactgtgttgacatatatcagggccgttgatatatatgaacacatgactgaatcgctggatcttgagttcgaatccgcctaccgcggtgaatccgtcgccttcggggagggagtccgaccgccatggagcatcggcgaaccccagcccgagctggccgccctgatcgtgcagggcaagttccgcggcgacgtcctcgacgtgggctgcggggaggccgcgatttcgctggcactggccgaacggggacacaccacggtcggactggacctctcccccgccgccgtagaactggctcggcatgaagcagcgaagcgcggcctggccaatgccagcttcgaggtggccgacgccagttcgtttaccggctatgacggcaggttcgacaccatcgtcgacagcacgctgttccactccatgccggtcgagtcccgggagggctatctgcaatcgatcgtgcgtgcggcggcaccgggcgcctcctacttcgtgttggtattcgaccgggcggcgatacccgaggggccgatcaatgcggtcaccgaggacgagctgcgcgcggcggtgtccaagtactggatcatcgatgagatcaagcccgcgcggctgtacgcgaggttcccggccggcttcgccggcatgcccgcactcctggacatccgcgaagagcccaacgggctgcagtcgatcggtggctggctgctctcggcccacctgggc

SEQ ID NO: 26575 - DNA, 1251 bp, Mycobacterium bovis
gtgaaccttcagttgttccttttgctcattgtcgtcgtgacggcattggcgttcgacttcaccaacgggttccacgacaccggaaacgccatggcgacctcgattgccagcggcgccctggcaccgcgggtagcggtagcactttctgccgtgctgaacctgatcggtgcgtttttgtccaccgccgtggcggccacaatcgccaagggtctgatcgacgcgaatctggtgacgctggagttggtgttcgccggcctggtcggcgggatcgtctggaacctgttgacctggttgctgggcattccgtcgagttcctcacatgcgctgatcggcggcatcgtcggcgccacaattgccgccgtcggcctgcgtggggtgatctggagcggagtggtgtccaaggtgatcgtgccggccgtggtagccgcgctgctggccacgctggtcggagcagtcggcacctggctggtctaccggacgacgcgcggggttgccgaaaagcgtacggaacgcggtttccggcgcggccagatcggctcggcgtcgctggtctcgctggcgcacggcaccaacgacgcgcagaagacgatgggcgtgatcttcctggcgttgatgtcctacggcgcggtcagcacgacggcatcggtgccgccgctgtgggtgatcgtgagttgcgccgtggccatggccgccggtacctacctgggtggctggcgcatcatccgcaccctaggcaaagggctggtcgagatcaaaccaccgcagggtatggccgccgagtcgtcatcggccgccgtcattctgttgtccgcgcacttcggctatgcgctgtccacaacgcaggtcgcgaccgggtccgtgctgggcagcggcgtcggcaagcccggcgccgaggtgcgctggggggtagccggccgcatggtggtcgcgtggctggtgacgctcccgttggccgggctggtcggggccttcacctacgggctggtgcatttcatcggtggctaccccggtgcgatcctcggtttcgcactgttgtggctgaccgccaccgccatctggctgcggtcgcgcagggcgccgatcgaccacaccaacgtcaacgccgactgggaaggcaacctgacggccggcctggaagcgggtgcgcagccgcttgcggatcagaggccgccggtgcctgcaccgccggctccgactcccccaccgaaccaccgagcaccacagttcggcgtcaccacgaggaacgccccg

SEQ ID NO: 26576 - DNA, 807 bp, Mycobacterium bovis
atgacggagatcgccacgaccagcggcgccaggagcgtcgggctgctcagtgtcggggcgtaccggcccgaacgcgtggtcaccaacgacgagatatgccagcacatcgactcgtccgacgagtggatctacacccgaaccggcatcaagacccgccgattcgccgccgacgacgagtcggcggcttccatggcgactgaggcctgtcgacgggcactgtcgaacgccggcctgtcggcggccgacatcgatggcgtgatcgtcaccaccaacacccatttcctgcaaaccccgccggccgccccaatggtcgcggcgtcgctgggcgccaagggcatactcgggttcgatctttcggcggggtgcgccggattcggatatgcgcttggcgcagcggccgacatgatccggggcggaggtgcggccacgatgctggtggtcggcacggaaaaactgtcccccacgatagacatgtacgaccgcggcaactgcttcatcttcgccgacggcgcggccgcagtggtggtgggcgagacaccgtttcaaggcattggaccaaccgtggcgggtagcgacggcgaacaggccgatgccatacggcaggacatcgactggatcactttcgcccagaatcccagcggcccacgcccgtttgtgcggctcgaaggtcccgcggtcttccgttgggcagcgttcaaaatgggcgacgtcggtcggcgcgcgatggacgccgccggggtgcgacccgaccagatagacgtgttcgtccctcatcaggccaatagccgcatcaacgagctgctggtc

SEQ ID NO: 26577 - DNA, 4323 bp, Mycobacterium bovis
ccttcagcactgagccgattcagcgcgctcacccgagactggttcaccagcactttcgccgcgcccaccgccgcccaggccagcgcctgggcggccatcgcagacggcgacaacacgctggtcatcgctcccaccggatccgggaagaccctggcggcgttcctgtgggccctggatagcttggccggttcggaacctatgtccgagcggccggcggccacccgcgtgctgtatgtgtcgccgctcaaagcgttggccgtcgacgtcgagcgcaacctgcgcactccgctggccggactgacccgactcgccgaacgccagggtctgcccgcgccccagatcagggtgggcgtccgttcgggcgacaccccgcccgcacttcgccgccagctcgtcagccagccgcccgacgtgctgatcaccaccccggagtcattgtttttgatgctcacttcggccgcacgccaaactctgaccggtgtgcagaccgtcatcatcgacgaaattcatgccatcgccgccaccaagcgcggcgcacacctggcactatccctagaacggctcgacgacctgtctagccggcgacgggcgcagcgcatcgggctgtcggcgaccgtacgtcctcccgaggaactcgcaaggttcctgtccggacagtccccgacgaccattgtggcgcccccggccgccaagaccgttgagctgtccgtgcaggtgccggtgcccgacatggccaacttgaccgacaacaccatctggccggatgtggaggctcggctggtcgacctgatcgaatcacacaactcgaccatcgtgttcgccaattcgcgacgattggccgagcgacttaccgcacggctcaacgaaattcacgccgcgcgctgcgggattgagctcgcgccagacaccaaccagcaggttgccggcggcgccccggcgcacatcatgggctcgggccagacgttcggagcgccgccggtgctggcccgcgcccaccatggctcgatcagcaaggagcagcgcgccgttgtcgaagaggacctcaaacgcgggcaactcaaagcggtggtggcgacgtccagcctggagctgggcatcgacatgggcgcggtcgatctggtgatccaagtacaggcaccaccatcggtggccagcgggctgcagcgcattggccgggccggtcatcaggtcggcgagatttcgcggggggtgctgtttcccaagcatcgcaccgacctactcggctgcgcggtcagcgtgcagcgcatgcttgccggtgagatcgagaccatgcgggtgccggccaacccactcgacattctggcccagcacacggtggcggcggctgcgctggaaccgttggatgccgacgcgtggttcgacaccgtgcggcgggccgccccgttcgcgaccctgccgcgtagcctgttcgaggccaccctggacctgctgtccggcaagtacccatccaccgagttcgctgagctgcggccgcggctggtgtatgaccgcgataccggcacgctgaccgcgcgacccggagcccagcgactggccgtcacctccggcggcgccattcccgatcgcgggttgttcgccgtctacctcgctaccgagcggccgtcgcgggtaggcgaactcgacgaggaaatggtttacgagtcccgccccggtgacgtgatctcgctgggtgccaccagctggcgaatcaccgagatcacccacgaccgggtgctggtgatccccgcgccgggccagccggcccgattgccgttctggcgcggagacgatgccggccgccccgccgagctcggcgccgcactcggcgccctcaccggcgagctggccgccctggaccgtacggcattcggcacacgttgtgcgggtttgggtttcgacgactatgccaccgacaacctgtggcgactgctggacgaccaacgcaccgctaccgcagtggtacccaccgacagcacattgttggtcgagcggtttcgtgacgagctgggcgattggcgggtgatcttgcattcgccgtatgggctgcgggtgcacggaccgctcgcgctcgcagtcggccggcggctgcgcgaccgctatggcatcgacgagaagccgaccgcctccgacaacggcataatggtgcgcctaccggacaccgtgtccgctggcgaagacagcccgccgggtgccgaactgttcgttttcgacgccgacgagatcgacccgatcgtcaccaccgaagtggccggttcggcgctgttcgcgtcacggttccgggaatcggcggcccgcgctctgctgctgccccgccggcaccccggccgccgctcgccgctgtggcagcagcggcagcgcgccgcccggctgttggaagtggcccgcaaataccccgacttcccgattgtgctggagacggtccgcgagtgcctgcagaacgtctatgacgtcccgatcttggtcgagctgatggcgcggatcgcccagcggcgggtgcgtgtcgccgaagccgagaccgccaaaccttcgccatttgcggcatcgctgttgttcggctacgtcggcgccttcatgtacgagggcgatacgccgctggccgaacggcgcgccgccgcgctcgcgctggacggcacgttgctggccgagctgctaggccgggtggagctgcgcgagctgctcgatcctgacgtcatcgccgctaccagccgccagctccagcatctggcggccgaccgggtagcccgtgacgccgaaggggttgccgatctgctgcggctgctgggtccgctcaccgaagacgagatcgctgcccgggcgggcgcgcccgaggtcagcggctggctggacggcttacgcgccgccaaacgcgcgctcgtggtgtccttcgccggccgcagctggtgggttgccgtcgaggacatgggccggctgcgcgacggcgttggcgcggcggttccggtggggctgccggccagcttcaccgaggcggtagccgacccgctgggcgaactactgggccgctacgcacgcacccacacaccgttcaccaccgctgcggccgcagcccggttcggtcttgggctgcgggtgaccgccgacgtgctgggccggctggccagcgatggccggctggtgcgcggcgaattcgtggccgcggccgaaggatccgccggcggcgagcagtggtgtgacgccgaggtgttgcgaattctgcggcgccgctcgctggccgcactgagggcgcaggcagagccggtcagcaccgccgcctacggacgcttcctgccggcctggcagcacgtttccgcgggcaactcgggcatcgacgggctggccgcggtcatcgatcagctcgccggcgtccggataccggcctcggcgatcgaaccgctggtgcttgccccacggatccgcgattactcgccggcgatgctcgacgagctgctcgcgagcggggacgtcacctggtcgggcgccgggtcgatctcaggcagtgacggctggatcgccctgcaccccgccgactcggcgcccatgacgctggcggagccggccgagatcgacttcaccgacgcccaccgggcgatcttagccagcctgggcactggcggcgcgtacttcttccgccagttgacccacgacggcctgaccgaggcggaactcaaagccgctctgtgggaattgatttgggccggacgagtgaccggcgacacgttcgcaccggtacgcgcggtactcggcggggcgggcacccggaagcgtgctgctcccgcacacggcgggcatcgaccgccgcgcctgagccgataccgcctcacgcacgcccaggcccgcaacgctgacccgaccgtcgccgggcggtggtccgcgctgccgcttcccgaaccggactccacgctgcgcgcccattaccaagccgagctgctgttgaaccgccacggcgtgttgaccaaagacgcagttgctgccgagggtgtggcgggcgggttcgcgacgctctacaaggtgctcagtgcgttcgaggatgccggcaggtgccagcgtggctacttcatcgagtcgttggggggcgctcagttcgccgtcgcctcgaccgtagaccggctgcgtagctacctcgacggtgtcgaccccgaacagccggactaccacgcggtggtgctggccgctgccgacccggccaacccgtatggggcggcgttgccctggccagcgtcgagcgctgacggtaccgcccggccgggccgcaaagccggcgcactggtcgttctggtggacggcgagttggcctggttcctcgagcgcggcgggcggtcgttgctg

SEQ ID NO: 26578 - DNA, 1504 bp, Mycobacterium bovis
ttcatagccgccatcgaccagggcaccaccagcacccgctgcatgatcttcgatcaccacggtgccgaggtggcccgccaccagctcgagcacgagcagatcctgccccgggccggctgggtggagcacaacccggtcgagatctgggagcgcaccgcgtcggtgttgatctcggtgctcaacgccaccaacctatcgccgaaagatattgccgcgttggggattaccaaccaacgtgagacgacgctggtatggaatcggcacaccggacggccctactacaacgcgattgtatggcaggatacccgcaccgaccgcatcgcgtcggcgctggatcgagacggtcgtggaaacctgatccgccgcaaggcgggcctgccgccggcaacttatttctctggcggcaagctgcagtggatcctggaaaatgtcgatggagtccgcgcggccgccgagaacggcgacgcattgttcggcacaccggacacctgggtgttgtggaatctgaccggcgggccgcggggggggtgtgcatgtcaccgatgtaaccaacgccagccggaccatgttgatggatctagagacgctggactgggacgacgagctgttgtcgttgttttcgatacctcgggccatgctgcccgagatcgcatcgtcggcgccgtcggagccttacggtgtcacgctggcgaccgggcctgtcggcggtgaggtgccgatcaccggagttctcgctgatcagcatgcggccatggtcggtcaagtctgtctggccccaggggaggcgaaaaacacctatgggaccggcaattttctgctgctgaacaccggtgaaacgatcgtgcgatcgaataacggcctgctaaccacggtgtgctaccaattcgggaacgctaaacccgtgtacgcgcttgaaggttcgatcgcggtgaccggctcggcggtgcagtggctacgcgatcagctgggcatcatcagcggcgccgcacagagtgaggcgctggcccgccaggtccccgacaacggcggcatgtatttcgtgccggcgttttccgggctgttcgcgccatactggcggtccgatgcgcgcggcgcgatcgtcgggttgtcgcggttcaacaccaacgcgcacctggcgcgcgcaacgctggaggcgatctgctaccagagccgcgatgtggtggacgccatggaagcagactccggtgttcgcctgcaggtgttgaaggtggatggcgggatcaccggcaacgacctgtgtatgcagatccaggccgacgtgttgggtgtggatgtggtgcggccggtggtcgccgagaccaccgcactaggtgcggcctacgcggcgggcttggcggtcgggttctgggcggctccgtccgatctgcgggccaactggcgagaggacaagcggtggacaccgacgtgggacgacgacgagcgtgccgcgggttatgccggctggcgcaaggcggtgcagcggaccctggattgggttgacgtg

SEQ ID NO: 26579 - DNA, 1071 bp, Mycobacterium bovis
gtgagcttgagcctggggatcgtgggcctgcccaacgtcggcaagtcgacacttttcaacgcgctgacccgaaacaacgtggtcgcggccaactacccgttcgcgacgatcgaaccgaacgaaggtgtcgtctccctgcccgatccccgcctggacaagcttgctgagcttttcggatcgcagcgagtcgtacccgcgccggtcaccttcgtggatatcgccggcctgatcaagggggcgtccgagggagccgggctgggtaacaagttcctggctcatatccgcgaatgcgacgccatttgtcaggtggtgcgggtgttcgtcgacgacgacgtgactcatgtcaccggacgggtcgatccccagtccgacattgaggtcgtcgagaccgagctgatcctggcagatctgcaaaccctggagcgggccacgggccggctggagaaggaagcgcgcaccaacaaggcgcgcaagccggtctacgacgcggcactgcgtgcccagcaggtgctcgacgccggcaagacgctgttcgccgcgggggtggatgccgccgcgttgcgcgagctgaacctgctgaccaccaagcccttcctgtatgtgttcaacgccgacgaggcggtgctcaccgacccggcgcgagtcggtgagctgcgcgcgttggtggcgcccgccgatgcggtgttcctggacgccgccatcgagtcggagttgaccgaactggacgacgagtcggccgcggagctgctggagtccatcgggcagagcgagcgcgggctggacgcgctggcccgggcgggttttcacaccctgaagttgcagacctttttgaccgcgggccccaaggaagcgcgggcgtggaccatccatcaaggcgacaccgcgccgaaggcggccggggtgatccacagcgacttcgagaagggtttcatcaaggccgagatcgtgtcctacgacgacctggtggccgcgggttcgatggcggcggccaaggcggccggcaaggtccggatcgaaggcaaggactacgtgatggccgacggtgacgtagtggagttccgattcaacgtg

SEQ ID NO: 26580 - DNA, 1911 bp, Mycobacterium bovis
atgggtgcaaccggtgggactcagctgagtttcgccgacctggcacacgcccagggggcagcctggaccccagccgacgagatgtccctgcgcgagaccaccttcgtcgtggtcgacctggaaaccacaggtgggcgcacgacgggtaacgacgcaacaccgccggacgcgatcaccgaaatcggggcggtcaaggtatgcggcggcgcggtgctcggtgaattcgccaccctggtaaacccgcaacacagcattccgccccagatcgtgcggctcaccggtatcactacggcgatggtgggtaatgccccgacgatcgacgccgtcctgccgatgttcttcgagttcgccggcgactcggtgctcgtggcccacaacgctgggttcgatatcggattcctgcgcgccgtcgcgaggcggtgcgatatcacctgtgcccaaccacaggtgttgtgcacgatgcggctggtccggcgggtgctgagccgagacgaagcccctagcgtgcgtctggccgcgctagcgcggctgttcgccgtcgccagcaaccccacccaccgcgccctcgacgacgctcgcgccaccgtcgacgtgctgcacgcactcatcgagcgagtgggcaaccagggcgtgcacacctatgccgagctgcgctcgtatctgcccaacgtgacccaggcgcagcgctgcaaacgggtactggcggaaacactgccgcaccggccgggggtgtacctgttccgcggaccgtcgggcgaggtgctctatgtcggcaccgcggcggacttgcgccgccgggtaagccagtacttcaacggcaccgaccgccgcaagcggatgacggagatggtcatgctggccagctcgatcgatcatgtcgaatgcgcgcaccccctggaggccggtgtccgtgagctgcggatgctgtcgacgcatgcaccgccgtataaccgcaggtcgaagttcccataccggtggtggtgggtggcgctcaccgatgaagcatttccacgcctgtcggtcatccgggccccgcgacacgaccgcgtcgtcggcccgttccgatcccgctccaaggccgccgagacgacggcgctgctggcacgctgcacgggactgcgaacctgcaccactcggctgacacgttccgcccggcacggacccgcctgccccgagctggaagtgtcggcctgcccggccgcccgcgacgtcacggccgcgcaatacgccgaggcggtactgcgcgcggcggccttgatcggcggattggacaacgccgcgctggccgcggccgttcaacaggtcactgagctcgccgagcgccgtcgctatgagagcgctgcccgactgcgtgaccacctcgccaccgccatcgaggcgttgtggcatggccaacgattgcgagcactggccgcgctgcccgagttgatcgccgccaagccggacggccccagggagggcggctaccaactggccgtcattcgccacggccaactcgccgctgccggcagggcaccgcgcggggttcctccgatgcctgtggtcgacgccatccgccgcggcgctcaggcgatcctgcctacgccggcaccgctcggcggggcactggtggaggagatcgcgctcatcgcccgctggctggccgagccgggagtgcgcatcgtcggggtctcgaacgacgccgcagggttggcctccccagtgcgctcggccggcccgtgggcagcgtgggcggcaacggcgcgctcggcccagttggccggcgagcagctcagcagaggttggcagtcagatctgccgaccgaaccgcacccatcgcgcgagcaactgttcggccgcaccggtgtcgattgccgcactggcccgccgcaacccctcctcccaggccggcagccattcagcacggctgga

SEQ ID NO: 26581 - DNA, 1179 bp, Mycobacterium bovis
atgaccgggccgctcgcggcggccaggtccgtcgctgccacgaaatcgatgaccgcgcccaccgttgatgagcggcccgacatcaaaaagggcctcgccggcgtggtggtggacaccaccgccatctccaaggtggtgccgcagaccaattcgttgacctaccggggatatccggtccaggatctggcagcccgctgcagtttcgagcaggtcgccttcctgctgtggcgtggtgagttgcccaccgatgccgagctggcgttgttcagccagcgcgaacgagccagccgtcgggtggaccgctcgatgctgtcattgctggccaagctgccggacaactgccacccgatggacgtggtgcgcaccgcgatcagctatctcggtgccgaggacccggacgaggacgacgccgcggccaaccgggccaaggcgatgcgcatgatggcggtgttgccgacgatcgtggcgatcgacatgcggcgccgacgcgggttgcccccgatcgcaccgcacagcgggctcggttatgcgcagaacttcctgcacatgtgcttcggggaggtacccgaaaccgccgtcgtgtcggcgttcgagcagtcgatgatcctctacgccgagcacggattcaacgcgtcgacgttcgccgcccgggtggtgacctcgacccaatccgacatctacagcgcggtgaccggcgcgatcggcgccctcaaggggcggctacacggcggcgccaacgaagccgtcatgcacgacatgatcgagatcggcgatccggccaacgcgcgggagtggttgcgcgccaagctcgcccgcaaggaaaagatcatgggcttcgggcatcgggtgtaccggcacggcgactcccgggtgccgaccatgaaacgggcgctggagcgcgtggggaccgttcgcgacggccagcgatggctggacatctaccaggtgttagcggccgagatggcgtcggccaccgggatcttgcccaacctcgattttccgaccgggcccgcgtactacctgatgggattcgacatcgccagcttcaccccgatcttcgtgatgagtaggatcaccggctggaccgcacacatcatggaacaggccacggccaacgcgctgatccggccgctgagcgcatattgcgggcacgagcagcgggtgttaccgggcaccttc

SEQ ID NO: 26582 - DNA, 2913 bp, Mycobacterium bovis
ttgggcgtgaccgaatcgccaaccgctgggcctggcggcgtgccccgtgccgacgacgcggactccgacgtgccacggtaccgctataccgccgagctcgcggctaggctggaacggacctggcaggaaaactgggcccggctagggacgttcaacgtgcccaacccggtcggctcgctggccccaccggatggtgccgcggtgcctgacgacaagctcttcgtgcaggacatgttcccctacccctcgggtgagggactccacgttggtcatcccctcggctacatcgcgaccgacgtctatgcccgctatttccggatggtgggccgtaatgtgctgcatgcgctagggttcgacgcgttcgggctgcccgccgagcaatacgcggtgcaaaccggcacccatccgcgtacccggaccgaagccaacgtcgtcaactttcgccgccagttgggccggctgggcttcggccacgacagccgacgaagcttctcgaccaccgatgtcgacttctacaggtggactcagtggatcttcctacagatatacaacgcgtggttcgacaccacagccaacaaggcgcgcccgatatcagagctggtcgccgaattcgagtccggtgcaaggtgtctcgatggcggccgggattgggccaagttgaccgcgggggagcgagccgatgtgatcgacgagtaccggctggtctatcgggcggattcgctggtgaactggtgcccggggctaggtacggtgcttgccaacgaagaggtgaccgccgacggccgcagcgaccggggcaattttccggtgttccggaagcggttgcggcaatggatgatgcggatcaccgcctatgccgaccggctgctcgacgacctggatgtgctggattggcctgagcaggtcaagaccatgcagcgcaactggatcgggcgttcgacgggtgcggtggcgctgttctcggcgagagcggccagcgatgacgggttcgaagtcgacatcgaggtgttcaccacgcggcccgacaccttgttcggcgccacgtatctggtgctggctcccgagcacgacttggtcgacgagttggtcgccgcgtcctggccggctggggtcaaccccttgtggacatacggcggcggcacacctggtgaggccatcgccgcctaccggcgtgcgatcgccgccaaatcagacctcgagcgccaggagagcagggaaaagaccggcgtcttcttgggcagctacgccatcaacccggccaacggtgagccggtgccgatcttcatcgccgactacgtgctggccgggtacggtaccggggcaatcatggcggtgccgggtcatgaccagcgggactgggacttcgctcgggcatttggtctaccgatcgtggaagtaattgccggcggcaatatttcggaatccgcgtatacaggcgatggcatcctggtcaactcggattacctcaatggaatgagcgtgccagcagcaaagcgggccatcgtcgaccggttggagtccgcgggccgcggccgggctcgaatcgaattcaaattgcgcgactggctttttgcgcggcagcggtattggggtgaaccattcccgatcgtctatgacagcgacgggcgtccgcatgcactcgacgaagctgcactgcccgtcgagctgcctgatgtcccggactactcgccggttttgttcgaccccgacgatgcggacagcgagccttcgcccccactggccaaggcgactgagtgggtacacgtcgacctggacctcggtgatggcctgaagccctacagccgcgacaccaacgtgatgccgcagtgggcgggcagctcctggtatgaactgcgctacaccgatccgcacaactcagaacggttctgcgccaaggaaaacgaggcctattggatgggaccgcggccggctgagcacggcccggacgaccccggtggcgtcgacttgtacgtcggcggtgctgaacacgcggttttgcacctgctgtattccaggttctggcacaaggtcttgtacgacctgggtcacgtcagctctcgcgagccttaccgcaggctggtcaatcagggctatattcaagcttacgcttacaccgatgcgcgcggatcctatgtccctgccgagcaggtgatcgaacgcggtgacagatttgtctatcctggacctgacggtgaggtcgaagttttccaggaattcggcaaaatcggtaagagcctgaagaattcggtatcgccggacgaaatctgcgacgcatacggggcagatacgcttcgggtttacgagatgtcgatggggccgctggaggcttcacgtccatgggccacaaaggatgttgtcggcgcgtaccgttttctgcagcgggtgtggcgcttggtcgtcgacgagcacaccggcgaaactcgggtggctgacggcgtggaactcgacatcgatacgctacgggcgttgcaccgcaccatcgtcggcgtgtcagaagactttgcggcacttcgcaataacaccgcaacggctaagttgatcgaatacacgaaccacctcaccaagaagcatcgtgatgcggtgcctcgggccgccgtggagccgcttgtacaaatgctggctccgctggccccacatattgccgaggagctgtggctgcgactgggcaacaccacctcgttggcacacggcccgttcccgaaggccgatgccgcctacctcgtcgacgagacggtcgagtatccggtgcaggtgaacggcaaggtacgtggccgggtggtggtggccgccgacaccgacgaggaaacgctgaaagccgccgttctgaccgacgaaaaggtccaggcattcttggctggtgccaccccgcgcaaggttatcgtggtcgccggccggctggtcaatctcgtcatc

SEQ ID NO: 26583 - DNA, 1155 bp, Mycobacterium bovis
gtggaggtttcgagggcgctgttgtttgagctcggcgtcctgttggcggtgcttgcggtgctgggtgcagtggcacgacgattcgcgttgtcgccgattccggtgtatttgttggcgggtttgtcgttaggcaatggcggcatcttgggggtggccgccgccggtgagttcatcgctaccggtgcgcccatcggtgtcgtgttgttgcttttggccctgggtctggagttttctgcgaccgagttcgccagcagtctgcgccaccacctgccgtcggcgggtgtcgatatcgtcctcaacgccacgcccggtgcggtggcgggctggcttttggggttggacggtgttgccatcctcggtctggccggggtcacctacatttcctcctcgggtgtgatcgcgcggctgttggaggacctgcgtcggctcggcaaccgggaaacgccggctgtgctgtcggtgctggtgctcgaagacttcgcgatggcggcctacttgccgctgttcgcggttctcgcgacagacggcagctggctcgaggcggtcgtgggcatgacggtggcgatcgccgctttgcttggggcgttcgcggcgtcgtatcgttggggtcatcatgtcggccggttggtgactcatcctgattccgaacaattgttgttgcgggtgctgggcatcaccttgatcgtggcggcggtggccgagtcgctgcacgcgtcggcggctgtgggtgcgtttctggtaggcctcacgcttaccggggagaccgcagaccgggcacgcatggtgctgactccgctgcgtgacttgttcgccacgatcttcttcctgggaatcggcctgtcggttgacccgggaaagctcgtttcaatgcttccggtagcgctggccctggccgctgtcaccgcagcgaccaaggtggccaccgggatgttcgctgcccggcgggagggagtggcacggcgtgggcagctgcgtgctggcaccgcgctcgttgcccggggggagttttctttgatcatcatcgggctggccggtgcctcgatcccgggggttgccgccttggccacggcgtatgtgttcgtcatggcgatcgtcggtccgatactggcccgctacaccggcggtgggctgccggccgccgcagtagcttcgaac

SEQ ID NO: 26584 - DNA, 456 bp, Mycobacterium bovis
atgaagctcattctcacggccgatgtcgatcacctcgggtccatcggcgacactgtcgaggtcaaggacgggtatggccgtaactttctgctcccgcgcggcctggcgatcgtcgcctcgcgcggagcccagaagcaggctgacgagatccgccgggcccgcgaaaccaaaagcgtacgcgacctagagcacgccaacgagatcaaggcggcgatcgaggcgctcggcccgatagcgctgccggtgaagacttcagctgattctgggaagttgttcggctcggtgaccgccgcagatgtggttgctgccatcaagaaggccggtggaccaaacctcgataagcggatcgttcggctgcccaagacgcacatcaaggccgtgggcacgcattttgtgtcggtgcacctgcacccggaaatcgatgtcgaggtatcgctggacgtcgtggcgcagagc

SEQ ID NO: 26585 - DNA, 7536 bp, Mycobacterium bovis
gtgcaccgagttcggttaagccgctcgcagcgcaacctctacaacggcgtgcgccaggataacaatcccgcgttatatctgatcggcaagagctatcggttccgccggttggagctggcgagattcctggccgctctgcacgcaacggtactggacaaccccgtgcaactttgcgtcctggagaattcgggggcagactatccggatctggtgccgcggctacggttcggcgacatcgtgcgggtggggtcagccgatgagcacctgcagagcacatggtgttcgggcatcctgggcaagccactggtgcggcatacggtgcacaccgacccgaacgggtatgtgaccggtctggacgttcacacccaccacatcctgctggacggcggcgcgaccgggacgatcgaagctgacctggcgcgttacctgaccaccgacccggcgggcgaaacccccagtgtcggtgcgggtctagccaagctcagggaggcgcaccgtcgtgagacggccaaggtggaagaatcgcgggggcgcctgtcggctgtcgtgcagcgtgaactcgccgacgaagcataccacggcgggcacgggcacagcgttagcgacgctcccgggaccgcggccaagggcgtcctgcacgaatcggcaacgatctgcggcaacgcgtttgatgccatcctgaccctttcggaagcgcagcgggtcccgcttaatgtgctggtggctgcggcggccgtcgcggtggacgcgagccttcggcagaacaccgaaaccctcttggtgcacacggtggacaaccggttcggagattctgatctgaatgtcgcgacctgtttggtcaattcggttgcccagaccgtccggtttcccccatttgcgtcggtgtccgatgtcgttcgaacgcttgaccgcggctatgtcaaggcggtaagacgccggtggcttcgtgaggagcattaccgccgaatgtatttggcgatcaaccggacatctcacgtggaggcgttgacgctaaatttcattcgcgagccatgcgcacctggcctgcgcccgttcttgtcggaggtcccgattgccacggatatcggtccggtcgagggcatgacggtggcgtctgttctggacgaagaacagcgcacactgaacctagccatctggaaccgagccgatctgcccgcgtgcaagacacaccccaaggtcgcggaacggatagcggcagcgttggaatcgatggcggcgatgtgggatcggccgatcgccatgatcgtcaacgactggttcgggatcggcccggacgggactcgctgccaaggcgattggccagcccgtcagccgtcgacgcccgcgtggtttctcgattccgcaaggggcgtccaccaatttctcggcaggcgccgcttcgtctacccgtgggtcgcgtggttggtgcaacgcggcgccgcaccgggtgatgttctggtgttcaccgacgacgacaccgacaagaccattgacctgctcatcgcgtgtcaccttgcgggttgcgggtacagcgtctgcgacaccgctgacgaaatttccgtgcggaccaatgcgattaccgagcacggcgatggcatcttggtgacagtggtcgacgtggccgccacccagctggcggttgtcggccatgacgagctgcggaaggtcgttgacgagcgcgtcacacaggtgacacacgacgcactgctggccaccaagaccgcctacatcatgccgacctcgggaactaccggacaacccaagctggtgcgaatctcacacggctcgctcgcggttttctgtgatgcgatcagccgcgcctacggttggggagcccacgacaccgttctgcagtgcgctccgttgacatcggacatcagcgtcgaggagattttcggtggcgcggcctgtggcgcgcgactggtgcgatccgcggctatgaaaaccggcgacctggcggcgctggttgacgatctcgtcgcccgcgagacgacaatcgtcgacctgccgaccgccgtctggcagctgttgtgcgccgacggcgacgccattgacgcgatcggccgctcgcgcctgcggcagatcgtaatcggcggtgaagccatccgctgtagcgccgtggacaagtggcttgaatcggctgcttcacaagggatctcgctgctctcgagctatggtccaacagaagccacggtcgtcgccaccttcttgccgatcgtttgcgaccagaccaccatggacggcgcactgctcaggctcggccggccgatcctaccgaacacggtgttcctcgcgttcggtgaagtcgtcattgtcggggatttagtcgccgacggctacctcgggatcgacggcgacggcttcggcaccgtgacggccgcagacggttcccgacgccgtgcctttgccactggcgaccgggtgaccgtcgacgccgaaggatttccggtcttctccggacgcaaagacgccgtcgtcaagatctccggcaagcgtgtcgatatcgctgaggtaaccaggcgcatcgccgaagaccccgcggtgtcagatgtcgccgtcgagttgcacagcggaagcctcggagtgtggttcaagagccaacggacccgcgagggcgaacaagacgctgccgcggcgacccggatcaggctcgtcctcgtgagtctgggagtgtcgtcgtttttcgttgtcggcgtgccgaatatcccgaggaagcccaacgggaagatcgacagcgacaacctgccgaggctgcctcagtggtcagctgctgggctaaacaccgccgagacgggtcagcgagcggccggcctctcgcagatctggagccggcagctcggccgggcaatcgggccggactcgtcgctgcttggtgagggcatcggctcgttggatctcatcagaatactgcccgagacgcgtaggtatctggggtggcgcctctcgctgctggatctgatcggtgccgataccgccgccaatctggccgattacgcgccaacgcccgacgcgccgacgggcgaagatcggtttaggccgctggtggccgcgcaacggcccgcggcgattccgttgtcgtttgcccagcggcgactatggtttctcgaccagttacagcgacccgctccggtctacaacatggcggtggcgttgcggctgcgcgggtatctcgataccgaggcgttgggcgcggcggtcgccgatgtcgtgggccgccacgaaagcctacggacggtgtttccggcggtcgacggggtccctcggcagctggtcatcgaagcgcggcgggcagatcttggctgcgacatcgtcgatgccaccgcatggccggctgaccggctgcaacgggccatcgaggaggcggcgcgccacagcttcgatttggcaaccgagatacctttgcggacgtggcttttccggatcgccgacgacgaacatgtgctggtggcggttgcacaccatatcgccgccgacggctggtcggtggctccgctgacggccgatctgagtgcggcatatgccagccgttgtgcgggtcgggcaccggactgggcgccattgccagtgcagtatgtcgattacacgctgtggcagcgggaaatcctcggtgatctcgacgacagcgacagcccgatcgccgcgcagctggcctactgggaaaatgcgttggccggtatgccggaacggctgcggctgcccaccgctcggccctatccaccggttgccgatcagcgcggcgccagtttggtggtggattggccggcgtcggtgcaacagcaggtgcgtcggatcgcccgccagcacaacgcgaccagcttcatggtggtagctgccgggcttgccgtgctgctgtcgaaactcagcggaagccccgatgtggcggtcggatttcccatcgccggccgcagcgatcctgcgctggataacttggtgggcttttttgtcaacaccttggtgttgcgggtcaacctggccggtgatcccagcttcgccgaactgctggggcaggtgcgagcgcgcagcctggccgcctacgaaaatcaagacgtacctttcgaggtgctcgttgatcgcctcaaacccactcgagccctgacccatcacccgctgatccaggtgatgttggcctggcaggacaatccggttggacagctgaatttgggtgatctgcaggccaccccgatgccgatcgacacccgcaccgcccgcatggacttggtgttttcgttagcggaacgcttcagcgagggtagcgaacctgccgggatcggcggagcggtggaataccgcaccgatgtgtttgaagcccaagcaatcgacgtgcttatcgagcggttgcggaaggtgttggtggcggtggccgctgctccggaacggacggtgtcgtcgatcgatgcgctggatgggaccgagcgtgcccggttggatgagtggggtaaccgcgctgtgctgactgcgcccgcgcccacgccggtgtcgatcccgcagatgttggccgcccaggtggcacgtatccccgaagcggaggcggtgtgttgcggggacgcgtcgatgacgtatcgggaactcgacgaggcgtccaaccggttagcgcatcggctggcaggttgtggggccggcccgggcgagtgtgtggcgctgctgttcgagcggtgcgcgccggcggtcgtggcgatggtggcagtgctcaaaaccggggcggcgtatctgccgatcgatccggcgaatcctccgccgcgggtggcgttcatgctcggcgacgcggtgcccgtggccgcggtcaccacggctgggctgcgctcccggttggcgggacacgacttgccgatcatcgatgtcgtcgatgctttagcggcatatccgggcacgcccccacccatgccggccgcagtgaacctcgcctacatcctgtacacctcgggcactaccggcgagcccaaaggcgtggggatcacccatcgcaacgtcaccaggctgttcgcatcactgccggcacgcttgtcggcggcgcaggtgtggtcgcagtgtcattcctatggcttcgacgcctcggcgtgggagatctggggcgcgttgctaggtggtgggcgactggtgatcgtgcccgagtcggtggcggcctcgccgaacgactttcatgggctgctcgtggccgaacacgtcagcgtgctgactcagactccggctgcggtggcaatgttgccgacgcagggtttggagtcggtggcgttggtggtggccggtgaggcatgtccggcagcgctggtggatcggtgggcgcccgggcgggtgatgctaaatgcttatggcccaaccgagaccacgatctgtgcggcgataagtgcgccgttgcgaccgggttcggggatgccgccgattggtgttccggtgtcgggggcggcgttgtttgtgctggatagctggttgcgcccggtaccggccggggtggccggagagttgtacattgccggtgcgggcgtcggtgttgggtattggcgtcgggcggggctgaccgcgtcacggtttgtggcctgcccattcggcggttccggggcacgcatgtatcgcaccggggatctggtgtgttggcgcgccgatggccagttggagttcctggggcgcaccgacgatcaggtcaagatccgcgggtatcgcatcgagctcggcgaggttgcgaccgcgctggccgagctggctggggtaggtcaagcggttgtaatcgcccgtgaagaccgccctggggacaagcgcctagtcgggtatgccaccgaaattgcccccggggcagtggacccggccgggctgcgggcgcaactagcccagcgattgcccggttacctggtgccagccgcggtggtagtgatcgatgcgcttccgttgacggtcaacggcaaacttgatcatcgtgcgttgccggcaccggaatacggtgataccaacggatatcgcgctccggccgggccggttgagaagaccgtggccggcatctttgcccgggtgcttgggcttgagcgggtcggcgtcgacgactcgttcttcgagctcggcggcgattcgctggcggcaatgcgggttatcgccgcgatcaacaccaccctaaacgccgatctgccggtgcgcgcgttgctgcacgcgtcgtcgacgagaggtttaagccagctgttggggcgagatgcccgaccgaccagcgatccgcgcttggtgtctgtgcacggcgacaaccccaccgaggtgcatgccagcgacctcacgctggaccggttcatcgacgccgacacgctggccaccgccgtcaacctgccgggcccgagccccgagctacggacggtcctgctgacgggcgcgacgggtttcctcggacggtatctggtccttgaattgctgcggcggctggacgtcgacggcaggctgatctgtttggtgcgggcggagtccgacgaggatgcgcggcgtcgtctggagaagaccttcgatagcggtgacccggaattgctgcggcacttcaaggagcttgccgccgaccggctggaggtcgtcgcaggcgacaagagcgaacccgacctgggcctggaccaaccgatgtggcggcggctggccgaaaccgtggatttgattgtcgattccgcggcgatggtcaacgcgtttccctaccacgaattgttcgggcccaacgtcgcgggcaccgccgagctgatccgaatcgcgcttaccaccaagctcaaacccttcacctacgtgtcaaccgccgacgtgggtgctgcgatcgagccgtcggcgttcaccgaggacgccgacatccgggtaatcagccccacccgcaccgtcgacggcggctgggctggcggctacggcaccagcaagtgggccggtgaggtgctgctgcgcgaggccaacgacctgtgcgcgctgccggtcgcggtgtttcgctgcgggatgatcctggccgacaccagctatgccggacagctcaacatgtcggactgggtcacccggatggtgttgagcttgatggctaccggcatcgcgcctcgttcgttctacgaaccggactccgagggcaatcggcaacgcgcgcacttcgacgggctgccagtcaccttcgttgccgaggcgatcgcggtgctgggcgcgcgggtggccggctcatcgttggcgggatttgcgacctatcacgtgatgaacccgcacgacgacggtatcgggctcgatgagtatgtggactggctgattgaggccggctacccgatacgccgcatcgatgactttgcggagtggttgcagcggtttgaggccagcctgggcgctctgccggatcggcaacgccggcactcggtgctgccgatgctgctggcgagcaattcccagcgattgcagccgcttaagccgaccagggggtgctccgcgccgaccgaccgattccgtgccgcggtgcgagcggcgaaagtcggctccgacaaggacaatccagacatcccgcacgtgtcggcgccgaccatcatcaactacgtcaccaacctacaactgctcggactgctg

SEQ ID NO: 26586 - DNA, 858 bp, Mycobacterium bovis
gtgagcgatgcgatccagcgggtaggggttgtcggggccgggcagatggggtccggcatcgccgaggtctcggctcgcgccggcgtcgaagtgacggtgttcgagccggccgaggcgttgatcaccgcgggacgcaaccgcatcgtgaagtcgctggagcgggccgtcagcgccggcaaggtaaccgagcgcgagcgtgaccgcgccctcggcctgttgaccttcaccaccgacctcaacgacctatccgataggcaactggtgatcgaggccgttgtcgaggacgaggccgtcaagtccgagatcttcgccgagctcgaccgggtcgtcaccgatccggacgcggtgctggcgtcgaatacctccagcatcccgatcatgaaggtcgccgcggccaccaagcagccgcaacgggttcttggcctgcatttcttcaatccggtcccggtgctgccgctggtcgagttggtgcgcacgctggtcaccgacgaagccgccgccgcgcgcacggaggagtttgccagtactgtgctgggcaaacaggtcgtgcgttgctccgaccgctccggattcgtggtcaatgcgctcctggtgccgtatttgctgtcggcgattcggatggtcgaggccgggtttgccaccgtcgaagatgtcgacaaggccgttgttgcggggttatcgcacccgatgggtccgctgcggctttccgatcttgtcggcctagacaccctcaagctgatcgcggacaagatgttcgaagaattcaaagaaccgcactacgggccccctccgctgttgctgcgtatggttgaggcgggccagttgggaaagaaatcgggtcgaggtttctacacgtac

SEQ ID NO: 26587 - DNA, 111 bp, Mycobacterium bovis
gtgaaggtaaacccgagcgtcaagccgatctgtgacaagtgcaggctgatccgtcggcacgggcgggttatggtgatctgttccgatccgcgtcacaaacaaaggcagggc

SEQ ID NO: 26588 - DNA, 1173 bp, Mycobacterium bovis
gtgaaaccacaccttcgggggcgcgcggtaggggtgatcccacgaatcccacggcaaataggtctgagtctttcccgccaccaaaccccaattgaacgcaccaacgttgtgccgcttagcaatcggcaggattccctcgacagtgctgccttgggaccgcgccaggtactcggtgcacaggattggccgctgcaacggagcgagctcagcgatgcggccctcgaattcggccggcgcggcgtaactgtggaaggtgatcacgtcggcgttgtcgagttgaatggcgctgatggtgctgcggcgtccgggatctccccaattcccttgccagacaccactggtcagcggttgaaccggatcgaccgtgcgggcccatcggaacacttgggggaggagctccgcgacgcgctcgagcttgtctttcctttccaccttgcgatacacgcgcgcgggattgtcgggttcattccacaggtcccaacccaacacgcgatcgtcgttgcggaattggcccaacacacccgtgacgtagttgtacagcgtgctggcatagcggcggtcatcgaggcgttcagcacccggactttgcacccacccggagttgtgcaccccagcccttggcgcccgctgccgacccggtctggggagcgggtcccagcaggagtcgaacaggacaaagagcggtttgatgtggtatcgcgccgcgatggcgacgaactgcgcgagccgggtttggaaaccgggcgcgtcttgggcccacagcaggtcgtggaggaagactcgcacggtgttgaacccgtgaaaccgcgcaaggcccagctcgttgtcgatgcgccggggatcgtatgtgcctggctggaacatctcgagctggttgatggcgttcgaggtgatgtagtttgcaccgacgagccagccgtgcgcttgataccagcgatgtgcgcggtcggccgaccaccggcctggttctccggcggcggcccgcggcgcttggcccagcaccgtgcctgccgccagcagcagcgggagcttcagggccgttcgacggtgcacaaaatgacgatagtttcccggccaaggtgtacggccttgttcggcgacgtggttcggcttgcattatcgattcgcaacaatttgaggttgggaatcgttatgaggacgccagcttggctt

SEQ ID NO: 26589 - DNA, 1206 bp, Mycobacterium bovis
atggacgcggctacgacaagagttggcctcaccgacttgacgtttcgtttgctacgagagtctttcgccgatgcggtgtcgtgggtggctaaaaatctgccagccaggcccgcggtgccggtgctctccggcgtgttgttgaccggctcggacaacggtctgacgatttccggattcgactacgaggtttccgccgaggcccaggttggcgctgaaattgtttctcctggaagcgttttagtttctggccgattgttgtccgatattacccgggcgttgcctaacaagcccgtaggcgttcatgtcgaaggtaaccgggtcgcattgacctgcggtaacgccaggttttcgctaccgacgatgccagtcgaggattatccgacgctgccgacgctgccggaagagaccggattgttgcctgcggaattattcgccgaggcaatcagtcaggtcgctatcgccgccggccgggacgacacgctgcctatgttgaccggcatccgggtcgaaatcctcggtgagacggtggttttggccgctaccgacaggtttcgcctggctgttcgagaactgaagtggtcggcgtcgtcgccagatatcgaagcggctgtgctggtcccggccaagacgctggccgaggccgccaaagcgggcatcggcggctctgacgttcgtttgtcgttgggtactgggccgggggtgggcaaggatggcctgctcggtatcagtgggaacggcaagcgcagcaccacgcgacttcttgatgccgagttcccgaagtttcggcagttgctaccaaccgaacacaccgcggtggccaccatggacgtggccgagttgatcgaagcgatcaagctggttgcgttggtagctgatcggggcgcgcaggtgcgcatggagttcgctgatggcagcgtgcggctttctgcgggtgccgatgatgttggacgagccgaggaagatcttgttgttgactatgccggtgaaccattgacgattgcgtttaacccaacctatctaacggacggtttgagttcgttgcgctcggagcgagtgtctttcgggtttacgactgcgggtaagcctgccttgctacgtccggtgtccggggacgatcgccctgtggcgggtctgaatggcaacggtccgttcccggcggtgtcgacggactatgtctatctgttgatgccggttcggttgccgggc

SEQ ID NO: 26590 - DNA, 1320 bp, Mycobacterium bovis
gtggcccctgctgctaagaacacttcacagaccaggcggcgagtcgccgtactgggcggcaaccgcatcccgttcgccagatcggacggtgcctacgcggatgcgtccaaccaggacatgttcaccgcggcgctgagcggcttggtggaccgattcggactcgccggcgagcggctggacatggtggtgggcggtgcggtgctcaaacacagccgcgacttcaatctaatgcgcgaatgcgtgctgggctccgaactctcgccgtacacgccggcgttcgacctgcagcaggcctgcgggacgggcctgcaggccgcgatcgcggccgccgacggcattgccgccgggcggtatgaggtggccgccgctggcggggtggacaccacctcggacccgccgatcggcctgggcgacgacctgcgccgcaccctgctcaagctgcgccgatctaggtccaacgtgcaacgcctcaagctggtgggcacgctgccggccagcctgggcgtggagatccccgccaacagcgagccgcgcaccgggctgtcgatgggcgagcacgccgccgtcaccgccaagcagatgggcatcaaacgcgtagaccaggacgagctggccgccgccagccatcgcaatatggccgacgcctacgaccggggtttcttcgacgacctggtcagtccgtttttagggctgtaccgagacgacaatctgcggcctaactccagcgtcgagaaactggccacgctgcgtccggtcttcggagtgaaggccggtgacgcgacgatgacggccggcaattcgactccgctgaccgacggcgcctcggtggcattgctggccagcgaacagtgggcggaggcacactcgctggctccgctggcctatctcgtggatgccgagaccgccgcggtcgactatgtcaacggcaacgacggcctgttgatggcgccgacctacgcggtaccccggctgctggcccgtaacgggttgagcctgcaggacttcgacttctacgaaatccacgaggcgtttgcctccgtggtgctcgcgcatctggcggcgtgggagtccgaggagtactgcaagcggcggctgggcctggacgccgcgctggggtcgatcgatcggtccaagctcaacgtcaacgggtcgtcgttggccgccgggcaccccttcgcggcgaccggtgggcggattttggcgcagaccgccaagcagctcgccgagaagaaggcggcgaaaaaaggcggcggaccgctgcgcgggctgatttcgatctgcgcggccggcggccaaggtgtggccgcgattttggaggcc

SEQ ID NO: 26591 - DNA, 1389 bp, Mycobacterium bovis
atggcactcaccaccgccccggcaatcgattatgcgctgccacgccagcaggatgagggcgatcactggatcgacgactggcgcccggaagacccggtgttctgggagacgatcggcaggccgatcgcccgccgtaacctgatcttctccatcttcgccgagcacgtcggcttcagcgtgtggatgctgtggagcatcgtggttgtccagatgaccgccgccgctcccgggcaccccgccgcgtccggctgggcgctgtccgccagccaggccctatgtttggtcgccgtccccagcggtgtcggggcgttcctccggctgccgtacaccttcgcgatcccgatctttggtggccgcaactggacgaccgtctcggcggcgctgctggtgatcccgtgcctgctgctggcttgggcggtgagccacccttccctgccgttcgcggtgttggtggtgatcgcggccaccgccggtttcggtggcggcaactttgcctcatcgatggccaacatctcgttcttctacccggagaaggacaagggttgggcgctgggcctgaacgcggccggaggcaacatcggggtggcggtggtgcagaagatcattccgcccatcgtggtcgccggcagtggggtggcactgtcgcgtgccggactgttcttcgtgcccttggccgtcgccgccgcggtgtgcgcattcctgtttatgaacaacctcacggaggccaaggccgatgtgaagccggtgtggcagtcgctgcggcatgccgacacctggatcatgtcgctgctgtacatcggcacctttgggtcgttcatcgggtattcggcggccttcccgacgttgctcaagaccgtgtttggccgtggtgacatcgcgttgggttgggccttcctcggcgcgggcatcggttccctggtccgtccgctgggcggcaagctcgccgaccggatcggcggtgcgcggatcaccgcggccagtttcgtcatgctggcggccggggcggctgcggcgttgtggtcggtgcagtcggtcaatctgccggtgttcttcgtcagcttcatgttcttgttcgttgccaccggcatcggcaatggttcgagctaccggatgatctcgaggatcttccaggtcaaaggcgaagtcgccggcggggatccggaaacgatggtgaacatgcgccgacaggccgccggagcgctgggcatcatctcctcgatcggcgcgttcggcgggtttgtggtgccgctggcctacgcctggtcgaaggtgcacttcggcaatatcgaacccgccctgcacttctacgtggcgttcttccttgccctgctcgtcgtcacctggtactgctacttgcgtagaaccacccccatgggccaggtgggggtg

SEQ ID NO: 26592 - DNA, 2890 bp, Mycobacterium bovis
cgcgagatcgtcgtggtcggccacggcatggtgggccatcggctggtcgaagcggtgcgtgcccgtgacgcggacgggtcgctgcggatcacggtgctggccgaggagggcgatgcggcctatgaccgggtcggtctgacgtcctataccgaaagctgggaccgcgccctgttggccttgccgggtaacgattacgccggtgaccagcgggttcggttgctactaaacacccgagtcacccagattgaccgggcaaccaagtcggtggtcaccgcggcagggcaacggcatcgctacgacaccctggtgctggccaccggctcctacgcattcgtcccgccggtgcccggccacgacctgcccgcgtgccacgtctaccgcacctttgacgatctcgacgctatccgcgccggcgcccagcgcaccctggacggcggtcacaccgatggcggggtggttatcggtggcggcctgctgggcctggaagccgccaatgcgctgcgccagttcgggttgcagacacacgtcgtcgagatgatgccacgattgatggcccaacagatcgacgaggccgggggtgcactactggccaggatgatcgccgatctcgggatcgcggtgcacgtcgggaccggtaccgagtcgatcgagtcggtgaagcattcggatggctcggtgtgggcgcgggttcgcctgagcgacggcgaggtgatcgatgctggggtggtgatctttgccgccggcatccggccgcgcgacgagttggccagggcggcggggctggcgatcggcgaccggggcggtgtgctcaccgacttgtcatgccggacaagcgatcccgatatctacgcggtcggcgaagtcgccgcgatagacgggcggtgttacggcctggtcgggcccggatacaccagcgccgaggtggtggccgaccgactgctggacgggtcggccgagttccccgaagcggacctgtcgaccaaactcaagctgttgggtgtcgacgtcgccagcttcggcgacgcgatgggggcaaccgagaactgcctcgaggttgtcatcaatgacgcggtgaagcgcacatatgccaagttggtgctctccgacgacgccaccacgctgctcggtggcgtgctggtgggcgatgcctcgtcgtacggggtgctgcggccgatggtcggcgccgaactgcccggggatcccctggcgctgatcgcgccggccggatctggggccggcgctggcgctttaggtgttggggcgctgccggattcggcccagatctgctcgtgcaacaacgtcaccaagggcgagctgaagtgcgcgattgccgacggttgtggggacgttcccgcgctgaagtcatgcaccgcggccggcacgtcgtgtgggtcgtgcgtgccgctgctcaagcagctgctagaagccgagggtgtggagcagtccaaggcgctgtgcgagcacttcagccagtcgcgcgcggagctttttgaaatcatcaccgccaccgaagtccggactttctccgggttgcttgaccgctttggacgcggaaagggttgcgacatctgcaaacccgtggtcgcctctatcctggcatccaccggctccgaccacattttggacggcgagcaggcctcgctacaagattccaacgaccacttcctggccaacatccagaagaacggcagttactcggtggtgccgagggtgcctggcggtgacatcaagccagaacacctgattttgatcggccagatcgcacaggacttcggcctctacaccaagatcaccggcggtcagcggatcgacttgttcggcgcccgggtggatcagctgcccttgatctggcagcgactggttgatggcggcatggaatctgggcacgcctacggcaaggcggtgcggaccgtgaagagctgcgtgggcagcgactggtgccgctacggtcagcaggattcggtgcagctggccatcgacctggaactgcgttatcgcgggctacgggcaccgcacaagataaagctgggcgtctcgggttgcgcgcgggaatgcgccgaggcgcgcggcaaggatgtgggcgtgatcgccaccgagaaaggctggaacctttacgtcgccggcaacggcggcatgacgcccaagcacgctcaactactggccagcgacctcgacaaagagacgctcatccgctacatcgaccgctttctcatttactacatccgcacggccgaccggctgcagcgaaccgcgccatgggtggaatcgcttgggctggaccatgtgcgcgaggtggtctgcgaggactcgctgggtctggccgaggaattcgaggccgcgatgcaacgccatgtcgccaactacaagtgcgagtggaagggcgtgctggaggacccggacaagctgtcccggttcgtttccttcgtcaacgcccccgatgccgtcgactcgacggtgaccttcaccgagcgtgccgggcgcaaagtacctgtgtccattggtatcccgcgggtccgatcatgaagtccgggaggacaaaggagggactgtgacgcttctcaacgacattcaggtatggaccaccgcctgcgcatacgaccatctcattccgggacgtggtgtcggggtgttactcgatgacggtagtcaggtggcactgttccggctcgacgacggctcggtgcacgcggtcggtaacgtcgacccgttctccggtgctgcggtgatgtcccgcggcatcgtcggtgatcgcggaggtcgcgccatggtgcaatcgccgatcctgaagcaggctttcgcgctcgacgatggctcgtgcctcgacgatccgcgcgtttcggtgccggtgtatccggcgcgcgtcacacccgaaggccgcattcaggtcgcg

SEQ ID NO: 26593 - DNA, 1164 bp, Mycobacterium bovis
atggcttttccacgcacactggcgatactcgctgcggcagcagcgttggtggtggcctgcagccatggcggcacacccaccggatcgtcgacgacctccggcgcgtcgcccgcaactccggtagccgttcccgtgccccggagctgcgccgagccggcggggatcccggcgctgctgtccccccgtgacaagctggcccagctgctggtggtcggcgtgcgagatgctgcggacgcccaagccgtggtcaccaactaccacgtcggcggcatcctcatcggcagcgacaccgacctgacgatttttgacggcgcgctggccgagatcgttgccggcgggggtccgctgccgctggcggtgagtgtcgacgaggaaggcgggcggttgtcccggttgaggtcgctgatcggcggtacggggccgtcggcccgcgaactggcacaaacccgaaccgtccagcaggtgcgcgacttggctcgagaccgcggccggcagatgagaaagctgggtatcaccatcgacttcgccccggtggtcgacgtcaccgacgccccggatgacacggtgatcggggaccggtcgttcggctcggatccggctacggtcaccgcgtatgccggggcgtacgcgcagggtctgcgcgatgccggggtgctgccggtgctcaagcatttccccggtcacgggcgtggctcgggtgattcgcacaacgggggtgtcacgacaccaccgcttgatgacctggtgggcgatgacctggtgccctaccgaacgctggtgacccaggcgccggtcggtgtgatggtgggtcatctgcaggttcctgggttgaccggctccgagccggccagtctgagcaaggccgcggtgaacctgctgcgcaccggcacgggatacggcgcaccgccgttcgatggtccagtgttcagcgacgacctctctggtatggccgcgatctcagaccggtttggcgtcagcgaggcggtgttgcgcaccttgcaagccggtgccgatatcgcactgtgggttaccaccaaagaggtgcccgcggtgctggaccgcctggaacaggcgctgcgcgccggtgaattgccgatgtcggcggtcgaccggtcggtggtgcgggtggcgaccatgaaggggcccaacccggggtgtggccgt

SEQ ID NO: 26594 - DNA, 1224 bp, Mycobacterium bovis
gtggaactgctacgtggcgcgttacgcacctacgcttggggatcgcgcaccgctatcgccgaattcaccgggcgtccggtgccggccgctcaccccgaggccgaactatggttcggtgcacacccgggtgatccggcttggctgcagacgccgcatggccaaacctcgttgctcgaagcgttggtcgcggatccggaggggcagctcggctccgcgtcgcgcgcgcgattcggcgatgtgttgccgttcttggtcaaggtgttggcggccgacgagccactatcgttgcaggcccatccgagcgccgagcaggcggttgagggctacctgcgggaagagcgaatgggcattccggtgtcctcacccgtccgcaactaccgcgacaccagtcacaagccagagttattggtggcgctgcagccgttcgaggcgctggccggattccgggaggcggctcgcaccaccgagctgctgcgggcgctggccgtatccgacctcgacccgttcatcgacttgctgagcgaggggtccgatgccgatggtttgcgtgcgctgttcaccacctggattaccgcaccccagcccgacatcgacgtgctggtgcctgccgtgctggacggcgctatccagtacgtcagctccggcgcaacggaatttggcgccgaagccaagacagtgctggaactcggcgaacgttatcccggcgacgccggtgtgctggcggcgttgttgctcaaccgcatcagcttggctcctggggaggcgatcttcctgccggccggcaacctgcacgcctatgtgcgtggtttcggtgtggaagtgatggccaactccgacaacgtgttacgcggtggacttacccctaagcacgtcgatgtgcccgagttgttgcgggtgctggacttcgcccccacgccgaaggctcggctgcggcccccgatccggcgcgaggggctggggctggtctttgagacgcccaccgatgagttcgcggccacgctactggtgctcgacggcgatcacctcggccacgaggtcgacgcgtcgtccggccatgacggtccacagatcttgttatgcaccgagggttcggcgacggtgcacgggaagtgcgggtcgctcacgctacagcgcggcacggccgcctgggtggcggccgacgacggcccgatccggctgaccgccggccaacccgccaagctgttcagggcgaccgtcgggttg

SEQ ID NO: 26595 - DNA, 1467 bp, Mycobacterium bovis
atgaagtcggtagaacagtcaatcgccgacaccgacgagcccaccactcggctgcgcaaggacctcacctggtgggacctggttgttttcggcgtctcggtggtgattggcgccggaatattcacggttaccgcgtcgaccgctggcgatatcaccggcccggccatctggatatcgtttctgatcgcggcggcgacctgtgcgctggccgcgctgtgctacgccgagttcgcctcgacgctgccggtggccggcagcgcctataccttctcttatgccaccttcggggagttcttggcctgggtgatcggctggaatctggtgctggaactggcgatgggtgcggccgtggtcgccaaaggctggtccagctacttgggcaccgtgttcggattcggtaatggcacaggccatctcggatcgctgcagctcgactggggtgcgctcgtgatcgtcacgttggtggcgaccctgatcgcgttgggcaccaaattgtcgtcgagattttccgcggtggtcaccgcaatcaaggtgtcggtggtcgtcttggtggtggtcgtcggtgccttctacatcagggccgccaactactcgccgttcattcccgagcccgaagtccagcaccacggcggcgggctcgatcaatccgtcttctcgttgctgaccggagcccaaggcagccactacggatggtacggcgtgctggccggggcatcgatcgtgttcttcgcgtttatcgggtttgacatcgtggccaccatggccgaggagaccaagcgtcctcaacgagacgtccctcgagggattctcgcgtcgctgggggtcgtgacccttctctacgtcgcggtatcggtggtgctgtcgggcatggttccatacacccaactgcggaccgtaccgggccgcgggccggcaaatctggccaccgcgttccaggccaacggggtgtactgggccagcggcatcatctccgtcggcgcgctggccgggcttaccacggtggtgatggtgttgatgctcgggcaatgccgcgtgctgttcgccatggcgcgcgacggcttggtgccgcggcaattggccaagaccggttcgcgcggcaccccggtccgggtcacggtgctggtcgcggtgttggtggccacgacggcgtcggtgtttccgatcaccaagcttgaggagatggtcaacgtcgggacactgttcgcgttcatcctcgtctcggccggagtggtcgtgctgcgccggacccgacccgaccttcagcgggggttcacagctccgtgggtgccgttacttccgatcgccgcagtgtgcgcgtgcctgtggctgatgctgaacctcaccgcgttgacttggatccggttcgggatctggctggtggccggaaccgcgatttatgtcggctacgggcgccggcactcggcgcagggccttcggcaagctcgagagagcgcgacccggaggtgt

SEQ ID NO: 26596 - DNA, 513 bp, Mycobacterium bovis
atgatcgagttggaggtacatcaggccgacgtgaccaagctcgagctcgacgccatcaccaatgcggcgaacacccgactgcggcatgccggtggtgtcgctgcggccatcgcccgcgccggcggccccgagctgcagcgcgagtccaccgagaaggcgccgattgggcttggggaagcggtcgagaccacggccggtgacatgccggcgcgctacgtgatccacgcggcgacgatggagctaggaggtccgacctcgggcgagatcatcaccgcagccaccgctgctaccctgcggaaagccgacgagctcggttgccgctcgctggcgctggtggctttcggcacgggcgtgggcggctttccgctcgacgacgctgcgcggctgatggtcggcgccgtccgtcggcaccggccggggtcgctgcaaagggtggtatttgcggtccatggggatgcggccgagcgggcgtttagcgctgctattcaggccggagaagataccgctcgacgg

SEQ ID NO: 26597 - DNA, 1953 bp, Mycobacterium bovis
gtgagtgagtccacccccgaagtctcctcgtcatacccgccgccagcgcacttcgccgagcacgcgaacgcccgcgccgagctttaccgcgaggccgaggaagaccggctggctttttgggccaagcaggccaaccgactgtcctggacgacgccgttcaccgaggtgttggactggtcggaggcgccgttcgccaagtggttcgtgggcggcgagctcaacgtcgcctacaactgtgtggatcgtcacgtcgaggccggccatggagatcgggtcgccatccactgggaaggcgagccggtcggcgaccggcgcacgctgacctattccgatctgcttgccgaggtatccaaagccgcgaacgcgctcaccgacctcggtctggtggccggtgaccgcgtcgccatctacctgccgttgatccctgaggccgtgatcgccatgctggcctgtgcccggctaggcatcatgcatagcgttgttttcggcgggttcaccgctgcggccttgcaggcccggatcgtcgacgcccaagccaagctgctgatcaccgcggacgggcagtttcggcgcggcaagccatcgcccctcaaggcggccgctgacgaggcccttgcagcgatccccgactgctcggtcgagcacgttctggtggtgcggcgcacgggaattgagatggcctggagcgagggccgcgacctgtggtggcaccatgtcgtcggctcagcttcaccggcacacaccccggagcctttcgattccgagcacccgctgttcctgctgtacacgtcaggcaccaccggcaagcccaaaggcattatgcacaccagcggcggctatctcactcagtgttgctacacgatgcgcaccattttcgatgtcaagccggacagcgacgtgttctggtgcaccgccgacatcggctgggtcaccggccacacctacggcgtctacggcccgctgtgcaacggagtcaccgaggttctctacgagggcacgccggatacccccgaccgacaccggcatttccagatcatcgaaaaatacggcgtgacaatctattacaccgcccccaccctcatccggatgtttatgaagtggggccgtgagatccccgacagccacgacctgtccagcctgcggctgctggggtcggtcggcgaaccgatcaaccccgaggcttggcgttggtaccgcgatgtcatcggcggcggacgcaccccgctggtagacacctggtggcagaccgagaccggctccgcgatgatctccccgctgcccggaatcgctgcggccaaaccgggttcagcgatgacgccgctgcccgggatctcggccaagatcgtcgacgatcacggtgatccgttgccaccgcacaccgagggcgcccagcatgttaccgggtacctcgtcctagaccagccgtggccgtcgatgttgcgcggcatctggggcgaccccgcgcggtattggcactcttactggtccaaattttccgacaagggctactacttcgccggggacggcgctcgcatagaccccgacggcgcgatctgggtactaggccgcatcgacgacgtgatgaacgtgtccgggcaccggatctcgaccgccgaggtggaatcggcgctggtcgctcactctggcgtggccgaggcggcggtggtcggggttaccgacgagaccacgacccaggccatctgtgcgttcgtcgtgctacgcgccaactacgccccccatgaccgcacagccgaagagttgcgcaccgaagtggctcgagtgatctcgcccatcgcacggccacgcgacgtccacgtagtgcccgaactacccaagactcgtagcggcaaaatcatgcgtcgactgctgcgcgacgtcgcggaaaaccgtgagcttggcgacacgtcgacgctgctcgatcccaccgtattcgacgcgatccgggccgccaag

SEQ ID NO: 26598 - DNA, 3073 bp, Mycobacterium bovis
gggggactgttcgaccgtatcggcaacttcgtggtgcgatggccgctgatcgtcattgggtgctggatcgcggtggcggccgcgctgacgctgttgctcccaacgctgcaggcgcaagccgcaaagcgcgagcaagctcccctgccgcccggggccccatcgatggtcctgcaaaaggagatgagcgcggctttccaggaaaaaattgagacctccgccctccttttggtcctcttgaccaacgagaacgggctgggacccgccgacgaggccgtctaccgaaaactgatcgaaaacctgcgggcggacacgcaggacaaaatatcggttcaggattttctcgccgtccccgaaatgaaggagctgttggccagcaaggacaacaaggcttggaacctgcccatcacgttcgcgggcgatgccgcgtcgcctgagacacaagcggcgttcaaacgcgtcgccgcgatcgtcaagcaaacagtcgcgggaaccagcctgaccgtccacctcagcggtccgatcgccacggtcgccgacctgacggagctcggcgagaaagatgtgcggatcatcgagatcggcgccgcggtcagcgtgctgatcatcctgatcctcgtctatcggaacctggtgaccatgctggtgccgctggccaccatcggagcgtcggtggtcactgcgcagggcacgttgtccgggctcgccgagttcggcctggccgtgaacatgcaggcgatcgtctttatgagcgcggtcatgatcggggcgggaaccgattacgccgtctttctgataagtcgctatcacgactatgtgcgccacggcgaaaaatcggacatggcggtcaagaaggcgttgatgtccatcggcaaggtgatcaccgcatcggcggccaccgtcgccgtcacatttctggcgatggtgttcaccaaactggaagtgttttcggcggtgggcccggcaattgcggttgccatcacggtgtcgctgctgggtgcggtcaccctgctgcccgccatcctgacactcaccggacggcggggctggatcaagccgcgacgcgacctgaccagtcgaatgtggcggcgttcgggtgttcgcatcgtgcgtcggcccaccatccacctggtcggcagtctcattgtgctggtcgccctggccggctgcacgctgctgatccgattcaactacgacgatctcaagacggtgccgcagcacgtcgaaagcgtcaaaggatacgaggcgatgaaccgccatttcccgatgaacgcgatgactccgatggtgctgttcatcaaatccccccgagacctgcggacacccggcgcgcttgccgacatcgagatgatgtcccgcgagatagcagaattgcccaacatcgtgatggtgcggggcttgacccgaccgaacggggaacctctgaaggagaccaaggtctcgtttcaggctggtgaagtgggcggcaagctcgacgaagcgaccaccctgctcgaagagcacggaggcgagctggaccagctgaccggcggtgcgcaccagttggccgacgccctcgcccaaatacgcaacgaaatcaatggggccgtggccagctcgagcgggatagtcaacaccctgcaggccatgatggacctgatgggcggcgacaagaccatccgacaactggaaaatgcgtcccaatatgtcgggcgcatgcgggctctgggggacaatctgagcgggaccgtcaccgatgccgaacaaatcgccacttgggccagccctatggtcaacgccctcaactccagcccggtgtgtaacagcgatcccgcctgtcggacgtcgcgcgcacagttggcggcgattgtccaggcgcaggacgacggcctgctcaggtccatcagagcgctagccgtcaccctgcaacagacgcaggaataccagacactcgcccggacggtgagcacactggacgggcaactgaagcaagtcgtcagcaccctcaaagcggtcgacggcctacccaccaaattggctcaaatgcagcaaggagccaacgctctcgccgacggcagcgcagcgctggcggcaggcgtgcaggaattggtcgatcaggtcaaaaagatgggctcagggctcaacgaggccgccgacttcctgttggggatcaagcgggatgcggacaagccgtcaatggcgggcttcaacattccaccgcagattttttcgagggacgagttcaagaagggcgcccagattttcctgtcggccgatggtcatgcggcgcggtacttcgtgcagagcgcgctgaatccggccaccaccgaggcgatggatcaggtcaacgatatcctccgtgttgcggattccgcgcgaccgaataccgaactcgaggatgccacgataggtctggcgggggttccgactgcgctgcgggatatccgcgactactacaacagcgatatgaaattcatcgtcattgcgacgatcgttatcgtattcttgattctcgtcattctgctgcgcgcacttgtggctccgatatatctgataggctcggtgctgatttcttacttgtcggccctaggcataggaactctcgttttccaattgatactgggccaggaaatgcattggagcctgccgggactgtccttcatattattggttgccatcggcgctgactacaacatgctgctcatttcacgcatccgcgacgaatcaccacacggtatacgcatcggcgtcatccgaaccgtgggctccaccggtggtgttatcacctcggcgggtctcatcttcgccgcgtcgatgttcggtctggtgggcgcgaacatcaacacgatggctcaggccggtttcaccatcggcatcgggatcgtgctggacaccttcctggtccgcacggtcacggtgccggccttgaccacgatgattggccgggcaaactggtggccgtccgagctgggacgcgacccatccacgccgccgaccaaagccgatcggtggctgcggcgggtgaaaggccaccgacgcaaggccccgatcccggcgcccaagccgccccacaccaaggtcgtccgcaacaccaacg

SEQ ID NO: 26599 - DNA, 948 bp, Mycobacterium bovis
gtgcgggtgctcttccgtcagctggagtacttcgtcgcggtcgcccaggagcggcatttcgctcgggccgctgagaagtgctacgtgtcgcaacctgcgctgtcttcggcaatcgccaagctcgaacgcgaactcaacgtcaccctgatcaatcgcggacacagtttcgaaggccttactcgcgagggtgagcggttggtggtatgggccaagcggatacttgccgagcacgctgcgttcaaggccgaggtggatgcggtgcggtccgggataaccgggacgcttcggctaggcacggttcccaccgcgtcaacgacggcatccctggtgctgtcggcgttttgctcggcgcacccgttggcgaaggtgcaagtctgttcccggctggctgcgaccgagctgtaccgacggctgcgcgaattcgagctcgatgccgtcatcgtgcaccccgagacccaagacagtgatgatgttgatctggtgccgctctatgaggagcagtacgtgctgttgtcgccggcggatatgctgccgccggggacatcgacgttggtgtggcgggatgccgcgcaactaccgttggcattgctcactgcggatatgcgggaccgccaggttatcgacgccgcgttcgccgaccacgcggtctcggcgatcccgcaggtcgaaaccgattccgttgcttcgctgttcgcacaggtggcaaccggcaactgggcgtccatcgttccgcacacctggctatgggcaatgccaatgagcgggccgacgggtggtgagatccgcgcggtcgaattggtcgatccggtgctgaaagcccagatcgccctggctaccaacgccttgggaccgggatctccggttgcccgagcgctcataacatgcgcgcaggcgctggcgctgaacgaattctttgacacgcagctgcgggggatcacccgtcgccgc

SEQ ID NO: 26600 - DNA, 468 bp, Mycobacterium bovis
gtgaccgacgccgacgagttggccgccgtcgccgcacgcaccttcccgctggcgtgcccaccagcggtcgccccggagcacatcgcgtcgttcgtcgacgccaacctgtcgtcggcccggttcgccgagtatctgaccgatccgcggcgcgccatcctcaccgcccgccatgacggccgaattgtcggttacgccatgctcattcgcggtgacgaccgggacgtggagctgtccaagctgtacctgctgccgggttatcatggcaccggagccgctgcggcattgatgcacaaggtgctggctaccgccgccgactggggcgcgctccgggtgtggctgggtgtcaaccagaaaaaccaacgcgcacaacgcttctacgcgaagactggtttcaagatcaacggcaccaggacgtttcgactgggagcccaccacgagaatgactacgtcatggttcgcgagcttgta

SEQ ID NO: 26601 - DNA, 1413 bp, Mycobacterium bovis
atggggtcgatgcgtgaatacgacatcgtggtgatcgggtcaggcccgggcggacagaaagccgccatcgcctcggcgaagctgggcaagtccgtggccatcgtcgaacgcggccgaatgctcggcggcgtctgcgtcaacacaggcacgatcccatccaaaacgttgcgtgaggctgtgctctacctcaccggcatgaaccaacgcgagctgtacggcgcaagctaccgcgtgaaggaccggatcaccccggccgacctgttggcgcggacccagcacgtgatcggcaaggaagtcgacgtggtgcgcaaccagctgatgcgtaaccgcgtcgatctgatcgtgggccatggccggttcatcgacccgcacaccatcctcgtggaggaccaggcccgcagggaaaagaccaccgtcaccggcgactacatcatcatcgccactggcaccaggccggcacggccatccggagtcgaatttgacgaagaacgggtgctcgactccgacgggatcctcgatctcaaatcgctgccatcctcgatggtcgtggtcggtgccggcgtgatcggcatcgaatacgcctccatgttcgctgcgttgggcaccaaagtcaccgtcgtggagaagcgggacaacatgctggacttctgcgaccccgaggtcgtcgaggcgctgaaattccacctgcgcgacctggcggtgacattccggttcggcgaggaagtgaccgcggtcgatgtcggctctgcgggcaccgtgaccaccctggccagcggcaaacagattccagccgagaccgtaatgtactcggcgggacgtcagggacaaaccgaccacctcgacctgcacaacgccggactcgaggtgcagggccgcgggcggatcttcgtagacgaccgtttccagaccaaggtagaccacatctacgccgtcggcgacgtcattggcttccccgccttggccgcgacgtcgatggagcaggggcggctggccgcctaccacgccttcggcgaaccaaccgacggaatcaccgaacttcagccgatcggtatttattcgattcccgaggtgtcctacgtcggcgccaccgaggtggaactgaccaagagctccatcccatacgaggtgggagtggcccgctaccgggagctggcccgcggccaaatcgccggcgactcctacggcatgctcaagctgctggtttccaccgaggatctcaagctgctcggcgtgcatatcttcggcaccagcgccaccgagatggtgcacatcgggcaggccgtgatgggatgcgggggcagcgtcgagtacctggtcgacgcggtgttcaactacccgaccttctcggaggcctacaagaacgccgcactggacgtgatgaacaagatgcgcgcactcaaccagttccgccgc

SEQ ID NO: 26602 - DNA, 1887 bp, Mycobacterium bovis
atgggcggcgggttcatcggcgtcgacgccttcttcgtcttgagcggatttctcatcacctcgctgctgctcgacgagctggggcgcaccggtcgtatcgatctgagcgggttctggattcgccgtgcgcggcggctgctgccggcgctggtgctgatggttctcaccgtgagcgccgcacgcgcactatttcctgaccaagctctcaccgggctacggagcgatgcgatcgccgcgttcctatggacggcgaattggcggtttgtggcccaaaataccgattacttcacccagggcgctccaccctcgcccctacagcacacctggtcgttgggggtggaggagcagtattacgttgtctggccactgttgctgatcggggcgacgctactgttggcggcccgggcgaggcgccgttgcagacgggccacggtgggcggggttcggttcgccgcgttcctgattgccagtctcggcacgatggcttccgccaccgccgcggtcgcatttacctcggcggccacccgcgaccggatttacttcggcaccgatacccgtgcgcaggcgttgctgatcggctccgcggcagcggctctgctggtgcgggattggccatcgctgaaccgcgggtggtgcctgatccggactcgctggggacggcggattgcccgtctgttgccgttcgtcgggctggctgggctggcggtgacgactcacgtcgcaacgggcagtgtgggcgagttccgccatggtctgctgatcgtggtggcaggtgcggccgtcatcgtggttgcctcggtagccatggagcagcgcggagcggtggcccgcatcctggcctggcgaccgttggtgtggctgggcaccatatcgtacggcgtctatctgtggcactggccaatctttctggcgctcaacggccaacgtacgggctggtcgggcccggccctgtttgccgctaggtgtgcagccacggtggtgctggccggtgcgtcgtggtggctgatcgagcaacctattcggcgctggcgaccggcacgggttccgctgttgccgctggcagcggcgaccgttgccagcgctgccgccgtgacgatgctcgttgttccggtcggagccggaccggggctacgcgagatcggccttccgcccggcgtttcggcggtcgccgcggtctcgccgtcgccgccggaagcgagtcagcccgcgcccgggccacgagatcccaaccggccgttcaccgtttcggtattcggtgattcgatcgggtggactttgatgcattacctgccgccgactcccggattccggttcatcgaccacaccgtcatcggctgcagcctggtacgcggcacaccgtatcggtacatcggtcaaaccctggagcagagggcggaatgcgacggctggccggccagatggtcggcgcaggtcaaccgggaccaaccggacgttgcgttgctgatcgtcggccgctgggagacggtagaccgggtcaatgaggggcggtggacacatatcggcgacccgaccttcgatgcgtacctcaacgccgagctacagcgagcgctcagcatcgttggatccaccggggttcgagtgatggtcaccaccgtgccctacagccgcggcggcgaaaagccggacggccgcttgtatccggaggatcaacccgagcgtgtgaacaaatggaacgccatgttacataacgccattagccaacactcgaacgtcggaatgatcgacctcaacaaaaagctttgtccagacggcgtttacacggccaaggtcgacggcatcaaggtccgcagtgatggtgttcatctcacccaggaaggcgtgaagtggctgataccgtggcttgaggattcggtgcgggtcgccagt

SEQ ID NO: 26603 - DNA, 1521 bp, Mycobacterium bovis
atgactgtcttttcccgtcccggttccgccggggcgctgatgtcctatgaatcccggtaccaaaacttcatcgggggccagtgggtcgcgccggtccatgggcgctacttcgagaacccgacgccggtgaccggccagccgttctgcgaggtgccgcgctccgacgcggccgacatcgacaaggcgctcgacgccgcgcacgcggcggcgccggggtggggcaagaccgcaccggccgaacgggcggcgatcctcaacatgattgccgaccgcatcgacaagaacgccgccgcgctggcggtggccgaggtctgggacaacgggaaaccggtccgggaagcgctggccgccgatatcccgttggcggtcgatcacttccggtacttcgccgcggcgattcgcgcccaggagggcgcgctgagccagatcgacgaggacaccgtggcctaccacttccacgagccgctcggcgtggtgggccagatcattccgtggaacttccccatcctgatggcggcctggaagctggcgccggcgttggcggccggcaacacggcggtgctcaaacccgccgagcagacacccgcttcggtgctctacctgatgtcgctgatcggtgatctgttgccgcccggggtggtcaacgtggtcaacggattcggcgccgaggccggcaagccgttggcctccagcgaccgcatcgccaaggtcgcgttcaccggggaaaccaccacggggcggctgatcatgcaatacgcctcgcacaacctgatcccggtcaccctggaactcggcggcaagagccccaacatcttcttcgccgacgtgctggccgcccacgacgacttctgcgacaaggcgctggaaggcttcaccatgttcgccctcaaccagggcgaggtgtgcacctgcccgtcgcgcagtctgatccaggccgacatctacgacgagttcctggagctggcggcgatccggaccaaggcggtccggcagggcgacccgctggacaccgaaaccatgctgggttcccaggcctccaacgaccagctggaaaaggtgttgtcctacatcgaaatcggcaagcaagagggtgcggtgattatcgccggaggcgagcgcgccgaactaggcggcgacctgtccggcggttattacatgcagccgacgatcttcaccggcaccaacaacatgcggattttcaaggaggagatcttcgggccggtggtcgcggtgacgtcgttcaccgattacgacgacgcgatcggcatcgccaacgacaccctctacggcttgggtgccggtgtgtggagccgcgacggcaacactgcctatcgggccgggcgggacatccaggccggccgggtgtgggtcaactgctaccacctctaccccgcgcacgcggcgttcggcggctacaagcagtccggcatcggccgggagggccaccagatgatgctgcagcactaccagcacaccaagaacctgctggtgtcctactcggataaggcgctggggttcttc

SEQ ID NO: 26604 - DNA, 719 bp, Mycobacterium bovis
atgaaccgcagaacgctactgtggctgtcggcgatcgcggcgctggcgctggtggtcgcgtatcagacgctgggatcatcagcgggcaggcacgctgacgagttcgcccgccgcgctggcgtgccaaccgtgcaacccggtgccgacgtgctcgccggcatcgccgtgctacccaaacggatccaccgctacgactaccgcaggtcccgcattcggtcacccctgggacgatcgcaatgtacgcgccggtagggcacaacgggtgcgacacccgcgacgacatcctcgaccgggatctggtcgacaatacatatgtgtcgatcaagcggtgtaggaatgcggtggcctccggcaccctgcgcgatccgtacaccaacaccaccgttgccttccaacgcggcgccagtgttggccaatcggtccagatcgaccacatcgttccgctctcgtatgcctgggacatgggcgcctatcggtggccgaactccgagcgaatgcgcttcgccaacgatccggccaacctgctggccgtgcaggggcaggcaaatcaggacaagggcgattcgccaccggcccaatggatgccacccaacaaggccttcgcctgtcagtacgcgatgcaattcatcgccgtgctgcgcggctattcactgccagtggatcagccatcgtccgacgtactgcgtcaggccgcggccacctgcccgacgggctagtcc

SEQ ID NO: 26605 - DNA, 846 bp, Mycobacterium bovis
gtgactggcgagtcgggcgccgccgccgcaccctcgattaccctcaacgacgagcatacgatgccggtgcttggcctcggcgtcgcggaattgtcggacgacgagaccgaacgtgcggtgtccgcggcgctggaaattggctgccggctgatcgacaccgcctacgcctatggcaacgaggccgcggtcggccgcgcaattgcagcctccggcgttgcccgcgaagagctgttcgtcaccaccaagctagccacccccgaccagggtttcacccgttcccaggaagcatgtagagccagtttggaccgcctcggcctcgactacgtcgacctttacctaattcactggccggccccgccggtgggcaagtatgtggacgcctggggaggcatgattcaatcccgcggagagggccatgcccgatcgatcggcgtgtccaacttcaccgcggagcacatcgaaaaccttatcgacctcacattcgtcacgccggcggtcaaccagatcgagctgcacccgctgctcaaccaggacgaactgcgcaaagctaacgcccagcacaccgtcgtcacacagtcctactgccccctggcactcggcaggctgctggacaacccaaccgtcacatcaatcgccagcgaatacgtcaagacgcccgcacaagtgctgctgcggtggaacctgcaattgggcaatgcggtggtcgtccgctcggccagacccgagcgcatcgccagcaacttcgacgtcttcgacttcgagttggcggccgaacacatggatgcattgggcgggctcaatgacggcacccgggtgcgcgaggatccactgacctacgccggcacc

SEQ ID NO: 26606 - DNA, 5397 bp, Mycobacterium bovis
gtgatagaggagcaacggacgatgagcgttgaaggtgccgaccagcagagcgaaaagctttttcactacctaaagaaggttgctgtcgagctcgatgagacacgcgctcggctgcgtgaatatgagcaacgcgcgacagaaccggtggcggtggtgggaatcggctgccgatttccgggcggcgtggatggcccggacggactctgggatgtcgtttcggcggggcgcgacgtggtgtcggagtttccgaccgatcggggctgggatgttgaggggctatacgatccggatcccgacgctgagggcaaaacctacacgcgatggggggcatttctagacgacgccaccggctttgacgccgggttcttcggcatcgctcctagtgaagtgttggcgatggatcctcagcagcggttgatgctggaggtttcgtgggaggcgttggagcacgcggggattgacccgttgtcgttgcgtggttcggcgaccggggtgtacaccggcattttcgcggcgagttacggcaatagggataccggggggctgcaagggtacgggttgaccggcacgtcaatcagcgtggcctcgggacgtgtgtcgtacgtattggggctgcagggcccggcggtgtcagtggataccgcttgttcgtcgtcgttggtggcgatccattgggcgatgtcgtcattgcgctccggggagtgtgatttggcgttggccggtggggtgacggtgatggggctgccgtcgatttttgtggggttttcccggcagcgggggttggctgccgatgggcgatgtaaggcgtttgcggccgcggccgacggcaccgggtggggcgagggcgccggggtggttgtgctggagcggctatcggacgcccggcggttggggcattcggtgctggcggtggtgcgggggagcgcggtcaaccaggatggtgcgtccaatgggctgaccgcgcccaatgggctcgcccagcagcgagtgatccaggcggcgttggccaacgccgggttgtccgccgcagacgtagacgtggtggaggcacacgggaccgccaccacgttgggtgatcccatcgaagcgcaggcattgctgtccacctacgggcagggacgtccagcggagcagccgctgtgggtgggctcaatcaagtcgaacatgggccacacccaggccgccgcgggggtcgccggggtgatcaagatggtgcaggcgatgcgtcatggggtgatgccggcgacgttgcatgtggatgagccttccccgcgggtggattggaccagcggcgcggtgtcggtgttgaccgaggccagggagtggtcggttgacgggcgtccgcgccgggcggcggtgtcctcctttgggatcagcggcaccaacgcgcatctgatcttggaagaggcccccgtaccagcccccgcagaggcgccggttgaggcgagcgaaagcaccggggggccgcggccgtcgatggtgccgtgggtgatttcggcgagatcggctgaggcgttgacggcgcaggcgggtcgacttatggcccacgtgcaggccaacccagggctggatccgatcgatgtggggtgctcgttggccagtcgctcggtgtttgagcaccgagcggtggtggtcggcgcaagccgtgagcaactgattgccgggctggctgggctcgcggcgggcgagccgggtgccggcgtggcggtcggtcagccagggtcggtgggcaagacggtggtcgtgtttcctgggcagggcgcgcagcgcatcgggatgggccgcgagttgtacggcgagttgtccgtgtttgcgcaggcattcgatgcggtggccgacgagttggaccggcatctgcggttgccgctgcgcgacgttatttggggtgccgatgcggatttgcttgacagcaccgaatttgctcagcccgcgttgttcgcggtggaggtggcatcgttcgcggtgttgcgggattggggtgtgcttccggacttcgtcatgggtcactccgttggagagctggcggcggcgcacgcggccggtgtgttgacgttggcggacgcggcgatgctggtggtggcgcggggccggttgatgcaggcgctgccggcaggcggtgcgatggtggcggtggctgccagtgaggacgaggtggagccgctgctgggtgagggtgtggggatcgctgcgatcaacgcgcccgaatcggtggtgatctccggtgcgcaggccgcggcaaatgcgattgcggatcggttcgccgcgcagggtcggcgggtgcaccagttggcggtctcgcatgcgtttcattcgccgttgatggagccgatgctcgaggagttcgcgcgtgtcgcggcccgggtgcaggcacgcgagccccagcttgggctggtgtcgaacgtgacgggcgagttggccggccctgatttcgggtcggcgcagtactgggtggaccacgttcgtcggccggtgcgcttcgcggacagtgcgcgtcatttgcagacccttggggcgacccacttcatcgaggccggcccgggaagtggtttgactggctcgatcgagcagtccttggccccggctgaggcgatggtggtgtcgatgctgggcaaagaccggcccgagctggcctcggcgctcggtgctgccggtcaggtgttcaccaccggtgtgccggtgcagtggtcggcggtgttcgccggctcgggtggacggcgggtgcagctgcccacgtatgcgtttcagcgacggcggttttgggagacgccgggcgcggatgggcccgccgatgcggccgggttgggtctgggcgcgaccgagcatgccttgttgggtgcggtggtcgagcggcccgattctgacgaggtggtgctgaccggccggttgtcgcttgcggatcagccgtggctggccgaccacgtggtgaacggggtggtgctgttccccggggcgggttttgtggagttggtgatccgcgccggtgatgaggtcgggtgcgcgctcatcgaagagttggtgctggccgcaccgttggtgatgcacccgggtgtcggggttcaggtgcaggtggtcgtcggggctgccgatgaatccgggcaccgtgcggtgtcggtgtattcccgcggtgatcaatcccagggttggttgctgaacgccgaaggcatgctgggggtggctgccgctgagacgccgatggatttgtccgtgtggccgcccgagggcgcggagagtgtggatatctcggacggctatgcgcagttggccgagcgcggttatgcctacggccccgcgtttcagggtctggtggcgatctggcggcgggggtcggagctgttcgccgaagttgtagcccccggcgaggccggcgtggccgtcgaccgaatggggatgcatccggcggtgttggacgcggtgctgcatgccctcgggctggccgtcgagaagacccaggcgagcaccgagacgagactgccgttttgctggcgtggggtgtcgctgcatgccggcggcgctggacgggtgcgggcccgcttcgcgtccgcgggcgcggatgcgatttccgtggacgtctgcgacgccactgggctgccggtgttgacggtgcgctcgctggttactcgcccgataaccgcagaacagctgcgcgccgccgtgaccgcggccggcggtgcgtccgatcaggggccgctggaagtggtgtggtcgccgatctcggtggtcagcggcggcgctaacgggtccgccccacctgccccggtgtcttgggcggacttttgcgccggcagtgatggtgacgccagtgtcgtggtgtgggaactcgagtctgccggtggccaagcatcctcggtggtgggctcggtgtatgcggccacccacaccgccctggaggtgttgcagtcctggctcggcgcggatcgggcggccacgttggtggtgttgacccatggtggcgtggggctggctggcgaggacatcagcgacctggccgccgccgcggtgtggggcatggcgcgttccgcgcaggccgaaaatcccggccggatcgtgttgatcgacaccgatgcggcggtggatgcctcggtgctagccggcgtcggggaaccccagctgctggtgcgcggcggcactgtgcacgccccccggctgtccccggccccggcgttgctagcgttaccggcggcagagtcggcgtggcgattggccgccggtggtggcgggaccctggaggatttggtgatccagccctgcccggaggtacaggcaccgctacaggcggggcaggtgcgcgtggcggtggcggccgtcggggtcaacttccgcgatgtggtggccgccctagggatgtatcccggccaggctccaccgctgggtgccgaaggcgccggggtggtgcttgagaccggtcccgaagtgaccgatcttgccgtcggtgacgccgtgatgggattcctgggcggggccggtccgctggcggtggtggatcagcaactggttacccgggtgccgcaaggctggtcgtttgctcaggcagccgctgtgccggtggtgttcttgacggcctggtacgggttggccgatttagccgagatcaaggcgggcgaatcggtgctgatccatgccggtaccggcggtgtgggcatggcggctgtgcagctggctcgccagtggggcgtggaggttttcgtcaccgccagccgtggcaagtgggacacgctgcgcgccatggggtttgacgacgaccatatcggcgattcccgcacatgcgagttcgaggagaagttcctggcggtcaccgagggccgcggggttgatgtggtgctcgactcgctggccggtgagttcgtggatgcgtcgctgcgcttactggtccgcggtgggcgtttcctcgagatgggcaagacggatatccgcgatgcgcaggagatcgccgctaattatcccggcgtgcagtatcgggcgttcgacctgtcggaggccggcccggcacgcatgcaggagatgttggccgaggtgcgggagctgttcgacacccgggagctgcaccggctaccggtcaccacgtgggatgtgcgctgcgccccggcggccttccggttcatgagccaggcccgccatatcggcaaggttgtcttaaccatgccctcggcgttggccgaccggcttgccgacggcacggtggtgatcaccggtgccaccggggcggttggtggggtgttggccccccacctggttggcgcctatggggtgcgtcatctggtgttgcccagtcggcggggcgatcgcgcgaagggaccggccgaattggccgccgacttgacgaaggccggcgccaaggggcaggtggcgccccgcaacgtgaccgatcccgctgcggtagcggggttgtttgccaacctg

SEQ ID NO: 26607 - DNA, 654 bp, Mycobacterium bovis
gtgggccgtcaacgtgatgttgtcgtctccggccggccccgtgcgtataccccgcagcgtgatgtcgttgctgctggtgcgctgcacgatatgggcacgtacataggtctctgctttgggccgacaaatcacccgtacctggtagggctgcagcccttcgtcttcgacggcgttgtcgcggtcgaccagccggccaagtgggcgccccaggagatggacagcgacgatggttccggtgccaatcagggtgaacaccagatgcccggaggcggccagcactccgaccgcggccgagcaccaaagcgtggcagccgtgttcagaccgcggacgttgaacccctcccgcaggatgaccccgccgcccaggaatccaattccagaaaccacgtaggacgccactcgggtggggctgctgtcctcggtggcgaccgcgtacagcacgaacaaggtagcaccggtcgccaccagagcgttggtgcgcaacccagccatccgcgcccgccactggcgctcgagcccgataatggccccgcaacccactccgacggccagccggagagcgaaatcggcgacagtcagcgtttgcatgacgccgagtccttcccgatcgcaagacggccacggcagccaaccacgcgcaggttaacagcagtt

SEQ ID NO: 26608 - DNA, 1899 bp, Mycobacterium bovis
gtgacaacttccttggggactcactacacctggctgctggtggcactgccactggcgggtgccgcaatcttgctgttcggcggcagacgcaccgatgcgtggggccacctgctgggctgtgccgcagcgctggcggcattcggggtgggcgcgatgctgctggccgacatgctcggtcgcgatgggctcgagcgcgcgatccatcagcaggtgttcacctggatacccgccggcggactccaagtcgacttcgggctgcagatcgatcagttgtccatgtgcttcgtgctgctgatctccggggtcggatcgctgattcacatctattcggtcggctacatggccgaggacccggaccggcgcaggtttttcggctatctcaacctgtttctggcctcgatgctgctgctggtggtcgccgacaactatgtgttgctgtacgtcggctgggagggtgtgggcctggcgtcgtatctgttgatcggtttctggtaccacaagccgtcggcggccaccgcggccaaaaaggcattcgtgatgaaccgggttggggacgccggcctagcggtgggtatgttcttgacgtttagcactttcggcaccctgtcgtatgccggcgtgttcgccggcgtacccgccgcaagtcgcgcagtgctgaccgcgatcgggttgttgatgctgttgggggcgtgcgccaagtccgcgcaggttccgctgcaagcctggcttggcgacgcgatggagggccccaccccggtgtccgcgctgatccacgccgccaccatggtgaccgccggagtgtatttgattgtgcggtcgggcccgctgtacaacctggcgcccaccgcccaactggcggtcgtcatcgtcggcgcggtgacgctgctgtatggggcgatcatcggctgcgccaaggacgacatcaaacgtgcgctggcagcctcgaccattagccagatcggctacatggtgctggccgcgggcctgggtccggccggctacgcgtttgcgatcatgcatctgctcactcacggtttcttcaaggccggcctattccttgggtccggcgcggtgattcacgcgatgcacgaagagcaggacatgcgccgttacggtggtctgcgcgccgccctgccggtcacgttcgcaaccttcggcctggcgtatctggcgattatcggggtaccgccgttcgcgggcttcttctccaaggatgcgatcatcgaggccgcattgggcgccggcggcatccggggctcgctgctgggcggtgccgcgctgctgggtgcgggcgtcaccgcgttctacatgacgcgagtgatgctgatgaccttcttcggcgaaaagcgttggacgccaggcgcccatccgcacgaggcaccggccgtgatgacctggccgatgatcttgctcgccgtcggctcggtgttctccggtggcctgctcgcggtgggtggcacgttgcggcattggctgcagccagttgtcggatctcatgaagaggccacccatgcgctgccgacctgggtcgccaccaccctggcgctcggtgtggtcgccgtcggtatcgcggtggcctaccggatgtacggcaccgcgccgatcccgagggttgccccggttcgggtgtcggcgctgaccgcggccgcacgtgcggacctgtacggcgatgccttcaacgaggaggtgttcatgcgccctggtgcgcaattgaccaacgcggtggtcgcggtggacgacgcgggtgtggacggctcggttaacgcgctggcgacgctcgtgagccagacttcgaatcgcctgcggcaaatgcaaaccggcttcgcccgtaactacgcgttatcgatgctggtaggagcggtgttagtggcggcggcgctgctggtggtgcagctgtgg

SEQ ID NO: 26609 - DNA, 756 bp, Mycobacterium bovis
gtgacacagccacccggtcagccggtgttcatccggctcggaccgccaccggacgaacccaaccagtttgtcgtcgagggcgctccgcggtcgtatccgccggacgtactggcgcggctggaggtcgacgccaaggagatcatcggccgctatcccgacaggcgctcggcgctgttgccgttgctgcacctggtgcagggcgaggattcctacctgacgccggcgggtttgcggttctgcgccgatcaactcgggctgaccggggccgaggtgtcggcggtggccagcttctacaccatgtaccgccggcgccccaccggcgagtacctggtgggtgtgtgcacgaacacgctgtgcgccgtcatgggtggcgacgccatcttcgaccgcctcaaagagcatctcggcgtcggccacgacgaaaccacctccgacggtgtggtcaccttgcaacacatcgaatgcaacgccgcctgcgattacgcaccggtggtgatggtcaactgggaattcttcgacaaccagacgccggagtccgcgcgcgaactcgtcgactcgctgcgctccgacacaccgaaggcgcccacccgcggcgcgccgctgtgcggcttccggcaaacatcgcgcatcctggcgggtctacccgaccagcgtcccgacgaaggccagggcggtcccggcgcgcccaccctggccgggctgcaggtggcaaggaagaacgacatgcaggcgccaccaacccccggagcggacgaa

SEQ ID NO: 26610 - DNA, 1335 bp, Mycobacterium bovis
atgaccacgcaggccaccccgttgaccccggtgatcagccgccactgggacgacccggagtcgtggaccctggccacttatcaacgccacgatcgctatcggggctatcaggcgttgcagaaagccctgacgatgccgcccgacgacgtgatcagcatcgtcaaggattccgggttacgcggacgcggcggcgcgggctttgccaccgggaccaagtggtcgttcatcccgcagggcgacaccggcgccgcggccaagccgcactacctggtggtcaacgccgacgagtccgaacccggtacgtgcaaagacattccgttgatgctggcgacgccacatgtgctcatcgaaggcgtcatcatcgccgcctacgcgatccgcgcccatcacgcgttcgtctacgtacgcggtgaggtggtgccggtattgcgccggctgcacaacgcggtggccgaggcctatgccgccggcttcctaggccgcaacatcggaggttccggattcgatctggagctggtggtacacgccggcgcgggcgcctacatctgcggcgaggagaccgccctgctcgactcgctggaaggccggcgcggccagccgcggctgcggccccccttccccgcggtggccggtctgtatggctgcccgaccgtgatcaacaacgtcgaaacgatcgccagtgtcccatcgatcatcctgggcggcatcgactggttccggtcgatgggcagcgagaaatcgcctggcttcaccctgtattcgctgtccggccacgtcacccgccccggccagtacgaggcgccgctgggcattacgctgcgcgagttgctcgactacgcaggcggggtgcgcgccgggcaccggctgaagttctggacaccgggcggctcgtcgaccccgctgctcaccgacgagcatctggatgtgccgctggactacgagggtgtgggtgcggccggctcgatgctggggaccaaggcgctggagatcttcgacgagaccacctgcgtggtgcgcgcggtgcgccgctggaccgagttctacaagcacgaatcgtgtgggaaatgcacgccgtgccgggagggcaccttctggctggataagatctacgagcggctggaaaccggccggggtagccatgaagacattgacaaactgttggacatttccgattccatcttgggaaagtcgttctgcgcgttgggcgacggtgccgcgagtccggtgatgtcgtcgatcaagcacttccgcgacgagtacctggcccacgtcgaaggaggcggttgcccattcgacccccgagactccatgctcgtcgcgaacggagtggacgcg

SEQ ID NO: 26611 - DNA, 3981 bp, Mycobacterium bovis
gtgcgctgtggcatcgtcgtcaatgtgaccggaccgccgcccaccatcgaccggcgctaccacgacgctgtcatcgtcggcctcgacaacgtggtcgacaaggccacgcgagtgcacgccgcggcatggacgaagttcttggatgactacctcacccgacgaccccagcggaccggcgaagaccattgccccctcacccacgacgactaccgccgcttcttggccggcaaacccgacagtgtagccgacttcttggccgcccgcggaatcaggctgccgccgggctccccgactgatctcaccgacgacaccgtgtacgggctgcaaaacctcgagcgccagacattcctgcaactgttgaacaccggtgtccccgagggcaagtcgattgcctcgttcgcacgtcggctgcaggttgccggtgtccgcgtggccgcccacacctcccaccgtaactacgggcacacgctggatgccaccggcctggcagaagtgtttgccgtctttgtcgacggcgccgtcaccgccgagctcgggctaccggccgagcctaacccggccggcctgatcgagacggcgaagcggctgggagcaaaccccggtcgctgtgtggtcatcgacagctgccagaccggtctgcgcgccggccggaacggcggattcgcgctggtgattgccgtcgacgcgcacggcgatgccgagaacctgctgtccagcggagccgacgccgtggtcgcagacctggccgctgtcacggtgggaagcggcgacgccgccatctccacgattcccgacgccctgcaggtctacagccaattgaaaagactactgaccggccgacgaccagcggtgtttctcgatttcgacggcacgttatccgatatcgtcgagcgccccgaagcggcaacgctcgtcgacggcgcagcagaagcgttgcgagcgctggcggcccagtgtccggtggcggtgataagcggacgcgacctggccgacgttcgcaaccgggtcaaagtcgacgggctgtggctggccggcagccacggcttcgaattagtggcgccagacggcagccatcaccaaaacgccgccgccactgccgctatcgacggattggccgaggcggcagcgcaattggccgacgcactccgcgaaatcgccggagcagtagtggaacacaaacgcttcgcagtcgcagtgcactatcgcaacgttgccgacgacagcgtcgacaacctgattgcggcggtgcgccgactcggacacgcagcagggctgcgtgtcaccaccggccgcaaagtcgtcgagcttcgcccggatatagcctgggacaagggcaaagcactcgattggatcggtgagcggctcggcccggccgaagtcggccccgacctacggttgccgatctacatcggcgacgaccttaccgacgaagatgcctttgatgccgtgcgtttcaccggtgtcgggattgtggtgcgccacaacgaacacggtgatcgacggtctgccgctacctttcgtctcgaatgtccttacaccgtttgccaattcctctcccagctggcttgcgatctgcaggaggcagtgcagcacgacgatccgtggactctggtcttccacggctacgaccccggccaggagcggctgcgtgaagcgctgtgcgcggtgggcaacggctacctgggttcgcggggctgcgcacccgaatcagcggaaagcgaggcacattacccgggcacctatgtggccggggtgtacaaccagctcactgaccacatcgaagggtgcaccgttgacaacgaaagcctggtcaacctccccaactggttgtcgctgaccttccgtatcgacggcggagcatggttcaacgtcgatacggtcgagttgttgtcctaccggcagacgttcgacctacgccgtgccacgttgacccgcagcttgcgattccgagacgccggcggacgagtgaccacgatgacccaggagcggttcgcgtccatgaaccggcccaacctggtcgcactgcaaactcggattgaatccgaaaattggtcgggcacagttgatttccggtcactagtcgacggaggtgtgcataacaccctggtggaccgctatcggcaactatccagccaacaccttaccaccgccgagatagaagtcctggcggactcggtgttgttgcgcacccagacgtcgcaatcgggtatcgcgatcgcggtcgccgctcgcagtaccctgtggcgcgatggccaacgggtcgacgcgcaatatcgggtcgccagggacaccaaccgcggcggccatgacatccaggtcaccctgtcagcggggcaatcggtcacgctggaaaaggtcgcgacgatcttcacgagccgggacgccgcgacattgacagcggcaataagcgcacagcgctgtctaggtgaggccggtcgctatgccgagctctgtcaacagcacgtccgcgcgtgggcacggctgtgggaacgatgcgccatcgatttgaccggcaacaccgaggaattgcggctcgtgcgactgcacctactgcacctgctacagaccatttcgccgcataccgctgagctcgacgccggggtcccagcgcgcgggctgaacggagaggcctaccgcgggcatgtcttctgggatgcgctgttcgtcgctccggtgctcagcctgcggatgccgaaggtggcgcgatcgctgctggactatcggtaccgacgactacccgcggcccgccgagcggcgcaccgggcgggccaccttggcgcgatgtatccctggcagtcgggcagcgacggaagcgaagtgagtcagcagctgcacctcaatccacggtccgggcggtggactcccgatcccagtgatcgtgcccatcacgtcggtctagcggttgcctacaacgcgtggcactactaccaagtgaccggtgaccgccagtatctcgtcgactgcggggcagagctgctggttgagatcgcacgcttctgggtaggcctggccaagttggatgacagtcgcggccgctacctgatccggggagtaatcggtcccgacgaattccattcggggtatcccggcaacgagtacgacggaatagacaacaatgcgtacaccaacgtgatggcggtatgggtgatcctgcgggcaatggaggcgctggacctgctaccgctgaccgatcgccgccatctgatcgaaaagctcgggctgacaacgcaggagcgcgaccaatgggacgacgtgagccgacgcatgttcgttccattccacgacggcgtgatcagccagttcgagggctattcggaactggcggaactggattgggatcactatcggcaccgatacggaaacatccaacgactcgaccggatcctggaagccgagggcgacagcgtgaacaactaccaggcgtccaagcaagccgacgcgctgatgctgctctacctgctgtcttccgacgagctgatcggcctgttggcccggcttggctaccgcttcgcgcccacacaaatcccaggcaccgtggattactatcttgcccgcacctcggatggatctaccctgagcgctgtcgtgcatgcgtgggttctcgcccgcgccaaccggagcaatgccatggagtacttccgtcaggtcctgcgctccgatatcgccgacgtccagggcggcacaacccaggaaggaattcacctggcggccatggctggcagcatcgacctgccgcagcgttgctattccggattggaactgcgcgacgaccggctggtgttgagcccgcaatggccggaagcacttggaccacttgagtttccgtttgtgtaccgccgccaccagctgagcctgcgaatcagtggccgaagcgccacattgaccgcagaaagtggagacgccgagccaattgaggtcgaatgccgtggccacgtgcagcggctacggtgcgggcacaccatcgaagtcggttgcagcagg

SEQ ID NO: 26612 - DNA, 672 bp, Mycobacterium bovis
atgtctccgatcgagcccgcggcgtctgcgatcttcggaccgcggcttggccttgctcggcggtacgccgaagcgttggcgggacccggtgtggagcgggggctggtgggaccccgcgaagtcggtaggctatgggaccggcatctactgaactgcgccgtgatcggtgagctcctcgaacgcggtgaccgggtcgtggatatcggtagcggagccgggttgccgggcgtgccattggcgatagcgcggccggacctccaggtagttctcctagaaccgctactgcgccgcaccgagtttcttcgagagatggtgacagatctgggcgtggccgttgagatcgtgcgggggcgcgccgaggagtcctgggtgcaggaccaattgggcggcagcgacgctgcggtgtcacgggcggtggccgcgttggacaagttgacgaaatggagcatgccgttgatacggccgaacgggcgaatgctcgccatcaaaggcgagcgggctcacgacgaagtacgggagcaccggcgtgtgatgatcgcatcgggcgcggttgatgtcagggtggtgacatgtggcgcgaactatttgcgtccgcccgcgaccgtggtgttcgcgcgacgtggaaagcagatcgcccgagggtcggcacggatggcgagtggagggacggcg

SEQ ID NO: 26613 - DNA, 1257 bp, Mycobacterium bovis
gtgatcgacctgaagctgcttcgtgaaaaccccgacgcggtacgccgctcacaactcagccgcggcgaggacccggcgctggtagatgccctgctgacggccgacgccgcccgccgggccgtgatctcgaccgccgattcgttacgggccgagcagaaagccgccagcaaaagcgtgggtggcgcgtctcccgaagagcgcccgccgctgctgcggcgcgcgaaggaactcgccgagcaggtcaaagccgctgaggccgacgaggtcgaagcggaggcggcgttcaccgcggcgcacctggcgatctcgaatgtcatcgtggacggggtacccgccggcggggaggacgactacgcggtgctcgacgtcgtcggcgagcccagctacctcgagaaccccaaggaccacctggagctcggcgagtcgctgggcctgatcgacatgcagcgcggcgccaaggtgtcgggttcacggttctacttcctgaccggtcggggtgccctactgcagcttggattgctgcagctggcgctgaagctagccgtcgacaacggctttgtccctacgatcccgccggtgctggtgcgcccggaagtgatggtaggcacgggatttctaggcgcccacgccgaggaggtgtaccgggtagagggcgacggcctctaccttgtgggcacctccgaggtaccgctggcggggtatcactccggcgagattctggacctttcccgcgggccgctgcggtatgcgggctggtcgtcgtgtttccgacgtgaggccggcagccatggcaaggacacgcgcggcatcatccgggtgcaccagttcgacaaagtcgagggcttcgtctactgcacaccggccgacgcggagcacgaacatgagcggctgctgggctggcagcgccagatgctggcacgcatcgaggtgccgtatcgggtcatcgacgtggccgcgggtgatctcggctcgtcggccgcccgcaagttcgactgcgaggcgtggattccgacgcagggggcctatcgcgagctgacgtcgacgtcgaactgcaccacctttcaggcgcgccggttggcgacccgctaccgggatgccagcggcaagccgcagatcgcggccaccctcaacggaacgctggccaccacccggtggctggttgcgatcctggagaaccaccagcggcccgacggcagcgttagagtcccggacgcactggttccgttcgtgggtgtcgaagtgctggagccggtcgct

SEQ ID NO: 26614 - DNA, 1197 bp, Mycobacterium bovis
atgcaaccgatgaccgctcgttttgaccttttcgtcgtcggctcaggattcttcggcctgacgattgccgagcgcgtggccacccaactcgacaagcgcgtgctcgtcctcgagcggcgcccgcacatcgggggcaatgcctattccgaagccgagccacagaccggcatcgaggtccacaagtacggtgcgcacctgtttcacacctctaataagagagtgtgggactacgtgcggcagttcaccgacttcaccgactaccggcaccgggtcttcgcgatgcacaacgggcaggcatatcagtttccgatggggctcggcctggtatcgcagttcttcggcaagtacttcacgcccgagcaagcccgccagctgatcgccgagcaggccgccgagatcgacaccgccgacgcgcagaacctcgaggagaaggccatctcgctgatcggccggccgctctacgaagcgttcgtcaaggggtacacggccaagcaatggcagactgaccccaaagaacttccggccgccaacatcacgcggcttcccgtgcgctacaccttcgacaaccggtatttcagcgatacttacgagggtttgccgaccgacgggtacacggcgtggttgcaaaacatggccgctgaccaccgcatcgaggtcaggctgaacaccgactggttcgacgtgcgcggccagctgcgccccggcagcccggcggccccggtcgtttacaccggcccgctggaccgctacttcgactacgccgaaggccgattgggctggcgcaccttggacttcgaggtggaagtgctaccgatcggggactttcagggcaccgcggtgatgaactacaacgatctcgacgtcccctacacgcgcatccacgagttccgccacttccaccccgagcgtgactacccaacggacaaaacggtgatcatgcgggaatactcccggttcgccgaggacgacgacgagccatactatccgatcaacaccgaggctgaccgcgccctgttggccacctatcgggccagggcgaagtccgagaccgcgtcatcgaaggtactgttcggcggccggttgggcacctaccaatatctggatatgcatatggccattgccagcgccttgaacatgtacgacaacgtcctcgcgccgcatctgcgcgacggcgtcccactgcttcaggacggcgca

SEQ ID NO: 26615 - DNA, 777 bp, Mycobacterium bovis
gtggaaccggtatacggcaccgtcattcggcttgctcgcttgtcctggcgcatacagggtttgaagatcaccgtcacgggtgtggataacctaccgaccagcggcggcgccgtcgtcgcgatcaaccacaccagctacctcgacttcacctttgcgggtttgcccgcctaccaacagggcctcgggcgcaaggtgcggttcatggccaagcaggaggtgttcgatcacaagatcaccggtcccattatgcgcagcctgcgccacatcccggtggatcggcaggacgggtccgcgtcctacgacgccgccgtcaggatgctgaaggccggcgaactcgtcggcgtgtaccccgaggcgaccatcagccgcagcttcgagatcaaggaattcaagacgggggcggcccgaatggcgatcgaggccggggtgccgatcgttccgcatattgtttggggtgcgcagcggatctggactaaggaccgtcccaaaaagctgtttcgcccgaaggtgccggtcacgattgtcgtcggtgaacggatcgaaccgacgctgcccaccgctgaactgaacggcctgctgcactcccggatgcaacatttgctggagcgggcccaagaactgtacggaccgcatccggccggcgagttctgggtgccgcaccggctgggcggcggcgccccgtcgcttgccgaggcggcccggttggacgcgcaggaggcggcggttagggctgcgcgccgcgctcagcgagcccatcccgccggggcgccggagcag

SEQ ID NO: 26616 - DNA, 627 bp, Mycobacterium bovis
atgagcaggtcaacccgttattctgttgccgtgtcggcgcagcctgaaacgggtcagatagcaggccgcgcccgcattgccaacctcgccaatatcctgacgctgttgcggctggtgatggtcccggtcttcctgctggccttgttctatggcggcggccaccactccgcggcccgcgtagtggcgtgggcgatatttgcaaccgcctgcattaccgatcgattcgacggcctgctggctcgcaattacgggatggcaaccgaattcggtgcgtttgtcgatccgatcgcggacaagactctgatcggctcggcgctgatcggattgtcgatgctcggcgacttgccgtggtgggtcacggtgctaatcctgacccgcgaactcggagtgaccgttttgaggttggcggttattaggcgcggtgtcattcccgcgagctggggcggcaagctgaagacctttgtccaggcggtggcaattggcttattcgtgttgccactttcgggtccgctgcacgttgcggcggtggtagtgatggccgccgcgatcctgctcaccgtgatcactggtgtcgattacgtggccagggctctgcgggacatcggggggatccgccagaccgccagc

SEQ ID NO: 26617 - DNA, 621 bp, Mycobacterium bovis
gtggcgccagtgatcgccgacaaccgatcgctaggttgcaacggggtgggcgtgactaccggtgcgatccgcttggcggcacggtcgatgtctgccccagatagtgaaaacagcggcgagctgctcgggctctggctcagttcggcggacaccggtcaatggtgccacgccgccctatcccaatggctagccgcccgcgcgcaccggggtcagcacgaacaccggaatctggcggtccgtcttggtctggtagctggcatagtccggccagaccgccacggcgcgctgccaccagatggccttctcgtcaccgaacacctcgcgggcgtcgtagtcgccggtcacggtgccgtcctgcagctcgacccgtgggttcttcacgacgttgtggtaccagaccggatttttcggcgccccacccagcgaggcgacgatcgcgtactggccgtcgtgctcgacgcgcatcagcggggtcttacggagtttgccggtcttcgccccgacggtggtgagcaggatgaccggctttccctgcagctgtgtgccctcggttccgccggacttcatatacgtgtcggcttgctcgcgcgaccagtcgagcgggctcggcgcatattcccc

SEQ ID NO: 26618 - DNA, 1281 bp, Mycobacterium bovis
ttgctgtctctcagcgaggaattcgaactcaccactcgagaacaggagttgctgaccaccacggcggtgctcggccagatcgccggggcgcttggcggcggcatcctcgccaacgcgatcggacgcaagaaatcggtggtgctcatcgtcgccggctacgcagtgttcgccctgctcggcgcgacctcggtgtccgtaccgatgctggtggtggcgcgtctgctgctgggtgtgacaatcggcctgtcggtggtggtggtgccggtgtatgtggccgagtcggcgccggcggcggtgcgtgggtcgttggtgaccgcgtatcagctggcgacgcttagcggcatcgtcgtcggttacctggtcggctacctgttggccggatcgcacggctggcgcgcgatgttcgggctggccgccgcgccggccacgctgctgttgccgttgttgtggcgcatgcccgataccgcccgctggtatctgctcaagggccggatcgccgacgcgcgtagcgcgctgcggcggatccagccggaggccgacatcgatgccgagctggccgatatggcggccgcggtcgacgaacgcggcggcggtatcggcgaaatggtgcggcggccgtatctgcgggccacgctgttcgtcatcgcgctcggcttcctcgtccagatcaccgggatcaacgcgatcatctactacagtccgcgacttttcgccgccatgggcttcgcgggctatttcgcgatgcttgccctgcccgcgatggtgcaagtcgccggcttggcggcggtgtgtgcctcgctgtttctggtcgatcggctgggccgtcgcccgatcctgttgtccggcatcgcgacgatgatcaccgcagatgccgtgctgatcaccgtattcgccaacgactccgatggtggcacggggctggtgttggggttcgccggcgtgctgctgttcatcatcgggttcaacttcggattcggctcgctggtctgggtgtacgccgcggagagcttcccgtcccggctgcggtcgatgggatcgagcctgatgctcacctcgacactgacggccaacgcgatcgttgccgccttctcgctcaccatgctgcgtgtgctcggcggcgcaggcgttttcgcggtcttcggcacgttcgccgtcgtcgcgttcgtggtcgtgtaccgctttgcgccggagaccaagggccgcaaactcgaggagatccggcacttctgggagaacggcggccgctggcccgccgagcggtcaccggcggcggacgaaccg

SEQ ID NO: 26619 - DNA, 1149 bp, Mycobacterium bovis
gtgaccgtgctcggcgccgacgccgtcgtcatcgacggccggatatgccggccagggtgggtgcacaccgccgatggtcggattctctccggtggcgctggggcaccgcccatgccggccgacgcggaattccccgatgcgatcgtggtgcccggctttgtcgatatgcatgtgcacggcgggggcggcgcgtcgttcgccgacggcaacgccgcagacatcgcccgtgcggccgagtttcacctgcggcacggcaccactaccacgctggccagtctggtcaccgcgggccccgccgagttgctctccgccgtgggcgctttggccgaggcaactcgggacggcgtcgtcgcgggcatccatctggaggggccgtggctgagcccagcgcggtgcggagcgcacgaccacacccggatgcgtgccccggatcccgccgagatcgagtcggtgctcgccgccgccgacggcgccgtccggatggtcacgttggcacccgagttgcccggaagcgatgcggcgatccggcgcttccgtgacgccgaagtggttgtcgccgtggggcatacggatgcgacctacacacagacccgacacgccatcgacctgggcgcgacagtcggcacccacctgttcaacgcgatgccgccgctggaccatcgggcgcccggacccgtgctggcgttgctgtgcgacccgcgggtgaccgtcgaaatcatcgccgacggcgtgcacgtgcaccccgcggtggtgcacgcggtgatcgaagccgtcggtcccgatcgggtcgccgtggtcaccgacgcgatcgccgcggccggatgcggcgatggcgcgttccggctcggcacaatgccgatcgaggtcgagtcgagcgtggcacgggtggctggtgcgtcgacgctggcgggcagcaccaccaccatggatcagctcttccggacggtggctgggctcggctcgaagtcggactcagccggcgatgtggcgctggccgccgcggtgcaggtgacctcggcgacgccggcccgcgctctcgggctcaccggggtgggccggctggcggcgggctatgccgccaatcttgttgtgctggaccgtgatctgcgggtgacggccgtcatggtcaacgatgactggcgggtgggc

SEQ ID NO: 26620 - DNA, 909 bp, Mycobacterium bovis
atgatggcccgcatgccagagttgagccgccgcgccgtgctcggtctcggcgccggcacggtccttggcgctacctcagcgtatgcgatcgacatgctgttgcagccccgaacttcacatgccgcaccggcggcggcgattggcacaaacgttccattggcgccgacaccagcactcgatccggcccccccggctcaggcggcgccgacgatgtccaccggctcgttcgtgtcggcagcgcgcgccgggaagatgaccaactgggccatcgcccgcccacccggccagacccaggcgttgcggcccgtgatcgcactgcacggcttgggcggtagcgcatcggccgtgatggacggcggcgtcgagcagggcctggcccaggccgtcaacgccgggttgccaccgttcgcggtggtctccgtggccggaggcagcagctactggcaccagcgggcttctggcgaggacgcgggggcaatggtgctcaacgagctcattccgctattggacacccagcggctggacacctcccgggtagcgtttctgggctggtcgatgggcggctacggcgctttgctgctcggcagccgccttggaccggcacgcaccgcagcgatctgcgcggtcagcccggcactgtggctatccgccggtgccgtcgcacccggctccttcgacggacccgacgactggtcggcgaactcggttttcggactccccgcattggggtccatcccgatccgggtcgattgcggcaacagcgatccgttttatgccgcaaccaagcagttcgtggcgcagctgccccacccgccggcgggcggcttctcccctggcgggcacaacggtgggttctggagcgcacagctacccgccgagctgacctggttcgcgccgctgctcacaggt

SEQ ID NO: 26621 - DNA, 1416 bp, Mycobacterium bovis
gtgagcattcccaacgtgctggccacccgatacgccagcgccgagatggtcgcgatctggtcgccggaggccaaggtggtctcggagcggcggttatggctggccgtattgcgggcacaggcagagctgggggtagcggttgccgattcggtgctcgccgactacgaacgtgtggtcgacgatgtggacttggcctcgatctcagcccgggagcgggtgctgcgccacgatgtcaaggcccgcatcgaggaattcaacgcattggccggtcatgagcacgtgcacaaggggatgaccagccgcgacctgaccgagaacgtggagcaactgcagattcggcggtcgctggaagtgattttcgcccatggggtggcggcggtggcgcggctggccgagcgggcggtgagctaccgtgacctgatcatggccgggcgcagccacaacgtggccgctcaggccaccaccttgggcaagcggttcgcctcggcggcccaagagatgatgatcgcgttgaggcggttgagggagttgatcgaccgctaccccctgcgtggcatcaagggcccgatgggcaccggtcaggacatgctcgatctgctgggcggtgaccgtgcggcgctggccgatctcgagcggcgcgtcgccgacttcttgggctttgcaactgttttcaacagcgtggggcaggtgtatccgcgttcattggaccacgacgtggtttcggctctggtgcagctcggcgcggggccgtcatcactggcacacacgattcgattgatggccggccacgagctcgccaccgagggtttcgcgccgggtcaggtcggttcgtcggcgatgccgcacaagatgaacacccgcagctgcgaacgggtcaacgggctgcaggttgtgctacgcggctatgcatccatggtggccgagttagccggtgcacagtggaacgagggtgatgtgttttgctccgtggtgcgccgggttgcgttgccggacagcttctttgccgtcgacgggcagatcgagacgtttttgacggtgctggacgagttcggcgcctacccggcggtgatcggccgcgagttggatcgttatctgccgttcctggccaccactaaggtgctaatggcggccgtgcgcgcggggatgggtcgcgagtccgcgcaccggttgatctccgagcacgcggtggcgacggcgctggccatgcgagaacacggcgcggagcccgacctgctggaccggttggccgccgatccgcggctgccgctgggacgagacgctttggaggccgcgctggccgacaagaaggcatttgccggtgccgcgggtgaccaggtcgatgatgtggtcgcgatggtggacgcgctggtgagccgttacccggacgcggctaaatacacgccgggtgcaattctt

SEQ ID NO: 26622 - DNA, 1389 bp, Mycobacterium bovis
gtgacccaggacggcacgtgggtggacgaaagcgattggcaactagacgattcggagatcgcggagtccggagcggcgcctgtggtggcggtagtcggccggcccaatgtcggcaagtccaccctggtcaaccggatcctgggccgccgcgaggcggtggtgcaggatattcccggcgtgacgcgtgaccgggtctgctacgacgcgctgtggaccggacgccggttcgtcgtacaggacaccggcggatgggagcccaatgccaagggcctgcagcggttggtggccgagcaggcctcggtggccatgcgcaccgcggatgcggtgatcctggtggtcgacgccggtgtcggtgccaccgccgccgacgaggccgcggcccgtatcctgttgcgatccggcaagccggtgttcttggccgccaacaaggtcgacagcgaaaaaggcgaatccgacgccgcggcgttgtggtcgctgggcctgggtgagccgcatgcgatcagcgcgatgcacggtcggggggtggccgacctgctcgacggggtgctcgccgcgctgcccgaggtgggggagtccgcgtcggcgagcggcggtcctcgccgggtggcgctggtcggtaagccgaacgtcggcaagagctccctgctgaacaaactcgcgggtgatcagcgatcggtggtccatgaggcggcgggcaccaccgtcgacccggtggattcgctgatcgagttgggcggtgacgtctggcggttcgtcgacaccgcgggattgcggcgcaaggtcggccaggccagtgggcatgagttctacgcctcggtgcgcacgcacgccgccatcgactccgccgaagtggccatcgtcctgatcgacgcgtcgcagccgctcaccgaacaggacttgcgagtgatatcgatggtcatcgaggccggacgggcgctagtcctggcctacaacaagtgggacctggtcgacgaggaccggcgcgagctgcttcagcgcgagatcgaccgagagctggtgcaggtgcgctgggcgcaacgggtcaacatctccgccaagacgggccgggcggtgcacaagctggtgccggccatggaggatgcgctggcgtcatgggacaccaggatcgcgaccggcccgctgaacacctggctcacagaggtgacggcggccacaccgccgccggtgcgcggcggcaagcagccacgcatcttgttcgcgacccaggccaccgcgcggccaccgacgttcgtgttgttcaccacgggttttttggaggccggctatcggcggttcttggagcggcggctgcgtgagacgttcgggtttgacggcagcccgatccgggtcaacgtgcgggtgcgagagaagcgggccggcaagcgccgc

SEQ ID NO: 26623 - DNA, 921 bp, Mycobacterium bovis
gtgaccgctcatcgcagtgttctgctggtcgtccacaccgggcgcgacgaagccaccgagaccgcacggcgcgtagaaaaagtattgggcgacaataaaattgcgcttcgcgtgctctcggccgaagcagtcgaccgagggtcgttgcatctggctcccgacgacatgcgggccatgggcgtcgagatcgaggtggttgacgcggaccagcacgcagccgacggctgcgaactggtgctggttttgggcggcgatggcacctttttgcgggcagccgagctggcccgcaacgccagcattccggtgttgggcgtcaatctgggccgcatcggctttttggccgaggccgaggcggaggcaatcgacgcggtgctcgagcatgttgtcgcacaggattaccgggtggaagaccgcttgactctggatgtcgtggtgcgccagggcgggcgcatcgtcaaccggggttgggcgctcaacgaagtcagtctggaaaagggcccgaggctcggcgtgcttggggtggtcgtggaaattgacggtcggccggtgtcggcgtttggctgcgacggggtgttggtgtccacgccgaccggatcaaccgcctatgcattctcggcgggaggcccggtgctgtggcccgacctcgaagcgatcctggtggtccccaacaacgctcacgcgctgtttggccggccgatggtcaccagccccgaagccaccatcgccatcgaaatagaggccgacgggcatgacgccttggtgttctgcgacggtcgccgcgaaatgctgataccggccggcagcagactcgaggtcacccgctgtgtcacgtccgtcaaatgggcacggctggacagtgcgccattcaccgaccggctggtgcgcaagttccggttgccggtgaccggttggcgcggaaag

SEQ ID NO: 26624 - DNA, 1629 bp, Mycobacterium bovis
atgcaaaagctcgacccgtacctcaacgtcgacccgggtaccatgaacccgttccagcacggcgaggtcttcgtgaccgaggacggtgccgaaaccgatctcgacgtcggccactacgaacggttcctcgatcgcaatttgcccggctcagcgaatgtgactaccgggcaggtgtattcaacggtgatcgcgaaggagcgccgcggcgaatacctgggcgacaccgtgcaggtgatcccccatatcaccgacgagataaaacggcgcatcctggcgatggcccaaccggacgccgacggtaaccgcccggacgtggtcatcaccgaaatcgggggcactgtcggcgatatcgagtcacagcccttcctggaggcagcgcggcaagtccggcactatctcggccgggaggacgtgttttttctgcacgtgtcgctggtgccctacctggcgccgtcgggtgagctcaaaaccaagccaacacagcactcggtggccgcactgcgcagcattgggattaccccggacgcgttgatcctgcgctgcgaccgcgacgttcccgaagcgctgaaaaacaagattgcgttgatgtgtgacgtcgatatcgacggcgttatctccaccccggacgcgccctccatctacgacatacccaaggtattgcaccgcgaggagctcgatgcgttcgtggtgcgccgactcaatctgccgttccgcgacgtcgattggaccgaatgggacgacctgctgcgccgggttcacgaaccacatgagacagtgcgaattgctttggtgggcaagtacgtcgaattatccgacgcttacctctcggttgccgaggcattgcgtgccggcggattcaagcaccgggccaaggtcgagatctgttgggtggcatccgacggttgtgaaacgaccagtggtgccgcggcggcgctcggcgatgtgcatggggtgctcattccgggcggattcggcatcaggggcatcgagggcaagatcggcgccattgcatacgcgcgggcgcgcgggttgccggtgttggggctgtgcctcggtttgcagtgcattgtgatcgaggccgcgcgatcggtcggtctcaccaacgccaattcggccgaatttgatcccgacacaccagatcccgttatcgccacgatgcccgatcaagaagaaatcgtggccggcgaggcggatctgggcggtaccatgcgtctcgggtcctaccccgccgtgttggagccggattcggttgttgcccaggcataccaaactacccaggtgtccgagcggcatcgccaccggtacgaggtcaacaacgcgtaccgagacaagatcgccgaaagcggcctgaggttttccgggacgtcacctgacggacacttggtagagttcgtcgagtatccgccggatcggcatccgttcgttgtcggcacccaggcccaccccgagttgaagagccgacccacccggccgcacccactgtttgtcgcattcgtcggggcagccatcgattacaaggcgggtgagttgctgcctgtcgagatccccgagatccccgagcacacacccaacggtagctcccatcgggacggcgtgggccagccgctaccggaacctgcgtctcgtggc

SEQ ID NO: 26625 - DNA, 933 bp, Mycobacterium bovis
atgaagacgctggcactgcaattgcagggctacctcgaccatctgacgatcgaacgaggtgtcgcggcaaacacattgagctcctaccgacgtgatctgcgccgctactccaagcacctggaagaacgagggattaccgatctggccaaggtcggcgagcacgacgtcagcgagttcctggtggcattgcggcgcggggatcctgattccggcacggcggcgttgtccgcggtgtcggcggcacgggcgctgatcgcggtgcgcgggctgcatcgcttcgctgccgcagaagggctggccgaactggacgtggcgcgcgccgtccggccaccgacgccgagccggcgattgcctaagagcctgacaatcgacgaggtgctatcgctgctcgaaggtgcgggcggcgataaaccgtccgacggcccgctgacgctgcgaaaccgtgcggtgctggaactgctgtactcgaccggggcgcggatctccgaggccgtcggccttgacctcgacgacatcgacacccacgccagatcggtgttgttgcgcggcaagggtggtaagcagcggctggttccggtgggacgcccggcagtgcacgcgctggacgcctatctggtgcggggacggcccgacttagcgcggcggggccgcggaacggcggcgatctttctcaacgcgcgcggcggccggttgtcacggcaaagcgcgtggcaggttctgcaggacgcggccgagcgtgccggcatcaccgccggtgtttcgccgcatatgttgaggcattcgttcgccacgcatctgctggagggtggcgccgatgtccgggtggtgcaggaattgctggggcacgcctcggtgaccacgacgcagatctataccctggtcaccgtccatgcactgcgcgaggtgtgggcgggagctcacccgcgggcacgc

SEQ ID NO: 26626 - DNA, 669 bp, Mycobacterium bovis
ttgcctgcggccttgttgaccagtgccttcttcgccatctgctcagttctccttgaagggaaagccgagggcccgcaacagcgctcggccttcgtcgtcggtcgccgcggaagtgacgacgttgatgtccatgccacggacccggtcaatcttgtccacgtcgacctcgtggaataccgcctgctcggccagcccgaaggtgtagttgcccacaccgtcgaactgtttgggcgaaagcccacggaagtcacggatgcgtggcagtgcgatcgacgtgagccggtcaaggaactcccacatccggtcaccgcgcagcgtgactcggacgcccaccggcatgccctcacgcaatttgaactgcgcgatggacttgcgcgcccggcggacttccggcttctgcccggtgatcagcgccaaatcgttgaccgccccgttgatcaacttggcgtcccgggcggcctcgccgacacccatgttgacgacgactttcgtcaccgtcgggatctgcatgacattgccgtagccgaactgcttgcgcagcgcatcccgaatctcactgcggtagcgctccttgaggcgcggctgaaccttctgtgcagtggtcatcaaatgtccttgccgttgcgcttggagatacggacgcgcttgccggtctcctcgtcgacccga

SEQ ID NO: 26627 - DNA, 1458 bp, Mycobacterium bovis
gtgttacaacgaatcgctagagagctcttatcgggagtggccgtcgcgatcgttgcgctgccgctggcgatcgcgttcggcattaccgccaccggaacgtcccaaggtgcgctcatcgggctctacggcgccatcttcgccggattcttcgcggccgtgttcggtgggacacccggacaggtgacgggccccaccggccccatcaccgtcgtcgctaccgcaaccatcgccgaacacggactcgagggtgccttcttcgcgtttatcctcgccggcgtctttcagatcctgttcggggcgtgccggctcggttcactcatccgctacgtgccccaccccgtgatctctggattcatggggggaatcgcgatcctcatcatcatgacccagctggatcaggtgcgcagcagctccctgctcgtgttggtaacggtcgtcctgctgctggctagcggccggtttatcaaagcgattccaccgagcctgctcgtcctggttctggtcagctcggtgctgccgctcgcggcgccatggctgcgcgacctgcgcgctgggccggtctcgatcaacaggacggtcgactacatcggcgagatcccacaggccatgccgtctttcgacttcccgcaagtcgccaattcgacgatgctgcaggtgctgctgtcggcggtggccatcgcgctgttgggatccctcgattcactgctgacgtcgctggtcatggacaacatcaggggcacccggcaccggagcaacaaagaactgatcggccaggggattggaaatatcgccgccgggctcttcggcgggctggccggtgccggcgcgaccgtccgatcggtggtgaacgtcagaaatggtggtcagaccgccctgtcggcggccactcacagtgtcgttttgttcgttttcgttgccgggcttggtgccgtggtgcagtacatcccgctcgccgtgctgtcggggatactgatattggttgccgtcggcatgttcgactggcacgccatgcgcaaagcgcatgtgtcacccaggggcgacgtcatcgtcatgttcacgacgatgatcatcaccgtcgtcgtcgacctcaccatcgcggtgatggtcggaatcgccctctcgctgctggtccataggctccgatcccggcaacgcaaagccaaggtcacccaggacgacaccggcacctatcgcatcgacggtccgttgtcgttcctgtccgtcgacggtgtatttggctccctgcgcgacggtcgtgaggacgtgtcgctggacctccagcacgtcacctacctcgacacctctggtgcccaggccctgctgtatttcatcgaccactccgagaaggacggcgtcgcggtaagcatcaagcggatccccccacgcctcgaaagccaactcaccgcactcgccgacaacgagcaacgtgacaagctgagaaccgtcctcgaatccgcc

SEQ ID NO: 26628 - DNA, 762 bp, Mycobacterium bovis
ttgatggccgagccggaagagtcccgggagccccggggcatccgcctgcagaaagtgttgtctcaggctggaatcgcgtcgaggcgagccgccgagaagatgatcgtcgacggccgcgtcgaagtggacgggcacgtggtgaccgagttgggtactcgggtcgaccctcaggtcgcggtggtccgtgtcgacggggccagggtggtgctcgacgactcgctggtgtacttggcgctgaataagccgcgcggcatgcactcgaccatgtccgacgatcgcggccgcccgtgcatcggcgacttgatcgaacgaaaggtccggggcaccaagaagctttttcatgtcggacgcctagacgcggacaccgagggactgatgctgctgaccaatgacggcgagttggcgcaccggttgatgcatccctcccatgaggtgcccaagacgtatctggcgacggtgacggggtcggtgccgcgtgggctgggccgaacgctgcgagcgggaatcgaattggacgacggaccggcgttcgtcgacgatttcgcggtagtggatgcgatccccggcaagacgttggtgcgggtaacgctgcatgagggacgcaatcgcattgtgcgccgactgctggcggccgccggcttcccggtggaggcattggtgcgtaccgatatcggcgcggtgtcactgggaaagcaacgcccgggcagcgttcgggccttgcggtcgaacgagatcgggcaactgtaccaagcggtgggcctg

SEQ ID NO: 26629 - DNA, 690 bp, Mycobacterium bovis
gtgagtcgcctaagcgcagcggtagtcgcgatcgacgggccggccggcaccggaaaatcctcggtgtcaaggcgattagcgcgcgagctgggcgcacgctttctggacaccggggcaatgtatcggatcgtgacgttggcggtgctgcgtgccggtgctgatccgtccgatatcgctgccgtcgagacgattgcgtcgacggtgcagatgtcgttaggctacgatcccgacggagacagctgttaccttgccggagaagacgtttcggttgagatacgcggtgacgcggtcacccgtgcggtctccgcggtgtcgtcggtgccggccgtacgcacccggctggtcgagctgcagcgaacaatggctgagggcccgggcagcatcgtcgtggagggccgcgacatcggaaccgtggtgtttccggatgcgccggtgaaaatcttcttgaccgcctcggccgaaacgcgggcccggcggcgcaacgcccaaaacgtcgcggcgggtttggccgacgactatgacggggtattggccgatgtgcgccggcgcgaccacctcgattccacccgggcggtgtcaccgctgcaagccgccggtgatgccgtcatcgtggacaccagcgatatgaccgaggccgaggtggtcgcccatctgttggagctggtcacgcggcgaagtgaggcagtgcgg

SEQ ID NO: 26630 - DNA, 1587 bp, Mycobacterium bovis
ttggcgccgcgcagctatcgcaggtggcccccggcggtggtgggcatctccgctctcggcggcatcgcctacctggcggacttcgcgatcggcgccaatgtcggtatcacgtggggtaccgcgaacgcgctgtgcggaatcgcaatcttcgcactggtggtcttcgtcaccggcttgccgctggcctactacgcggcgcggtacaacatcgacctggatctgattacccgcggtagcggtttcggctactacggctcggtggtcaccaacgtcatctttgccacgttcacgttcatcttctttgccctggagggctcgatcatggctcagggccttaagctaggcctgcacattccgctgtgggcgggttacgcgtgctcgaccctgatcatcttcccgctggtggtctacgggatgaaagttttgtcacagctgcaactttggaccaccccgctctggctgatcctgatggcggccccatttggctacctggtagtcagccatcccgattcgattggacagtttttctcctacgccggcaaggatggtcatggcggccttagcttcggttctgtcctgttggcagcgggagtgtgcctgtcactcatcgctcagatcgccgagcagatcgactacctgcgcttcatgccgccacggacgccggagaacgcgaacaggtggtggacgtggacgctgctggccggtcccggctgggttgcatttggggcgaccaaacagatcatcggcctgttcctggcggtctatctgatggccaacatccccggctcgtcgacaatcgccaaccagccggtgcaccaattcatgcagatataccgcaccttcgtaccgggctggctggcgttgacactcgccgtcatcctggtgatcttgagccagatcaagatcaacgtcacgaacgcgtattcgggctcgctggcgtggaccaattcattcacacggctcaccaagcactatcccgggcgggtcgtgtttcttggggttaacctcgcgattgcgttgattctcatggaagccaacatgtttgacttcctgaacacaatcctgggttgctacgccaattgcggtatggcctgggtggtggcggtggcgtcggacatcggcttcaacaagtatctgctcggcctgtcgccgaagactcccgaattccgccgcggcatgctatacgccatcaacccggtcggcttcgggtcgttgctgctggccgcggggctgtcgatcgtcaccttcttcggcggtctgggtgcggcactgcagccttattcaccattggtggcaatcgtcaccgcgttggtaatgccgcccattctggcagccgcgaccaaaggcaagtactaccttcgccgcacgcacgacggtatcgatctgcccatgtacgacgagcacggcaatccctcggccgcggtgttgacttgccatgtctgccaccaggatttcgagcggcccgacatgctggcctgccagacccatggtgcgcatgtctgttcgctgtgcttgtccacggacaagcaggccgagcatgtgcttcctgggttagcccgagcgcacatcccgggtgaccaagttccg

SEQ ID NO: 26631 - DNA, 1485 bp, Mycobacterium bovis
gtgagtcgtatcacgaccgaccaactgcggcacgcggtgctagaccggggatctttcgtcagctgggatagcgagccgctggcggtgccggtagccgactcctatgcgcgggagctggccgccgctcgggcggccaccggcgcggacgaatcggtgcagaccggtgagggacgcgtattcgggcggcgggtggccgtggtggcctgtgagttcgacttcctgggcggctcgattggggtggcagcggccgaacggatcaccgccgccgtcgagcgggcgaccgccgagcggctgccgctactggcgtcaccaagctcgggaggcacccgcatgcaagaaggcacggtcgcgtttctgcagatggtgaagatcgctgcggccatccagctgcacaaccaggcgcgcctgccctacctggtctatttgcgccatccgaccacgggtggagttttcgcgtcgtggggctcgctggggcatctcaccgtcgccgagccgggcgccctgatcggctttctgggaccacgggtctatgagttgctctatggcgaccccttcccatccggcgtccaaaccgccgagaatctacggcggcatgggatcatcgacggcgtcgttgcactggaccggctacgaccgatgctggatcgtgcgttgacggtgctcatcgacgctcccgaaccgcttccggcaccgcagacgcccgcgcccgtacccgatgtgcccacgtgggactcggtggtggcatcgcgccggccggaccggccgggcgtcaggcagctactgcgacacggcgccaccgaccgggtgttgttgtcaggaaccgatcaaggcgaagcggcgaccacgctgctggcgctggcccgctttggcggccaacccacggtggtcctcggccagcaaagggcagtaggcggcgggggaagcactgtcgggcccgctgcgttacgcgaagcccgacgcgggatggcgctcgccgccgagctgtgcctgccgctggtgctggtcattgacgcggccggacccgcgttgtcggccgcagccgaacagggcgggctggccggccagatcgcgcattgcctggccgagctcgtcacgctggataccccgaccgtgtcgatcctgctgggccagggcagcggcgggccggcgctggcgatgttgcccgccgaccgggtgctggccgcactccacggctggctggcgcccttgcctcccgaaggagccagcgcgatcgtgttccgagacactgctcatgccgccgaactcgctgccgcccaaggcatccggtcggccgacctactgaagtcggggattgtcgacaccatcgtgccggagtaccccgacgccgcagacgagccgatcgagttcgccctacgactgtcgaacgccatcgccgccgaagtgcacgcgttacggaagataccggccccggaacgcctcgcgactcggttgcaacgctaccgccggatcgggttgccccgcgac

SEQ ID NO: 26632 - DNA, 1614 bp, Mycobacterium bovis
atgcggatcgccggcgtggggctcggccagttgctcctggcgctggatgcgaccgtggtcagcctggtggacgccccgcgcggcctggacctgccggtggcgtcgacggcgctgatcgattccgacgacgtgcggctgggcctggcggccgcggcgggctcggccgatgtgttcttcctgatcggggtcaccgacgacgaggcggtgcgctgggtcgacgatcaggcacgccaacgggcgccggtggcgatcttcgtcaagcacccgtcggactcggtggtggccggggccgtccgcgccggctcggcggtggtagccgtggagccgcgggcccgctgggaacggctgtaccacttggtgaatcatgtcttggagcatcatggtgaccgggccgaccccaccgacgattccggaaccgacctgttcgggttggcacagtccctggccgaccgcatccacggcatgatcagcatcgaggacgcccagtcgcacgtgctcgcctactcggcctccaacgacgaggccgacgagctgcgtcggctgtccatcctgggccgcgccggcccgcccgagcatctgcagtggataggtcaatggggcatcttcgatgccctgcgggccggccgtgaggtggtgcgggtggccgagcgccccgagctggggttgcgtcctcggctagccatcgggattcatcagccgggggtcggtgcgctgcggccaccggtgttcgccggcacgatctgggtccagcaaggctcgcagccgttggccgacgatgccgaggagatgttgcggggtgctgcggtgctggccgcccggatcatgtcgcgactggcgacccagcccaatacgcacgcgctgcgggtacagcaactactgggcctggccgagctgaacgcaaccacagcacccgtcgacgtatcgaccatcgcccgtgaactcggcgtcgccgccgagggcaacgcaacgctgatcggtttcgacaccgcggaaaaccgcgataccgcagtccgccatgttcggcttgttgacgtcatggcattgagcgccagcgcttttcgccacgacgctcaggttgccgccaacggctcacggatctatgtgctgctgccccaaaccacgaccggccgagctgtcacctcgtgggtccgcggcacaatcagcgcactgcgcgccgagctgggagtagcactacgggcagccatcgcggggccggtcgcgggacttgccgaagtcaacccggcacgcgtcgaggtggatcgggtactcgagagtgccgagcgccacccgatcttggggcaggtgacatcgctggccgaggcacgcaccaccgttctgctcgacgaaatcgtcaccctggtcggcaccgaccagcggctcgtcgatcctcggatacgtgacctgggcgcccaggatccggtgctggctcagaccctgcgtgcctacctggatgccttcggcgacatcggcgccgccgcacggtcactgcaagtgcatcccaacaccgttcgctaccggataaggcggatcgagcagctgttgtcgacctcgctgggcgatccggatgtgcggctgctcttttcgctggggctgcgggccatggaacgcacggct

SEQ ID NO: 26633 - DNA, 741 bp, Mycobacterium bovis
atggcgtcattgctgaacgctcggactgccgtaattaccggcggtgcacaagggctggggttagctatcggccagcgattcgttgccgagggtgcacgggttgtgcttggtgatgtgaatctcgaagcgaccgaggtcgcagccaagcggctgggcggcgatgacgttgctctggcggtgcggtgcgatgtgactcaagccgacgacgtcgacatcctcatccggaccgctgtcgagcgtttcggcggtctggatgtcatggtcaacaacgccgggatcacccgcgacgcaacgatgcgcacgatgaccgaagagcagttcgatcaggtcatcgcggtgcatctgaagggaacatggaacggtacccggctggcggcggcaatcatgcgggaacgcaagcggggcgccattgtgaacatgtcttcggtgtcaggcaaggtcggtatggtcggccaaaccaactactcagcggccaaggccggcatcgtaggaatgaccaaggcggccgccaaagaacttgcacacctcggcattcgggtaaacgcaatagctccggggttgatccgttcagcgatgacagaagctatgccgcaacgcatttgggaccagaagcttgccgaagttccgatgggtcgcgccggcgagcccagcgaagtcgctagcgtggccgtgttcttggcttcggatctatcctcgtacatgaccggcaccgtgttggacgtgactggcggccggttcata

SEQ ID NO: 26634 - DNA, 1689 bp, Mycobacterium bovis
atggccttcccggaatattcgcctgcggcgtccgctgcgacgtttgctgacctgcagattcatccccgcgtcttgcgggcgatcggcgacgtcggttacgagtcaccgacggctatccaggcggctacgatcccggcgttgatggcaggctccgacgtggtggggctggcgcagaccggcaccggcaagacggcggcatttgcgattccgatgctgtccaagatcgacatcaccagcaaggtgccccaggcgctggtgctggtgcccacccgggagctggctctgcaggtggccgaggcgttcggccgctacggtgcctatctgtcgcaactcaacgtgctgccgatctacggcggatcgtcgtatgccgtgcaactggccggattgagacgcggcgcgcaggtggtggttggcacccccggtcgtgtgatagaccatctcgaacgggcgaccttggacctgtcgcgggtggactttctagtgctcgatgaggccgatgagatgctgaccatgggtttcgccgacgacgttgagcgcattctgtccgagacccccgaatacaagcaggtcgccctgttttccgcgaccatgccgccggcgatccgcaaactcagcgccaagtatctgcacgatccgttcgaagtcacttgtaaggcgaaaaccgctgtggccgagaatatttcgcagagctacattcaggtagcacggaagatggacgcgctcaccagagtgctcgaagtcgagccgttcgaggcgatgatcgtctttgtccgcaccaagcaggcgaccgaggagattgccgaaaagctgcgtgcccgagggttttccgcggctgccatcagcggtgacgtcccgcaggcgcagcgggagcggaccatcacggcgctgcgggacggcgacatcgatatcctggtcgccaccgatgtggcggcgcgcggactcgacgtggagcggatatcacacgtgcttaactacgacatcccgcacgacaccgagtcctacgtacaccggatcgggcgcaccggcagggccgggcgttcgggagccgcgctgatattcgtctcgccacgggagcttcacctgctcaaggcgatcgaaaaggctacgcggcaaacgcttaccgaggcgcaattgcccaccgtcgaggatgtcaacacccagcgggtggccaagttcgccgattccatcaccaatgcgctgggcggtccgggaatcgagctgttccgccgactggtcgaggagtatgaacgcgagcatgatgtcccgatggctgacatcgccgcggcactggccgtgcagtgccgcggcggtgaggcattcctgatggcacccgacccgccgctttcgcggcgcaaccgcgaccagcgtcgggaccgtccgcaaaggcccaagcgtagaccggacttgaccacctaccgcgtcgccgtcggcaagcggcacaagatcggtccaggcgccatcgtcggcgccatcgccaatgagggtgggctgcaccgcagcgacttcggtcagatccgtatcgggccagacttctcgctagtagaattgccggcgaagctgccccgcgcgacgctcaaaaagcttgcacagacccgtatctcgggtgtgctgatcgaccttcggccataccggccgcccgacgcggcgcgccggcataatggcggcaaaccacggcggaaacacgtcgga

SEQ ID NO: 26635 - DNA, 1113 bp, Mycobacterium bovis
ttgggtggcgatcgcaagcgcggcggagccgggtgcggcgggtcggcacggtttggattgggtggcgatcgcaagcgcggcggagccgggtgcggcgggtcggcacggtttggattgggtggcgatcgcaagcgcggcggagccgggtgcggcgggtcggcacgcatggtgactcaagcattgttgccttctgggctggtggccagtgcggtggtggcggcgtccagtgcaaacctgggcccgggcttcgacagtgtcggtttggcgctgagtctctacgacgagatcatcgtcgagacaacagattccggcttgacggtgactgtagacggcgagggcggcgaccaggtgccgctgggccccgagcacctcgtggtccgcgccgtgcagcacgggttacaggcagcgggggtcagcgccgccggcctggcggtgcgctgccgcaacgccatcccgcactcccgcggcctcggctcctccgcggcagcagttgtgggcggtcttgcggccgttaacggtcttgtcgtacaaacggattcgtcaccatcgagcgatgctgagctgattcagttggcttcggagttcgagggtcatcccgacaacgcggcggccgcggttttgggtggtgccgtggtttcgtggactgaccacagtggtgaccggcccaactattcggccgtatcactgcggcttcatcccgatatccgcctgttcactgcgattcccgagcagcgttcgtcgaccgcggaaacgcgggtgctattgcccgcgcaggttagtcacgacgacgcacggttcaatgtcagtcgcgcggcgctgctggtggttgcgctcaccgaacggcccgatctgctgatggcggccaccgaagatctgcttcatcagccgcaacgtgccgcggcaatgacagcctccgcggaatatcttcggctgttgcggcgtcataacgtggcagcagcactgtccggggcaggtccttcgttgatcgccctgagtacagattcagagttgccgaccgacgccgtggagttcggagccgcaaagggatttgccgttaccgagctgactgttggcgaggcggttcgctggagcccgacagtaagagttcccggt

SEQ ID NO: 26636 - DNA, 1806 bp, Mycobacterium bovis
gtgaccgatacggacctcattacggctggcgaaagtaccgacggcaagccgtcggatgccgctgccacagatcccccagacctcaacgccgacgagccggccggctcgctggccaccatggtgctgcccgaactgcgtgcgctggctaatcgagccggcgtgaagggaacatcgggtatgcggaagaacgaactgatcgctgcgattgaggagatcaggcgacaggccaacggcgccccagccgttgaccggtcggctcaagagcacgacaagggcgaccggccgcccagttccgaggcaccggccacccagggggaacagaccccgaccgaacagatcgattcccaaagccaacaggtccgcccggagcggcgcagcgccacccgtgaagcgggaccctccggctccggtgagcgtgcgggcacagccgcagacgacaccgacaaccgccaaggcggtcaacaggacgccaagaccgaggagcgtggcaccgacgcgggtggcgaccaagggggtgaccagcaggcttcgggcggtcagcaggcgcgcggcgacgaggacggagaagcgcgtcagggccggcgcggacgccggttccgcgatcggcggcgccgcggtgaacgatccggcgacggcgccgaggctgaactgcgtgaggacgacgtcgtccagccggtagccggcatactcgacgtcctggacaactacgcgtttgtgcgcacctccggctacctacccggtccgcacgacgtgtatgtgtcgatgaacatggtgcgcaagaacggcatgcgccgtggtgatgcggtgaccggtgcggtgcgggtgcccaaggaaggggagcaacccaaccagcggcagaagttcaacccgctggtccgcctggacagcatcaacggcggatcggtcgaagacgccaagaagcggcccgagttcggcaaactgacgccgttgtaccccaaccagcggcttcgtctggaaaccagtaccgagcggctgaccacccgggtcatcgacctcatcatgccgatcggcaagggtcaacgcgcgttgattgtgtcgccgcccaaagcgggcaagacaacgatcctgcaggacatcgccaacgcgatcaccaggaacaacccggaatgccacctcatggtcgtgctcgtcgacgagcggcctgaggaggtcaccgatatgcagcgctcggtcaaaggcgaggtcatcgcttcaactttcgaccggccgccgtcggaccacacgtcggtcgccgagctggcgatcgaacgcgccaagcggctggtggagcaaggcaaggacgtcgtggtgctgctcgattcaatcacccggctaggccgcgcttacaacaacgcgtcgccggcgtcgggccggatcctgtccggtggtgtcgattccacggcgttgtacccgcccaagcgcttcctgggggccgcgcgcaacatcgaagagggcgggtcgctgaccatcatcgccactgcgatggtcgagaccgggtccactggtgacacggtcattttcgaggagttcaagggcaccggcaacgccgagctcaagctggaccgcaagatcgccgagcggcgggttttccctgcggtcgacgtgaatccttctggaacccgcaaggacgagctactgctgtcgcccgacgagttcgctattgtgcacaagctgcgccgcgtgctatcgggcctggattcccaccaggccatcgacctgctgatgtcgcagctgcgtaagacgaagaacaactacgaattccttgttcaggtgtccaagaccacgccagggtccatggacagcgac

SEQ ID NO: 26637 - DNA, 240 bp, Mycobacterium bovis
atgaaatctgacattcatccggcatatgaggagaccaccgtggtctgcggatgcggcaataccttccagacgcgtagcaccaagccgggaggtcgtattgtggttgaggtttgttcgcagtgtcatccgttctacaccggcaagcagaagatcctcgacagcggcggccgggtggctcgcttcgagaagcggtacggcaagcgcaaggtcggagctgacaaggcggtttcaaccggcaaa

SEQ ID NO: 26638 - DNA, 1071 bp, Mycobacterium bovis
atgacgcagccagtgcagacgattgacgtgttgctcgccgaacacgccgagctcgagcttgcgctggcagatcccgcgctgcacagcaatccggccgaggcgcgcagagtcgggcgccggtttgcccgattggccccgatcgtcgcaacccaccgcaagctgacgtccgcgcgcgacgacctcgagaccgcgcgcgagctggtggcttccgacgagtcgttcgccgccgaggttgccgcattggaggctcgggtgggcgaactggacgggcaactcactgacatgttggcaccgcgtgacccgcacgatgccgatgacattgtgctggaagtcaaatccggcgaggggggcgaagaatccgcgttgttcgccgccgatttggccaggatgtatatccgctacgccgagcggcacggctgggcggtgacggtgttggacgagaccacctcggatctgggtgggtacaaggacgcgacgttggcgattgccagcaaagccgacacccccgacggggtgtggtcgcgcatgaagttcgagggcggggtgcaccgcgtacaacgggtcccagtgacggaatcccaaggccgcgtgcatacttcggcggcgggtgtgctggtctatccggagcccgaggaagtcggccaagtgcagatcgacgagtcggatctgcgtatcgacgttttccggtcgtccggcaagggcgggcagggagtgaataccaccgactccgcggtgcgtatcacccatctgcccactggaatcgtcgtcacctgtcagaacgaacggtcgcagctgcagaacaagacgcgtgcgttgcaggtgctggccgctcggttgcaggcaatggccgaggagcaggcgctggccgacgcgtcggccgaccgggctagccaaatccgcactgtggaccgtagtgaacgcattcgcacctacaacttcccggagaaccggatcaccgaccaccggatcggttacaagtcacacaatctcgatcaggtgctggatggcgatcttgacgcgttgttcgacgctctgtccgccgcggacaagcaatcccggttgcgacaatca

SEQ ID NO: 26639 - DNA, 975 bp, Mycobacterium bovis
atgacctccgcgccggcgacgatgcggtgggggaacctcccgcttgcgggggagagcggcacaatgaccctgcgtcaggcgatcgacttggctgctgcgctattggccgaagcgggggtcgactcggcgcgttgcgacgctgagcagttggccgctcacctagcgggcacagaccgcggtaggctacccctgttcgagccgcccggcgacgagttcttcgggcgctatcgcgacatcgtcaccgctcgtgcgcggcgggtgccgttgcagcatctcatcgggactgtgtcgtttgggcccgtggtgctgcatgtcggcccgggtgtgtttgtaccgcgtccggagaccgaagccattttggcctgggccaccgcgcagtcgctgccggcgcggccgctgattgtcgacgcatgcacgggatctggcgcgttggcggtcgcattggcccagcaccgggccaaccttggactaaaggcccgcatcatcggcattgacgactccgactgcgcccttgactatgcccgccgcaatgcggcgggtaccccggtagagttggtgcgtgccgacgtcaccacgccctgcctgctccccgaactcgacggacaagtcgacctgatggtttccaacccgccctacatccctgatgctgctgttttggaacctgaagtagcgcaacatgacccgcatcacgcgttgttcggcggtcccgacgggatgacggtgatatccgcggtcgtcgggcttgctgggcgctggctgcgtcccggtggcctgttcgccgtcgaacacgacgacaccacgtcgtcgtcaactgtcgatttggtcagcagcacaaaacttttcgtggacgtacaagcccggaaagatctggccggacggccgaggtttgtgacggcgatgaggtgggggcacctcccgcttgcaggggagaacggcgccattgacccgcgccagcgacgatgcagagcgaagcga

SEQ ID NO: 26640 - DNA, 1215 bp, Mycobacterium bovis
ttggtgcagtacggtctcgaggtgtccagcgatgtggccggcgttgccggtggcttgctcgccctgtcctatcgcggcgccggtgtcccgctgcgtgagcttgcgctggtcgggctgaccgcggcgatcatcacctattttgcgaccggtccggtgcggatgctggccagtcgcctgggagccgtcgcctacccgcgggagcgagatgtgcacgtcacgcctacccctcggatgggtgggttggcgatgttcctgggcattgtcggcgccgtctttcttgcctcccagcttccggcactcacccgggggttcgtctattccaccggcatgcccgcggtgctggtggccggtgcggtgatcatgggcatcggcctgatcgatgatcgttggggtctggatgcactgacgaagttcgccggccagatcacggcggcgagcgttctggtcaccatgggtgtcgcctggagtgtcctgtacatcccggtgggtggtgtgggcaccatcgtcttggaccaggcttcctcgatcctgcttaccctggcgctgaccgtttcgatcgtcaacgcgatgaactttgtcgacggtctcgacgggctggccgccggcctgggcctgataacggcgctggcaatctgcatgttctcggtgggtttgcttcgtgaccacggtggtgacgttttgtactacccgccggcggtgatttcggtggtcctggccggggcctgcctgggctttctgccacacaacttccaccgggccaagatcttcatgggcgattccgggtcgatgctgatcggcctgatgctggccgccgcttccaccaccgcggccgggccgatctcgcagaacgcctacggcgctcgtgatgtatttgctttgctgtcgccgttcctgctggtggtggcggtcatgtttgtgccaatgctcgacctgctgctagcgatcgtccgtcgcacccgcgccggccgcagcgcgtttagcccggacaaaatgcacctgcatcaccggctgctgcagatcggtcattcccatcggcgcgtggtcctgatcatctacctgtgggtgggcatcggtgccttcggcgccgcgagctcgatcttctttaacccgcgcgacaccgcggcggtgatgctgggcgcgatcgtggtcgccggcgtcgcgacactgatccccctgttgcgccgcggcgacgactactacgacccggacctggac

SEQ ID NO: 26641 - DNA, 750 bp, Mycobacterium bovis
atgactgagaccatcctggccgcccaaatcgaggtcggcgagcaccacacggccacctggctcggtatgacggtcaacaccgacaccgtgttgtcgacggcgatcgccgggttgatcgtgatcgcgttggccttttacctgcgcgccaaagtgacttcgacggatgtgccaggcggggtgcagttgttttttgaggcgatcaccattcagatgcgcaatcaggtcgaaagcgccatcgggatgcggatcgcacccttcgtgctgccgctggcggtgaccatcttcgtgttcatcctgatctccaactggctggcagtcctcccggtgcagtacaccgataaacacgggcacaccaccgagttgctcaaatcggcagcagcggacatcaattacgtgctggcgctggcgcttttcgtgttcgtttgctaccacacggccggtatttggcggcgcggtattgtcggacacccgatcaagttgctgaaagggcacgtgacgctcctcgcgccgatcaaccttgtcgaagaagtcgccaagccaatctcgttgtcgctccgacttttcggcaacattttcgccggcggcattctggtcgcactgatcgcgctctttcccccctacatcatgtgggcgcccaatgcgatctggaaagcatttgacctgttcgtcggcgcaatccaggccttcatttttgcgctgctgacaattttgtacttcagccaagcgatggagctcgaagaggaacaccac

SEQ ID NO: 26642 - DNA, 285 bp, Mycobacterium bovis
atgctggtaacggctaccagagccatcaaggaggataaggaaatggaccccactatcgctgccggcgccctcatcggcggtggactgatcatggccggtggcgccatcggcgccggtatcggtgacggtgtcgccggtaacgcgcttatctccggtgtcgcccggcaacccgaggcgcaagggcggctgttcacaccgttcttcatcaccgtcggtttggttgaggcggcatacttcatcaacctggcgtttatggcgctgttcgtcttcgctacacccgtcaag

SEQ ID NO: 26643 - DNA, 1338 bp, Mycobacterium bovis
atgtcgacgtttatcggacagctgttcgggttcgcggtcatcgtttatctggtgtggcgatttatcgtgccgctcgtagggcgtttgatgtccgcacggcaggacacggtgcgccaacagctggcggatgcggcggcggccgccgaccggctggcggaggcgagtcaagctcacacgaaggcgctggaagacgccaagtcggaagcgcaccgtgttgtggaagaggccaggacagatgccgaacgcatcgcagaacaactagaggcccaggccgacgtcgaggcggagcgcatcaaaatgcagggtgcccgtcaggtcgacctcatccgggcacagctgacccgtcagcttcgcctcgagctcggtcacgaatcggtccgccaggcaagggaattggtacgcaatcacgtggccgatcaggcacaacaatcggccaccgtcgaccgcttcctggatcagctcgatgcgatggcgccggctacggccgatgtcgattacccactgctggccaagatgcgctcagccagccggagggcattaaccagcctggtggattggttcggcaccatggcccaggacctcgaccatcaaggtctgaccaccctcgccggcgagctggtgtcggtagcaagactgctggaccgcgaggccgtcgtcacccgctatctcaccgtgccagccgaagatgcgacgcccaggatccggctgatcgaacggctggtgtccggcaaggtcggcgcgccaacgctcgaggtgttgcgcacagccgtatcgaagcgctggtcggccaattccgatttgatcgatgcgatcgaacacgtgtcgcggcaggcgctgttagaactcgccgaacgtgcgggtcaggtcgacgaggtggaagaccagttattccggttttcccgcattctcgacgtgcagccccggcttgccatcctgttgggtgactgtgccgttccggccgaaggccgagtccggttgctgcgcaaggtgcttgagcgtgccgacagtaccgtcaacccggtcgtggtcgcgctgttgtctcacaccgtcgagctgctgcggggtcaggcagttgaggaagcggtgctgttcctggccgaagttgcggtggctcgccgcggcgaaatcgtcgcgcaggtcggcgcggcggccgagctcagcgatgctcagcgcactcgcctcaccgaagtgctgagccgtatctacggtcaccccgtgaccgtgcagctgcatatcgacgccgcgctgctgggcggattgtccatcgcggtcggtgacgaagtgatcgacggtacgctctcgtctcgtctagctgcggccgaggcacgactgcccgac

SEQ ID NO: 26644 - DNA, 1647 bp, Mycobacterium bovis
atggctgagttgacaatccccgctgatgacatccagagcgcaatcgaagagtacgtaagctctttcaccgccgacaccagtagagaggaagtcggtaccgtcgtcgatgccggggacggcatcgcacacgtcgagggtttgccatcggtgatgacccaagagctgctcgaattcccgggcggaatcctcggcgtcgccctcaacctcgacgagcacagcgtcggcgcggtgatcctcggtgacttcgagaacatcgaagaaggtcagcaggtcaagcgcaccggcgaagtcttatcggttccggttggcgacgggtttttggggcgggtggttaacccgctcggccagccgatcgacgggcgcggagacgtcgactccgatactcggcgcgcgctggagctccaggcgccctcggtggtgcaccggcaaggcgtgaaggagccgttgcagaccgggatcaaggcgattgacgcgatgaccccgatcggccgcggccagcgccagctgatcatcggcgaccgcaagaccggcaaaaccgccgtctgcgtcgacaccatcctcaaccagcggcagaactgggagtccggtgatcccaagaagcaggtgcgctgtgtatacgtggccatcgggcagaagggaactaccatcgccgcggtacgccgcacactggaagagggcggtgcgatggactacaccaccatcgtcgcggccgcggcgtcggagtccgccggtttcaaatggcttgcgccgtacaccggttcggcgatcgcccagcactggatgtacgagggcaagcatgtgctgatcatcttcgacgacctgactaagcaggccgaggcataccgggcgatctcgctgctgctgcgccgtccgcccggccgtgaggcctaccccggcgatgtgttctatctgcattcgcggcttttggagcgctgcgccaaactgtccgacgatctcggtggcggctcgctaacgggtctgccgatcatcgagaccaaggccaacgacatctcggcctacatcccgaccaacgtcatctcgatcaccgacgggcaatgtttcctggaaaccgacctgttcaaccagggcgtccggccggccatcaacgtcggtgtgtcggtgtcccgagtcggcggcgcggcgcagatcaaggctatgaaagaggtcgccggaagcctccgcttggacctttcgcaataccgcgagctagaagctttcgccgctttcgcttctgatttggacgccgcatcgaaggcgcagttggagcgcggcgcccggctggtcgagctgctcaagcagccgcaatcccagcccatgcccgttgaggagcaagtggtttcgatcttcctgggcaccggcggtcacctggactcggtgcccgtcgaggacgtccggcggttcgaaaccgaattactggaccacatgcgggcctccgaagaagagattttgactgagatccgggacagccaaaagctcaccgaggaggccgccgacaagctcaccgaggtcatcaagaacttcaagaagggcttcgcggccaccggtggcggctctgtggtgcccgacgaacatgtcgaggccctcgacgaggataagctcgccaaggaagccgtgaaggtcaaaaagccggcgccgaagaagaagaaa

SEQ ID NO: 26645 - DNA, 2625 bp, Mycobacterium bovis
gtgaagctgcaccggctggccctgaccaattaccgcggcatcgcacaccgtgacgtcgaatttcccgatcatggagtggtggtggtgtgcggcgccaacgagatcggcaagtcctccatggtcgaggcgctggacctgctgctcgagtacaaggaccgctcgacgaagaaggaagtcaagcaggtcaagccgaccaacgctgatgtcggctccgaggtcattgccgaaatcagcagcggcccttatcgtttcgtctaccgcaagcgtttccacaagcggtgcgagacggagttgaccgtgctggcaccgcgccgcgagcagctgaccggcgacgaagcgcacgagcgggtccggacgatgttggccgaaacggtcgacaccgaactgtggcatgcccagcgggtgctgcaggccgcctcgacggccgcggtggatctgtctggctgcgacgcgctctcgcgtgcgctcgatctcgccgccggtgatgacgccgcgctgtcgggcaccgagtcgctgctcatcgagcggatcgaggccgagtatgcgcgctacttcaccccgaccgggcgccccaccggagaatggtccgcggcggtctctaggctggcggccgccgaggccgcggtggccgactgcgcggcggcggtagccgaggtcgacgacggggttcgtcgccacaccgagctcaccgagcaggtggctgagctgtcgcagcaactacttgctcaccagctgcggctcgaagctgcgcgagtcgccgccgagaagatcgccgcaatcaccgacgacgcccgcgaagccaagctgatcgctactgccgcggccgcgaccagcggcgcttccaccgccgcacacgccggacggctgggcctgctcaccgaaatcgacacgcgcactgcggccgtcgttgctgcggaggcaaaagcgcggcaggccgcagacgagcaggcgacggcgcgcgcggaggccgaggcctgcgatgccgcgctcacggaggcaacccaggtattgacggccgtccgccttcgcgccgagtcggcccggcgcaccctcgaccagctcgccgactgcgaggaggccgaccggttggccgcccggctggccaggatcgacgacatcgagggtgatcgcgaccgggtctgcgcggagctgtccgcggtcacgctgaccgaggagctactgagtcggatcgaacgtgctgcggcagccgtcgatcgcggcggtgcacagctggcgtcgatctccgcggcggtggagttcaccgccgccgtcgacatcgagctcggcgtcggcgatcaacgggtgtcgctgtccgcgggccaaagctggtcggtcactgccaccggccccaccgaggtcaaggttcccggcgtcctgaccgcacggatcgtcccgggcgcgaccgcactcgactttcaagccaaatatgctgcagcacaacaggaattggctgatgcgctggcggctggagaggtcgctgacctagccgccgcacgctccgccgatctgtgccgacgcgaactgctgagccgccgcgatcagctgaccgccactctggccggcctgtgtggcgatgaacaggtcgaccaactgcgttcccgcctggaacagttgtgtgccggtcaaccggccgagctcgatctggtttcgacggataccgctacggcccgcgctgaattggatgcggtcgaggcggctcgaatcgccgcggagaaggactgcgagacccgccgtcagatcgctgctggcgccgctcgccggctcgcggagacatccacgcgggcaacggttctacagaacgcagcggccgccgaaagcgccgagctcggtgcggccatgactcggttggcctgtgagcgggcgtccgtgggcgacgatgagctcgccgccaaggccgaggccgacctgcgggtactgcagacggccgagcagcgagtgatcgacctggccgacgagctcgcagctacggcgccggacgcggtagccgccgagctggccgaggccgccgacgccgtcgagttgctgcgcgaacgtcacgacgaggccattcgcgcgttgcacgaggtcggcgtcgaactctcggtgttcggcacccagggccgcaagggcaagcttgatgccgccgaaaccgagcgtgagcacgccgccagccaccacgcgcgggtcgggcgccgggcccgggccgccaggctgctccgctcggtgatggcacgccaccgcgacaccacccggctgcgctacgtcgagccataccgggcggagctacatcggctcggccgcccagtgttcgggccctctttcgaggtcgaggtcgataccgatttgcgcatccgcagccgcaccctggacgacagaaccgtgccctacgagtgcttgtcgggcggggccaaagaacagcttggcatcctggcgcgattggccggcgcggcgctggtcgccaaggaggacgccgttccggtgctgatcgacgacgcgctggggttcaccgatccggagcgactagccaagatgggggaggtctttgacaccatcggcgccgacggacaggtgatcgtgctgacgtgcagtcccacccgatacggcggtgtcaaaggagcgcaccgcatcgatctggacgccatacag

SEQ ID NO: 26646 - DNA, 1584 bp, Mycobacterium bovis
atggacactcagagcgactacgtcgtggtcggtaccggctcagccggggcggttgtggccagccggcttagcaccgatccggccacgacggtggtggccctggaggcggggccgcgtgacaagaacagattcatcggcgtcccagcggcgttttccaagctgttccgcagcgagatcgactgggattacctaaccgaaccgcagccggagctcgacggccgcgaaatctattggcctcgtggcaaggtgctcggtggctcgtcgtccatgaacgcaatgatgtgggtgcgtggattcgcatcagactacgatgagtgggccgcgcgagccggtccgcggtggtcgtacgccgacgtgctcggctactttcgccgcatcgagaacgtcaccgctgcctggcactttgtcagcggtgacgacagcggagtaaccggtccgttgcatatttcccggcaacgcagcccaagatcggtgaccgcagcgtggctggcagccgcacgtgagtgcggatttgccgctgcgcggccgaattcccctcgaccggaaggcttttgcgagaccgtcgtcacccagcgccgcggtgctcgattcagtactgccgacgcctatctgaagcccgcgatgcgccgtaaaaacctccgtgtgcttaccggcgccactgctacccgggtggtcatcgacggcgaccgggccgtcggcgtggaataccaaagcgacggtcaaacccgcatcgtctacgcccgccgcgaggtggtgctctgcgctggtgccgtcaacagccctcagctgctgatgctctccggcatcggcgaccgcgaccacctcgccgaacacgacatcgacaccgtttaccacgcgcccgaggtcgggtgcaacctgctcgatcatctcgtcacggtgctgggtttcgacgtcgaaaaggacagcttgtttgccgccgagaagcccggccagttgatcagctacttactgcgacgccgcggcatgctcacctccaacgtcggcgaggcgtacggatttgtccgcagccgacccgaactgaagctgcccgatttggagttgatttttgccccggcgccgttttacgacgaagcgctggttccaccggctggtcacggtgtggtattcggcccgattctggtcgcgccgcaaagccgtggccagatcacgctgcggtccgccgatccgcatgccaagcctgtcatcgaaccgcgttacctgtccgatctcggtggcgtagaccgggccgccatgatggcgggcctgcggatatgcgcgcggatcgcgcaggcccgcccgctcagagatctccttgggtccatcgcgcgaccgcgcaacagcaccgagctggacgaggccactctcgagttggcgctggccacttgttcgcacaccctgtaccacccgatgggcacctgccgcatgggcagcgacgaggccagcgtggtggatccgcagctgcgggtccgcggtgtcgacggactccgcgtcgccgacgcgtcggtgatgcccagcacggttcgtgggcatacgcatgcgccgtcggtgctgatcggggagaaggccgccgacttaatccgcagc

SEQ ID NO: 26647 - DNA, 1836 bp, Mycobacterium bovis
atgagccccctgctcgaggtgaccgatttggccgtcaccttcaggaccgatggcgatccggtgaccgcggtgcgcgggatcagctaccgcgtcgagcccggcgaggtggtcgcgatggtgggcgaatcgggttcaggtaagtccgcagcggcgatggcggtggtgggcctgctgcccgagtacgcgcaggtgcgtggttcggttcggctacagggtaccgaactgttggggcttgccgacaacgcgatgtcccggtttcgaggcaaggcgatcggcacggtgttccaggatccgatgtctgcgctcacccctgtctacaccgtcggcgaccaaatcgccgaggccatcgaggtgcaccagccccgtgttggcaagaaggccgctcgtcggcgtgcggtggaactgcttgacctggtcggtatttcgcagccgcagcggcgttcccgtgcgtttccgcatgagctttcaggtggcgaacgccaacgcgtggtgatcgccatcgcgatcgccaacgatcccgacctgttgatctgtgacgaaccgaccacggcgctcgacgtcacggtgcaggcgcagatcctcgacgtcctcaaggcggcgcgcgacgtcaccggcgccggggtgctgatcatcacccacgacctcggcgtcgtggccgagttcgccgaccgggcgctggtgatgtacgccggacgggtcgtcgagtcggccggggtgaatgatctgtaccgcgatcgccggatgccctacaccgtggggcttttaggctcggtcccccggctggatgccgcgcagggcacccggctggtgccgataccgggtgcgcccccgtcgctggcgggcttggcaccgggttgcccgttcgcgccgcgctgcccgctagtcatcgacgaatgccttaccgcggaacccgaattgcttgacgtcgctaccgatcaccgggcggcctgcatccgcaccgagctggtcaccgggcgcagcgccgccgacatctaccgggtcaaaaccgaggcccgcccggctgcactcggcgacgcctcggtggtcgtgcgggtacgtcatctagtcaaaacctaccggctggccaagggcgtggtgctgcgccgggcgatcggcgaggtccgcgcggtcgacggcatcagtctcgaactccggcagggccgcacgttgggtatcgtcggcgaatccggttcgggcaagtcgaccaccctgcacgagatcctggagctggctgcgccgcaatcgggatcgatcgaagtcctcggcactgacgtcgccacgctggggacagcggaacgccgatcgctgcgccgcgacatccaggtggtcttccaagacccggtggcgtccttagacccgcggctgccggtcttcgatctgattgccgaaccattgcaggccaatgggttcggcaagaacgagactcacgcgcgggtcgccgagctgctcgatatcgtcggactgcgccacggcgacgccagtcgttatcccgccgagttctccggcggtcagaagcagcgcatcggcatcgcgcgggcactggcgctccaacccaagatcctggcactcgacgaaccggtgtcggcactcgatgtctccattcaggccgggatcatcaacctgctgctcgacctccaagagcagttcgggttgtcatatttatttgtttcccacgatctttcggtggtcaaacacctcgcccaccaggtggcggtcatgcttgccggtaccgttgttgagcagggcgacagtgaggaggtcttcggcaatccgaaacacgagtacaccaggcgactgctgggcgcggtaccgcaaccggatccggcccgtcgtggc

SEQ ID NO: 26648 - DNA, 483 bp, Mycobacterium bovis
atgcggatgtcagctaaggcggagtacgcggtgcgggcgatggtccagctcgccacggccgccagtggcaccgtggtcaagaccgacgatctggctgcggcccaaggcataccaccgcagtttctcgtcgatatcctgaccaacctgcgcaccgaccgcctggtgcgaagccaccgcggtcgcgagggtggttatgaattggcgcgtccgggcaccgagatcagcatcgccgacgtattgcgctgcatcgacggaccgctggctagtgtccgcgatatcggacttggcgacctgccctactcgggccccactaccgcgctgaccgacgtttggcgcgcgctgcgcgccagtatgcggtcggtgctggaggagaccacgctggctgacgttgccggtggcgcgctgcccgagcacgtcgcccagctcgccgacgactatcgcgcgcaggagagcacgcggcacggcgcctcgcgccatggtgac

SEQ ID NO: 26649 - DNA, 1650 bp, Mycobacterium bovis
gtgacccccgctgacctggctgagctgctcaaagcgaccgcggccgcggtgctggccgagcgcggcctcgatgcctccgcgttgccgcagatggtcacggtggaacgcccgcgcattcccgagcacggcgactatgccagtaacctggcgatgcagctcgccaagaaagtcggcaccaacccgcgtgagctggccggatggcttgccgaggcactgacaaaggtcgacggtatcgcctcggcggaggtggccgggccgggctttatcaacatgcggctggaaaccgccgcccaggctaaagtcgttaccagcgttatcgacgccggccacagctacggtcactcgctgctgctggccgggcgcaaggtcaacctggaattcgtctccgccaaccccaccggaccgatccacatcggcggtacccgttgggccgcggtcggtgacgcgctgggccgtttgctcaccacccagggcgccgacgtggtccgcgaatactatttcaacgaccacggcgcccagatcgaccgattcgccaactccctgatcgccgcggccaagggcgaacccacgccccaagacggctacgcgggcagctacatcaccaacatcgccgagcaggtgctgcagaaggcgcctgacgcgctgagtctgccagacgcagagttgcgcgagaccttccgcgcaatcggcgtcgacttgatgttcgaccacatcaaacagtctctgcacgagttcggtaccgacttcgacgtctacacccacgaagactcgatgcacaccggcggccgggtcgagaacgccatcgcccgactccgcgaaaccggcaacatctacgagaaggacggcgcaacctggttgcgcaccagcgcatttggtgacgacaaggaccgcgtcgtgatcaagagcgacggcaaaccggcatatatcgccggtgatctcgcctactacttggacaaacgccaacgcggttttgacttgtgcatctacatgctcggcgccgaccatcacggctacatcgcccggctaaaggccgcggccgccgccttcggtgacgacccggccaccgtcgaggtgctcattgggcagatggtgaacctggtccgcgacggccaaccggtccggatgagcaaacgtgcaggcaccgtgctcaccctcgacgacctggtcgaggcgatcggcgtggacgccgcacgttacagcctgatccgctcctcggtggacaccgcgatcgacatcgacctggcgctatggtcctcggcgtcgaacgaaaacccggtctattacgtgcaatacgcgcatgcccggctctcagcgctggctcgcaacgccgccgaactcgccctgatcccggatacaaaccacctcgaactgcttaaccacgacaaggagggcacgctgctgcgcaccctcggcgaattcccgagggtgctcgagaccgcggcctccctgcgggaaccgcaccgggtctgccgctacctggaagacctggccggcgactatcaccggttctacgactcgtgccgagtgttgccgcaaggcgacgagcagcccaccgacctgcacaccgcgcgcctagcgttgtgccaggccacccgtcaggtcatcgccaacgggctggcgatcatcggcgtcaccgcaccggagcgaatg

SEQ ID NO: 26650 - DNA, 942 bp, Mycobacterium bovis
atgctctttgccggccgcgcccatccggagctggccgagcaggtagccaaagagctcgacgtccacgtcacctctcaggacgcgcgggagttcgccaacggcgagatcttcgtgcgcttccacgaatcggtacgcggttgcgacgccttcgtcctgcaatcctgcccggcaccggtgaacaggtggctgatggaacagctgatcatgatcgacgcgctcaaacggggcagcgccaaacggatcaccgccgtcatgccgttctatccgtatgcccggcaagacaagaaacaccgtggccgcgaaccgatctccgcgcgactgatcgccgacctgctcaagaccgcgggcgccgaccggatcgtgacggtcgacctgcacaccgaccagatccagggtttcttcgacgggccggtcgatcatatgcgcggtcagaacctgctgaccggttacatcagagacaactacccggacggcaacatggtggtcgtctcccctgactccggccgggtacgcatcgccgagaagtgggccgacgcattaggtggtgttcccctcgccttcatccacaagacccgtgatccgcgggtacccaaccaagtggtgtccaaccgcgtcgtcggcgacgtggccgggcgcacctgtgtcctgattgacgacatgatcgacaccggcggcaccatcgccggcgcggtggcattgctgcacaacgacggcgccggtgacgtgatcatcgcggcaacccacggcgtgctctccgaccccgctgcgcagcggctggcctcctgcggcgcccgcgaagtgatcgtcacgaacacgctcccgatcggcgaagacaagcgcttcccccagctcaccgttttgtccatcgcgccgctgctggccagcacaatccgggcggtcttcgaaaacggctcagtaacaggacttttcgacggggacgca

SEQ ID NO: 26651 - DNA, 645 bp, Mycobacterium bovis
atggccaaatccgcaagcaaccagctgcgcgtcacggtgcgtaccgagaccggcaagggcgcgtcccggcgggcccggcgcgccggcaagatacccgctgtgctgtatggccacggcgccgagccacagcacctggagctgcccggacacgactatgcggccgtactgcggcattccggcaccaacgcggtgttgaccctcgacatcgccggtaaggaacagctggcactgaccaaggcacttcatatccatccgatccgccgcaccatccagcatgccgacctactggtcgtgcgccgtggcgagaaggtcgtcgtcgaagtcagcgtggtcgtcgagggccaggccggacccgacaccctggtcacccaagagaccaacagcatcgagatcgaggccgaggcgctgtcgattcccgagcagttgaccgtgtccatcgaaggtgccgaaccaggcacccagctcaccgccgggcagatcgcgctgccggccggtgtcagcctgatttctgaccctgatctgttggtggtcaacgtggtgaaggcgccaaccgccgaggagctggagggcgaagtcgcaggagccgaggaagccgaggaagccgcggtagaagccggcgaagccgaggccgctggcgagtccgag

SEQ ID NO: 26652 - DNA, 1023 bp, Mycobacterium bovis
atgtgcgcccatcaattcttcgggctggtccacaacccggtggttgcggcggcgatcggcaaacccgaaccaccaccggttgactcggatatcggtctgccgacgacggtgcccttcgaaccgtggtcggtcgcagatttctcccgatacctgagcaccctcggcctgcccgccgcgggcgacgcggtgaccctccaccgcatcctcagctcgatggaacgcgcgggacttctgctgccgctcggttgggacccgcgattgccagtcatggggcagaagtacatctcgcaggggacgatatcgaagggacagcgtggcggcaacctctggttgtccgaggtgttcggtgccgagctcatcatcccgagctacaacgcggtgaccgttcaactcgccggtcacgacgacgctggcaatccggtggatagttggggaaccggcctcgtcgtcgaccacaatcacgtcatcaccaacaaacatgtcgtgaccgggctcgcgggcacgagcgcaggtctgtccgtctatccgtcaagcaaccacgccgaagccgagttggtgaacttctcgggcaccgctcacccgcaccccacgctcgacgtcgcagtaatcaaattcgagatgcccgaaggcaagtacatcccgcggcttggcggcatggcgttccgtgatcccgactgggcggatgaggtctacgtgttcggttacccgcgggtgccgatgactgcggagatggcgatcacggtgcagcgtggcgaggtggtcaacccggccgcgacgactatcccctgccggcagaagattttcctctactcggcaatcgcgcggccgggcaacagcggcggtccgatcgttgcgcaagacggccgtgtgatcggcctcgtggtcgaggactctgcggaagcaccgtcgacgggcaccggaccgaacgcggcacccttctatcgcggcatcccgtcgagcgaagtgatccgagcactcgacgaactcgacttcggcggcatcgtggagatggacaccctccca

SEQ ID NO: 26653 - DNA, 471 bp, Mycobacterium bovis
gtggcgcccgggaaccaacaggtctacggtggccgttggcataggtggaatacgccggcagttgcacgaaacttccataacgtaggtgacgtgtcaggagaggccatgggggcccagggttatctgcgcaggctcacccgtcggttgacggaggacctggagcaacgcgacgtcgaagagttatccgacgaggtgctcaatgccggcgcacagcgtgcgatcgactgccagcgcggccaggaggtcacggtggttggcaccctgcgtagcgtggaaaccaatggcaagggttgctcgggtggtgttagcgccgaattgttcgacggcagcgacaccgtcacgctggtgtggttgggtcaacgccggatacccggcatcgacacgggccgtaccctgcgggtgcgcggccggctgggcaagctggaaaatgggacgaaggctatctacaacccgcattacgaaattcagcgg

SEQ ID NO: 26654 - DNA, 2613 bp, Mycobacterium bovis
atggtagttgccgagccccccaggaacacgaccgtgacgttgctcttcgccgatctttgcgcgatctttacgccctaccggtggatgattgagcatgtgaccaccaagcgcgggcagctgcggatctatctgggcgcggcccccggcgtgggcaaaacctacgccatgctcggcgaggcgcaccgcaggctggagcgcggcaccgacgtggtcgccgcggtcgtcgagacacacggacgcaacaagaccgcgaaactgctcgagggcatcgagatgatcccgccgcgctacgtcgaatatcggggtgccaggtttcccgaactcgatgtggaggcagtactgcgacgtcatcctcaggtggtgctggtggacgaactcgcccacaccaacacacctggcagcaagaaccccaagcgctggcaggacgttcaggaaatcctcgacgccggcatcacggtgatctcgacggtcaacatccagcacttggagggcctaaacgatgtcgtggagcaaatcaccggcatcgagcagaaggagaagatccccgacgagatcgtccgcgcggccgatcaggtcgagctggtcgacatcacaccggaagcgttgcggcgcaggcttgctcacggcaacgtctatgcagccgaacgggtcgatgccgcgctgtcgaactacttccgcacgggcaatctgaccgcgctgcgcgagatcgcgttgctgtggctggccgaccaagttgatgcggccctggagaagtaccgcgcagacaaaaagatcaccgccacgtgggaggcgcgggaacgcgtcgtcgtcgccgtgaccggcggcccggagtcggagacgttggtgcgacgggcatcgcggatcgcgtcgaagtccagcgccgagctgatggtggttcacgttatccgtggcgacgacctggcgggggtgtccgcgccgcagctgggcagggtccgcgagctggcgacaagcctcggtgcgaccatgcacaccgtggtcggcgacgacgtgcccaccgcgctgctggacttcgcccgcgagatgaacgccacgcagctcgtcgtcggcacatcgcggcgatcgcgatgggcacgcctgtttgacgaggggatcggcgcccgcaccgtccaggagtccggcggcatcgacgttcacatggtcacccatcccgcggccagccgggcctccgggtggtcgcgggtctccccgcgcgagcggcatatcgcgtcgtggctggccgcgctggtggtgccctcggtgatctgcgccatcacggtggcctggctcgaccgattcatgggcatcggcggcgagagcgcgttgttcttcatcggcgtgctgatcgtggcgttgctgggcggcgtcgcccccgccgcattgtcggccttgctgtcgggcatgctgctgaactactttctgaccgagccccgctacacctggaccatcgccgaaccggacgccgcagtaaccgaattcgtgttgttggcgatggccgttgcggtggcggtgttggtggacggcgcggctagccgaacccgtgaggctcggcgcgcatcccaggaggctgagttgctggccctgtttgccggttcggtgttgcgcggcgcagaccttgccacgctgctgcagcgggtccgcgaaacgtattcccaacgggccgtgaccatgctgcgtgtccggcagggcgcatcgacaggcgaaaccgtcgcgtgcgtcgggacaaacccgtgtcgggacgtcgactccgccgacaccgcaatcgaagtcggcgacgacgagttttggatgctgatggcaggccgcaagttggccgcccgcgaccgccgagtgctgaccgcggtcgcgacacaggccgcgggtctggtgaagcagcgcgagctggcggaagaggccggccaggccgaggccatcgctagggccgatgagctgcgccggtcgctgctgtcggcggtcagccacgacctgcgcaccccgctggcggcggccaaggttgcggtgtccagcttgcgcaccgaagacgtcgctttctcccccgaggataccgccgagctgttggccaccatcgaggagtccatcgaccaactcaccgccctggtcgcaaacctgctcgattcgtcgcggttggctgccggcgtgattcgcccccagctgcgccgggcatacctggaagaagcggtgcaacgggccttggtcagcatcggcaagggcgccaccggtttttaccgatccggcatcgaccgggtcaaggtcgacgtgggagacgccgtggcgatggccgacgccgggttgctggagcgggtgctagccaacctgatcgacaacgcgctgcgatatgcgcccgactgcgtggtccgggtcaacgcgggacgggtgcgtgagcgggtcctgattaatgtcatcgacgagggcccaggggtcccgcgcgggaccgaggagcaactctttgccccgttccagcggccgggggatcacgacaacaccaccggtgtcggtctggggatgtcggtggcacgcggcttcgtcgaggctatgggcggcacgatttcggctaccgataccccgggcggcgggctcacagtggtgatcgatctagcggctcccgaggaccgccca

SEQ ID NO: 26655 - DNA, 975 bp, Mycobacterium bovis
atgattgtcgtcctggtcgacccccggcgtccgacactggtgcctgttgaagcgatcgagttcctgcgcggcgaggtgcaatacaccgaggaaatgccggtcgcggtgccctggtcgctaccagcggctcgttcggcgcacgccggaaacgacgcgccggtgttgctgtcgtctgaccccaaccatcctgctgtcattactcgactggccgccggtgcccggctgatctcggcaccggattctcagcgtggcgaacgactcgtcgacgccgtcgcgatgatggacaagctgcgcaccgccggaccgtgggaaagtgagcagactcacgactcgctgcgcagatacctgctggaggagacctacgagctgttggacgcggtccgcagcggcagtgttgaccagctgcgcgaagagcttggtgatctcttgctgcaggtcctctttcacgcccggatcgctgaggatgcgtcgcaatcgccgttcaccatcgacgacgtcgccgacacactgatgcgaaagctcggcaatcgggcgccaggagtacttgcgggcgaatcgatttcgctcgaagatcaactggcgcaatgggaggcagccaaggcctcggaaaaggcgcgaaagtcggtagccgacgatgtccatacgggccagccggcattagcgctggcgcagaaggttattcagcgtgcccaaaaggctgggctgcccgctcacctgatccccgatgagatcacttctgtttcggtttcagctgacgtagatgcggaaaacacgctgcgcactgccgttttggactttattgacaggctgcgctgtgccgagcgggcaattgccgtcgcacgccggggcagcaacgttgccgagcagctcgatgtgacgccgctgggtgtgatcaccgagcaggagtggctcgcgcattggccaactgctgtcaacgattcccgcggcgggtccaagaaacgtaaaggcatgcga

SEQ ID NO: 26656 - DNA, 1485 bp, Mycobacterium bovis
atgacgtttcctggtgacaccgcggtcctggtcctagcggccgggcccgggacccggatgcgttcggacacccccaaggtgctgcacacactcgccggtcgcagcatgctgtcgcatgtactgcatgcgatcgccaagctggcgccgcagcgtctaatcgtggtgctgggacacgatcaccagcgcatcgcgccgctagtcggtgaactcgccgacaccctaggccgaacgatcgacgtcgccctgcaggatcgaccgctagggaccgggcatgcggtactctgcgggctgtccgcgctgcccgatgactacgccggcaacgtcgtggtcacctcgggagataccccgctgctggacgccgacacgctggccgacttgatcgccacccaccgcgcggtgtcggctgcggtgacggtgctgaccacgacgctggatgatcccttcggctacggccgcatcctgcgcacccaggatcacggagtcatggcgatcgtggagcaaaccgacgcgacaccatcgcagcgggaaatccgcgaagtcaacgccggcgtctacgccttcgacatcgccgcgctgcggtccgcactgagccggctgagctccaacaacgcccaacaggagctctacctcaccgacgtcatcgccatcttgcgctccgacggccagaccgtacatgccagccacgtcgacgacagcgcgttggtggccggcgtcaacaatcgcgtccagctggcccagctggcctccgaactcaaccggcgggtggtggccgctcaccagctggccggcgtcaccgtcgtcgacccggctaccacctggatcgacgtcgacgtcaccatcggccgcgacaccgtcattcacccgggtacccagttgctgggccgcacccagatcggcggtcgctgtgtcgtcggtcccgacaccaccctgaccgacgtcgccgtcggcgacggtgcctcggtggtgcgcacccacggttcgtcgtcgtcgattggggatggcgccgcggtcgggcccttcacctacctgcggcccggaaccgcgttgggcgccgacggcaagctgggcgcgttcgtcgaggtcaagaactccaccatcggcaccggcaccaaggtgccgcacctgacctacgtcggcgacgccgacatcggcgagtacagcaacatcggcgcctccagcgtgttcgtcaactacgacggtacgtccaaacggcgcaccaccgtcggttcgcacgtacggaccgggtccgacaccatgttcgtggccccagtaaccatcggcgacggcgcgtataccggggccggcacagtggtgcgggaggatgtcccgccgggggcgctggcagtgtcggcgggtccgcaacgcaacatcgagaactgggtgcagcgcaaacgccccggcagcccagcggctcaggcctcaaaaagagcctcagaaatggcctgccaacagcccacacaaccacccgacgctgatcagacaccg

SEQ ID NO: 26657 - DNA, 1569 bp, Mycobacterium bovis
atgaaccgcacgcagctcctcacgctcatcgccactggcctgggcctgttcatgatctttctcgacgcactgatcgtgaacgtggcgctgcccgacatccagcgcagtttcgcggtgggggaggacggcctgcagtgggtggtggcgtcctacagcctcggaatggcggtcttcatcatgtcggcggcgacgcttgccgacctctacggtcggcgccgctggtacttgataggtgtttcgttgttcacgctgggatctatcgcctgcgggttggcgccctcaatcgcggtgctcaccaccgcgcggggcgcgcagggcctaggtgcggcggccgtcagcgtaacctcgctcgccctggtcagcgcggcctttccggaggcgaaggagaaggcgcgcgccatcgggatctggaccgccatcgcgagcatcggtacgacgacgggcccgacactgggcggtctgctggtggaccagtgggggtggcgcagcatcttctatgtcaacctgcccatgggcgcactcgtcctcttcctgactttgtgctacgtcgaggagtcgtgtaacgagcgggcacgccgcttcgatctgtccgggcagctgctgttcatcgttgccgtgggtgccctggtgtatgcggtcatcgaaggcccccagatcggctggacgtctgtccagaccatcgtgatgctctggacagccgccgtcggctgcgccctgttcgtctggcttgagcgcagatcatcgaatccgatgatggatctgaccctgttccgcgacacctcatacgccctggccatcgcgaccatctgcacggtgttcttcgccgtctatgggatgctgctgctcaccacccagttcctgcagaacgtgcgcggctataccccgagcgtgaccggcctgatgatccttccgttcagtgcggccgtggccatcgtgtcgccacttgttgggcacctggttggccggatcggagcacgcgttcccatcctggcggggctgtgcatgttgatgctgggtctgctcatgctcatcttcagcgagcaccggagctcggccctggtcctggtcgggctgggcttgtgcgggagcggcgtcgcgttgtgcctgacgccgatcacgaccgtcgccatgaccgcggtccccgccgagcgtgcgggcatggcgtccggcatcatgagtgctcagcgggcgatcggctcgacgatcgggttcgcggttttgggctccgtccttgccgcctggctttcggccacactcgagccccatctggagcgcgcggtgcccgacccggtccagcgccacgtccttgccgagatcattatcgacagtgccaatccgcgagcgcatgtgggcggaatcgtcccccggcggcacattgagcatcgcgaccccgtcgcgattgcggaggaggatttcatcgaaggcattcgggtggcgttgctcgtcgccactgcaacactggctgtcgtgtttctcgccggctggcgatggtttccgcgtgacgtgcaaaccgcgggcagcgacgctaagcgagaggctgcctacagcgatgaccgtcgagtgcgcggt

SEQ ID NO: 26658 - DNA, 846 bp, Mycobacterium bovis
atgaccacaacttcggccccggcacgcaacgggactcgtcgcccgtcacgtccgattgtgctgttgattccggtgccgggtagctcggtcatccacgacctgtgggccggcaccaaattattggtggttttcggcatttcggtgttgctgacgttctacccgggatgggtgacgatcgggatgatggcggctttggtgctggccgcggcccgaatcgcgcacattccgcgcggcgcgctgccgtcggtacctcgctggctgtggatcgtcctcgcgatcggctttctgaccgctgcgctagccggtggcactccagtggtcgccgtgggcggagtgcagctcggattgggcggcgcactgcacttcctgcggatcaccgcgctgtcggttgtgctcctggcgctgggggcgatggtgtcctggaccaccaatgttgccgaaatcagccctgcggtagccactttgggtcggccgtttcgggtgttgcggatcccggtcgacgaatgggcggtggcgttggcgctcgcgctgcgcgccttcccgatgttgatcgacgaattccaggtgctctacgccgcgcgccggctgcggcccaagcggatgccgccaagccgcaaggctcggcgccagcggcatgcgcgcgagctgatcgacctgcttgccgctgccatcacggtgaccctgcgccgtgccgacgagatgggcgacgcgatcaccgcccgtggcggcaccggccagctgtcagcgcatcctgggcgacccaaacttgccgactgggtgacgcttgcgatcactgccatggccagcgggacagcggtggcgatagagagcctgatattgcactcc

SEQ ID NO: 26659 - DNA, 1917 bp, Mycobacterium bovis
atgtccggccggatctccgatcgcgatatcgcggcaatccgcgagggggcccgtatcgaggatgtcgtcggcgactatgtccagctcaggcgtgccggtgccgattcgctgaaggggctgtgcccgtttcacaacgagaagtccccgtcctttcacgtgcggcccaaccacggccacttccactgcttcggctgcggcgagggcggcgacgtgtatgcgttcatccagaagatcgagcacgtcagcttcgtcgaggcggttgagttgcttgccgaccggatcggccacacgatcagctacaccggtgcggccaccagcgtgcagcgcgaccgcggcagtcgcagcaggctgctggccgccaacgcggccgcggcagcgttctatgcgcaggcgctgcagtccgacgaggcggcaccggctcgccagtacctgaccgaacgcagcttcgacgcggcggccgctcgtaaattcggctgtgggttcgccccgtcgggctgggactcattgacaaaacatctgcagcgcaagggttttgagttcgaggaactggaggccgcgggactgtcccggcagggccggcacggcccgatggaccggtttcaccgtcggctgctgtggcccatccgcacctcggccggcgaggtggtcgggttcggtgcccggcgactgttcgacgacgacgcgatggaggccaagtacgtcaacacgcccgagacattgctgtacaagaagtcatcggtgatgttcggcatcgacttggccaaacgcgacatcgccaagggacatcaggccgtcgtcgtcgagggctacaccgatgtcatggccatgcatctggccggggtcaccaccgcggtggcgtcgtgcgggaccgcattcggcggcgagcacctggcgatgctgcgcagactgatgatggacgacagcttcttccgcggcgagctgatctacgttttcgacggcgacgaggccggccgcgccgccgcgctcaaggccttcgacggtgagcagaagctggctggtcagtctttcgtcgcggtggctcccgacggcatggacccctgcgacctacgactgaagtgcggcgacgctgccctgcgcgacctcgtggcacgacgaaccccattgttcgagttcgcgattcgcgccgcgattgccgagatggacctggatagcgccgagggcagggtggccgcgctgcgccgttgcgtaccgatggtgggccagatcaaagaccccacgctgcgtgacgaatacgcccgtcagctcgccggctgggtcgggtgggccgacgtcgcacaggtcatcggtcgggtgcggggtgaggccaaacgaaccaagcaccccaggctgggcagactgggatcgacgaccatcgcccgggcagcgcagcggcccaccgccggccccccgaccgaactcgcagtccgacctgatccgcgtgacccgaccctgtggccacagcgtgaggcactcaaatcggcgttgcagtacccggcgttggccggcccggtgttcgacgcgctgaccgtcgaaggcttcacgcaccccgagtacgcggctgtgcgcgcggccatcgacacggcgggcggtacctcggctggccttagcggtgcgcagtggctggatatggtgcgccagcagacgacatcaaccgtgacctcggctttgatcagcgagctgggggtggaggcgattcaggtcgacgacgacaagctgccgcgctatatcgccggcgtgctggcccgtctgcaggaggtttggttggggcggcagatcgccgaggtgaagtccaaactgcagcgcatgtcgccgatcgagcaaggcgacgaataccacgcgctgttcggcgacctggtcgccatggaggcctatcggcgcagcctgttagagcaggccagcggcgacgatctcaccgcg

SEQ ID NO: 26660 - DNA, 1596 bp, Mycobacterium bovis
atgcaaatcactccctttctggcggggactgccggtcttagtctgctcttttcctcgacgcaggcgaatgtggccggcatgctgatcggcatggcgttgcgcgcgggagcccggcgacaaccggtcattggttgtgcggcagcgttggtgttcggcgggttacccgcgctggcctttcccgcgccgtcttggtggtggctggcctggttcggcttggtcccactgctgttagtggtgcgggccgcgccgacgtcgtgggagggcgcgctgcgggcgtggacgggtatgggcggatttgtgctggcaacccagtactggctggtgaccagtgctggtccgatgctggtgctgttggccgccggcctgggtgtgctgtggctgccggccgggtggttggcgcaccggctgttgtcggtaccggtgaccacatgccgcgtcggtgccgccctggtcgtggtgcccagcgcgtgggtggcagccgaagcggtgcggtcctggcaatcgctgggcggtccgtgggcgttgctgggtgcatcgcaatggagccagcccgtgacgctagcgtcggcgtcgctgggtggggtgtggctgacaagttttcttctggttgcgaccaataccgccatcgcgagcgtgctcgtgtgccgggcaacgggcggccggctggtcgcgctgggatgcgtgattgggtgtgcgggactcggcccggcttcctacctgctgggctcggtgccggtcggcggtccgacggtgcgcgtggcgctggtacaggccggcgacatagccgatgcggcggctcgactggcggccggtgaagagttcaccgcggccgttgcggaccagcggccggacttggtggtctggggggaaagcagcgtcggacaagacctcacccgccatcctgacgtcctggctcgcctggccgagctgtcacagcgggtgggcgcggatttgttggtcaacgtcgacgccccggcaccggacgggggaatctacaagtcggcggtgcttgtcggcgcgcacgaagctgtgggcagctaccggaagacccggttggttccgtttggcgaatatgtgccgctgcgcccgcttttcggctggatcacccgctacagcaaggccgccgcaaaggatcggcagcgcggcgccgggccggtggtgttggcggtgaactccttgcatatcgccccgttgatcagctacgagatgaccttctccgatctgacccggcacgccgcgcggctcggggcggcgctgctggtgtatcagagttccacctcgacgttccaagggagttgggcgcagccgcagttggccgcccagcccgcggtgcgcgccgtcgaagccggcatcccagcggtgcacgccagcttgtcgggcgacagctcggcctttgatacccggggccgtcggctggcctggtgctcggcggaattcaacggtgccatcgtggtgaacgttccgttggcatcgaatgtcacgctctaccttcggttgggtgactgggtgccagtgacggcatttgtggtcatgggtgccggctttgcggtgtttctgcgccgcagcttggctcgagtgtcagattgcgcggataag

SEQ ID NO: 26661 - DNA, 1941 bp, Mycobacterium bovis
atgaacgcccatgtcgagcagttggagtttcaggcggaggcccggcaactgctggatttgatggtccactcggtctactccaataaggacgcgtttctgcgggagttgatctcgaatgcctccgatgcgctagacaagctgcggattgaggcgctgcggaacaaggacctggaggtcgacacctccgatctgcacatcgagatcgacgcagacaaagctgcaaggactcttaccgttcgtgacaacggcatcgggatggcgcgcgaggaggtggtggatctgattggcacgctggccaagtcgggcaccgccgagctgcgcgcacagctgcgtgaggccaagaacgcggccgcctccgaggaactgatcggtcagttcggcatcggcttctactcgtcgttcatggtggccgacaaggtccaactgcttacccgcaaggctggcgagagcgcggccaccagatgggagtccagcggtgagggcacctacaccatcgagtccgtcgaggatgccccccagggcacgtcggtcaccctgcacctcaagccggaagacgccgaggacgacctgcacgactacacctcggaatggaagatccgtaacctggtcaagaaatactccgacttcatcgcctggcccatccggatggacgtcgagcgccgcaccccagcctcccaggaagaagggggggaaggcggcgaggagaccgtcaccatcgaaaccgaaaccctcaactcgatgaaggcgctgtgggcgaggcccaaagaagaggtgtctgagcaggagtacaaggagttctacaaacacgtcgcgcacgcctgggacgacccgctcgagatcatcgcgatgaaggccgagggcaccttcgagtaccaggccctgctgttcatcccgtctcatgccccgttcgatctgttcgaccgggacgcccacgtcggtatccagctctacgtcaagcgggtgttcatcatgggcgactgcgaccagctcatgcccgagtacttgcgttttgtcaagggtgtggtcgacgcgcaggacatgtcgctcaacgtttctcgcgaaatcctgcagcaggaccggcagatcaaggccatccgccggcggctgaccaagaaggtgctgtccacgatcaaggacgtgcagtccagccggccggaggactaccgcacgttctggacacagttcggcagggtcctcaaagagggactgctgtcagacatcgataaccgggagaccctgctcggtatttcttcgtttgtctccacgtacagcgaggaggaacccaccacgctggccgaatacgtcgagcgcatgaaggacggtcagcaacagatcttctacgccaccggcgagacgcgccaacaactgctgaagtcaccgcacctggaggcgtttaaggccaaggggtacgaagtgctgctgctcaccgacccggtcgacgaggtctgggtgggaatggtgccggagttcgacggcaaaccgctgcagtcggttgccaagggcgaggtggacttgagttccgaagaggacaccagcgaggccgagcgcgaggagcggcagaaggaatttgccgacctgctgacctggttgcaggagacgttgagcgatcacgtcaaggaggtgcggctgtccacccgcctgaccgagtcaccggcctgtctgatcaccgatgccttcgggatgacacccgcgctcgcgcgcatctaccgggcttccggccaggaggttccggtcggcaagcggatacttgagctcaacccgagccatccgttggtgaccggcctgcgccaagcccaccaggaccgcgcagacgatgccgagaaatcattggccgaaaccgcggaattactttacggcacagcgcttctcgccgaaggcggcgcactcgaggatccggcgaggttcgccgagctgctggccgaacgtctcgcgcgtaccttg

SEQ ID NO: 26662 - DNA, 609 bp, Mycobacterium bovis
atgtttgagggacccgtccaggacctgattgacgaactcggcaagttgccggggatcggacccaagagtgcgcagcgaatcgccttccacctgttgtcggtagaaccgtcggacatcgaccggctgaccggtgtgctggcgaaggttcgggacggcgtgcgattctgcgcggtgtgtgggaatgtctctgacaacgagcgttgcagaatctgctctgatatccgtcgcgatgcgtccgtggtgtgcattgtcgaggaacccaaagacatccaggccgtcgagcgcacccgcgagttccggggtcgctatcacgtcctgggcggggcgcttgacccgctgtccggaattgggccggatcagctgcggatccgcgaactgctgagccgcatcggggaacgggtcgacgacgtcgacgtcaccgaggtcatcatcgccaccgaccccaacaccgagggcgaggcgacggccacctacctggtgcgaatgctgcgcgacatccccggcctgaccgtcacacggatcgcgtccgggctgccgatgggcggtgacctggaattcgccgacgagctcaccctgggccgagcgctcgccggccgccgcgtgctcgcc

SEQ ID NO: 26663 - DNA, 693 bp, Mycobacterium bovis
gtggtgcggatcgggctcgtgctgcccgacgtgatgggcacctacggcgacggcggcaacgccgtggtgctacgacagcggctgctgctgcgcggcatcgccgccgagatcgtcgagatcacgctggccgatccggtgccggattcgctggacctctacacgctgggcggagcggaggactacgcgcagcggctggccacccggcacctacgtcgatatccgggcctgcaacgcgcggcgggccggggtgctccagtattggcgatctgcgcggccatccaggtgcttgggcactggtacgagacgtcgtcgggagaccgggtcgacggcgtggggttgctggatgtgaccacgtcaccgcaggatgcgcgcaccatcggcgagttggtcagcaagccgttgctggccggtttgacccaacccttgaccggttttgagaaccaccgcggcggcaccgtcctcgggcccggaacgtcgcccttgggcgcggtggtcaagggagccggcaaccgggccggcgacggttttgatggcgcggttgcgggcagcgtggtcgcgacctacatgcacgggccgtgcctggcccgcaacccggagcttgccgacctgctgctgagcaaggtggttggtgagctggcgccgctggatttgcccgaggtggacctgctgcgccgcgaacggctatccgcgcgt

SEQ ID NO: 26664 - DNA, 1611 bp, Mycobacterium bovis
gctgacgtggctctctaccgcaagtaccgaccggcaagcttcgcggaggtggtggggcaggagcacgtcaccgcgccgctgtcggtggcgctggatgccggccggatcaaccacgcgtacctgttctctgggccgcgtggctgcggaaagacgtcgtcagcgcgtatcctggcgcggtcgttgaactgtgcgcagggccctaccgccaacccgtgcggggtctgcgaatcctgcgtttcgttggcgcccaacgcccccggcagcatcgacgtggtagagctggatgccgccagccacggcggcgtggacgacacccgcgagctgcgggaccgcgcgttctatgcgccggtccagtcacggtaccgggtatttatcgtcgacgaggcgcacatggtgaccaccgcgggattcaacgcgctgctcaagatcgtggaggaaccgcccgaacacctgatcttcatattcgccaccaccgaaccggagaaggtactgccgacgattcggtcgcgcactcatcactacccgttccggctgctgccgccgcgcactatgcgggcgttgctcgcgcggatctgcgagcaggagggcgtcgtcgtcgacgatgcggtgtacccgttggtgatccgggccggcggaggttccccacgggatacgctctcggtgctggaccaattgctggctggggccgcggacacccacgtgacctacacccgggcgctggggctgctgggtgtcaccgacgtcgccctgatcgacgacgcggtcgacgcactggccgcttgcgatgcggccgcattgttcggggcgatcgaatcggtgatcgatggcggacatgaccctcggcgtttcgctaccgatctgctggagcgattccgcgacctgattgtgctgcaatcggttcccgacgcggcatctcgcggggtggtggatgcgcccgaagacgcgctggatcggatgcgcgagcaagccgcccggatcgggcgggcgaccctgacccgatatgccgaggtggtgcaggccgggctaggcgagatgcgcggtgcgaccgcgccgcgtctgctgctggaagtggtttgcgcgcgactgctgctgccctcggcgagcgacgccgaatcggcactgttgcagcgggtcgaacggatcgagacccggttggacatgtcgatcccggcgccgcaagccgtaccacgcccgtcggctgcggctgccgagccgaaacaccagcccgcgcgtgaaccgagaccggtgctggcccccacaccggcctggagcgaacccaccgtggccgcggttcggtccatgtggccgacggtgcgcgacaaggtgcgcctgcgcagccgtaccaccgaggtgatgctggcgggtgccaccgtccgtgcgctagaggacaacacgctggtgctgacccacgaatcggcgccgctggcgcggcggctgtccgaacagcgcaacgccgatgtcctcgccgaggcgcttaaagacgcgctgggagtcaactggcgggtgcggtgtgagaccggtgaaccggctgcggcggcatcacccgtcggcgggggagcgaacgtggcgaccgccaaggccgtaaaccctgcccccacagcgaattccact

SEQ ID NO: 26665 - DNA, 1128 bp, Mycobacterium bovis
ttgatctgctttgacgatgtcagcaaggtgtacgcacacggtgccaccgccgtagaccggctgacgctggaagtccctaacggcatgctgaccgtcttcgtcggcccctccggctgcggcaagacgacggcgctgcgaatgatcaaccgaatggtggatccgacctcgggcaccatcactgtcgacggtaccgacgtgtcgacggtcaatgcggtgaagctgcgcctgggaattggctatgtcatccagaacgcggggctgatgcctcatcaacgggtcatcgacaacgtcgcaacggtgccggtgctgaagggtcagccgcgccgggcagcccgcaaagccggttatgaggtgcttgagcgtgtcgggctggaccccaaggtcgccacccgctacccggcccagctctcgggcggcgaacagcaacgggtcggcgtggcacgggcactcgcggccgatccgccgatcttgttgatggacgagccgttctcggccgtcgacccggtggttcgccacgagctacagaacgaaatacttcgtctgcaagccgagttgcacaagaccattgtcttcgtgacgcacgacatcgacgaggcgttgaagctcgccgatctggtggcggtgttcgccccgggcggcgcgcttgcgcagtacgacgaaactgcccggctgttatccagtccggcgaatgacttcgtgtcgaagttcatcggtctcggtcgcggctatcggtggctgcagctgttcgacgcggccggactacctgtgcgcgacatcgagcaagtctcggtgaacggcctttccgatgcccgggacaggcaagttcgtgacggctgggtgctggtggtcgacggtgcgggtgcgccgttgggctggatcgacgccgatggccggcggcgtcaccgcggcggcgcggcattgtcggatgccatgaccgtcggcggttcggtgttccgcccgaacggtaacctcagccaggcgctggacgccgccttgtcctcgccgtcgggggtcggtgtcgccgttgacggcggtggcaaggtcatcggcgggatactggccgccgacgtgctggccgagttccaaaaaggcaagaaggccggcggcggagctaagccatgcactacc

SEQ ID NO: 26666 - DNA, 399 bp, Mycobacterium bovis
atgcaacccggaggcgacatgtcggcgctgctcgctcaggcgcagcagatgcagcaaaagctcctggaggcccagcaacagctggcgaactctgaggtgcacggtcaagccggtgggggcctggtcaaggtcgtcgtcaaaggcagcggggaggtgatcggcgtgacgatcgaccccaaggtcgtcgatcccgacgacatcgagaccttgcaggacctgatcgtcggtgcgatgcgcgacgcgtcccagcaggtgacgaagatggcgcaggaacggctgggtgcattggccggcgcgatgcgcccgccggcaccaccggctgcgccgccgggagcgccaggtatgccgggtatgccgggtatgccgggtgcgccgggcgcaccacctgtaccagggatc

SEQ ID NO: 26667 - DNA, 1056 bp, Mycobacterium bovis
atgaagttggtcagtgctggccaactgtgtaatggttgcccggctcgggtcaccacgtacattctggcaaggcgggcgagattcggttcctcgcgtccttggccggtggcggttcccggttgtccgtgggcgtgtcgtgtacgtggtgtaagtgtcgtgaacgtcctcagtttgggctcgtcatcgggtgtggtgtggggccgggtgccgatcaccgcccccgcgggggcggccaccggcgtcacctcgcgcgccgatgcgcattctcagatgcgccgatacgcccaaacaggtccgacagctaagctaagctctgcgccaatgacaaccatgtggggtgctccgcttcaccgcaggtggcgaggatcgcggctgcgcgacccacgtcaggccaagttcctcacgctggcatcgctgaaatgggtgcttgccaaccgcgcctacactccgtggtacctggtgcgctactggcggctgttgaggttcaagctggccaacccgcacatcatcacccgcggcatggtgtttctcggcaagggtgtggagatccacgcgacaccggaactagcgcaactggagatcggccgctgggtgcacatcggggacaagaacacgatccgtgcccacgagggctcgctgcggttcggcgacaaggtggtgctgggccgggacaacgtcatcaacacctatctcgacatcgagatcggggactcggtgctaatggccgactggtgctatatctgcgatttcgaccaccggatggacgacatcacgctgccgatcaaagaccagggcatcatcaagagtccggtgcggatcgggcccgacacctggatcggcgtgaaggtgagcgtgctgcgcggcaccaccatcggacggggctgcgtgctcggctcgcacgcggtggtccgcggcgcaattcccgactattcgatcgcggtcggggcgccggccaaggtggtcaagaaccgccagctgtcctgggaggcatcggccgcgcagcgcgctgagctagccgctgccttggccgacatcgaacgcaagaaggcggcccgc

SEQ ID NO: 26668 - DNA, 1134 bp, Mycobacterium bovis
atgccggtaaccttggctgctgtggaccccgaccgtcaagccgacatcgccgccttggactgcaccctgaccacggtggagcgggtgctcgacgtcgagggtctgcgcagccgcatcgagaagctcgagcatgaggcatctgatccgcacttgtgggacgaccagacccgggcgcagcgggtgaccagcgagttgtcgcacacccagggagagctgcggcgcgtcgaggagctaaggcgccgcctggacgacctgccggtgctctacgagctggccgccgaggaagcgggcgcggccgccgccgatgccgtcgccgaggccgacgcggagctcaagtcgttgcgcgccgacatcgaggccaccgaggtgcgcaccctgctgtcgggggaatacgacgagcgtgaggcgctggtcaccatccggtccggcgcgggtggggtggacgccgcagactgggccgagatgctgatgcggatgtatatccgctgggccgagcagcacaaataccccgtcgaggtgttcgacacctcctatgccgaagaagccggcatcaaaagcgccacgttcgccgtgcacgcaccgttcgcctacggcacgttgtcggtcgaacagggcacccaccggctggtgcggatcagcccgttcgacaaccagagccggcgacagacgtcgttcgccgaagtcgaagtgctgccggtggtggagaccaccgaccacattgacatccccgagggcgatgtccgcgtcgacgtctatcgctccagcgggcccggcgggcaatcggtgaacacgacagactcagcggtgcggctcacccacattcccagcggtatcgtggtcacctgccagaacgagaagtcccaactgcagaacaagatcgcggcgatgcgggttctgcaagcaaagttgttggaacgcaagcgcttagaagaacgcgccgagctcgacgcgttgaaggccgacggcggcagctcctggggtaaccagatgcgttcctatgtgctgcacccatatcagatggtcaaggatctgcgcaccgagtacgaggtcggcaatccggcggccgttctggatggagacctcgacggattcctggaagccgggatccggtggcgcaatcgacgtaatgacgac

SEQ ID NO: 26669 - DNA, 924 bp, Mycobacterium bovis
atgacgactagcggcacagttctggccacctcgatagcacagcactggcataacttctggcgcggtgaaatcggcgactggatcctcaaccggggcctgcgcatcgtcatgctgctgatcgcagcggtgctggcggcccgcttcgtgacttggcttgccaaccgggtgacccggcgcctcgacctggggtttaccgaaagcgacgcgttggtgcgctcggaggcaaccaagcaccgccaggccgtagcgtcggtgatctcgtgggtgtcgatcgtcctcatctatgtcgtcgttgtgtacgaggtcatcgatgtgttgccggttccggtcggtgcgttggtggggccggcggcggtgctcggcgccgcgctgggcttcggtgcccaacgcctggtgcaggacctactcgccgggttcttcatcatcgtggagaagcagtacgggttcggcgatttggtcgaactcagcatggtggggtcaccggagaacgcggccggcacggtggaggacgtcacgctgcgggtgaccaagctgcgttccagcgagggtgaggtgttcaccgttcccaacgggaacatcgtcaagtcggtcaacctgtccaaggactgggcccgcgcggtcgtggacatccccgtcccgaccagcgccgatctcggccgcgtgaacgaggtcttgcatcaggagtgtgagcacgcgcgccacgactcgctgctgggagagctgttgttggatgagcccacggtcatgggcgtggagcgcatcgaagtggacaccgtcaccctgcgactggtggcccgcaccctacccggcaagcagttcgaggcgggccggcagttgcgggtgctggtgatccgcgcgctcacccgcgccgggatagtcaccgcggccgatgcgcgggccgcggtggcagaaagtccggagcag

SEQ ID NO: 26670 - DNA, 480 bp, Mycobacterium bovis
gtgtccaagtcgtcgcgtggcggccggcagatcgttgccagcaatcgcaaagcccggcacaactattcgatcatcgaggtgttcgaggccggggttgcgctgcaaggcacggaggtgaagagcctgcgggaagggcaggcgtcgctggccgattcgttcgccaccatcgacgacggcgaagtgtggctgcgcaacgcgcacatcccggaataccggcacggcagctggaccaaccacgagccgcgacgcaaccgcaaactgctgttgcatcgccgccagatcgacaccttggtcggcaagatccgcgaaggcaacttcgccctggtgccgttgtcgctgtatttcgccgaaggcaaggtcaaggttgagcttgcgctggcccgaggcaagcaagcccgcgacaaacgccaggacatggcccgtcgtgatgcccagcgtgaagtgctccgcgagttgggtcggcgcgctaagggcatgacc

SEQ ID NO: 26671 - DNA, 450 bp, Mycobacterium bovis
atggatatcgcggggcgcagcctggtctatttctccagcgtgtcggagaacacccaccgctttgtgcagaaactgggtattcccgccacgcggataccgctgcatggccggatcgaggtcgacgagccgtacgtgctgatactgcccacctacggtggcggccgggccaacccgggtctcgatgccggcggatacgtccccaaacaggtcattgccttcttgaacaacgaccacaatcgagcgcagctgcgcggggtcatcgctgccggcaataccaacttcggtgccgagttctgctacgccggcgacgtcgtctcccgaaaatgtagcgttccctacctataccgcttcgaactgatgggcaccgaggacgacgtcgccgccgtccgcaccggtctcgctgaattctggaaggaacagacgtgccaccaaccgtcattgcagagcctg

SEQ ID NO: 26672 - DNA, 2175 bp, Mycobacterium bovis
gtgccaccaaccgtcattgcagagcctgtagcctccggcgcgcacgcctcttactctggggggccgggcgaaacggactatcacgcgctgaacgcgatgctgaacctgtacgacgcggacggcaagatccagttcgacaaggatcgggaagcagcccaccagtactttttgcagcatgtcaatcagaacacggtcttcttccataatcaggacgagaagctcgactacctgatccgcgagaattactacgagcgtgaggttctcgaccagtactcgcgcaacttcgtcaagacgctgctagaccgcgcctacgccaaaaagttccggtttccgacgtttttgggtgcgttcaagtactacacctcctacacgctgaaaacctttgacgggaagcgctatctggagcgcttcgaggaccgcgtggtcatggtggcgctaacgttggccgccggcgataccgcacttgccgagctgctggtcgacgagatcatcgacggccgcttccagcccgccacaccgacgtttttgaattctggcaagaagcagcgcggggagcccgtgagctgttttttgcttcgcgtcgaagacaacatggagtcgatcggacggtcgatcaactccgcgctgcagctatccaagcgtggcgggggagtggcgttgctgctgaccaacattcgcgagcacggcgcgccgatcaagaacatcgagaaccagtcctcgggcgtcatccccatcatgaagttgctggaggatgcgttctcctacgccaaccagctgggcgctcgtcaaggtgccggcgcggtgtacctgcacgcccatcaccccgacatctaccgattcctggacaccaagcgtgagaacgccgacgagaagatccggatcaagacgctgagtctgggggtggtgatccccgacatcaccttcgagttggccaagcgcaacgatgacatgtacctgttctcgccctacgatgtcgagcgggtctacggtgtgccgttcgctgacatctcggtcaccgagaagtactacgaaatggtcgatgacgcgcgcatccgcaagaccaagatcaaggcacgggagttcttccagacgctggccgagctgcagttcgagtccggctacccctatatcatgttcgaagacaccgtcaatcgcgctaatccaattgatggcaagatcacgcacagcaacctgtgctcggagatcctgcaagtgtctacgccgtcattgttcaacgaggacttgtcgtatgccaaagtgggcaaagacatttcgtgcaacctggggtcgctgaacatcgccaagacgatggactcgccggacttcgcgcagacgatcgaggtggcgatccgcgcgttgaccgcggtgagcgaccaaacccatatcaagtcggtgccctcaatcgagcagggcaacaacgactcccacgcgatcgggctaggacagatgaacctgcacggctacctggcccgggaacgcatcttctacggatccgacgaaggcatcgacttcaccaacatctacttctatacggtgctgtatcacgcgttgcgggcatccaaccgcatcgcgatcgaacgcggcacgcacttcaagggtttcgagcggtccaagtacgcgtccggggaattcttcgacaagtacaccgaccagatttgggagccgaagacccagaaggtacgccagctgttcgccgacgccggcatccgcatcccaacgcaggacgactggcgtcggctcaaggagtcggtgcaagcgcacggcatctacaaccagaacctgcaggcggtgccgccgaccgggtcgatttcctacatcaaccattcgacgtcgtcgattcacccgatcgtgtcgaaggtcgagatccgcaaggaaggcaagatcgggcgggtctactacccggcgccgtatatgaccaacgacaacctggagtactacgaagacgcctacgagatcggttacgagaagatcatcgacacctacgcggcggccacccagcatgtggatcaagggctttcgctgacgttgttcttcaaagacaccgccaccacccgcgacgtgaacaaggcgcagatttacgcctggcgcaaggggatcaagacgctgtactacatccggctgcggcagatggcgttggagggcaccgaggtcgagggttgcgtgtcctgcatgctg

SEQ ID NO: 26673 - DNA, 1101 bp, Mycobacterium bovis
atgaaagttctcgccgcgatgagcggtggcgtcgactcgtctgttgctgccgcccgcatggtcgatgccggacacgaggtggtcggagtgcacatggcgctatcgaccgcgcccggcacgctgcgcaccggctcgcggggctgttgttccaaagaggacgctgcagacgcgcgccgcgtcgccgatgtgctcggaatcccgttttatgtttgggatttcgcagagaagttcaaagaggacgtgatcaacgacttcgtgtcgtcgtatgcccgcggggaaactccgaacccttgcgtgcggtgcaatcagcagatcaagttcgctgctctgtccgccagggctgtggcgttgggtttcgatacggtggccaccggccactacgcccggctgtcgggtgggcggctgcgccgcgccgtcgaccgggacaaggatcagtcttatgtgcttgccgtgctcactgcgcagcagctgcgccacgccgcgttcccgatcggcgacacgccgaagcggcagatccgtgccgaggcggcccgccgcggcctggcggtcgccaacaagccggatagccacgacatctgcttcataccgtccgggaacaccaaggcttttttgggtgagcgcatcggggttcgccgtggtgtggtggttgacgcggatggtgtggtgctggcttcccatgatggggtgcacgggttcaccatcgggcagcgtagaggcctgggcatcgccgggccgggcccgaatggtcgtccgcgctatgtcacggcgatcgacgccgacaccgccaccgttcacgtaggtgacgtgaccgaccttgatgtgcaaacgctgactgggcgcgctcccgtcttcaccgccggagccgcgccgtcaggacccgttgactgcgtggtccaagtgcgtgcgcacggtgaaaccgtcagtgcggtagcggaattgatcggcgatgcgcttttcgtgcagttgcatgccccgctgcgcggcgtggcgcgcggccagacgctggtgctctaccgacctgacccagccggtgacgaggtgctcggcagcgcgaccatcgccggcgcttcagggttgtcgactggcggcaaccccggggct

SEQ ID NO: 26674 - DNA, 1719 bp, Mycobacterium bovis
ttgacagccgaagcgcccccgctgggagaactcgaagccattcgtccttacccggcccgcaccggtcccaaggggagcctggtctacaagctgatcaccaccaccgatcacaagatgatcggcatcatgtactgcgtcgcgtgcataagctttttcttcatcggtggcctgctggcgttgttgatgcggaccgagctggccgcacccggtctgcagttcttgtcgaatgagcagttcaaccagttgttcaccatgcacggcacgatcatgctgctgttctatgccacgccgattgtgtttggtttcgccaacctggtgctgccgctgcagatcggcgcacccgacgtggccttcccccggctgaacgccttttcgttctggctgttcgtatttggcgccaccatcggggcagccggcttcatcactccgggcggggccgcggacttcgggtggaccgcctacacgccgctgaccgacgccattcactcgcccggcgccgggggcgacctgtggatcatgggtttgatcgttgcgggtctgggcaccatcctgggcgcggtcaacatgatcaccaccgtggtgtgcatgcgcgcacccgggatgacgatgttccggatgccgatcttcacctggaacatcatggtgacgtccatcctgatattgattgcgttcccgctgctcacggcggcattgttcgggctggccgccgaccggcatctgggagctcacatctatgacgccgccaatggcggagtcctgctgtggcagcacctgttttggttcttcggccaccccgaggtctacatcatcgcgctgccgtttttcgggatcgtctcggagatcttcccggtgttttcccgcaagccgatcttcggttacaccacgctggtttatgcgacgctgtcgatcgccgcgttgtcggtcgcggtatgggcgcaccacatgttcgcgaccggagccgtcctgcttcccttcttctctttcatgacgtatctgatcgcggtgccgaccgggatcaagtttttcaactggatcggcaccatgtggaaggggcaattgacctttgaaaccccgatgttgttttcggtgggcttcatggtcaccttcttgctgggcggactcaccggtgtgctgctggccagcccgccgctggacttccacgtcaccgatagctatttcgtggttgcacactttcactacgtgctgttcggcacgatcgtgttcgccaccttcgccggcatctatttctggttccccaagatgaccggccggctgctcgacgagcggttgggcaaactgcacttctggttgacgttcatcggttttcacaccacgttcctggtgcagcactggttgggcgacgagggtatgccgcgtcgctacgccgactacctacccaccgacggcttccagggtctcaacgtcgtctcgacgatcggggccttcatcctgggtgcgtcgatgttcccgttcgtgtggaacgtcttcaagagctggcgctacggcgaggtggtcaccgtcgacgacccgtgggggtacgggaattcgctggagtgggcgacaagttgtccgccgccgcggcacaacttcaccgagctgcctcgcatccgctccgagcgtcccgcgttcgaactgcactacccgcatatggtggaacgccttcgcgccgaggcccacgtcgggcgtcatcatgacgagcccgccatggtgacttcgagc

SEQ ID NO: 26675 - DNA, 759 bp, Mycobacterium bovis
gtgcgtaacggcacgctacgttatcggcagccctcttacaaatcacacggtgtgcgttatcctctggcggtggcgcaactcggcttccagcgcgcccgcaccgaggaaaacaagcgccaacgtgcggcggcgctggtggaagccgcgcggtcgctggcgctggagacgggcgtggcatcggtgacgttaacggctgtcgcaggtcgtgccgggattcactactctgcggtgcgccgctacttcacctcgcacaaagaagtgctgctgcacctcgccgccgagggttgggcgcggtggtcgggcacggtatgcgagcagctgggcgagccggggccgatgtcggcaccgcgggtggccgaggcactggccaacggtctggccgccgatccgctgttttgtgatctgcttgccaatctgcatctgcatctcgagcaggaggtggatgtcgaccgggtcatcgaggtcaagcggaccagcatcgcagccgtgatagcgctcgtcgacgcgatcgaaagcgcattgccggcactcgggcgttctggggcattcgacatcctgctggccgcttactcgctggcggccaccctgtggcagatcgccaatccgccggagcggctcaccgacgcctatgccgaggagccagagttgctcccaccggagtggaacctcgactttgctgccgcgcttactcgcctgctcaccgctacgcttctcggcctgctcgccggatccccatgcgaatgccggtcgccaacgcgc

SEQ ID NO: 26676 - DNA, 1176 bp, Mycobacterium bovis
atgatccgcgcctgtcgcccgattacggttccgctgacccaggctcaaggtctggtcctgggcggcgacgtggtcgcaccgctgtcgctgccggttttcgacaactccgcaatggatggctatgcggtgcgcgccgaagacacctcaggtgccacaccgcaaaatccggtgatgttgccggtcgccgaggacattcccgccgggcgcgccgacatgctgacgctgcagcctgtgactgcgcaccggatcatgaccggtgcgccagtgcccaccggtgcgacggcgatcgtgccggtcgaagccaccgacggcggcgtcgattcggtggcgatccgccaacaggccaccccaggcaagcacatccgacggtcgggcgaagacgtcgccgccggtaccacggtgctgcacaacggccagatcgtgaccccggcggtgctcggcctggccgccgcgctgggtttggccgagctgccggtgctcccccgtcagcgggtgctggtgatctccacagggtcggagctggcgtcgccaggcacgcccctacaaccgggtcagatctacgagtccaactcgatcatgctggccgctgccgtccgcgatgcgggcgccgctgtggtcgccaccgcaaccgccggcgacgacgtcgcgcagttcggcgcgatccttgaccggtacgcggtggacgccgacctgatcatcaccagcggcggtgtcagtgccggagcctacgaggtggtcaaagacgcgttcggcagcgctgactaccggggaggcgaccacggtgtcgaattcgtcaaggtggcgatgcaacccggaatgccccagggcgtcgggcgggtggcaggtacgccgatcgtcacccttcccggcaacccggtcagcgcgctggtgtccttcgaggtgttcatccgtcccccgctgcgcatggccatgggcctgccggatccgtaccggccgcaccgaagcgcggtactcaccgcgagcctgacatcgccgcgcggcaaacgtcagttccgacgcgcaatactcgatcaccaggcaggcacggtcatcagctacggcccaccggcgtcgcaccatttgcgttggttggcatcggccaacggacttctggacatcccggaggacgtcgtggaggtggctgccggaacgcagctgcaagtctgggacttgacc

SEQ ID NO: 26677 - DNA, 666 bp, Mycobacterium bovis
gtgcacgaatcccgtctggcatcggcaaggctgtatctgtgcaccgacgcccgtcgggaacgcggcgacttggctcagttcgccgaggccgccctggccggcggagtggacatcatccagttgcgcgacaagggctcacccggtgagctgcggttcggcccgctacaggcgcgtgacgaactggccgcctgcgagatcctggccgacgcagcgcaccggtacggcgccctattcgcggtcaacgaccgcgccgatattgcccgcgcggccggcgccgacgtgctgcatctgggtcaacgcgacctgcccgtgaacgtcgcacgacagatcctggcaccggataccctcatcggccggtccacccacgaccccgaccaggttgctgcggccgccgccggcgacgccgactatttctgtgtcggaccatgttggccgacaccgaccaagcctggccgtgcggcgccgggtctggggctggtacgggtcgccgccgaactcggcggcgacgacaagccgtggttcgctatcggcggcatcaacgcgcaacggctgccggccgtgctcgatgccggcgctcgccggatcgtggtggtgcgggcgatcacctcggctgacgacccacgtgcggcggccgagcagctccggtcggcgcttacagcagcgaac

SEQ ID NO: 26678 - DNA, 1284 bp, Mycobacterium bovis
atgcacgcacgcgcacccgtcgacgtttggcggtcggtgcgcagcttgcccgacttctggcgtctgctgcaggtgcgggttgcgagtcagttcggcgacgggttgtttcaggcggggctggccggagcgttgctgttcaacccggaccgggcggccgacccgatggccatcgcgggggccttcgcggtgctgtttctgccctattcgctgctggggcccttcgccggggccctaatggaccggtgggatcggcggtgggtgctggttggcgccaacaccggccggctagccctgatcgccggggtcggcacgatactcgcggtcggagccggcgacgtgccgctgttggtcggagcgctggtcgccaacggcttggcacgattcgtcgcctcgggactgtcggcggcactgccccacgtggtgccgcgcgaacaggtggtcacgatgaactcggtggccatcgcgtcgggggcggtctccgcgttcctgggcgccaacttcatgctgttgcctcgttggctgctcggcagcggcgacgagggggcctccgcgatcgtcttcctggtggcgatccccgtatcgatcgcgttgctttggtcgctgcggttcggcccgcgggtactcggcccggacgacaccgaacgcgcgatccacggatctgctgtctacgccgtggtcaccggttggctacatggagcgcgcaccgtggtgcaacttccgaccgtcgctgccggcctgtccggtttggcagcgcatcggatggtggtcggtatcaactcactgctgatcttgctcctggtccgccacgtgaccgcccgggccgttggggggttgggtaccgcactgctgttcttcgcggccaccgggctgggagccttcctggccaacgtcttgactccgaccgcgatccggcgctggggacgctacgccacggcaaatggcgcgttggctgcggccgccactatccaggtcgcggccgccgggctgctggtcccggtgatggtggtatgcggcttccttttaggtgtggccggccaggtggtcaagctgtgcgccgattcggcgatgcagatggacgtcgacgacgcattgcgcgggcacgtgttcgccgtgcaggatgcactgttttgggtctcatacatcctctcgattaccgtggccgcagccttgattcccgagcacgggcacgcgcccgtatttgtgctgttcgggtcggcgatctacctagccgggctggtggtgcacaccatcgtcgggcgccgcggccagcctgtgatcggtcgc

SEQ ID NO: 26679 - DNA, 1440 bp, Mycobacterium bovis
gtgccggaagccgtccaggaagccgatctgctaaccgccgctgcggttgccttgaacaggcatgctgccttattgcgggaactcgggtcggtgttcgccgccgcgggacacgagttgtatctggtcggcggttcggtgcgagatgcactgttgggccggttgagccccgacctggacttcaccaccgacgcccgtcccgagcgggtgcaggagatcgtgcggccgtgggccgatgcggtgtgggataccggaatcgaattcggcaccgtcggcgtgggtaagagcgaccaccgcatggagatcaccacattccgtgccgacagctacgaccgggtttcgcgtcatccagaggtacgtttcggcgattgcctcgagggcgatctggtccgccgcgacttcaccacgaacgcaatggctgtgcgcgtcaccgccactgggccgggcgaattcctggatccgcttggtggcttggcggcgctgcgggccaaggtgttagacaccccggcggcgccgtcggggtcctttggcgacgatccgttgcggatgctgcgcgccgcgcggttcgtctcgcaacttggattcgcggtggcgccgcgggtgcgcgcggcgatcgaagagatggcgccgcagttggcccgaatcagcgccgaacgggtggccgccgagctggacaagctgctggtcggtgaggatccggccgcgggtatcgacctgatggtgcagagcggtatgggtgctgtggtcttgcctgaaatcggtgggatgcggatggcgatcgacgaacatcaccagcacaaggacgtctatcagcattccttgaccgtgctgcggcaggcgatcgcgctggaggacgacggcccggatctggtgttgcgctgggcggcgctgctgcacgacatcggcaagcccgccacccgccgtcacgaacccgacggtggggtgagcttccatcaccacgaagtggtcggcgccaagatggtgcgcaagcggatgcgggcgctgaagtattccaagcagatgatcgacgacatctcgcagctggtctacctgcatctgcggtttcacggctacggcgatgggaaatggaccgactctgcggtgcgccgctatgtcaccgacgccggggccctactgccacggctgcacaagctggtgcgcgccgactgcacgacccgcaacaagcgccgggccgcgcggttgcaggccagttacgaccggctggaagagcggatcgcggagctggccgcccaggaggatctggatcgggtgcgccccgacctggacggcaaccagatcatggcggtgctcgacattccggcgggcccgcaagtcggcgaggcgtggcgctacttgaaggagctgcggctagagcgcggcccgttgtccaccgaggaggcgacaaccgagctgctgtcctggtggaaatcacgggggaaccgc

SEQ ID NO: 26680 - DNA, 2232 bp, Mycobacterium bovis
atgagtattaccaggccgacgggcagctatgccagacagatgctggatccgggcggctgggtggaagccgatgaagacactttctatgaccgggcccaggaatatagccaggttttgcaaagggtcaccgatgtattggacacctgccgccagcagaaaggccacgtcttcgaaggcggcctatggtccggcggcgccgccaatgctgccaacggcgccctgggtgcaaacatcaatcaattgatgacgctgcaggattatctcgccacggtgattacctggcacaggcatattgccgggttgattgagcaagctaaatccgatatcggcaataatgtggatggcgctcaacgggagatcgatatcctggagaatgaccctagcctggatgctgatgagcgccataccgccatcaattcattggtcacggcgacgcatggggccaatgtcagtctggtcgccgagaccgctgagcgggtgctggaatccaagaattggaaacctccgaagaacgcactcgaggatttgcttcagcagaagtcgccgccacccccagacgtgcctaccctggtcgtgccatccccgggcacaccgggcacaccgggcacaccgggaaccccgatcacgccgggaaccccgatcaccccgggaaccccgatcacgccgggaaccccgatcaccccgggaaccccaatcacacccatcccgggagcgccggtaactccgatcacaccaacgcccggcactcccgtcacgccggtgaccccgggcaagccggtcaccccggtgaccccggtcaaaccgggcacaccaggcgagccaaccccgatcacgccggtcacccccccggtcgccccggccacaccggcaaccccggccacgcccgttaccccagctcccgctccacacccgcagccggctccggcaccggcgccatcgcctgggccccagccggttacaccggccactcccggtccgtctggtccagcaacaccgggcaccccagggggcgagccggcgccgcacgtcaaacccgcggcgttggcggagcaacctggtgtgccgggccagcatgcgggcggggggacgcagtcggggcctgcccatgcggacgaatccgccgcgtcggtgacgccggctgcggcgtccggtgtcccgggcgcacgggcggcggccgccgcgccgagcggtaccgccgtgggagcgggcgcgcgttcgagcgtgggtacggccgcggcctcgggcgcggggtcgcatgctgccactgggcgggcgccggtggctacctcggacaaggcggcggcaccgagcacgcgggcggcctcggcgcggacggcacctcctgcccgccctccgtcgaccgatcacatcgacaaacccgatcgcagcgagtctgcagatgacggtacgccggtgtcgatgatcccggtgtcggcggctcgggcggcacgcgacgccgccactgcagctgccagcgcccgccagcgtggccgcggtgatgcgctgcggttggcgcgacgcatcgcggcggcgctcaacgcgtccgacaacaacgcgggcgactacgggttcttctggatcaccgcggtgaccaccgacggttccatcgtcgtggccaacagctatgggctggcctacatacccgacgggatggaattgccgaataaggtgtacttggccagcgcggatcacgcaatcccggttgacgaaattgcacgctgtgccacctacccggttttggccgtgcaagcctgggcggctttccacgacatgacgctgcgggcggtgatcggtaccgcggagcagttggccagttcggatcccggtgtggccaagattgtgctggagccagatgacattccggagagcggcaaaatgacgggccggtcgcggctggaggtcgtcgacccctcggcggcggctcagctggccgacactaccgatcagcgtttgctcgacttgttgccgccggcgccggtggatgtcaatccaccgggcgatgagcggcacatgctgtggttcgagctgatgaagcccatgaccagcaccgctaccggccgcgaggccgctcatctgcgggcgttccgggcctacgctgcccactcacaggagattgccctgcaccaagcgcacactgcgactgacgcggccgtccagcgtgtggccgtcgcggactggctgtactggcaatacgtcaccgggttgctcgaccgggccctggccgccgcatcc

SEQ ID NO: 26681 - DNA, 1275 bp, Mycobacterium bovis
atgaacaccctcaacgactccctgaccgccttcgacccggacatcgccgccctgatcgacggcgagctgcgccgtcaagaatccggcttggagatgatcgcttcggagaactatgcaccgctggccgtgatgcaggcccaaggttcggtcttgaccaacaagtacgccgaaggctacccgggccggcgctactacggtggctgtgaattcgtcgacggtgtcgagcagttggctatcgaccgcgtcaaagcgctctttggcgccgaatacgccaacgtgcaaccacattcgggggccaccgccaacgccgccaccatgcatgcgctgctaaaccccggcgacaccatcctggggttgtcgctggctcatggcggtcacctgacccacgggatgcggatcaacttttccggcaagctctaccacgccaccgcctacgaggtgtccaaagaggactacctggtcgacatggatgccgtcgccgaggcagcgcgcacacaccggcccaaaatgatcatcgccggctggtcggcgtacccacgccagctggatttcgcccgcttccgcgccatcgccgacgaagtcgacgccgtgctcatggtggatatggcgcatttcgccggcctggtcgccgctggcgtgcaccccagcccggtgccgcacgcccacgtcgtcacctccaccactcacaagacgctcggcgggccccgcggcggcatcatcttgtgcaatgacccggccatcgccaagaagatcaattccgcggtcttccctgggcagcagggcgggccgctcgggcatgtcatcgcagccaaggccaccgcattcaagatggcagcacaacctgaattcgcgcagcgccaacaacgttgcctcgacggcgcgcgcatccttgccggccggttgacccagcccgacgtcgccgaacgtggcatcgcggtgctaaccggcggcaccgatgtgcacctcgtcctagtcgacctgcgcgacgccgaactcgacggccagcaagccgaagaccggttggccgccgtggacatcaccgtcaaccgcaacgcggtacccttcgaccctcgtcccccgatgatcacctcgggcctgcgaatcggcaccccggcgctggccgcacgcggcttctcccacaacgacttccgcgccgtggcagacctcatcgcggcggcactgacggccaccaacgacgaccagctgggtccgctgcgcgcccaggtccagcggctggccgcacgctatccgctctacccggaactgcaccggaca

SEQ ID NO: 26682 - DNA, 1383 bp, Mycobacterium bovis
atgaccatcagcgtcttcgacctgttcaccatcggcatcgggccgtccagttcccacaccgtgggaccgatgcgcgcggcaaaccagttcgtagttgcgctgcgccgccggggccacctggatgacctcgaggcgatgcgagtggatctgttcggctcgctcgcggccaccggagccggtcatggcaccatgtcggcgatattgctggggctggaaggctgccagccagaaacgattaccaccgaacacaaggaacgccggctcgccgagatcgcagcgtccggcgtgacgcgaatcggcggtgtcattccggtcccgctgaccgagcgtgatatcgacctgcatcccgacatcgttctgccaacgcatcccaacggaatgacgttcactgccgcgggcccacacggccgcgtcttggccaccgagacttatttttcggtgggcggagggttcatcgtcacggaacagaccagcggcaacagcggccaacatccatgctcagttgcccttccctacgtgtcggcccaagaactgctggacatctgtgaccgcctcgacgtgtcaattagcgaagcggcgctgcgcaacgaaacatgttgccgcaccgagaacgaggtacgcgccgcgctgctgcacctgcgcgacgtcatggttgagtgcgaacagcggagcatcgctcgcgaagggttgcttcctggcggcctccgggtgcgccggcgagcgaaggtgtggtatgaccgcttgaacgccgaagaccccactcgcaagccggaattcgctgaggactgggtcaacctggtcgcgctggcagtcaacgaggagaacgcctccggtgggcgcgtcgtcaccgccccgaccaacggtgccgccggcatcgtgccggcggtcctgcactacgcaatccactacacgtcggccggcgcgggggaccccgacgatgtcaccgtgcgattcctgctcactgctggagccatcggatcgttgttcaaggagcgagcatcgatctccggagccgaggtcggctgtcagggcgaggtcggctccgcggccgccatggccgccgccggattggctgaaatcctcggcggcacaccgcgacaagtggaaaacgccgccgagatcgccatggaacacagcctcggcctgacctgtgaccccatcgccgggctggtgcagatcccctgcatcgaacgcaacgcgatttccgccggcaaggccatcaacgccgcacggatggcattgcgcggcgacggcatccatcgcgtcaccctcgaccaggtcatcgacaccatgcgcgccaccggcgcggacatgcacaccaagtacaaggaaacctcggccggcgggctcgccatcaacgtcgcagtcaacatcgtcgagtgt

SEQ ID NO: 26683 - DNA, 2622 bp, Mycobacterium bovis
atggcggtcgttgatgacctagcgcccggcatggactcctcaccgcccagtgaagattacggccgtcaaccaccgcaggatctcgccgccgagcagtccgtgctgggcgggatgttgctgagcaaggacgccatcgccgatgtactggaacggctacggcccggcgatttttatcgtccggcgcatcagaacgtctacgacgccattttggacctgtatgggcggggagaaccggctgatgcggtgacggtggccgccgaactggatcgccgtgggctgctgcgccgcatcggcggtgctccctacctgcacaccctgatctcgacggtgccgacggccgccaacgcgggctactacgcgagcatcgttgccgaaaaggcgctgctgcgccggctggtagaggccggaacccgggtggtgcagtacggctatgccggcgccgaaggcgcggatgtggccgaggtggtcgatcgcgcgcaggccgaaatctacgacgtcgcggatcggcggctgtcggaagactttgtggcgcttgaggacctgctgcaaccgacgatggacgagatcgatgccatcgcttccagtggcggcctggcgcgcggggtggctaccggcttcaccgaactcgacgaggtcaccaacggcctgcatccggggcagatggtcatcgtggcggcgcgcccgggcgtgggaaagtccacccttgggctggacttcatgcggtcatgctcgatcaggcatcggatggccagcgtcatcttctcgctggagatgagcaagtccgagattgtcatgcgactgctgtcggcggaggccaaaatcaagctctccgacatgcgttcgggccggatgagcgatgacgactggacccggctggcgcggcggatgagcgaaatcagcgaagcgccactgtttatcgacgactcgcccaacctgaccatgatggagatccgtgccaaggcgcgccgcctgcggcaaaaggccaacctgaagttgatcgtggtcgactacctgcaactgatgacctcgggcaagaagtatgaatcacggcaggtggaggtgtcggagttctcgcggcatctgaagctgttggcaaaagagcttgaggttcccgtggtcgcgatcagccagctcaaccgtgggcccgagcagcgtaccgataagaaaccgatgctggccgacctcagggaatcgggctgcctgaccgcgtccaccagaatcttgcgcgccgataccggcgctgaggtcgccttcggtgagctcatgcgaagcggtgaacgtcccatggtgtggtcgctggacgagcggctgcgcatggtggcccggccgatgatcaacgtgttcccgagcgggcgcaaggaagtgtttcggcttcggctggcttccggacgcgaagtcgaggccaccggcagccacccctttatgaagttcgaaggctggactcccttggcgcagttgaaggttggtgaccggatcgcagcaccgcgccgggtacctgagcccatcgacactcagcggatgcccgagtctgagctcatttcgctggctcgcatgatcggtgacgggtcgtgcctgaagaaccagccgatccgctacgagccggtggatgaggcgaacctggccgcggtgacggtctcggcggcgcactcggatggggctgcgatccgcgacgactacctcgcagctcgagtgccgtcgttgcgcccggcgcggcaacgactaccgcgcgggcggtgcacgccgattgcggcgtggctggctggcctagggctattcacgaaacgcagccacgaaaaatgcgtaccggaggctgtatttcgcgcccccaatgaccaggtggcgttgtttctgcggcatctgtggagcgctggtggctctgttcggtgggatcccacgaatggtcaaggccgggtctactacggctcaaccagtaggcgtctcatcgacgatgtggctcaattgctgcttcgggttgggattttttcctggatcacacacgccccaaagttgggcggccacgattcgtggcggctgcacattcatggcgcgaaggatcaggtcaggttccttcgtcacgtcggcgttcacggcgccgaagcggtggcggcccaagagatgctgcgtcagctcaaaggaccggttcgcaacccgaacctggacagcgcgccgaaaaaagtatgggcgcaagtccgcaaccgactgtccgccaaacagatgatggacatccagctccacgaaccgacgatgtggaagcattccccgagccggtcaaggccgcatcgcgcggaggcgcggatcgaagatcgagcgatccatgagctggcgagaggcgacgcgtactgggacaccgtcgtggagatcaccagcattggggatcaacatgttttcgatgggactgtaagcggcacacacaatttcgtcgccaatggcattagtttgcacaattcgctggaacaagatgccgacgttgtcatcctgctgcatcgacccgacgcctttgaccgcgacgatccacgtgggggagaagcggatttcattctcgccaaacaccgcaacggtccgacgaagacggtcaccgtagcgcatcaactgcacctgtcacgcttcgccaacatggctcgg

SEQ ID NO: 26684 - DNA, 1878 bp, Mycobacterium bovis
atgaccaccccttcccacctgtccgaccgctacgaacttggcgaaatccttggatttgggggcatgtccgaggtccacctggcccgcgacctccggttgcaccgcgacgttgcggtcaaggtgctgcgcgctgatctagcccgcgatcccagtttttaccttcgcttccggcgtgaggcgcaaaacgccgcggcattgaaccaccctgcaatcgtcgcggtctacgacaccggtgaagccgaaacgcccgccgggccattgccctacatcgtcatggaatacgtcgacggcgttaccctgcgcgacattgtccacaccgaagggccgatgacgcccaaacgcgccatcgaggtcatcgccgacgcctgccaagcgctgaacttcagtcatcagaacggaatcatccaccgtgacgtcaagccggcgaacatcatgatcagcgcgaccaatgcagtaaaggtgatggatttcggcatcgcccgcgccattgccgacagcggcaacagcgtgacccagaccgcagcagtgatcggcacggcgcagtacctgtcacccgaacaggcccggggtgattccgtcgacgcccgatccgatgtctattccttgggctgtgttctttatgaagtcctcaccggggagccacctttcaccggcgactcacccgtctcggttgcctaccaacatgtgcgcgaagacccgatcccaccttcggcgcggcacgaaggcctctccgccgacctggacgccgtcgttctcaaggcgctggccaaaaatccggaaaaccgctatcagacagcggcggagatgcgcgccgacctggtccgcgtgcacaacggtgagccgcccgaggcgcccaaagtgctcaccgatgccgagcggacctcgctgctgtcgtctgcggccggcaaccttagcggtccgcgcaccgatccgctaccacgccaggacttagacgacaccgaccgtgaccgcagcatcggttcggtgggccgttgggttgcggtggtcgccgtgctcgctgtgctgaccgtcgtggtaaccatcgccatcaacacgttcggcggcatcacccgcgacgttcaagttcccgacgttcggggtcaatcctccgccgacgccatcgccacactgcaaaaccggggcttcaaaatccgcaccttgcagaagccggactcgacaatcccaccggaccacgttatcggcaccgacccggccgccaacacgtcggtgagtgcaggcgacgagatcacagtcaacgtgtccaccggacccgagcaacgcgaaatacccgacgtctccacgctgacatacgccgaagcggtcaagaaactgactgccgccggattcggccgcttcaagcaagcgaattcgccgtccaccccggaactggtgggcaaggtcatcgggaccaacccgccagccaaccagacgtcggccatcaccaatgtggtcatcatcatcgttggctctggtccggcgaccaaagacattcccgatgtcgcgggccagaccgtcgacgtggcgcagaagaacctcaacgtctacggcttcaccaaattcagtcaggcctcggtggacagcccccgtcccgccggcgaggtgaccggcaccaatccacccgcaggcaccacagttccggtcgattcagtcatcgaactacaggtgtccaagggcaaccaattcgtcatgcccgacctatccggcatgttctgggtcgacgccgaaccacgattgcgcgcgctgggctggaccgggatgctcgacaaaggggccgacgtcgacgccggtggctcccaacacaaccgggtcgtctatcaaaacccgccggcggggaccggcgtcaaccgggacggcatcatcacgctgaggttcggccag

SEQ ID NO: 26685 - DNA, 252 bp, Mycobacterium bovis
atggccaagtccagcaagcggcgcccggctccggaaaagccggtcaagacgcgtaaatgcgtgttctgcgcgaagaaggaccaagcgatcgactacaaggacaccgcgctgttgcgcacctacatcagcgagcgcggcaagatccgcgcgcgtcgggtcacgggcaactgcgtgcagcaccagcgagacatcgcgctcgcggtgaagaacgcccgcgaggtggcgctgctgccctttacgtcttcggtgcgg

SEQ ID NO: 26686 - DNA, 492 bp, Mycobacterium bovis
gtggctggtgacaccaccatcaccatcgtcggaaatctgaccgctgaccccgagctgcggttcaccccgtccggtgcggccgtggcgaatttcaccgtggcgtcaacgccccggatctatgaccgtcagaccggcgaatggaaagacggcgaagcgctgttcctccggtgcaatatctggcgggaggcggccgagaacgtggccgagagcctcacccggggggcacgagtcatcgttagcgggcggcttaagcagcggtcgtttgaaacccgtgagggcgagaagcgcaccgtcatcgaggtcgaggtcgatgagattgggccttcgcttcggtacgccaccgccaaggtcaacaaggccagccgcagcggcgggtttggcagcggatcccgtccggcgccggcgcagaccagcagcgcctcgggagatgacccgtggggcagcgcaccggcgtcgggttcgttcggcggcggcgatgacgaaccgccattc

SEQ ID NO: 26687 - DNA, 894 bp, Mycobacterium bovis
gtgctatctgacgacgaactgaccggactggacgagtttgccctgctggctgagaacgctgagcaggccggtgtcaatggtccactgcctgaagtcgagcgggtccaagcgggagccatcagcgcgctgcgctggggcggctctgcgccgcgggtgatctttctgcacggcggcggacagaacgcccatacctgggacaccgtgatcgtcggcctgggtgagccggcgctggcggtggaccttccagggcacggccattccgcttggcgggaggacggcaattactcgccgcagctcaactccgagaccttggcgccggtgctacgcgagcttgcgccgggtgccgaattcgtggtcggcatgtcgctgggcgggttgactgcgatacggctggccgcgatggcacccgacctggtcggcgaactcgttctcgtcgacgtcaccccgtcggcattgcaacggcacgccgagctgaccgccgagcagcgcggcacggtggcgctgatgcacggcgagcgggaattccccagctttcaggccatgctggacctaacgatcgccgcggccccgcaccgcgatgtcaagtcgttgcgccgcggcgtgttccacaactcccgccggctggacaacggcaactgggtgtggcgctatgacgcgatccgcacgttcggagatttcgcagggctctgggacgacgtcgacgccctgtccgcgccgatcacactcgtgcgcggcggctcgtcgggcttcgtcaccgaccaggacaccgccgaactccacaggcgtgcaacgcatttccgtggcgttcacatcgtcgagaagtcaggccactcggtgcaaagtgaccaaccgcgcgccctgatcgagatcgtgcgcggggtgctcgacacacgc

SEQ ID NO: 26688 - DNA, 1098 bp, Mycobacterium bovis
gtgagtcttttgtttgatttcttcagtctcgacttcatctactacccggtgtcgtggatcatgtgggtttggtaccggctgttcgcgtttgtgctaggaccatccaacttcttcgcctgggcgttgtcggtgatgttcctggtcttcacgctgcgtgcgctgctgtacaagccgttcgtgcgccagattcgcaccaccaggcagatgcaggaactgcaaccacagatcaaggccttgcaaaagaaatacggcaaggatcgtcagcggatggcgctcgaaatgcaaaagctgcaacgcgagcacggcttcaaccccattctcggatgtttgccgatgctggcgcagattccggtgtttcttgggctctatcatgtgttgcgctcgtttaaccgtacgaccgggggctttggtcaaccacacttgtcggtgatcgagaaccgactgactgggaactacgtctttagcccggtcgacgtcggccacttcctagatgccaacttgttcggcgctccgatcggggcgtacatgacgcaacggtccgggttggatgcgttcgtcgatttcagtcgccctgcgttgatcgcggtgggtgtgccggtgatgatcttggccggcatcgcgacgtacttcaacagtcgcgcgtctatcgcgcggcagagcgccgaggcggctgcgaatccacagaccgcgatgatgaacaagctggcgctgtacgtatttccgctcggcgtagtcgtcggcggaccgttcctgccactggcgatcatcttgtattggttctcgaacaatatctggacgttcgggcagcagcattacgtcttcggcatgatcgaaaaggaggaggaggccaaaaagcaggaggcggtccggcgccgggcggccaacgcgccggccccgggagctaagcccaagcggagcccgaagaccgctccagcgaccaatgcggcagccccaacagaagccggggacaccgatgacggggcagagtcggacgccagcactgagcgaccagccgacacgtccaatccggccagacgcaacagcggcccgagcgcccgtacgccgcggcccggggtgcgaccgaaaaaacgcaaacgt

SEQ ID NO: 26689 - DNA, 1041 bp, Mycobacterium bovis
gtgagtgctccgtggggcccggtggccgctggaccgtccgcgctcgtaaggtcgggccaggcttcaactatcgaaccattccagcgggaaatgacaccaccgacaccgacgcctgaggccgcgcacaatccgacgatgaatgtttcacgtgaaacatcgacagaattcgacacccccatcggcgctgcagcagaacgtgcgatgcgggtcctgcacaccacccacgagccgctgcagcggccgggtcgacgccgggtgctcaccatcgcgaatcagaagggcggggtcggtaagacgaccaccgccgtcaatatcgctgccgcgcttgctgtgcagggcctcaagacactcgtgatcgatctcgatccccagggcaacgcgagcaccgcattgggtatcaccgaccggcaatccggcacaccctcgtcctacgagatgcttatcggcgaggtttcgttgcacacggcgctacggcgcagcccgcacagcgagcggctgttctgcatcccggcgacgatcgatctggccggcgccgaaatcgaattggtgagcatggtggcgcgcgagaaccggttgcgcaccgccctggccgcactcgacaacttcgacttcgactacgttttcgtcgattgcccgccctcgctggggctgctgaccatcaacgcactcgtcgcggcaccggaggtgatgatcccgatccaatgcgagtactacgcgttggagggtgtgtcgcagcttatgcgcaacatcgagatggtgaaggcccacctcaacccccaactcgaggtcaccaccgtgatccttaccatgtatgacggccggacaaagctcgccgatcaagtagccgacgaggtccgtcagtatttcggaagcaaagtgttgcggacggtgattccacgcagcgtcaaggtttccgaagcgccgggctacagcatgaccatcatcgattacgatcccggttcgcgcggcgcgatgagttacctcgacgcgagccgcgaacttgccgagcgtgaccgaccaccatccgcgaagggacgacca

SEQ ID NO: 26690 - DNA, 1338 bp, Moraxella catarrhalis
atgagtatccaatctgttgttaaaaaaatagaaaaaaattacgcccatcaacccgaattcatccaagcggttcaagaagtcgctatgacgattgaagaagcttatgagaataatcctaagtttgcagagttaaaggtgtttgagcgtctttgtgagccagaccgcattataagctttcgtgtgaattgggaaaatgaccaaggcaaggttgagatcaatcgtggctggcgtgtgcagtttagtaacgccattgggccttataaaggcggtttgcgttttcacccaaccgtaaacgaaagcgtgctaaaatttttaggatttgagcagatttttaaaaatgctttgacaggcttaccaatgggcggtggcaaaggcggttctgactttgaccctaagggtaaatcagatgctgaaattcgccgtttttgctatgcttttatgcgtgaattgcacaaaaacatcggcaaagatatggatgtgccagcaggtgatatcggtgttggcagccgtgaggtaaactatatgtttgcgatgtataaaaatctgacgcgtaaacatgaaggtgtgttgacaggtaagggcgtaggttttggcggtagcttgattcgtaatgaagcaacaggctatggcttggtgtattttttggataatatgctcaaagccaatgacgataccttagagggtaaaactgttttggtttcaggtgcgggtaatgttgcccaacatgctgccgaaaaagccttgcatcttggcggtaaagtcatcactttttctgactctcaaggcacgctacatgacgatgaaggttttactcaagaaaaaattgactgggtgaaagctcaaaaagatgcacgcaaaccgttaagtgattatgtcgaaaaatttggtggtgaatggttgccagatacaaaaccttggcagtttgctgctgatatcgcattgccatgtgctacgcaaaatgaagtctgtgaacaagaggctaagcagctggtcgaaagtggtgtcaaatatgttgtagaaggggcgaatatgccattagatgcccaagcgatcgatatcgtacgcagtcatggcatcacttatgcaccaggcaaagcagccaatgctggcggtgtggctgtttcgggccttgagatgagccaaaactctgtacgccaatataaaagtttctcagagttggatgaaaaactacaaggcatcatgaaaaatatccatgatgatttattgtctgcagcaaaagagtacggtaaaaccaaagatgtggttgattatatgacaggtgctaatgtggcaggctttttaaaggttgccaatgcgttagtcgcttatggcattttg

SEQ ID NO: 26691 - DNA, 591 bp, Moraxella catarrhalis
atgaacttaactgaattaaaaagtaaatccgttggcgagctgcttgctattgctgagcatatgggtttggataatatggctcgcagtcgtaaacaagacattattttcgccattttaaagacacatgccagatatggcgaagcaatttatggcaatggcgtgcttgagattttacctgatggatttggttttttacgctcaagtgaaggttcatacttggcaggaccagacgatatttatgtcagcccaagccaaatacgcagatttaatttgcaaacaggcgactccatcgcagggcagatccggccgcctaaagactcagaaagatattttgctctcttaaaggtgagtgaaattaactttgatacgcctgatcgtagtcgccacaagctgatttttgaaaatcttaccccactttttcccacccagcaactggtacttgaagcaggcaatggcacgaccgaggacttaacaggccgcattattgatttgattgcacccattggtaaaggtcaacgctctatcatcgttgcaccgtccaaagctggtaaaacggtactactacagaccattgtccaagccattaccaaa

SEQ ID NO: 26692 - DNA, 1624 bp, Moraxella catarrhalis
ccgccatgtgcgtgtggaggataaagccatcggtgatatcatccatctgccgattggggaggcgtggcaatattatcaaaacttaaaaattactggtgctaaaggcgaggtggctgataagattttcaaagaaatcaaagagcgattgggttttttgaccaaggtcggcttggagtatttgaccttggcacgctccgctgaaacgctgtcaggtggtgaggcacagcgtatccgcttggcaagtcagattggtgcaggcttaatgggcgtgatgtatgtacttgatgagccgtctattggactgcatcaaagggataatgatcgacttttgtccactttaatacagttgcgtgatttgggcaatacggtggtggtggtcgagcatgatgaagatgccattcggcaggcggattatattattgatattggcgttggagcaggcgtgcatggcggccgtgttgtggcatcaggtagtgcagaacaggttgccaacaccacagggtcgctaacgggcgagtacctatctggcaagcgacgcattgaggtgccgactactcgccaattgcctaagaccatcgagataatcaaaggtaaaaaaaccatccaagagccattatggattcatttggagggtgcaactggtaataatctaaaaaatgttcatcttagtattccgattggtgtcatgacctgcattacgggtgtgtcaggttcaggtaaatccaccttgattaaccgtacacttatgccattggctgcgactaccttaaataacgccaccacacttgctcctgaaaaatatgaaaaaatttcaggacttgagcatttggataaaatggtggatatcgatcaaagtccgattggtcgtacaccgcgttcaaatcctgccacttatacaggcgtgtttacactgatacgagatttatttacccaaacgccagaagccagagcgcgtggctacaaagcagggcggtttagttttaatgtgaaaggcggtcgttgtgaggtatgtcagggcgatggattgattaaagttgagatgcattttttgccagatatgtatgtgccgtgtgatgtgtgtcatggtaagcgatataatcgtgaaactttggaggttaaatataaaggtaaatccatcagcgatgtgcttgatatgactgttgaggaagcgatgggattttttgaacccattcctgctattcatcgtcgcctagaagcactgcatgaggtgggtcttgactatatccgtttgggccagtcggcaacgactttatcaggtggtgaggcacagcgtgttaaacttgccaaagagcttgccaagcgtgatacgggcaagactttgtatatcttagatgagccgacaacggggctacattttcatgatatcgctaagcttttgcatattttacatacattgcgtgaccgtggtaatactgttgtggtgattgagcataatttggatgtgattaaaacagcagattggattgtggatttaggccctgaaggtggtagcggtggtggtgagattgtcgccacaggtacgcctgagacagttgccaaaaatagccgttcacatacaggcagatttttaaagcctatgcttaagtgaagcttgctggcaaat

SEQ ID NO: 26693 - DNA, 411 bp, Moraxella catarrhalis
atgttacaaccaaaacgtaccaagtttcgcaaaatgcacaaagggcgtaacacaggtcttgcccagcgtggtaatacagttgcttttggtgaaattggtctaaaatctatcggtcgtggtcgtatgactgcgcgtcaaattgaggctgcgcgtcgtacaatcactcgtcgcattaagcgtggcggtaaaatttggattcgtgtattcccagataaaccaattaccgaaaaaccattagaagttcgtatgggtaaaggtaaagggcctgttgagtattgggtagcggaaatcaaaccaggtaaaatgctttatgaaatccaaggtgttagtgaagaccttgctcgtgaagcactgactttggcagccgccaagctaccatttaagactaccattgttaaacggacgataatg

SEQ ID NO: 26694 - DNA, 750 bp, Moraxella catarrhalis
gtgttttttgcggttatcagcattttgccagagatgtttagtgctattaaagactatggcatcgtgggtcgtgcggttaaaaatggtcaagtgaatatccaagtcatcaacccaaggaattttacgacagataattataaacgcatagatgagcgtccttttggtggcggtcctggcatggtgatgatggcagaaccgcttgaaaaggcaattttatatgccaaagaattagctggcagggcaggctgcgatatccaaaatggcagatgccctgtggtatatctatcgccacaaggcaaaactttaagcgagcctttggttgccaccatgccaaatcttgatggcatgatactactgtgtggtcgatatgaaggcattgatgagcgattgattacttgctatgttgaccaagagatatctattggagattatgttctgacaggtggtgaactgcctgcgatggtattgatggatagcgtcattcggcgattgcccaagattatgggtgatgatctgtccgccgagcaagattcgtttgttgatggccttttggattgtccgcactataccaagccacttgattttcatggtcaaactgtaccgccagttttactttcaggacatcataccaatattaataaatggcgttttttagagcaagttaaacgcaccaaagcccgccgcccagagctttggcaaaattttataccaaataaacagcaagccaagtggctaaaagacttggaagat

SEQ ID NO: 26695 - DNA, 525 bp, Moraxella catarrhalis
atgtctgtttcaaacattgattttgatttattagaggctgctgatattcaagcattaagtgatcgtggtgtcacattaccactacactataaccaaattaagcattatttgccgcatcgctatccattcatgctgattgaccgagtgaccgcttgtaaacccaatgagtggatcacaggatataaaaatatcagtattaatgaagagttatttaacggtcattttccagataatccaatcatgccaggcgtactacaagttgaagcaatggcacagctatcgggtattttaggtttcatcagtgcagggcagaccgctgatgatggttatctgtacttgtttgcaggtgtggataaagttcgttttaaaaaagtcgttacctcaggcgatcagctggttattcgctcaaaggttttgatgaataaacgagatatttataaatttgagtgtaccgcccatgttgatggtcaattaacttgcagtgctgaaattatgattgctcgccaaaaggtggatggcgtcaaa

SEQ ID NO: 26696 - DNA, 249 bp, Moraxella catarrhalis
atgctaattttaacccgccgtgttggcgaaaccttaatgattggtgatgaggtcagtgtaactgtacttggcgtcaaaggcaatcaagtccgcttaggtgtcaatgccccaaaagacatcgctgtgcatcgtgaggagatttatcagcgtatccaacacgaacgctctatgcaaatgcacatgagtcatttagaacaaggtggtaattttgccccaccctcatttgatgatgacgattattttaaccgc

SEQ ID NO: 26697 - DNA, 855 bp, Moraxella catarrhalis
atgatacatccacattttgattcaacaaatccccaaaaatctgcacccatcggtatttttgattctggtgttggtggcttatcggtgtatcggcatttgtcagaacttatgcccaaagagcgatatgtttattatgcagatacccaaaatctgccttatggcaacaaatcaggcgatgagatcttgtttttgactctgcaggcggtggattggctgtgtcgtcaaggctgtaagctgattgtcatcgcatgtaacagtgcttcggcgtattcattgacaacgcttcgtatccgctgccgtatccccattgtgggcttggtgcctgcagtcaagcctgcttgtgagatgagtcaaacacgccaaattgctttacttgcgacgcaagcgacacttcaagggcaactgcttgcccaagtcattcataaggtggcaacatccaaaggtataacggtacataagcactttgagccaatgcttgtgccgtgggtcgagtcgggaatgccaatcaatcatcatgtcgctgatcttttgatcaaacaaactcaagcatggtatcagcagggcgtggatatacttgttttgggttgcacgcattacccattttttcgacaatttttgcaagattggattgatgaacaacacattacgatgaccttgcttgattcgggtgctgccattgcccaaagggttaaatctttgcttgactgttttgggataagtgctgatggtgatgtgcttgatgagccgctgacattctatgcatctgatttaacagataatgtacccgccacagcacgcagactctcacaggtgccgattagctttgttgatggcaactttttgcccatcaatgtt

SEQ ID NO: 26698 - DNA, 249 bp, Moraxella catarrhalis
atggcattaaaaatcaccgaagaatgtattaactgcgatgtttgcgaaccagtttgccctaatgaagccatctctgcaggcgatgatatttatgtgatcaatccagccttatgtaccgaatgcgttgggcattacgacacaccgcagtgtgtggatatttgtcctgtagactgcattcctaaagacccaaaatttccagagaccgaagatgagctgctggtaaaatatcaaaaacttacctctgattta

SEQ ID NO: 26699 - DNA, 633 bp, Moraxella catarrhalis
atgaattatcaagataaatttgcacgcattgtcgtctattgtggttcaaactttggcgatacacctgcttattatcatgccgcccaaagcttaggtaaaactttggcagagcatgacatcaccttggtttatggtggtggcaatgttggcttgatgggcacgattgcagacagcatcatcgcacatggtggaaaaagtattggtattattcccagatttttgaaggataaagaagtcgctcatcatggcctaagcgagcttatcatcacagaagatatggcaagtcgtaaactaaagatgatatccttagcagatgcttttattgctcttcctggtggtattggtacctacgaagagcttttcgaggtcatgtcactggcacaattgcgtcagcacgccaagccgattggtgttcttaatgttgatgggttttttaacccttttcttaaattgcttgaacagacagcaaaagcaggctttatgcccgtttcaaatattaatttgatttgtgtggccgacaacatccccacactactgacaaaaatggcaacttaccggtttaccgaatctcaaaaatgggtcaagcccagttggatggatgagacatcggcttatactgtacccaaattcacc

SEQ ID NO: 26700 - DNA, 930 bp, Moraxella catarrhalis
atgagcatggcaacccaagaaggcaaaatgtggctagatggtgccttagtagagcagccagatgctaaggtgcatgtgctgactcacagcttacattatggcttggcggtgtttgaaggggtgcgtgcgtatcagacgccagatgggcgtacagcgattttccgtttacaagcgcatacagagcgtctattaaactccgccaaaatttttcaattaaattgtacttatggctttgatgagcttgtccaagctcaaaaagatgttgtgcgtctaaataatttggcatcagcatacattcgtccattgatttgggtgggttctgaaaagcttggtattgctgccaaagataataccattcatgctgcgattgctgcatggcattggggcgcttatttgggcgaagaaggtattaaaaaaggcatccgtgttaaaacctcaagctatacccatcatcacccaaatataaccatgtgcaaggcaaaagctgccagtaattatcctgtctcaatcctagccaaccaagaggtgactcgtaatggctatgatgaagccatcttaatggatccacaaggttttgtctgtcaaggttctggcgagaacctatttttggtcaaaaatggcgagctacatacccctgacttgtcaggcggtgcacttgatggcattacacgccgcacgattattgagtttgccaaagatttgggcattaaagtcattgagcgtcgtattactcgtgatgagttttatttggcagatgaggtgtttatgactggtacagcggctgaagtgacaccgattcgtgaatatgatgatcgcatgataggcaatggcggtcgtggtgaattgaccgaacaactacagactttgtattttgatgttgttcaaggtcgcagcgataagtatcagcattggttaagctatatcgatgaa

SEQ ID NO: 26701 - DNA, 1442 bp, Moraxella catarrhalis
cgagaaagttggtcagcacgctctggctttattttggcagccattggatcggctgttggtttggggaatatttggcgttttccctatgtttcttatgaaaatggtggcggtgcattttttttaccctatttgattgctttggcaacagcaggatttcctttgttgtttttagactatgttatgggtcaaaaatataaaggtgcgccgccgacagcttaccgccgctttatcaaatcagcggaaggtattggctggtggcaagtagcagtttgtaccattatcggtatttattatgcgtctgttctaagctgggctggtaactacacgctatttgcagtgggtcagcaatggggtgaggataccgaaggtttttctttaatacctatctacaaaatgccagtgaattaaccatggcttattcatctcagctattgattggtttggtggttgtttgggtgatggtattattgattttatatggtggtatcaaaaagggtgttgagctatcaaataaaattttcattcctttattaatagtgatgtttggcgtattggttgctcgtgcggtaacgctaccaggcgcaacggtaggtttggataccttttttgcgcctaattgggaaaaaatggcagaccctaaggtttggttggctgcttatgggcatgtgtttttctcgatgtcaattggttttggtatcatggtgacttacgcatcttatctaaaacgcaatgccaatctaacggggtctggtttggtggttggttttgccaactcatcgtttgagcttttggcaggtattggcattttctctgttttgggatttatggcgcaggcatcaggcgtaccagtttctgaagtggtttcaggtggtattggtctggctttcatcgcattgccaaaaatcatctcaaccatgggcgatgctggcaacttggtaggtattttattttttggttctttatttattgctggcgtaacttcaatggtgtcaatcctacaagtgcccatttcagccgttcaggataaatttggctggtcaaaaaatcaatcagttactgtgataggtttaggttcagccatcatttcgattgcattatttggctctcaaaatgccattacatttgtggatgtgattgataattttgtgaataatattggtattgtttttggtgcgattttatctatcatttgggtaacttggtttaatcgcaataaactgcgtggattgattaatcatatcaatgccatctcaagtgtgaaagtgggtgcgatttggtcattcatgctgacgattgtaacgccgattgctttgattgttactttgggcttgacgcttaaatccttattaaccgaaggttatggcggttatccagctaatgtacagctcatctttggctggggagtgattattatctgtgcaattttggcactgatattacca

SEQ ID NO: 26702 - DNA, 1089 bp, Moraxella catarrhalis
atgggttttaattgtggtattgtcggcttaccaaatgttggtaaatccaccttatttaatgcactcaccaaagcaggtatcgctgctgagaattttccgttttgtaccaaagacccaaatactggcattgtccctgtcccagacccacgcttaaaagcactggcagctattgtcaatcctgaacgcaccattccaaccagtatggagtttgtagatattgcaggtcttgtggcaggcgcttctaaaggcgagggtatgggcaaccaatttttagccaatatccgtgaaactgacgccatcgcccatgtggtacgctgttttgatgatgacaatgttatccatgttgatgggcgggtcaatccgttatctgatattgaaaccatcaatacagagcttgctttagcggatttggaggcggtcactcgtgccattacaaacctaaataaaaaagccaaaggcggtgataaagatgctcaagctgctctaggggtcttccaaaaaattgaacctttacttgctgatggcaagcctgcgcggttggcggacttagatgccgatgaaaaaaagctgattaaaagctatggtcttatcaccttaaaacccgtcatgtatattgcgaatgtggcagaagatggatttgacaataatccacatttagatgcggtgcgtgaatttgctaacaatgaaaatgccatcgtcgttgccttatgtaatcaaattgaagctgaaatcgcccagcttgatgaagaagaaaaagcagagtttttggagggcatgggcatgagtgaagcaggtcttgaccgtgtcattcgtgcaggctatgaattattaaacctacaaacttactttactgcaggcgtcaaagaggtgcgtgcttggacagtacctgtcggagcaaccgctccagaagctgctggcgtgattcatactgactttgagcgtggctttattcgtgctgaagttatcggctatgatgattttattgaatacggcggtgaaaaaggtgccgctgccgctggtaagtctcgtttagaaggcaaaacctatattgttcaagatggcgatgtgatgcattttagatttaatgta

SEQ ID NO: 26703 - DNA, 384 bp, Moraxella catarrhalis
atggaacgcaattacggcactggtcgccgcaaaacttctaccgctcgtgtcttcttgtcaaaaggcacaggtaacattgttgttaatggcaaatcattggacgaatattttggtcgtgaaacttcacgcatggttgttcgtcagcctctagagctacttgagcttactgacagcgtcgatctttatatcactgttgttggcggtggtatcaatggtcaagcaggtgcaatccgtcacggtattactcgtgcattgattgaatctgatgaaagccacaagcctgcacttaaagcagctggctttgtaactcgtgatgctcgtgaagttgagcgtaaaaaattgggtctacgcaaagctcgtaaacgcccacaattttcaaaacgc

SEQ ID NO: 26704 - DNA, 495 bp, Moraxella catarrhalis
atgggtgtttttagctttgcaaaagatattggtgacaaattatttcatcgtaataaaaaacaagacgcagcccaaccaaccgctgctccagctgcaacacctgcagaagagccaaccgctcaagagattgccaatttacttcttgctcgtattcaagctcaaaatgtcaatatcagtggcttaaaagtcaattataatggcgatacagacacagtcacattatcgggtgttgccaaaacgcaagccgaccgtgaaagagcacgccttgcggtgggtaatgtccagtatgttgagacggtggttgacaatattgaggtggaatctgctgaacctgaatcacgattttataccgttaaatcaggtgatagcttatcaaaaattgccaaggaaatgtacggcaatgcgaatgattatatgaaaatctttgatgctaacaagcccatgctgtcagatcctaataagatttatccaggtcaagtattgcgtatcccacaa

SEQ ID NO: 26705 - DNA, 1401 bp, Moraxella catarrhalis
atgagcctgtttgaagatttgcccgtgcaagatagcatctcacccaatcatcttggtgagcgtgtgtggcaattgtgcctacctgatttacaatttgctatggcggataaagactatcgccaatggatcgcaccccttaaagctgaagtgaacgataccgagcttttgttacttgcacctaatatgatgtgggttaggcatgttaaagacaattatctaagccaaatcaccgatcttgcctatcagcatggtaaaggagtgatcaagtcggttcgtattgagatggtggcgagtaccatcccaaatgaccctgcgaccaaaaaagccaaaactaataaaaagaccagcaaaaaaacgggtgtcgttgaagggttgcccattgatcctgggtttacctttgatgtatttatcaaaggtaagtccaatgcttctgcttataatgcttgcaatgagctttctagaaaagaaagtaagcataactatggccctatatttatatacggctcatcaggtttgggcaagacgcatttgatgcatgccatggcgcatcgctatcaaaaatacggtaagcaatttttttattttaccaaagatcatttttataaaatcacgctagaggcatttcgtaccaatgacattgtacagatggaaaaagaaatttgccaagcggatttgttgattattgatgatgtgcatatggtcagtggctcaaaagcacccaaagtaactgaaatcttgatgaagctttttgatgcattctcagcaggcaacacccaaaagcaggtggtgcttgcctcagaccgtcccccttcacagatgaccagttttggtgagcgttacatttctcgtttatcaagctgtttgcagttgtcgattgagccgccagatatggaaatgcgtatccaaattttagaaaaaaaagcgcagatgctcaatctgttactacccagagaatgtgcgttatatatggcacaaaatctaccgcctgatgtgcgtggtttagaaggggcgttaaaacgcgtacagctgtccgccaccattttgcgtaatgagccggtgagcttaccacttgtcaaagacgccattaaagatcaggttcaagcacgcgctcgggcattgaacgccgaaaatattcgtgatttggtggctgaatattatgaaatttccccaaaggatttgatgagtaaaaagcgtgcacgctacatcgccagacccagacaaatggcaatggcactcattcgtgaactgacgcgtgatagttttcctgaaattgggcaagtttttggtggtcgtgatcacaccacagttatgcatgcgtgtgaaaagatcgaagagctgcgtacccaagatgccaaaattcaaaaggattatcattctttaaagatgatgttagaatatgtc

SEQ ID NO: 26706 - DNA, 303 bp, Moraxella catarrhalis
atggctaaaaaaagcatgattaatcgcgaattaaaacgcgaaaaaactgttgctaagtatgctgaaaagcgtgctcagctaaaagctatcattagcgataccaatgctagcgaagaagagcgcttagatgcaatgttggcattgcaagcgttaccacgtaacgcatctccggtgcgtttgcgtaaccgttgtggcgtaactggtcgtccccatggttatttccgtaaatttggtctttcacgcaatatgttgcgtttacatgtaatgcaaggcgatgtgcctggcgttcgtaaagctagctgg

SEQ ID NO: 26707 - DNA, 1566 bp, Moraxella catarrhalis
atgatgattttaccagctattttaattcgccagtatcattcgagccaaacaactatgtcaagcccaatcgtatttcatccaaaaacagttcacccaaaaaccaacaaccaaaacacaccactgcccagcgaacctgcctatcatcacaaggcaaaccataaccaaaaccgcagtatcgaccaaagcggtgtagtggcgacatccacattaaatggcactccaaaaattggctttgtatcactcggctgccctaaggcgttggtggacagtgaacgcatcatcacagaactgacttatgagggttatcaagttgccaatgattatgatggtgcagatttggtcgtggtgaatacctgtggatttattgagtcagcagtacaagaatctttggacgccattggtgaagcgattaataaaaatggcaaagtgattgttacaggttgtttgggtaaagacgccgaaaaaattcgtaccatgcaccctgccgttttagcggttacaggtgctcatgcttatgaagaggtcatttctgcggtcaatcatcatgtaccaaaaccgatcaaatcaaaagaatacgacccaaaaattgatttgattaatgatgcaggcatcaaacttacgcccaaacactatgcctatgtaaaaatttctgaagggtgtaatcatcgctgcactttttgtattatcccatcgctgcgtggcgatttggtcagtcgtccaatagacagcgtcatgaaagaagcggttgcacttaaaaaatcaggcgtcaaagaacttttggtcatctctcaagatacctcagcttatggcgtggatttaaaatataaaactgtattttgggaaggttggccgcttaagtctaaattttatgatatgtgtgaggcgatgtcaaaattaggcatttgggtacgactgcactatgtttatccttacccacatgtggacgcagtcgttcaaattatggcggacagcatgacagcttctgctggcatgggaggtttattgccctatttggacattccatttcagcatgccagtcccaatgtactaaaagccatgaagcgtccagcgatgagcgaaaatactttagagcgtattcaagcatggcgtgccatttgccctgatatcgtcatacgctcaacttttgtggtaggctttcctggtgaaaccgacgaagattttgagtatctgcttgactggctgaccaaggctcgcttggatcgtgttggctgctttacttattcagagattgaaggtgcggtggcaaacgatttacccaatcccgtgcctgaatcagtcaaacaatctcgttatgaacgcttgatggcattacaacaaaaaatcagtgccgaaaaacttgccgaaaaagtcggtaagacattggttgttttggttgatgagattgatacagaagaaaatattgccatttgccgaagctatgctgatgcacccgaaattgatggtcatgtctatgtggacaatattgatgcaacagtcaaagcaggtgatatgctgacagtcgtgattgatgaagcaagtgactatgatttgtttgcaagctttggt

SEQ ID NO: 26708 - DNA, 2556 bp, Moraxella catarrhalis
atgaataaaatttataaagtgaaaaaaaatgccgcaggtcacttggtggcatgttctgaatttgccaaaggtcataccaaaaaggcagttttgggcagtttattgattgttggggcgttgggtatggcaacgacagcatctgcacaacaaaaaataaccggctcaaacataaccaacgacacctctaccgtcggtggtggcgattataacgaagccagcggcacatactctaccgtcggtggtggcattgataacgaagccaaaggcgattactctaccgtcggtggtggcttgactaacaaagccaaaggcaattcctctaccgtcgcaggcggtgctaaaaacgaagccaacggcaattactcaaccgtcgcaggcggtgctaacaacaaagccaacggcgattactctaccgtcgcagggggcaggaagaaccaagctacaggtcttaactcaacggttgcagggggttctgataaccaagccacaggcaacaactcaacggttgcagggggttatgataaccgagccacaggtacaggttcatttgccgcaggtgtagggaacaaagccaatgccaacaacgccgtcgctctaggtaacaagaacaccatcacagtacaaaactcagtagccatcggctctaataataccattgacggcaatgacaaaaaagatgtctttattcttggctctaacacaacagacgtaaagagtaactcagtgctactgggtaatgagaccgctggcaaagtagcaaccgctgttaatgatgccacagtgaacggcttaaccctaaaaaattttgcaggcgtatcagaaactagtaatggtactgtatctgtcggtaagcagggtaaagagcgtcaaatcgttaatgttggtgcaggtcagatcagtgacacctcaacagatgctgttaatggctcacagctatatgctttagccacagctgttgctaaaaacaaagctgatatcaccaaaaatactgaaaatatcaaaaatctagaagtagcgacacttggtaaccatgcagatgttcaaaagcttaaacgcaagcaagaaagcgacatcaaagatgttgttgaaatgcaaaacgcaatcgctgaacaagctgatataaacaaaaatcatatccaagacctagcaaaagctcagctggctggtgtggcggttatggaagagttagataagcatgtcgaagatctgtatgaagctaccaatgaaaacttggataaaatctcacagctagatggtgcagtgtttaacaatacacaaaacatcgaagatctggccgcttacaatgagctacaagatgcctatgccaaacagcaaaccgaagcgattgacgctctaaataaagcaagtgatgagaacacacaaaacattgctaaaaaccaagccgatattgctaataacatcaacaatatctatgagctggcacaacagcaagatcagcatgcctctgatatcaaaacacttaaaaacaatgtcgaagaaggtttgttggagctaagcggtcacctcattgatcaaaaagcagatcttacaaaagacatcaaagcacttgaaagcaatgtcgaagaaggtttgttggatctaagcggtcgcctaattgatcaaaaagcagatatcgctaaaaaccaagctgacattgctcaaaaccaaacagacatccaagatctagccgcttacaacgagctacaagaccagtatgctcaaaagcaaaccgaagcaatcgacgctctaaataaagcaagttctgagaatacacaaaacattgctaaaaaccaagcagatattgctaataacatcaaaaatatctatgagctggcacaacagcaagatcagcatagctctgatatcaaaaccttggcaaaagtaagtgctgccaatactgatcgtattgctaaaaacaaagctgaagctgatgcaagttttgaaacgctcaccaaaaatcaaaatactttgattgagcaaggtgaagcattggttgagcaaaataaagccatcaatcaagagcttgaagggtttgcggctcatgcagatgttcaagataagcaaattttacaaaaccaagctgatatcactaccaataagaccgctattgaacaaaatatcaatagaactgttgccaatgggtttgagattgagaaaaataaagctggtattgctaccaataagcaagagcttattcttcaacatgatcgattaaatcgaattaatgagacaaataatcatcaggatcagaagattgatcaattaggttatgcactaaaagagcagggtcagcattttaataatcgtattagtgctgttgagcgtcaaacagctggaggtattgcaaatgctatcgcaattgcaactttaccatcgcccagtagagcaggtgagcatcatgtcttatttggttcaggttatcacaatggtcaagctgcggtatcattgggtgcggctgggttaagtgatacaggaaaatcaacttataagattggtctaagctggtcagatgcaggtggattatctggtggtgttggtggcagttaccgctggaaa

SEQ ID NO: 26709 - DNA, 2424 bp, Moraxella catarrhalis
gtgaaagttggtataatgggtaaacatttcctgccaatcggcgcaattaaaagaatccttatgaccaacacaacgactgataccgacattcaaatcgaccatcaagccatttatgccaaacttgctgcaacgcatgccatcaaaagcactcaggttgaagcatttgctagactttatgatgaaggggcaagcgttccttttattgctcgctatcgcaaagagcatactggcggcctagatgatgagattttgcgtgaacttgaaaaatcactcatcattgagcgagatttggcagcacgccgccaaaaaatcctaggtttgttggccgctcaaaatgtcatgacggatgagcttgctgaacgggtgaataccgcctcaaccaagcttgagcttgaagagatttatcagccttatcgtccacgccgtcgctctgtggctgcacgtgcaaaattggcaggacttgaaccaattgcacatgctgttttggcaggtcaaagcccagcagaagcacttgagggctatgtatcacctgagacgctgaccgatgataaaggcgaaactttcgaggctgattttggtgattttgataaacaaatcgtcggcattcaggcgattattttggatgaatgggcgacagcattggacttattggacaaggtacgcactggatttaatgccacggcaagcattcgctctgaattaatcggtgaagaaaagcgtgaagtgggcgaaaaattcaaagactattttgagcataccgaaccatttgccaagctatcaaatcaccgcctgcttgctatgttgcgtgggcgtcaacaaaatgtattggtgttacatgttgatggtgaagatgaaccatttattgagatgatcatgcgtcattttgagattgacccaaaagctgctaatggtgaatttttgaccgagaccgccaaaaaactttggctggttaagtggcgttcacagattgagcaccgcctcttaaccgagcgtcgcttggcagcagaggcggatgccatcgctgtttttgcagagaatctcaagcatctacttatggttgctccaacgggtcgtaaggcgattttgggggtggatccgggctatagtcatggcgtcaagatggcggtgattgatggcatgggtgaggtgttggcaactgatacggtctatccttttaagccgcaccataaactggccgaagccaaagatcgcattgagacgctgattaagacgcatcaggttgaattggtcgctattggtaatggtactgccagccgagaaagtgaagagctggtgaaatcaatcattcgtgaagcttctttatctactcaggcattggtggtctcagaggcgggtgcatcggtttattcagccagcgagatcgcctcccaagagttgcctgatttggatgtatcggtgcgtggtgctgtgtcgattgcacgccgcttacaagatccgttatcagaattggtcaaggttgagccaaaagcgatcggcgtcggtcagtatcagcacgatgtcaatcaaactgagcttgaaagcagtttagacaaggtaaccgaagactgtgtcaatgcggtgggggtagatgtcaataccgcaagccctgcaattttagctcatatctcagggcttaataaaaatgttgcccaacaaattgttgagtatcgtcgtgcacatggtgcttttactaaccgtgaagcactaaaaaatgtaccacgcttgggcgtcaaaacttttgagcaagcagcagggtttttgcgtatcaaagagggtgatgaaccactggacgctactggtgtccaccctgaaagctacggattggtatatgaaattttaactcagcatggtaaatcactagatgaggtgttgggcaatgagagcttgaccaaagcgcttaatgacagctcggataattttagccaattggcaacagttttaaatgagcttgccaaacctgcacatgaccctcgtggagagtttcgtactgccaagtttcgtgatgatgttaatgaaatcaaagacttaaaagtaggtatgacccttgagggtgtcgtgaccaatgtgaccgcttttggctgttttgtcgatgttggcgtgcatcaagatggcttagtgcatatctcagagctatcagatggttttgtgaccaaccctgctgatgttgttaagcctcaagatattgttacagttcgggttatttcggtggatgaagtgcgtgggcgtattggctttagtatgaaatctgaaaaatctgccaaagctaatcagtcagccaaggcggataaagcagacaaatcggcaaatcataagcccaaagcagatcgcaaacctgctcgccaagacaaaccaaaatctaccgccaaacctgccaaaacgatgggcagctttggtgcgctgttacagcaggcaggattgggtaaa

SEQ ID NO: 26710 - DNA, 1079 bp, Moraxella catarrhalis
atgaaagaatccttacgccaccgtctagatcaaatggttgatcgttttgaagaggttaccgcacttttgtcagatcctgataccatcagtgataacaaaaaatttcgtgagttatccatggagcatagcgacctgtctgagattaccactacttggcaggactttgtgcaagcggaagcagacttacaaactgccaatgagcttttgagcgatcctgagatgaaagaaatggcacttgatgaaattgaggggcgcgtgcaaacattgagacgctcgaggagaggcttaatgtgatgatgctgcctaaagatcctaatgataaagcgacggcatttttggagattcgtgcaggcacgggcggtgatgaagcggcaattttttcgggtgatttgtttcgtatgtatcaaaaatatacacaatcccaaggttggcaagtagaggtattgtctgccaatgaaggagagcatggcggctataaagaaatcatcgcgcgtgtatctggtatcggtgtttatggcagattgaaatttgaaagtggtgctcatcgtgtccagcgagttccagccactgaatctcaagggcgtgtacatacctcagcgtgtacagttgcggtgatgccagaggttgagattgatgatacggttgagattaacccaagtgatttgcggattgatacctatcgctcaagtggtgcaggggggcagcatgtcaatacaactgactcagcagtccgcatcacacatatcccaacaggggtggtggctgaatgccaacaagaacgctctcagcatgccaataaagaaaaagcgatgaaaatgctggtagctcgcattcaacaagccaaagttcaagcccaaattgatgcaacaagcgatatgcgacgcaatttggtcggttcaggcgatcgttcagagagaattcgtacttataatttcccccaaggacgcatgacagaccaccgcattaacctaactttatataagcttgatgccatcatggaaggggatttgactgagcttttagacagcttattgcgtgaacatcatgctgatttgatggcaagtgttggagcagagtaa

SEQ ID NO: 26711 - DNA, 690 bp, Moraxella catarrhalis
atgaaacctgccaaaaaagcaactttagccaaactcactctagcctcaggaattggtcttgccagtttttcagcgtatgctgctgtcactgtcccgacatatgacattgaagcaggcaaagccatcgttgaagccaactgtgctgcctgtcatggtcttgatggcatgagtcctgtgcctactcagccaaacctcggtggtcaaaatatcaagtatctttataagcagttggttgattttaagaccaaagcacgccgtaatggtattatggaagctcagctggctggattgactcagcaggatttggcaaatttggcaggttattatgccagtagaaccccttggacaccaggctatggcaataaagcaacagttgccgaagcaaccaaactatacttaggcggtgataaaactcgtggcgttattccgtgttcaggttgtcatgatcccaaaggtgcaggtaatgcgtacgcaggctttcctcgcttaggtggtcagcacgctgcctatttggcaacacaattaaaactgttccgtgccgcaggtcgtgaagatgatgtttcgtcagatacagaggtgcgtaccaacgattctgccaaggcaggtgataaaggcatgatgcagatggtggcatcacgattatcagatcgtgatattaagattttatctgaatatttatcagcacttcac

SEQ ID NO: 26712 - DNA, 438 bp, Moraxella catarrhalis
atgggtcttaaactgaatgaactatcaccagcattgggtgctaagaaaaaagcattccgtcgtggtcgtggtattggctcaggcttaggtaaaactggtggtcgtggtgttaagggtcaaacttcgcgttctggctcaagcattcctgcgggttttgaaggcggtcaaatgcctatctatcgtcgtttaccaaaatttggttttacttcgaagatggctatgacaactgctgaagttcgtctatctgagcttaataagattgatggcgatactgtgagcttagatacccttaaagctgcgaatattattcgtggtgatatgaagcgtgcacgcattattttatctggtgaggtgggccgtgcattgacttttaaaggtgtaaaagttacaaaaggtgcaaaacaagcaatcgaagctgccggtggtagtgtcgaggag

SEQ ID NO: 26713 - DNA, 1323 bp, Moraxella catarrhalis
atgtcaaggcagtcagtatctcgttctagcattcccttaaatccttttactttcgtaagaaagtatgatgaattatggacgcgtatgctttttttatttggggcgctgattgtttatcgacttggttctcatattccagttccaggcatgaaccctgttagcttagctaattttttccagagtaatagcaatacctttttgggtatgtttaatgtgttttctggagggtcattagagcgtatgtctattatggcactaggcattatgccttatatttctgcttcgattgttgtgcagatgatgtctgccatcataccttctcttgaagcgttaaaaaaagaaggtgaatctggacgcagaacgctgaataaatatacgcgccaaggaactttagcacttgcatttgttcaggcagttggtatgtctactggtttgattgctggtggcttgacattgacaactggtttgagtttttatattccggcagtgacttctttagtcgcaggatcgatgtttttaatgtggcttggtgagcaaattactgagcgaggtgtgggcaatggtatttctatgcttattttagcgagtatcatagccagtgcgccaggcatgatttcacaggctttcagtcaaaatttaaatttgattgttatgcttttatttgtcgtattgggtattacagtgatagcggccattgtttttattgagcgtgcacagcgccgtgtacctgtgaactatgctcaaaaacagcaattaggtcgtaaaatttatgcacagcagcagtcacatttacccttaaaaatcaatatggctggtgtaattccagcaatttttgcaagctcgctattgctacttccagccagcttaggtcaatggactacagttagtgaaaatccaacgctgacccaagagattattcaaaatatcactttagtacttcagcctggacaacctttatacttattgttatttggtgtgatgattatatttttctgttatttttatacggcattaatgtttaatcctaaagaggttgcagaaaatttgaagcgaagtggtgcttatattccaggaatacgaccaggtcagcaaactaagcgatatttagattttgttttaaatcgcctaacttttatcggtgcaatgtatatgacaatcatctgtttgatgccgatgattatacagtctgtatttaatgtaccaattccactaggtggggcatctttattgattatggttgttgttttgatggactttatcgctcaattacaagcacatttaatgacacatcaataccatgatcagacgattattaaatcgtca

SEQ ID NO: 26714 - DNA, 594 bp, Moraxella catarrhalis
atgctcaccccaaaactggataaactcatcaaagagctacaagtcttaccaagtgtaggacaaaaatcagctcagcgaatggcgctacagcttttgaccaaaaaacgcacccaaggattatctttggcggctgcacttgagactgcgatgcacgacattaaagaatgcttgcagtgtcactcctttagtgatgatgagatttgcccaatttgcttagatcatcgccgtgatgatgggctactatgtgttgttgagaatgcatcagatgtcatggcgattgagcaaagtggtgcttatcgtggcaagtattttgtacttggtgggcatttatcgcccatcgatggtatcaatgccaatgatttgcatattgatcagttgattcatcgcatcaggcatgaagcgatccatgaggtgatcttagccactggtgccacggttgaaggacaaaccacggctttttttattcatgatgccatctgtacccatgtacccaaaattacccgtcttgctcagggcattcctatgggcggtgaacttggatatgtggacagcatcacactacatcaagcactacaaaatcgcagtaatatatcg

SEQ ID NO: 26715 - DNA, 366 bp, Moraxella catarrhalis
atgattcagactgaaacaatgctggaagttgcagataacagtggtgcaagacgcgttcagtgcattaaagtactgggtggctcacatcgtcgttatgcatctgttggcgacatcatcaaagtaacagtgaaagaagcaattccgcgtggccgtgttaaaaaaggcgatgtgatgaatgcagtggttgtgcgtaccaaaaaaggcgttcgccgcccagacggttcagtgcttcgttttgacgacaatgcagcagtattgttgaataataacaaagcaccgattgcaacgcgtatttttggacctgttactcgtgaactgcgcagtgaacaattcatgaaaattgtttcattggcaccagaagtactg

SEQ ID NO: 26716 - DNA, 315 bp, Moraxella catarrhalis
atggcaaagttacgtaaaggcgacaccgtggttgtgattgctggcaaagataaaggcaagcaaggcacaattttggcggtgaaagcagaccgtgtaaaagttgaaggcattaacattgtaaccaaacaccaaaaacctaaccaaatgctaggcaaggaaggtggtatcgttaagcaagaagcttttttacatatttcaaatgttgcgatttataacgcaaacacccaaaaagcagatcgtattgcttatcaagtgaatgaagatggcaaaaaagagcgtatctatcgttcaactggtgaagtagtggcgactgca

SEQ ID NO: 26717 - DNA, 534 bp, Moraxella catarrhalis
atggcaagattaaaatcgttatataatgacaagctaaaacagcaaatcaaagaagagctgggtttagaaaatgtcatgcaagtaccaaaaatcaccaaaatcactttaaatatgggtgttggtggtgcagcacaagataaaaaattacttgaaggtgctttggcagatatgaccgcaatcgctggtcaaaaacctgttgtaaccaaagcacgcaaatcagttgcaggctttaaaatccgtgaagagtggccaatcggctgtaaagtcaccttgcgtggcgagcaaatgtatgaattcttagatcgcttggttgccatcgcaatcccgcgtatccgtgacttccgtggtttttctgccaaagcatttgatggtcgtggtaactattcattgggcatcaaagagcagatcgttttccctgaagtagactttgataaaatcgatcgtatccgtggattggacgtgaccatcacgacaaccgcagcaaatgatgatcaaggtcgtgcattgctaaaagcatttggcttcccattcaga

SEQ ID NO: 26718 - DNA, 396 bp, Moraxella catarrhalis
atgagtatgcaagatccagttgccgacatgctaactcgcattcgcaacgcacaagcaagaaataaaccatctgtacagatgcctgcttctaaactacgcaaatccattgctgatttattggtagctgaaggctatttgacttctgctgaagtcagtgaagctgaaaatggtaaaaaggtattagatattgaattaaaatactaccaaggcaaaggcgttattgagcaattgaagcgttatagtcgcccaggtttacgccaatatcgtggtaaagatgaacttccaagcgttcaaaaaggtcttggcgttgccattatctcaaccagtcgtggcattatgagtgatcgtgcggcacgcgaagctggtattggtggtgaaatcatcgcattggttgca

SEQ ID NO: 26719 - DNA, 531 bp, Moraxella catarrhalis
atgtctcgtgtggctaaagccccagtaacgctaccagaaggtaccaacgttactttgaacgatcggcaggttgaagtcaaaggtaagaatggcactttatctttgagcctgcatgaattggtcgagctaaaacaagaagatggtattgttgtactatctccagttgtagacactaaagaagcgtggatgcacactggtacagtgcgtgctctattgaacaatatggttaaaggcgttagtgaaggttttgagcgtcgtctgcaactgattggtgttggttatcgtgcacaagttgcaggtaataaagtaaacctaagtttaggtttttctcatccgatcgaatacacgctacctgaaggtgttacggctgaaagcccaagccaaactgaaattttgcttaaatcaagcgataagcaaaagcttggtcaagcagctgctaaaattcgtagcttccgcccaccagagccttataaaggtaagggtgttcgttatagcgatgaagttgttcttcgtaaagaagctaagaaaaaa

SEQ ID NO: 26720 - DNA, 348 bp, Moraxella catarrhalis
atgttcgataaaaaatcagctcgtcttcgtcgagcgaaaaaaactcgtgcacatatccgtcatttgggtgttgaccgtttgacagtaacccgcacgcctcgtcatatttacgcacaaatcatctcaccaacgggtggtgtggttgttgctcaagcatctactttagatgcaactttgcgttcaggtgcaacaggtaatgtggaagcagctaaagctgttggtgctcttattgcagagcgtgcaaaagctgctggtatcactaaagttgcatttgatcgtagtggttttaaatatcatggccgtgttaaagcactagctgacgctgctcgtgaaaacggattggagttc

SEQ ID NO: 26721 - DNA, 495 bp, Moraxella catarrhalis
atggcaaaagttgaacaaactgacggtttggtagaaaaattagttgccgttgaccgtgtagcaaaagttgtaaaaggtggtcgaattttttctttcaccgcattaactgttgttggtgatggtaacggtcgtgttggttttggtcgtggtaaggctcgtgaagtgcctgcagccatccaaaaagccctagaagctgctaagcgtaatatgattacggtggatttagctggtcatacactacagcacccaatcaatgctcgtcacggtgcatcaaaagtttatatgcaaccagcctctgaaggtactggtgttattgctggtggtgcaatgcgtgctgtactcgaagttgcaggtgtacagaatgtattggcaaaatgctatggttctaccaatgcagccaatgttgtacaagcaactttcaaaggtttgcgtgacatgacatcgccagagcaagttgccgcaaagcgtggcaaatctgtcgaagaaattttgggc

SEQ ID NO: 26722 - DNA, 1188 bp, Moraxella catarrhalis
atggcaaaggccaagtttgaacgtgtaaaaccacacgtaaatgttggtaccatcggtcacgttgaccatggtaaaaccactctaactgctgctatcgcaaccgttgctgctaagcaccacggtggtgaagcaaaagattacgctgctattgactcagcacctgaagaaaaagcacgcggtatcaccatcaacacctctcatattgagtatgacactgcagctcgtcactacgcacatgtagactgcccaggtcacgctgactatgttaaaaacatgatcacaggtgccgcacagatggatggtgctatcttggttgtttctgcaactgatggtcctatgccacaaactcgtgagcatatcctactatctcgtcaggttggtgtaccatacatcatggtattcatgaacaagtgcgatatggttgatgatgaagagctactagaattggttgaaatggaagttcgtgaacttctatctgactatgatttccctggtgatgataccccaatcatcaaaggttcagcactagaagcattgaatggttctgatggtaaatatggcgagcctgcagttctagaactgctagacacactagacagctatatcccagagcctgagcgtgatatcgataagtcattcttgatgccaattgaagatgtcttctcgatctcaggtcgtggtacagttgtgactggtcgtgttgaatcaggtattattaaagttggtgatgaaattgaaatcatcggtatcaaaccaactgctaaaaccacctgtactggtgttgaaatgttccgtaaactgttagacgaaggtcgtgcaggtgagaactgtggtatcttgttgcgtggtactaagcgtgaagaagttcaacgcggtcaagtacttgcaaaaccaggttcaatcaccccacatactaagtttgatgctgaagtttatgtactgtcaaaagaagaaggtggtcgtcacaccccattcttaaatggctatcgcccacagttctacttccgtaccacagatgtgactggtgccatcactctacaagaaggtaccgaaatggttatgcctggtgacaatgttgagatgagtgttgagcttatccacccaatcgccatggataaaggtctacgctttgctatccgtgaaggcggtcgtaccgtaggtgctggtgttgttgctaatgttaaagac

SEQ ID NO: 26723 - DNA, 573 bp, Moraxella catarrhalis
atgacaaatgagattttaaatattattcaccaacgccgcagtatcggcaacctatctttgcccatgccaaacgatgctgagctaaaatcggtattggaggctgcgatggtagcaccagatcataaacagttaaagccatggcgattttgggtattgacaggagagacactgattgaatttggtcaagtgttgttatcagcagctgagcatgaagcggcatcatgtggtgagatattagatgaagttgcgatcaaaaaaatactgaatatgccgcttagagcacccatgattattgtgattgcaaccgaatatcagtatcataaaaaagtaccaccatttgaacaattgctcagtgcaggagcagtcgcccaaaatatgttgcttgcacttgagtctttgggctatcgcagtgtgtggcgtacaggtcctttgtgtaatacgcctgaggtaaaagattattttggtgtgacaaaacaaaataccatttgtggcttgatttatacaggttcaagtagtgttcagatgccagatcgtgagactgtggatttatctgactatgttgaatatcgccaa

SEQ ID NO: 26724 - DNA, 1326 bp, Moraxella catarrhalis
atgaagctgcgcaaaccgaatgtcaaaaaccaaaaagtacaaaaaattgtcgatgctgccagcatcggtattgatgatgcggtaagcgctatcaaagaatcgggtctgccaaataaaccattgatttctagcatcgctgaactgactggactaaaaaagaaaaaatcagctcaactggttgaatcaatgcaggcaacagagcagatcgcatcggatattcatcagatgagttttgcctttttgggcggtggaagttttggaactgccatggcaaatttggcggctaaaaacggttgtgatgcgacattgtgggtacgagataagcgcactgtcaagtctctgcataaaactcgaatcaataaaaaatatttgccaaatcataagcttgatgagcgtttgaaatttagtcacgatctgaaaacagcagtggcaggcgtggatgtgatttttgttgcagtacccagctcggcatttcgagagatgctgaccaatattaagccctttattacacaccaagctgtggtttcactgactaaaggcatggaaaaagagacttttgcgatgatgagtgatatcatccaagaggtgttgcctgaggtgaattttggtgtcatgagtggaccaaacttagcggtagaaattatggataatatgcctaccgcaacagtcattgcctcagcatcagaaccgcttagaaaagctgttcaaaccgctttacatagtgcattttttcgtgtttttgccagtagtgacattaaaggcgtggagcttggcggcgcactaaaaaatatctatgccatcgccatgggtatggcggcagcgtatgatgtgggtgagaataccaaagccatgctattgactcgtgcattagccgaaatgagtcgttttggtgtggcggttggtgctgatcctttgacttttttaggtctgtctggtgtgggggatttatatgctacctgcagttcggtgctaagccgtaactatcgcatcggctatatgcttggtcagggcataagtcttgaacacgccatcaaaaaattaggtcagaccgctgaaggtgtcaatacaattcttcaagtgcattctcgtgccaaagcactgggtatttatatgcccatcactcatgcactgcatgcggtattatatgagaataaatctgcacttggtgttgcactcaatttgatggaaacaggctttagaagtgatgtggaatttgttttgccgcatgatgaaagcaatgtacgcttgagccatgagtttagtgaagtgctaaagaccagtgccaatgctaagcccaaagatgaaattcaatccagtgatatgcct

SEQ ID NO: 26725 - DNA, 767 bp, Moraxella catarrhalis
tggcaaagcgtacagttagcacgacatgcaaagcgaccattattcttagattatgtcgattcattatttgatgagtttgatgaattgcatggagatcgagcgtttgctgatgatcgtgctattattggtgggttggcaagatttaatggtcagcctgtacttgttgttggtcaacatcgtggccgtagcactcgtgagcgtattgcccataattttggtatggcaaaccctgaaggctaccgtaaaatcattcgtttggtacagttggcggacgttttggtttgcctgtgtttacttttatcgatactcaaggtgcgtatcctggtgttggtgccgaagagcggggtcaagctgaggcaatcgccaaaagtatcgcagtattttccagtctaaaaacgccaatcattgcgacagtgatcggcgagggtggttcaggcggtgcgcttgccattggtgtggcagatcgggttaatatgcttgaaaatagcatttattcggtcatctctccagaagggtgtgcatctatcttatggaagacggctgaaaaagcatctgatgcgtcagaagcactcaagctcaatgcaaccaatttgtatcaattgcagctgattgatgagattgtcagtgaaggtgtgggcgcgcatgaagcacctgaacctgtcatggcagcactaaaaaacctattgacagtacaattggcagaattacacgcattgccaattgatgagctgcttgaacagcggtatcagcgtttgatgcagtttaat

SEQ ID NO: 26726 - DNA, 1038 bp, Moraxella catarrhalis
gtgcttcttatgaccaccacgatacctactttagatcagcctttgatcacgcttaatgaacaagattttttggcatttgcagacaatgcaattgcagtgattgagactgcaaccgatgaacgcacacttcaagaattgcgtgtcagcttgagcggcaaaaaatcagccttgacagcattgtccaagcaaatgggtgcacttgatgctgacaccaaaaaacaatatggcgtgtatttgcatgagttacgcacgcatatcaaccaagccttagaaactaaggcaaaacagcttgctaccgctgcgatgaatgccaagcttgccagtgagcaaattgatattggtctacctgcgcgtggtattttatcaggtggattgcatccgattacccaaacaaccgaacgcatgaagcagttttttgttcaagctggttttagcgtggcgacaggccctgagattgagagcgattattataattttgaagcgctcaatatctcaagccatcatcctgcacgtgcgatgcatgatacattttattttgatgcacattatttgctgcgtacacacacttcaagtgtgcagattcgcacgatggaaaacagtgagccgccgattcgcattatctgcccaggccgtgtgtatcgctgcgactcagaccaaacgcattcaccgatgtttcatcaaatggaaggtttgatgatctcaaaatcaagcaattttgcagagcttaaggggttgattcatgagtttttggatgcattttttggcaaaaaaatgacggctcgttttcgtccatcatttttcccattcaccgaaccatccgctgaggtggatattttgtccgacaatgggaaatggttagaggttttgggctgtggtatggtacatccacaagtgctcaaaaactgcggtatcaatcctgatgagtatactggttttgcttttggcatgggcattgaacgctttgcgatgctgtattatggtattgatgatttacgcctatttttccaaaatgatttgcgttttttaaagcagtttagt

SEQ ID NO: 26727 - DNA, 2394 bp, Moraxella catarrhalis
atgaaaatcagtgaaaattggctaagacagtgggcaaatccaagcattaatagtgagctacttggcgagcagttgaccatggcggggcttgagctggacggtgttgagactgttgcaccaccatttaatggtgtggtcatcggtgtggtcactgaatgtcagcagcacccagatgctgatcgcttgcgtgttactaaggttgatattggcagtggtgagcatttacaaatcgtctgcggtgcacccaatgtatgtgttgggctaaaagttgctgtggcaaccattggtgcggtgctgcccagtgatgataataagggttttaaaatcaaaaaaggtaagcttagaggtgttgaatcacaaggaatgctttgtggtgcttcagagctgggccttgaagatgagattgatggtttgatggagcttccaaaggatgccccaattggcatggatgtgcgtgattatttaaacttagatgcgaagatttttgaaattgctattacgcccaaccgtggggattgcttaagtgtattgggcttggcacgtgagattgctgccattaatcagatgccgctcaatcgtcctgtaatccaacctactaaggtggtcactgataccgctccgagtgtgcaagttttggatgccaaagcttgtcccagatatttagcacagcgtattgatgatattgatcgcacttggccaactccccaatggatgaccgacgctttgattgcttctggcgttcgaagccataattttttggtggatgtgaccaattttgtattacttgaattaggtcagccgctacatgcgtttgatgctgataaaattcaaggcgatatcatcgtgcgtatggcacactctggcgagacgcttgaattattaaacgaacaaatcattacactcagcggagatgagctggtgattgctgatgatgctggcgtcttggcattggcaggcattatgggcggtgcacgctcagcggtcagtgatgagacaaccagcatcatactagaaagtgcacattttgatcggttgaccatctcagggcgtgcacgccgttttggactgcatacggatgcttctcagagatttgagcgtggtgtggattttgcgttgccaaagcttgccattgatcgtgctgttggtttgattgtttcggttgcaggtggtaaggttagtcaaatgacgactgccgagaatttagatgcattgcctgtcagacataagattattgtacctgtgggtaaggtatcacagcttttgggtgtagatataccatctgatcagatggtagatatgcttaatcgtcttgagattgtaaccaccatgcagcaagacagtttggtatgccaagtgcccagccaccgatttgatttaacaatttatcaagatatcgttgaagagattgctcgcatgtatggctatgccaatatttgtgcgaccttgccagagctttctgtggatatgcgatatgatgatacggcagatttggttcaattggttaagcgatctttggcaagctcaggttattacgaagcagtgagcttcagctttagcgatgctaaaattgaagcactgtttgatgatcaaagcctaggcacggtattgccacttgccaatcccatctccagtgatcttgcggtgatgcgtcgtaccttaatgtcgagtctgttaccgattgttagttataatcttaatcgtcagcagccgcgtgtccgcttgtttgaaactggattaagcttcgttggcggtgatgttgagcatgtggttcagacaccaagcttggctatgattgcaacaggcgagctgaccactgagcaaagtcatgggacacgcaagatggatttttatgatctcaagcgtgatattgaaagcctgctgccaaatactttggataaatccaaagtgacttatgaacgcacgactttgactttcttgcatccaggccaaagtgctcatctgatgattgatggcgaagatttgggcttctttggtcagctacatccaagcatttgcaaagctttggacttaccaacggtttgggtggctcaaatggatttggataagctgattacacttaaccgaaaatcaagccccatcatagcaccaagtaaattcccatcagttcgtcgagatttggcagtgttggtggatcaagatgtcgcttggcaagcgcttgaaaaagacattcgcaaggcagcgggcaaatatttgcaagatgtttggctgtttgatatctatgtgggtgaaacattgcccaaaggcaaaaaatcgcttgcttttgcgatggtttttcaggatcaaaatgccacacttgaggacgagcaaatcaaagcagcggttgataaagtcattcaaaatttggcagataaacacgctgcccatctgcgagac

SEQ ID NO: 26728 - DNA, 1659 bp, Moraxella catarrhalis
atggctcaatatatctacaccatgaacaaagtgtcaaaacttgttccgccaaagcgtgaaattttaaaagacatcagcttgtcctttttcccaggtgccaaaattggcgtgctgggtctaaatggtgctggcaaatccacgctgctgcgtatcatggcgggtgtggatacagaatttagcggtgaggcacgagcggcaacaggcattaaaattggctatctgccccaagaaccacagcttgaccctgccaaagatgtgcgtggcaatgtggaagatggtgtgcgtgaggccttagatgccctagaacgcctaaaccaaatctatgctgaatatgccgagcctgatgctgattttgataaattggcagccgagcaaggcaaaatggaagacatcattcaagcgtgggatgcccacaacctaaatactcagcttgaaaaagcagcggatgcccttcgcctgccaccgtgggatgccgatgtctccaagctgtcagggggtgaaaaacgccgtgttgctttgtgtcgtttgctgctgtccaagcctgacatgctacttttggatgaaccgaccaaccatttggatgcagagtctgtggcatggcttgaacgcttcttaaaagactactctggtacgattgtggcgattacccatgaccgctattttcttgacaatgtcgctgagtggattttggagctagaccgtggttatggctacccctaccaaggcaactacaccgagtggctagaacaaaagaacaaacgcttagaacaagagcaaaaacaagaagaggcctttgccaaggcactaaaacaagagctagaatgggtgcgtaaaaaccaaaaaggtcagcaagccaaatccaaatctcgcctagaacgctttgaggagatgaactctcgtgagtttcaacagcgtaacgaaacggcggagatttatatcccaccagggcctcgtttgggcaataaagtcattgaggtcaataacatctcaaaatcttttgatggacgcttgttgtacgaaaacttatcatttactgtgccacccatggcaattgtcggtattgtaggcccaaatggtgctggcaaaaccacactttttaacatgattacaggtaaagacacgccaaatacaggcacagtagaggttggcgagagcgtaaaagttgcttatgtggggcaggtcagagatgagctggatgataaaaaaaccgtgtgggaggaggtctcagatgggcttgatatgattactgtgggtgagtataccacgccaagccgtgcctatatcggacgctttaactttaaagggcaagaccaacaaaaactcgttggtaatttatcaggcggtgagcgtaaccgcttgcaacttgccaaaaccctaaaacaaggggcaaatgtcatcttgctggatgaaccatccaacgaccttgatgtggagaccttgcgtgccttagaagatgcggtgcaggtgttccctggtacggtcatggtggtatcgcatgaccgttggttcttagaccgtatttgtacgcatattttgtcatttgagaacgaagcgccagagttttttgatggtaattatagcgaatatgaaaaatggcgtaaagagcgacttggggcagatgccacgcctaagcggatgaaatataagaagattggtgga

SEQ ID NO: 26729 - DNA, 1352 bp, Moraxella catarrhalis
atcagcgtttttgaactgtttaaaatcggcatcggaccatcaagttcacatacggtcggccccatggtggcagccaatcgttttttggtgttgcttggcgatcgtatggatagcgtccgtcaaattaccattgagttatatggctcgttatcatcaacgggcaaaggtcatgccacagataccgctattttgcttggtttatcagggcatgagccacctacaattgacaccactcgaaccgaagaatatttaaagcccatctaccaagaaggtcggttgatgttgggcggcacgcatcagattgcatttgatgctaacgaacatcttttatgggatgacacgccattacctgagcatcccaatggcatgaaactcatcgccatacttgatgatggtgagcagttggcacagacttattattctgttggcggtggctttatcaaagatgagcagcaaattcacttagcaccatctcaagatactcaatcagcctacccttatgattttgacagtgcagaagagctggcagcattatgccaagcacatgatttaagtatcgccgatttgatgcttgccaatgaaactgccctaagggatattgatgatgttaaagcgtatttaaacgatgtttgggataccatgcaagcttgcgtcactcaaggctgtaaagttgatgggattttgcccggtggcttaaatgtcaaacgccgtgccaaagatctgtatgaacaactatccaaagaatatgggtattcaggcaatggaggtctgcttgccatggattgggtgaatttatatgccttggcggtcaatgaagaaaatgccgctggcggaaaggtcgttacagcacctaccaatggtgcggcgggcatcattcctgctgtattacattattaccgtggatttattccagcatttagctaccaaggggtgcgtgaatttttgttggttgcaggtgcgatcggtgcactcattaaacaaaatgcctcaatttcaggggcagaagttggctgtcaaggtgaggttggctctgcttgtgccatggcagcggcaggattggctcatgttttaggcggcagtgttgctcaatgcttgaatgcagcagaaattggacttgaacataatttgggcttgacatgcgatccaattgcaggactggttcaagtcccttgtatcgaacgaaacgccatggcatcggtcaaagccattaatgtgcgcgtcttgcactacgaggtgatggcagtcatcatgtctcattagataaagcgattgccacaatgaaagaaactggcatggatatgatggataaatacaaagaaaccgccaaaggtggactggctatccacgctacc

SEQ ID NO: 26730 - DNA, 858 bp, Moraxella catarrhalis
atgacatttgcactaatttttgctgcttttagtatgggtctgcttggctcaccacattgtttgggtatgtgtggtggtatcgtagcagcctttggtatttctatgaaaaatacctcgcctgccaagcgaactttattgatgttaggctatcatatggggcggttgggtagctatacgattttaggcttactggttgcagccttgggtaagcacattttagcacctttaatggccaacagtgccttacccaaatatttattgggcggtgctttggtttttgctgcactgctcatgttggggctaccagtactcaatcgccttgaaaaagcaggtctaagattttggaatacactggcacctttacgcaccaaagttctaccgatggatagcttgcctaaggcattgatcgcaggtctgctttggggatttttaccctgtgggcttgtttatggtgcattgggcgtggcattgggacttgcctctgacagtcaagtaggattgacagcaacaacctttatggtatttttttggtttggtactttacccatgctacttgccacaggcacagtcatcgcttggctaaaatccaaaatccacgcatttaatctacgcaaattcagcggtgtggtgatgctcatatcaggattagcaattgcctttagcataccaatcatgcacaaattacatggcgaccacgcagaacatggtcaccatcaccatcaccattaccacaccagcgacgagcatattcatgatcaagtaggtcatcacagccatcaacatcacggtgaagcacctgcccacaaccacgatcactcatcgcattcagatcgaagccattcgcattcgtatcatcat

SEQ ID NO: 26731 - DNA, 828 bp, Moraxella catarrhalis
atggaattaatcagctgtcataaaatgtttgatggtgagcatcgccgttatcgccatgtttctaaagcagtccaaagtgagatgacctttgcggtctatctaccaaagcaggcactcaaaggtgcctgtttacctgtattatattatttatcagggttaacctgtaatgatgagaatttttcgaccaaatcaggcgctcagcagtatgctgctaagtacggtataattttggtgatacctgatacatcacctcgtggagaaaccgtacctgatgatgaagcttatgacttaggccaaggtgctggattttatgtcaatgcaaccgccagcccttggtcagtacattatcaaatgtatgattatattgttgatgagctacctaggctgattgagaagaacttcaatgtcggacaaaaggcaatctgtgggcatagcatgggcggtcatggtgccctacaaattggactaaaaaaccctgatgcttatgccagtatttctgcttttgctcccattgttaatccgtctaagacgccttggggtcaaaaagcatttacagcgtatttgggtgaaaaagagtctgattggtgtgagtatgacagcacttatttggtagccaaagcaaccaaagctccacccatttacattgatcaaggcttggcagatgatttttatccaaatcagttgcagcctgaacagttcgttgccgctgcccaagaaaatggtattaatgtggaactaaacttgcatgatggctatgaccacagttacttttttgttgcaagttttattgaagtacatattaagtttcatgcaaatcatcttaatgcc

SEQ ID NO: 26732 - DNA, 369 bp, Moraxella catarrhalis
gtgagtaataaacatccattagttcaagttgttgaaaatgcacaactaaaagaccatccatcatttgcaccaggtgatacggttgttgttcaagttaaagttcgtgaaggtgaccgtgagcgtcaacaggcctttgaaggtgtggttatcgctaagcgtaaccgtggactaaactcagcattcactgttcgtaaaatctcaagcggtgttggcgttgagcgtgcattccaattacattcaccattgattgctagtattgaagtgaagcgtcgtggtgatgttcgccgtgccaaactttactatttgcgtgagcgttcaggtaaatctgcgcgtattaaagaaaagttgggtgttcgcaaaactgcagaa

SEQ ID NO: 26733 - DNA, 1416 bp, Moraxella catarrhalis
atggcaggcaaaaccttatacgacaaactttgggatgaccatttggtcagacagcgtgatgatggttcatcgctcatctacattgaccgtcagcttttacatgaagtgacctcgcctcaggcctttgaaggtttggcactaaacggtcgcacgccttggcggttgtctgccaatatcgcaacccctgaccataatgtacccacctcacttatggagcgtaagcagggcatggcaggaatagccgatgacacatctcgcattcaagtcaaaacccttgatgataattgtaaatcttttaatgtcatgcagtttggcatcaatgacattcgccaaggcatcgtgcatgtggtcgggccagagcagggtttgactttgcctggtatgaccgtggtgtgcggtgatagtcatactgccacgcatggggcattgggctgtttggctcatggcattggtacatcagaggttgaacatgtgcttgcgacccaatgtttggttgccaaaaaaatgaaaaacatgctggtgcgtgtggatggcaaattgggcaaaggtgttaccccaaaagatgtcgtgcttgccatcatcgctaaaattggcacggcaggggggacaggctatgccatagaatttggcggacaggtgttttgtgatatgtccattgaggggcgtatgactgtgtgtaatatggcaatagagggcggtgctagggttggtcttgtggcggtggatgataagaccattgactatgtcaaagaccgaccttatgccccaacaggcgatgattgggagcgtgcggtaacctattggaacacactacattctgatgatgatgcccattttgatgcggtagttgtgctaaacggtgatgagattgagccacaagtgtcttggggaacctcgcctgagatggtgattgcagtttcgcaaaatgtgccaacgctggatatggcacgagacgatgtgcagcgtaatgactggatgcgagcttatcaatacatgggcttgacagcaggacagcccttgtccgatattgtgcttgaccgtgtgtttatcggctcttgcaccaactcacgcatcgaggacattcgtgcagcagcagaagttgttaagggtcacaaagtcgctccaagcatcaagcaagcgatggttgtggcaggctcaggactggtcaaagcacaagccgaacaagaagggctggataaaatctttatggatgcaggctttgaatggcgtgaaccgggctgttctatgtgccttgccatgaatgctgataaactacaagctggcgagcattgtgccagtacctccaaccgcaactttgaaggtcgtcaaggcaatggtggacgcacgcatttggtatctcctatcatggcagcagcagcggcaattgcagggcattttgtggatgtgcggacattt

SEQ ID NO: 26734 - DNA, 1167 bp, Moraxella catarrhalis
atgcaagtatatttggttggcggtgctgtgcgtgatgctgtgcttggcttgcccattaccgataaggactttatggttgtgggtgctacgcctcaggtgctgcttgatttgggatttatccaagttggggtagattttccagtatttttacatcccaagacacaggcagagtatgctttggctcgcattgaaagaaaatcaggtgtcggccataccgcttttcaagtacacgccgatccaagcgtgcgtcttgaagaggatctcattcgacgggatttaaccatcaatgcactggcgattgaggttaaaggcttatttgatgagacacccatgacaggcaaggtcattgatttttatggtgggctaaccgatatccaaaatcgcacgcttcggcatgtctcgcctgcatttagtgaagatccacttagggtgttgcgtgtggcaaggttttttgcccgttttgcaccacttgggtttagcattcatgatagcactgccaagcttatgcaagacatcgccaaatcaggtgagatgagcagtttaagccgtgagcgtttatactctgaatttgttaaagctatgcgacagccacaaggcgatcaatttattgcctgcctgcaccaacttgacattttgcccttcattttgcccacattagcacagcattttaacacaccacaaaaccgccaacgcaccttcacacggctggctttagcctgtacgctgaatttgcctatttttagtcactttgcgatgttgctaagtgatttgcccaaagatgacctaagcgactgtctgaatagactaaatgctccaaaaagtattcggcaatttatacaaacctttaatcatttccatgacacattcatcgctttacccaacatctcaggcaacgctttgcttgaattgcttgaacgcacgcaagcacataaagacagcacaaaactgatacagctttatgacgcttgtcatgcctaccaaggcagccctctgagttatcccaagcagtggctatttgatgccattacttgctaccaaagcatcggtattgccgacattgacccaactttaacaaaaaaagccattggtgatgccctgtcatatcttagatgccaagccttgcataaacttttaagtaattttcaaaaaacatctgtcgctgggctt

SEQ ID NO: 26735 - DNA, 372 bp, Moraxella catarrhalis
atggcaactacaaaccagcttatccgcaagggtcgcacaaccatcaaggaaaaatcaaaagttcctgcgttgcaagcgtgcccacagcgtcgtggtgtgtgtactcgtgtctatactaccacaccaaaaaaacctaactcagccatgcgtaaagtttgccgtgtacgcctaacttcaggttatgaagtttctagctatatcggtggtgaaggtcacaaccttcaagagcatagcgttgtattaatccgtggcggtcgtgtcaaagacttgccaggtgtgcgttaccataccgtacgcggtgcacttgactgtgcaggcgtgaaagatcgtaaacaaggccgttctaaatacggtgctaagcgtcctaaggcg

SEQ ID NO: 26736 - DNA, 471 bp, Moraxella catarrhalis
atgccaagacgtcgtgtcgtcgctgcccgtgaaattctaccagatcctaaattcggcagccaaacaattgctaaattcattaaccatgtgatggttgatggtaaaaaatcagtcgcagaaaaaattgtttatggtgcactagaagcagttgttgccaaaaagaatattcaagaccctgtggctttttttgaagaagtgctagaaaatgttcgcccaaccgttgaagttaaggctcgccgtgttggtggtgctacctatcaagtacccatggaagtacgcccatcccgtcgtaccgccttggctatgcgttggttagctgatgctgcttcaaagcgttctgaaaaatctatggctctacgcctagctggtgagctaaatgatgcttcagaaggtaaaggtgcagccattaagaagcgtgatgatgttcaccgtatggcagacgcaaacaaagcgttttcacactatcgtttc

SEQ ID NO: 26737 - DNA, 2124 bp, Moraxella catarrhalis
atggctcgtacaacccctattagtcgctaccgtaatattggtatctcggcacacattgatgcaggtaaaaccactacctctgagcgtattttgttttatactggtgtatcacataaaattggtgaggtacatgacggtgccgctaccatggactggatggaacaagagcaagagcgtggtattaccattacttctgctgcgaccaccgcattttggtcaggcatgggtaaccagttcaaagaacatcgtatcaatgttattgacaccccaggccatgttgacttcactgtagaagttgagcgttctatgcgtgttcttgacggtgcttgcatggtttattgtgctgttggtggcgtacaaccacagtctgaaaccgtatggcgtcaggctaacaaatataaagtacctcgcttggcatttgtgaataaaatggaccgtacaggtgcaaattttttccgtgttgttgagcagatgaaaactcgcttaggtgcaagccctgtgccaatcgttattcctatcggttcagaagaaaactttactggtgtggttgacttgatcgagatgaagtctatcatctgggatgaagcgtcacaaggtatgaagtttgaatatggcgaaatcccagcagacttggttgacactgccgaagagtggcgtactaacatgatcgaagctgccgctgaggcatctgaagagctgatggataaataccttgaagaaggcgaattgtcaaaagaagatatcgttgcaggtttgcgtatccgcactttggcgagtgagattcagccgatgctatgtggttcagcgttcaagaacaaaggcgtacagcgtatgctggatgctgtcatcgagttcttaccagcacctgatgatgttgaagcgatcaaaggcattttggatgataaagccgaaaccgaagcttctcgtgaagcttctgatgaagcacctttttcagcattggcattcaaaatcatgaatgataagtatgttggcaacttgacatttgttcgtgtttattctggtgttgttaagcaaggtgatagcgtttataaccctgttaagatgaagcgtgagcgtatcggtcgtatcgtacagatgcacgccaacgaacaaaaagaagttgaagagatccgtgcaggcgacattgcagctttagtaggtatgaaagatgtaaccacgggcgacacgctgtgtgataacgataacatcatcactctagagcgtatggaattcccagagccagtaatttctttggcggttgagccaaaaacaaaagctgaccaagaaaaaatgtcagttgctttgggtcgcttagcaaaagaagatccttcattccgtgtacgcacagatgaagaatcgggtcaaacgattatttcaggtatgggcgagcttcaccttgatatcatcgttgatcgtatgaagcgtgaatttaatgttgaagctaatattggtgcgccccaggttgcttatcgtgaaacgattcgccaatctgtggaagttgaaggtaagttcgttcgtcaaacaggtggtcgtggtaaatttggtcatgtttggttgcgtcttgaaccacttgatccgacaggcgatgtggaatacgaatttaacgaagaaattgtcggcggtgtagttccaaaagaataccatgcagcagttgataaaggtatccaagagcgtatgaaaaatggcgttatcgcaggatatccagttgttggtatcaaggcaactttatatgatggttcttatcatgatgttgactctgatgagctatcatttaagatggcaggttctatggcgttcaaaaaaggctttctacaagccaatccagcgctacttgagcctatcatgaaagttgaagtggaaacacctgaagactacatgggcgacatcatgggtgacttgaaccgtcgtcgtggtatggttcaaggcatggatgatcttcctggtggcaccaagtctattcgtgcagaagtaccattggctgaaatgtttggctatgcaacccaaatgcgttcaatgtctcaaggtcgtgcaacttactcaatggaattcttgaagtatcaagaaacaccaaaaaatgttgctgatgagatcatcaagaaatttacagctaaagatgatgatgaa

SEQ ID NO: 26738 - DNA, 1125 bp, Moraxella catarrhalis
atgccagcacttagaaaagatattgaccctgaaggattattggaattttctgttgtttatactgatcgtgcgcttaaccatatgtcggtgcagttccagcaggtgatgaaggatttatcttttgagttaaagtcactgtttcaagccgatgcacttgccatcgtgccaggttctggcacggcagggatggaagcagttgcacgagctttggcgactgatcaagatgctgtcattatcagaaatggctggtttagctatcgctggacgcagatattagaagcgattggtgttgccaaatctagccatgtgtttaaggcatgtcttcaagaaggcaagaacggtcagtttgtacctgctgatattaatgaggtgaccgcctatatcaaagagcatcggccgggcgttgtgttcgcccctcatgttgaaactgcctctggcatgatgctgtcagatgattatattcgtgcacttgctgaggctgtgcatttggtcggtggcctgcttgtcattgattgtattgcttctggatgtatttggctggatatgaaagcgcttggtatcgacgtgcttttatcagcacctcaaaaggggttgtcaagcacaccatgtgctggcttggtgatgctgtcacaggccgccaaagaagctgtattatcaagcacgccgtcaagcttttctttggatttaaaagcttggttaaatatcatgatggcttatgaaaatggtggtcatgcgtatcatgccaccatgccaaccgatggtctaaagcagctgcgggatactttgcttgaggcaaagcagattggctacgataacctaaaacaagcccaaatcaagcttggtcaagagattttggcaacacttcataaaaaaggcgtccacagtgtcgccgatccatcagctcaagcgtatggcgtgattgtttgccatgctttaagtgatgagattcacaaaggtgccgcctttgctaaggcaggtgttcaaatcgctgctggtacaccgcttcaggttggtgagccaagcgattataagagctttcgtatcggtttgtttgggcttgataaattgaccgatattgaaggtacgattgaacgctttaagcgtgcagtcgatcaagtgttcgtt

SEQ ID NO: 26739 - DNA, 636 bp, Moraxella catarrhalis
atggtgattggtttagtcggtaaaaaatgcggcatgacccgagtcttcactgaagcaggcgtttctattcctgtcacagtggttgaggttgatgccaaccgcatctcgcaaatcaaaacagtagacaccgatggctataacgcaatccaaatcaccacaggtgagcgtcgtgacagccgtgtgactgctgctcaaaaaggacacttcgcaaaagctggcgttgctgctggtcgtggtgtttgggaattccgtgcagaagaaagcgatttagaaggtcgtgaaatcggcggtaatatcctagctgatatctttgaagttggtcagttggtcgatgtgactggtcaaagcaagggtaaaggtttccaaggtggtgtgaagcgtcataacttccgcactcaagatgcaacccacggtaactctgtttctcaccgtgttttgggttctacaggtcaaaaccaaaccccaggtcgtgtatttaaaggcaaaaaaatgccaggtcaaatgggtaataaacgagttactgttcaaggcttggaaatcgtttctgttgacgccgaaaaaggtgtactggtcatcaaaggtgctgttccaggtgctaatggtggcgatgttatcgtacgcccatcagtcaaagcc

SEQ ID NO: 26740 - DNA, 600 bp, Moraxella catarrhalis
gtgaatttaaaaactgttacaggtgcagcggttgaactatcagagatcacttttggtcgtgagtttaacgaagccttggtacaccaagtcgtaactgcttacctagctggtgctcgtcaaggtactcgtgctcaaaaaactcgtggcgaagtttctggtggtggtaaaaaaccatggcgtcaaaaaggtactggtcgtgctcgtgcaggctctatccgtagccctatttgggttggtggtggtcgtgcatttgctgccaaaccacaagattggtctcaaaaagtaaaccgcaaaatgtatcgtggtgcaatgcagtgcattttggcggaattggttcgtcaagagcgtttggttttggttgatgacatcgctgtatcagcaccaaaaaccaaagagcttatcgctaagctggctgaactgaatgccccacgcgcattgatcgtaactcatgaagttgacgaaaacttgtacttggctgcacgcaatatcccatatgtgaatgtattgggtactcgtgaagttgatccagtaagcttggtttcttttgacaaagtgattatgactgttgaagcagccaaacaatttgaggagacacttgca

SEQ ID NO: 26741 - DNA, 327 bp, Moraxella catarrhalis
atgagcaacgcaagactatatcaggtactaaaagcacctgtattttcagaaaaatctcagcgtctgggcgacactcttggtgtgcaagttttcaaagttgatagcactgcaaccaagcgcgaaatcaaacaagctgttgagctgatgtttgaaggtgttgaagttgtcaaagtaaacacacttaataccaaaggcaaaaccaagcgttttggccgtgttgttggtaagcgttctgacgtgaaaaaagcgtatgtaaccttaaaagctggttcagacgtacaaatcggtgctggtgaagaagccactggcgaaacagcgactaacgaa

SEQ ID NO: 26742 - DNA, 825 bp, Moraxella catarrhalis
atgcctatcgtaaaagcaaaaccaacctcaccaggtcgccgctttgttgaaaaagttgtgcatccacacctttataaaggtcgtccttatgcaccacttgttgaatcaaaagctaaaactggtggccgtaacaataatggccgtatcaccacccgccatatcggtggtggtcataagcagcattatcgcttaattgattttaaacgcaataaagatggtattccagctgttgttgagcgtattgaatatgatcctaaccgtacagcacatattgctcttttgaagtatgcagatggtgagcgtcgttacattattgcacctaagaaattaagtgttggcgatcaggttcaatctggagaaggttctcctatccgtccaggcaactgcttaccattgaaaaatatccctgtcggtacagtaattcataatattgaacttaaaattggcaaaggcgctcaaattgctcgctctgctggtgcagcagttcagttattgggtcgtgatggtgcttatgtcatcgtgcgtttgcgttcaggtgagactcgccgtattcatgctaattgccgtgcggttattggtgaagtgtctaacactgaaaataacctaaaatcactaggtaaagcaggtgcagcacgctggcgtggtgttcgtcctaccgttcgtggtacagcaatgaacccaattgaccacccacacggtggtggtgagggtcgcaacttcggtaaacacccaaccagcccatggggtcagaaagctaagggtcttaagactcgttctaacaagcgtactgacagtatgattatccgtcgccgtcgtgccaagaaa

SEQ ID NO: 26743 - DNA, 273 bp, Moraxella catarrhalis
atgcctcgttcattgaaaaaaggtccatttatcgatgcgcatttgtttgctaaggttgaaaatgctctagaaagcaacagccgcaaaccgatcaaaacttggtcacgccgctcgatgattctacctcaaatggtaggtctaaccatctcagttcataatggtcgcactcatgtgccagttattgtaagtgaacagatggttggtcataaactcggtgaattcgccccgacccgttcttatcgtggtcatggcgttgataagaaatctaaaaga

SEQ ID NO: 26744 - DNA, 327 bp, Moraxella catarrhalis
atggaagtaactgcaaaattacgtggtgccgccatttcggcacagaaagtaagattggttgcggacgaagttcgtggtaagccaattgagcgcgctttggacattctaacatttagcaacaaaaaaggtgctaaactggttaaaaaatgcctagattcagccattgctaatgctgaacacaataatggcttggacattgataagttgcgtgtcactaccatttatgttgatgaaggtattaccttaaagcgtatcatgccccgtgccaagggtcgtgctgatcgtatcagtaaacgcacttgtcacatcactgttaaagtaggggaa

SEQ ID NO: 26745 - DNA, 720 bp, Moraxella catarrhalis
atgggtcaaaaagtacatccaattggtattcgtttgggcgttatcaaaaagcacaacgctaactggtatgccaatcctaagcaatattcagagtatttgctgaatgacttccaagttcgtaattttttgcgtaaaaaattggaaggtgcaatggttagccatatttacattgagcgtccaactggtgctgcaaaaatcacgattcatagtgcacgccctggtattatcattggtaaaaaaggtgaagatatcgaaagcctacaaaaagagctaaccaaactgatgggtgttccagctcaggttaatatccaagaaatttctcaacctgatttggatgctcgtttggttgccgaaggtattgccagccagcttgaacgccgtgttatgtttcgccgtgcgatgaagcgtgctgttcaaaatagtatgcgttcaggtgctcaaggtattaaagttgagctttctggtcgtttaggtggtgctgagattgctcgtaccgaatggtatcgtgaaggtcgtgtgccgctacacacattgcgtgctgatattgattatgcatcagtgcgtgcagaaactacttacggtactatcggtgttaaagtttggattttccgtagtgaagttttagacggtatgaatagtgcctacaacccagttgttgaagataaaacacgcgcaccaaaacgccgtggtcgttctaatcgccgcaacacagacagaggt

SEQ ID NO: 26746 - DNA, 285 bp, Moraxella catarrhalis
atgaccatcaccaccgaagacattttggactgtgcaaatttatcacgccttgctcttgatgaaaaaaccgcccaaaactatgcaggcaatttggataaaatcctagccatgatggacatattagatggcgtaaacactgataatatcaagcctttggcaaatatccacgaagcttgtaatgagctgcgtgccgacattgccaattctgacattgaccgagacggttttcaagcggttgcccctatggtgcaagatgggttatatttggtgccacaggtgattgaa

SEQ ID NO: 26747 - DNA, 1476 bp, Moraxella catarrhalis
atgacagatttacaccacctatccgtccatgaattagcagacggtctaaaaaacaaacaatttagcagccatgaactggtagagcattttgccaatcgcattaaccgcttagatggtcaaatcaacagcttcatcaccaaagattttgacaatgccctagcccaagccgaacttgccgataaactgcgtgcaaaaggcgacaaccgtccacttttgggcgtaccaatggctcataaagacaacctatgtaccaaaggggttttgaccactgctggctcaaaaatgctctacaacttcgtctcgccctatcatgcaacggtcgttgacaacatcgcaaacagtggctttgtgagtcttggcaaacttaacatggacgaatttgccatgggttcggacaatgaaagttcatactttggggcagtgcataacccttgggataccactcgtgtgccaggtgggtcgtcagggggttcagcggcagcggtggcggcagggtttgtgcctgtggcgacaggctcagatacaggcggttctattcgccagcctgccagtttttgtggcatcacaggcatcaagcccacttatgggcgtgtgtctcgctatggcatgattgcttatgcttcaagccttgatcaggcgggcgcttttggcaaatccgccctagactgtgcctacctgctcgccccgatgacaggatatgaccccaaagacgccacatccatcagtcgccccagtgaggattatgtggcggacattttggcaacagccacagacggcaaacctttggcaggcaaaaaaatcggcatagcacaggcgtattttggggcagggcttgatgatgaagtagaaaaatccattcgtgctgccctagccacatatgaagcgctgggggcaaaaatcgtagaagtggacattaccgaccctgccatcacacttgccacttattatctgctcgcccccgctgaggccagctcaaacctatctcgctatgacggcgtgcgttttggttatcgctatgaaaatcccaaagacttacacgacttatacactcgcagccgctctgatggctttggcgaagaagtacaacgccgcatcatcatgggtacttatgctctctcggcaggctattttgacgcttattacaccaaagcccaaaaggtacgccgtcttatcgtggatgattttaaaaaggcatttgaaaaatgcgacatcatcgcaagtcctaccgctccaacggctgcctataaattgggtgaaagccttgaccctgccagcatttaccttggtgatgtctacaccatcggcgtaaacttggcaggtctgcccgccctatcgcaccctgtgggacaagcgaacggcttgcctgtgggattgcagttgattggtaagcattgggcggaaagcgagctattaaaaaccgctcatatttatcaggcgaataccgagtttcatcaagagatggcggatttagtgaag

SEQ ID NO: 26748 - DNA, 219 bp, Moraxella catarrhalis
atggcaaaaaaagacgatattatcgaatttgaaggcgaggttattgatactttgccaaatactttattcaaggttcgcctagataatggacacgaaatcatcgcccacatttcaggtaaaatgagaaagcactatatccgtatcctaacaggcgataaagtcaaagttgaaatgacaccttatgacttaaccaaaggtcgtattacataccgtggcaaa

SEQ ID NO: 26749 - DNA, 672 bp, Moraxella catarrhalis
atgatgactcatccttttttgaccatgattacccgtgaatggcaaatcaaacgacaaggcacagttcagtggctttatcctttggtgctgtttttattgattattacactatttcccttggcgattggcaatgaaccaaagcttttactcagattggcaccttcggcggtgtggattgctgctttgcttgcattggtgattggtgtggatgatttattccgcagtgagtttgataacggcacattggcacaaatggtcgttgccaaatcacccttaatcatttgggttttggcacggcttttggtgcattggttgtttagtgcaggtgtggtagcaatcttatccttattagtgattatattgtttgagatgccatttggtgaagcgggaatattgatggtttcgatatttgtgggttctccgattttgcttggattgtctgcgattgcaagcagtttgactttaactttaaaaaatggtgcagttcttgtccctttgattgcattaccgatgcaactgcctgtgctgatatttgcaacaggtgcggtggacttatatgccacagagttaaatggcttaccaaccttggctttattggcggcaggcagcattatcacggtgctggtgacgccatgggttgtcgcctcagtactcaaaatggcatgggcagat

SEQ ID NO: 26750 - DNA, 822 bp, Moraxella catarrhalis
atgttactaaaaggtcagcgttttgtggtgactgggattgccagtaaattatcaattgcttgggcgatcgctgaaagcttgcatcgtgagggggcgcagctgattttaacctatccgaatgataaaattaaaaagcgtgtggatatggctgccgaagcatttgatgcggtggcggtgattgagtgtgatgttggctcagatgagtcgattcaagtgtgttttgatgaaatcgccaaacattggggcgtaggtgacgataaaggcatcgatggcattgtgcatgccatcggttttgcccctgccgatcagcttgatggcgattttacccaagcaaccactcgtgaaggcagtcaaattgcccatgatatctcaagctacagttttgtcgcacttgccaaagcagggcgtgaattacttgctgcacgccaaggctcactgttgactttaacttatgaaggcagtatttctgtattgccaaactataatgtcatgggcatggcaaaagcaagcctagaagcttcggtacgctatttggcatcatcattgggtggtgagggcattcgtgtcaatgccatcagtgcaggccctatccgcacgctggccgccagtggtattaaatcatttcgccgtatgcttgatgttagcgaaaaaatcgcaccacttgggcgtaatgtcagccaagaagaagtgggtaatgctgcgctgtttttgttatcaccttgggcaagcggtattactggcgagattttatttgtggatgcaggctttaataccgttgccatcagtgaaaaaatcatgatgatggcaggcgacggcgaacaa

SEQ ID NO: 26751 - DNA, 1602 bp, Moraxella catarrhalis
atgattaccgagcatttggttgatatatcacgcctacagtttgcaacaacagcattatttcattttttatttgtgccattaacacttgggatgacttggcttttggtcatcatggaggctgtttatttaatcacaggtaaacaaatctggaaagatatgactcgtttttggggcaaattatttggaattaactttgtgcttggggttaccacaggcatcacaatggaatttcaatttggtaccaactgggcatattactcacattatgtgggcgatgtatttggtgcgccactggctattgaagggttgatggcattttttcttgaatctaccatggttgggctatttttctttggctgggataaaatgtcacggttacaacattttacaaccaccttattgatggctttgggtaccagcttatcggcattgtggattttggtggcaaatggttggatgcaaaaccctgtcggtgctgaatttaattatgacaccatgcgcatggagatggtcagttttgctgaaattttcttaaaccctgatgcccaaaataaatttgtacataccgtatcagcaggctatgtgacgggtgcgtcatttgttcttggtatttcagcatggtatttgctcaaagggcgtgatgttgctcttgcaaaaagaagctttcatgtcgccgctgcatttggttttgcggcaatatgcagcgccattgttttgggtgatgaatctggctactcaattgggcaagctcaacaaaccaaacttgcaaccatggaggcaatgtgggaaacagagccagcaccagcaggctttaatctcattgcagatatcaatgaagcagaacaaaaaaataactggtctttgcatatcccttatgtcatgggcgtgattggaactcggtcaatagatactgagattttgggtattcaagatattaaaaaactcaatgctgaccgtatcatcaatggtgtgactgctgttagtgcgcttgatttgatgcgtcaaaataagctaaatggtataaaaaatccgcaagcactgattgatatttttgaagaacataaaaaagatctgggttttgggctactgttaaaaaaatatacagatgatatggctaagattacgccacagatgctttcaaaagcggttgatgatagcataccaagggtaactccaatgttttggtcatttcgcctgatggtgggtatgggcgtattaatgcttatcttgtatgggctgtgtttattttttagtctaaaaggcagctttatccataaaccttggttgcttaaatttgccatgattatgattcctgcaccttggattgccatagaagcagggtggtttgtcgcagaatatggtcgtcagccatggacggtatatggcattttacccacgcatttatctgtttcaaacattgatgctgggcatgtgatattatctttggctgggtttgtacttttttatacaatactggggattgttgaagtatttttgatggtcaagtatgtacgccttggtcctgccagtcttggtacgggtagatatgatggtgaaaagacccaagtacatttgatttgcccatctgatgaacagggggtg

SEQ ID NO: 26752 - DNA, 777 bp, Moraxella catarrhalis
atgcgactaactaaaaccattaaagaagctatccacgcccacgccaaaatctgctatcctgctgaatgctgtgggcttatcatagatgggcagttttatccttgtgataatatcaccccaaatccttatgagcattttgagatagaccccaaagattttgcccgtgctgaaagtatgggtcaaatacaagcgattgtccatagccaccctgacggcaatgccgagccgtccgaagtggatagggtgcagatgggcatacatgggatagattgggtgatttgtgcttttggttaccacgctgatggcaaagagtactttgatgtcaaatgccataaacccaaagcgtatcaagccccattattagggcgtgagtatcatcatggcgtgcaagactgttatagcttggtgcgtgattattacagccgtgaacttgatattcacctgcctgattttcaccgaactgatggttggtgggaggatgagaaccatgaaccactttatgaaaataacttcaccaaagcaggttttatcaagatgcaagataaaaacgacttacaaaagcacgatgtcatcttgtgccgtgttgggcggacgcatcatgtcaatcatgctttgatttatgtgggcgatggcaagttaaaaagcgaaaccacgcctgattgtgtgggtaatgccctaattttgcaccacccccatggcggtcttagcgtgcgtgagatttatggggacaattggcaaagacgcacggcgatggtggtgcgtcatcagtcactaggc

SEQ ID NO: 26753 - DNA, 969 bp, Moraxella catarrhalis
atgcaaatcatttttttagacagccatcatttaccgacactgccaccacttgccttgaccatcggtaattatgacggcgttcatttgggtcatcaagcgttattatcagcactggctgatgatgccaaagcgatgggtttgttacctgcggtgatggtatttgagccacagcctagagaatatttttcgcctgataatccaccagctcgattgaccaatttgaccgaaaaagcagagcaaatcacgcaattgggcgttcaatatctgattgtggcaagttttgatgatgcatttcgttcattatcagcggcggcgtttgttgatcttttgcacagcttaaatgtgagccatcttgtgcttggtgatgattttcgttttggtcaagatcgtgttggcgacaaagcatttttgcaagctgcaggatttagcgtagataatttgcccagcatcacccaaaatggcgtacgcatcagctcatctttggtgcgtcaagctttggcggtcggtgatttaaacgctgccaaatctatgttgggtcgctcttatggcataactggcgtggtcgagcatggcgataagattgggcgaacattggattttccaacagcaaatgtgtctttggggcgtctaaagcctgcactacatggcatttttgctgccgatgtcatcgcctatcaaaatggcgtgcgtttggattgggcatcgctgggtcaaggtggtgtgatgggtctaaaacagggcagtttatttggtgccgttagcattggattacgccccagtgtgggcggtaaacagtggcgacttgaggtgcatttacctgattttaacggtgaactatatggcgtgacgctttgggtggtgtttacgcattttttgcatggtgaacggcattatgatggtgttgatgccctaaaggcaggcattaccaacgatgtggtggctttgcttgcgtggcgagatgatcaaggg

SEQ ID NO: 26754 - DNA, 1140 bp, Moraxella catarrhalis
atgcgtagcacctctatcaccatccaccctaatgctttgacacacaatctgcaaatcatcaaaagccagcttgaccgaacgaccaaagtactcgccatggtcaaagcagatgcatacggtcatggcatagatgcaaccattcctgctttgatccatgccgatggctttggtgtggcgtgtttgtctgaagccatggcggtcaagcaagtacttgatggcatgaatcacaaaaaacccatcgtactgattgaaggtgcgttcagcttagatgagtggaaagtggcaattgaccatgattttggctgtctgattcatcatgaaaatcagctcatatgggcattgtctcatcgacccaagcaagaccaattttgccataccatttggctaaaatacaatacgggcatgagccgcctaggatttaatgacgatcacatcatcacggccgccaaatcgttggccgatgcaggctatcggctaattttgacaagtcattttgcatgtgcagatgacaaatcacacccactaaatgcacaacaaatcagcaaatttgatcaagccttggcgtgtattcgatcgtttgcacctgatacgcttgccagtttgtgtaattcagcagggatttttaattttaagcaccagcatcatgattgggtgcgtgctggtattgccttgtacggctctaagcccatcaccgaccaatcagccaaagcactcaatctcatgcctgccatgacgctatcggcacaagtgatggcaattcacaccttggcagctggcgacagtatcggttatagtgcactgtgggcagcacaaaaaccacatcaaattgctgttgtcagtattggctatggcgatggttaccccagagtggtgatgggtgctaaagtcagcgtgaccgatacttcaggcaatcgccacttatgcgatatcattggtagagttgccatggatatgtttatgattgatattgatgggcttgatattgccattaatacgcctgttgtgctgtggggcgattcgcccacgatagatgaggtggcaatgtgtgcagggacaattggctatgagctgatgtgccgtttgaccactcgaccaaagcgatgtattatggatacatacctacccaagaatgaatttaaa

SEQ ID NO: 26755 - DNA, 1515 bp, Moraxella catarrhalis
atggtacaatttaagtttttttatggcatattttccagccggattttatcattatttatagcgattaccaaacataaatcctatttgtacgaccttttgcataagccaaatactgacatgaccaacacgaacgataaaaaagacagcctccttacgcttcagccgccccacagcattgagatggagcgttcacttttggcaagcttgatgagtattaatgattcatttgaagacatagaaaatatcatcaacgccaatgatttttatggcgaaagacacaaaaaaatctttgatgccatcagtcatttggcgcgtgtcaatgagccatacgatagcatcatggtgcatgattatctaagtcgcattggtcagctggtatcagcaggcggtgaagactatctcattaccatcaatcaaagcacggcaaattattttaatctcatcaattatgccgaaaaagtacgagaaatgtcggtatatcgtcagctgatttcgtccgccaatcatatgctaaatttggcatatcacccaaaaaagcaaaccataacagagattttagatacgattgaatcggatatttttcgtattggggagagctttgctaaaggtagtagtaaaacaggcccacagcgtatcgatgatgtcatggcaaatgtcgtcactcagcttaacgacattcgcttacgccctaatggcctgattggtcttgatacagggtttattgagcttaataataaaacacttggttttcaaaatggcaacctaatcattttggcagctcgcccagcgatgggtaagacggctttggcactaaattttgcacaatcggcactgatgtctaataaagcagttgccattttttcgatggagatgcctgctgaatcgattgctatgcgtatgttggcagcatggggcagtattgatatgaagcgtctaatgtcggcgaatatgaacgaagatgaatgggggcgttttatgaatggcgtcactttgcttcaagacaagcatttatacatcgatgaccgttcagatcttagcccttctgaaatcagagccacttgccgtaggattgccaaaaaccaccctgacggtttgggatttgttttgattgattatatgcaattgatgcgtgtgcctggtatgggcgataacaaagtcaatgaaatgggcgagatttctcgcagtttaaaggcactggcgcgtgagcttaactgtcctgtggttgctctatctcagcttaaccgcaaagttgaagaccgcccaaacaagcgaccattaatttcagatatccgtgaatcagggcaaattgagcaggatgctgacttgattttatttgtatatcgccatcattattatcaccaagacaaagatgatatcaagcatttggcggaggttatcatcggcaaaaaccgtcaaggtgagcgtggtaaagtgccgctcaaattcattggtgaatatgtccgatttgatgatttaattccaggcgatatgcctgaagattatgatatcgatgaa

SEQ ID NO: 26756 - DNA, 1011 bp, Moraxella catarrhalis
atgccaagtcttcatgaaatgatgactgccatcgaaaaatatcagagcgtgcttaataaagatgatattgatggcagtattaagataacaggcgtggcaaatttatcggcagccaccaagcatcaagttgcttttttggcaaaagcaaaatatttggatgaactcaatcaaacaaacgcaggggttgtgttattatctgaacaattcatcaatgaagcacggacgattaaccctaagtgtttgtatgtattggtcaaagatgcttatttggcctatgcatgcgttagtacattattcaccccttcatgcgtgacaggcattcaccgcacggcaatcgttgcagattcagctgttattggtaatcaagttagtattggtgcaaacgccgtcattggtgaaaaagtggttttggctgatggcgttgtggtgggtgcaggtgtgattatcggtgagcgtacccaaatcggtgcaggcagtcaaattgatgctgctaccgttattcatcatgattgtatcattggcgagcaaacacgcattcatagccatgcaaacattggatcagaagggtttggttttgctcctgtggcaacgaaagatggacgacagtggcagcgtattgcacaactggggcgagtaattattggtaatcatgtgcgtattggtagccatacctgtattgatcgtggtgcggtggatgatactgtcattagtgatgatgtgattattgataatttggtacaaattgctcataatgttcacattggttgtggtacagccattgccgccaactgtggtattgcaggcagcaccaaaatcggtaaaaattgcctgattggtggtgcggtgggtatcagcgggcatttgacaatcactgatgatgttaccattaccagtatgagtatggtcattgcaaatatccaaaaatcaggaagttactcttctggtactgttgctatgccttctttaaagtggcggcgtgcagcagcaagatttcgtcaaatgggcgaaaaa

SEQ ID NO: 26757 - DNA, 1320 bp, Moraxella catarrhalis
atgttttcatccctttggcaagctttaagtgagcatcctgaatttatcgccatgctgaccatcccacctgtcacagcatttgtgacttgggcgcatgtgtggatggcacttgagatgttgttttatccgattaaattttggggcatacgcatttttgggctgccgtttagtttaaaaggtgtggggtggcaaggtattgtgcctgccaaggctggcaaaatctctggtattattgttgaccaaacactctcaaaacttgggtctttagatgagttttttcaggcgatggaacctgaagagatggcggagtttatcactgccaccgttgataaaaatctagaaagcttaattgatgaaattatgcttgagcggtcttatactctatggacgcatacgccatatgccatacgccgccgtatttatgcccacgctcactcacatttggcggcaattatgaaatctttggtcatggatttgacttataatgttgagtcgctcgtagatatgcgtgagatgattgttaccaaaatggaaaatgaccgtaagcttatggtggatatgtttttacgggtcggcaaaaaagaaattaattttatttggaaaattagtgctttgattggctttggctttggtgtgctccaaatggccattttttactttgtaccgcagcattggacggtgcctttttttgcgatgatttggggagctttgaccaattggattgccatttggatggtatttaacccagttgagcctaaaactgtcccatttgttcgcctatttcgttatgagatggttgatcatcaaaaacgaatcgtatggatgcacccgcattggcataaatattcttggcaaggtggttttatgaagcgtcaggatgaggtttcaactgtttttgccgaaattgtcgtcaatgaacttgtaacacttgaaaatatcatgaatgaaatgatgtatggcaggcgagcggataaaacccgagagttggtgaaatctcatctttatgagatgcttgaagatccaattgtggcaacaagcctaaaagtgggtatggataagcgtagtcttgacacctttaaagatacaattattgataaatccatcgatgcaacgatggtgcctattcgtgatcccaaactcaatgtttctcgagccaataaaatttttggattatttgaaagtcgtattcgtgccctaactcctaaagagtttcaaaatttattaagaccagcttttcaagaagatgagatcaccttaattatcttaggtggtatcacgggatttttggcaggttggttacatttggtgattgtctttttt

SEQ ID NO: 26758 - DNA, 1725 bp, Moraxella catarrhalis
atgaatattcaagcaattttaaacgatgaaattaaaaaggcaatgatcgcagctggtgcaggcagcgaggttgaggctttggtgcgtcaatccaataaaatacaatttggggattatcaagccaatggcatcatgggtgctgccaaaaaactgggtatgaatccacgagagtttgcccagacggtgcttgatcatttaagcattgatgatatcgccgaaaaacttgagattgcaggccctggatttattaatattttcttaaaaaatgagtggatatctagacatgccaatcaagccaatatcagtcgcactttgggcgtaaataccgcccaaaatgataccgtggtggttgactactcctccccaaatgtcgccaaagaaatgcatgtcggtcacctgcgttcaaccatcatcggtgatagcgtcgtacgcacgcttgaatttttaggtaataccgttatccgtgctaaccatgtgggtgattggggtacgcagtttggcatgctcatcgcttatcttgaaaaggtacaaaatgacgatgtcaaggatttggatttatctgatttagaagcattttatcgtgcagcaaaacacgcctatgacagcgatgaagcgtttgccaaaaagtctcgtaattatgtggtaaaactccaaagcggtgatgagtattgcttaacaatgtggcgaaaacttgtagatatcaccatggcacaatgtcagcacacttatgaccgcctaaatgttaccttaacgcgtgatgataccatgggtgaaagcctatataatccaatgctgcccagcattgttcaaacactcaaagataaaggtttggcggtcgaagatgatggtgctgtggtggtttttttggatgaatttacaaataaagcaggcgatccaatgggcgtcatcatccaaaaaaaggatggcggctatctttacacaaccaccgacatcgctgcagcagcttaccgctatcatacacttcatgctgaccgtgtcattttgtttaccgatgcacgccaaaccctacatgcacagcaagcatggctcatcacacgcaaggcaggatttgtacctgatgaatttgtcatggagcattttacctttggtatgatgcttggcaaggatggtaaaccttttaaaacacgcacaggtggcacggttaagcttgccgatttgcttgatgaagcaatcgagcgtgcaaccaccctaatcaagcaaaaaaatcccgatcttagtgctgaagaaaagcgtgctgtcgttgaagcggttgccattggtgcggttaaatattccgacctttccaaaaatcgtaatactgattatgtgtttgattgggataatatgctgtcatttgagggcaatactgcaccctatatgcaatatgcctatacacgcattcgctcgatttttgcgcgtgcagggcttgatatggcagatattggcggtgagattgtgattcatgaagataaagagcgagccttggcggtcaaattacttcaatttgaagaagtgctattattggttgccaaagacggtatgccacatctattgtgtcaatacctatttgaattggcgggtattttctcaagtttttatgaagcctacccaatcctaagctctgatgataagacaaagacctctcgcctacgacttgcagcactgaccgccaaaactctaaaacaaggcctgcaattacttggtattaagaccgtagaaaaaatg

SEQ ID NO: 26759 - DNA, 1176 bp, Moraxella catarrhalis
atgaacgcctaccgtctatctgatattgcccaatcttatggcaaagcccccaaagacatcaaagtcatcgttggcatgtctggtggtgtagacagctcggtatcggctgttttgttacaacaagcaggctttcatgttgaaggcttgtttatgaaaaattgggaagaagatgatggtagtgaatactgcaccgccatgactgatttggctgatgcccaagcggtggcggataaaatcggcatcaaattacacaccgctaactttgccatggaatattgggacaatgtttttgaacattttttggcagaataccaagcaggacgcacgccaaaccctgatattttatgcaacaaagaaattaaatttaaagcctttttggattatgcgtctgggccacaatttggacttggggcggattttatcgctacaggacattacgcacgccgtggttttagccaagatggcaaggcccagttgctgcgtggtttggacaccaataaagaccaaagttattttttacacgctgtggggggcgacaaaatcgccaagacacttttccccatcggtgaacttgaaaaaccacaagtgcgagccattgcccaaaaatatgaccttatcaccgccaacaaaaaggactccacagggatttgctttattggtgaacgcaagtttaaggattttttacaacagtatttacccgctcaaaaaggcgatatctacaccgatgatggcataaaaattggcacacatgatggcttgatgtattacaccatcggacagcgtggcggcattggtattggtggtgtggcaaatcgccccgaagagccgtggtttgtgttacacaaagacctgacaaataaccgtctcatcgtcggacaggggcatgaccacgccatgttacaatctgacgagcttaccgcttataaactggattggggaattgctccgcctgctcagatttttggcaagcaaggttttagatgcaccgccaaaacccgctatcgccagagtgaccaagattgtaccgtctttgcccttgatgagacaggtgatacagtcaaagtggtgtttggtgatgcccagcgtgcggtaacacaaggccaatcggtcgtgttttatgatggcgacatttgcttagggggtggggtgattgatgggacaaatgcaaagatttat

SEQ ID NO: 26760 - DNA, 1326 bp, Moraxella catarrhalis
ttgattttattgttattttttgttaaaattataagccatttatcaaaattcatcataccaatgcttcatcaaaacccaccaaaatattcatttaaccatcaaaaaatcatcatcattgctttggcttatgttggcgtcatcacaggcgctggtctatcttctggtcaagagatttttcaatattttgcaagctttggcaaaatgggcatgataggcgttgtgattttagggattttgcacgccatttttgggggtattattttggcattgggttcgttttatcgtgccaatgaacacagccaagtccttgataacattgcaggtccttgggtgaaaaaattacttgattggtcattgattatcagtggttttaccttaggctttgtcatgattgctggtgctggtgctaatttaaatcaagaatttggggcacccacatggcttggggcagccctttgttcgttattggtgattggcattagcatgctaaactttgaaaaagtcaccgctgtaatcggtatctttacacccattgtggtatttatcatcttcgctttgacactctacacctttgttggtaaaagctacgattgggattaccttgaccgcattgcgttatcagaacctcaaatttttcccaatgcatggctgtctttaatcaactattacgctttgtgtattatgacaggtgcatccatggcgtttgtgcttggtggtaaaaccatgtatgtcggtgaagctgcccgtgggggatttttagggggtgcgctcatcggcttaatcagtgcttgcaccgcttttaccatctttgccaacattgatttgattttagatgctgacttacccatgcaattattggtggcaaatgttcatccatggcttggcactttgatgagttttatcatttttgccatgatttttaataccgccatcagtttatattactcgctggccaagcgtttttcaggtgatgacaaccagcgctttaaatggatattgattggcttggttttggtcggctttatcttaagctttgcaggttttaaaaaactggtctcaatcatgttccccatcattggctacattggtatgttgcttcttgtcgtgttgttgttggcatggataaaaaaccataaaaagattaaaaccgagcgtatcaatcgccgccatatttatgctttgatgcaaaaaaaattagacgattcacaaagttttaataaaaccgatgaaaaacagttaaataaattgattgaaaattcggttattaatgaccaagaaatcaagcaagacatgactcagctggttaaagacaacctagataaatca

SEQ ID NO: 26761 - DNA, 828 bp, Moraxella catarrhalis
atggctatggcaaagttttatcagtatttcaatcgcaccttggtggcatcagatgatcgtatggatgatcgagcatttgcttttggtgatggattttttagcaccatcggcgtacgccaaggtcagatactttttgctcaactgcatcacatcagaatcacgcatggcttaactatttttaagcttaatttggatgttgatgagatgatgacttgcttaagtaagcttgcccatcaaatgacagaaggcatcataaaaattatcatcactcgaccaagacagagcatgcgtggctatggttttttgtcagtacagcccgcccaagtgttgattaaagtgatgccattagccatttatcaaggcgtatcgtttatcaaaggtgtacctatccagccaaccataccacgccaaatggtctgcttgacacacaagctatctcatcgcccaccacacttagcaggaattaagctgattggtgcaacagaacagatttttgcacacgcagagctactttatcatcagagcatggatgatggcattttagatggtttggttggcaatgtgcatggtgaatggatttgtgcgacgatggggaatgtgttttatcgtcttgggcagaattggtacacgccgttggttgataaatcaggtgttttgggggttatgcgatgtgccgttattcaaagtgggctgcttggtgatgttaaagagcgtttatttaccaatgcagatcttgatttcgtcaatggcttaatcacaaccaacgcagttcgtggtataaccgccatgtcaatgcttaatgggcgtcaattgacgcatctttttggt

SEQ ID NO: 26762 - DNA, 1386 bp, Moraxella catarrhalis
ttgaatacttctcccacttcaaatgtcgctcgtctacagcgaaaccttggtttatggcatgtgatcattatcggtcttgcctacattcagcccatgaccttgcttgatacctttggtgtggtatctcgtgatagtagcggtcatgtacccatgtcgtatatttttgctttgattgcgattttgttgacttcggtgagttacggtcacatgattcgtgcttatccttcatcgggttctgcttatacttatacccaaaaatctattaacccatcaatgggctttatggtcggttggtcaagttggcttgattatttattatctccgttagtaaatatcattttggcggtgatttatttagaagcattattccctgcggtcaatcattgggtttgggttattggtttgacggcactgatgacgggcgttaatctttttggctcaaaagctgtggcctattttaacagctggattgtttttgtacagctggctgtcattgcagtctttgtttttttaacttacaatgctctgtcagcaggtcaaaatgccgatggtatcattagccctgaaaatgcttaccatctttggagcatggcacccttttgggacagcatgacctctgttgcagcactcattacaggtgcaaccattttgtgcttctcatttacaggatttgacgcactctcaacattagctgaagaaaccaaagacgccaaaaacactctaccaaaagcaatgattttaacgactttgattgctggcgttgtatttattatcagcacttattttatgcaactgtatttcccaaatcatccagaaacttattttaaactcattgatgaaacacaacctgaaattttagaggctgttggtggtgcggtatttaaggcggtggtacttggatttgccatcgttacagtcatggcatcaggaatctcagcccatgcaggcgtttctcgcttgatgtatgtgatgggtcgtgatggtgtgattagcaaaaatatttttggtaaaattcacccaactttatttacacccgtcaataatattctcatcgctggtgttgtcgcactaaccgctggctttgtcacatttgaatcggtgataaatctaatcagttttggtgctttgacagcatttagctttgtcaatatttctgtgttattccattatgtctttagaaataaatatgtgcataatgcaaaagatgtattaagctatatcatcgtaccaattgcaggctttatcagtgtgtttttaatgtggttaaaggttgacaaactaacctttgaagtgggtctattttgggctgccattggctttatctggcttggcatcaaaactcgtggttttaaagcacctgtcccacagtttaaagaagaagatgtt

SEQ ID NO: 26763 - DNA, 5838 bp, Moraxella catarrhalis
atgccaaatcccacagcacgggggggggatagctgtgctacagggcaagttggcagtgtatgcactctgagctttgcccgtattgccgcgctcgctgtcctcgtgatcggtgcgacgctcagtggcagtgcttatgctcaaggtatcgcaattggtcaacaaaacaacaactcaaaaggcgatgccgaggcgacaggtaatcaatccgttgctcttggtgaaaaagctgttgcaagtggcagtcaagccatcgccatcggtggtagccaaaacaaatcaaataatagtaaagtatcaggtgccaacgccaaaggtgaagagtccatcgccatcggtggtgatgtattggctcagggtcctgcctcgattgccatcggtagtgatgacttatatttggagagtaaaggcttgtatacactcccagaagagattaaaaaacttattgaaaaacattcagaattaaacagaatacgaaaactggatcccaatagtaatcaaaaatatttacacacaaaagcacaaggacacgccagtattgcagtgggaaccatggcacaggcagagggtcattttgccaacgcttttggtacacgggcaatagctaaaggcaactattccttggcagtgggtcttaccgccaaagccgacacagaatcttcaatcgctcttggttctaatgcacaagctagcaagtttgcagcgatagccattggtggaaatactaaatctgagttgggtcgaggtgttgccctaggttataattctcagatcactgctaatgataataatctaaatggagcctataaaccagacggtgaaacattacacaaggatcatgaagccaccaaaaacggtcagccgaagaatacagtggatatattttccattggtaatagtgatctcagacgtagaatcatccatgtcggtgcaggtgttgatgccaccgatgcggtcaatgtggcacagctagaagcggtggtgaactgggctaagaagcgtaaaattacttttaagggtgatgacagtactggcgtacaaaaaggtttcgacgaggagttaactattaaaggcgggcgagcaaatgccggtgaattaaccgacaataacatcggtgtggtaaaagataatgataatggtggtggtctgaaagttaaacttgctaaaaatttaactgatcttgaagcagttaacacgcaaaacctaaccgccacaggtgcaatcaccgtaaataataatagtactaccaatacggctacattattggctggtggtttaactgttaaagatattcataacaaacaaatccaagtcagtgctgatggcattaaatttactgatatgaatggtggtacatcagccccagtagcagccggcactactcgtattaccagagatacaattggctttgccaaagaaggtggtacagttgatgacaattcaccatatttggataacgcaaagctaaaagttggcaatgttgagattaataaagacactggtattaatgcaggtaatcaaaagattaccggacttactgatggtgcagacgatgccgatgctgttaccatcaaacagctcaaaaacgccaagcctaatttaaccccaggcaatggcattgagattaacaatacaaacagtctattagttgatgctgctaatggtaatgttacccccccatcttataccattggggtgaaaaccaccactctgaccaataatggccctagtgatagtaaatttgctgttaaggatagtaatacgcataacaatagcttagttaccgccaaagatttggcaggctatctaaatgaagtcaatcgaacggctgacagtgctctacaaagctttaccgttaaaggtggtgatgcagcaagcaacaacagcatcacgctagataaaaccagcaacagtctaaccgtagcaggcgataacggcattactgttaaaacggatacaactcagaaaaaagtcacggttggcattgaccaagccaatggcttaaccacgcctaagctgaccgtgggtagcaatagtaaaactcaattggttattgagcaaatggttatcggtaacgacaccaaaaacatcatcaaagggctgtcctcaacactgactgacattaccaacacagataatacacacaccacagaacaagacaatgacgcccaaggcaaagaatccaacgctgccagtatcaaagatgtgctaaacgcaggctttaacttgcaaggcaatggcaagcccgttgactttgtctctacttatgataccgtcaactttgccaatggcgatggcaccactgccacagttacctataattataatgaaggcaaaccaaccagcacagtggtctataatgtcaatgtggatgatacaaccattcatctggcaaataataatggtaataaaaaacttagcgtaaaaaccaccacattgaccaaaacaaatggtgcaaatggtaatgcaactaaatttagtgccaacaatggcgatgcccttgttaacgccaaaggtattgccgacaatctaaacatcctagccgaggaaattcacaccaccaaaggcacagcagacaccgccctacaaacctttaaagtcaaaaaagacggtgcaaccaatgatgatgacaccatcaccgtgggtaaaaatgccgtcgacaccctaacattcaaaggtgaaaacggtctaacggttgctaccaaaaaagatggtacggttacctttggcattaacacccaaagcggtcttaaagccggcgacaacaccactctaaacaaagatggcttgtctattaaaaaccccactggtaacgaacaaatccaagtcggtgctgatggcgtgaagtttgccaaggttaataataatggtgttgtaggtgctggcattgatggcacaagccgtatcacccaagataaaattggctttgctggggctaatggctcacttgataccaccaaaccccacctaagcaaagacggcattaacgcaggtggtaaaaagattaccaacattcaatcaggtgagattgccaaaaacagccatgatgctgtgacaggcggtcagatttatgatttagaaaccgaacttaagaacaaaatcagcagtactgccaaaacagcacaaaactcattacacgaattctcagtagcagatgaacacggtaataactttacggttagtaacccttactccagttatgacacctcaaagacctctgatgtcatcacctttgcaggtgaaaacggcattaccaccaaggtaaataaaggtgtggtgcgtgtgggcattgaccaaaccaaaggcttaaccacgcctaagctgaccgtgggtaataataatggcaaaggcattgtcattgacagtaaagatggtcaaaataccatcacaggactaagcaacactctagctaatgttaccaatgatggtgcaggacacgcactaagccaagggcttgccgataacaccgacaaaacccgtgctgccagcattggtgatgtattaaatgcaggctttaacttgcaaggcaatggtacagcggttgactttgtctccacttatgacactgtcaactttgccgatggcaatgccaccaccgctaaggtgacctatgatgacacgagcaaaaccagtcaagtggtctatgatgtcaatgtggatgatacaaccattgaagttaaagataaaaaacttggcgtaaaaaccaccacattgaccagtactggcacaggtgctaataaatttgccctaagcaatcaagctactggcgatgcgcttgtcaaggccagtgatatcgttgctcatctaaacaccttatctggcgacatccaaactgccaaaggggcaagccaagcgaacaactcagcaggctatgtggatgctgatggcaataaggtcatctatgacagtaccgataacaagtactatcaagccaaaaatgatggcacagttgataaaaccaaagaagttgccaaagacaaactggtcgcccaagcccaaaccccagatggcacattggctcaaatgaatgtcaaatcagtcattaacaaagaacaagtaaatgatgccaataaaaagcaaggcatcaatgaagacaacgcctttgttaaaggacttgaaaaagccgcttctgataacaaaaccaaaaacgccgcagtaactgtgggtgatttaaatgccgttgcccaaacaccgctgacctttgcaggggatacaggcacaacggctaaaaaactgggcgagactttgaccatcaaaggtgggcaaacagacaccaataagctaaccgataataacatcggtgtggtagcaggtactgatggcttcactgtcaaacttgccaaagacctaaccaatcttaacagcgttaatgcaggtggcaccaaaattgatgacaaaggcgtgtcttttgtagactcaagcggtcaagccaaagcaaatacccctgtgctaagtgccaatgggctggacctgggtggcaaggtcatcagcaatgtgggtaaaggcacaaaagacaccgacgctgccaatgtacaacagttaaacgaagtacgcaacttgttgggtcttggtaatgctggtaatgataacgctgacggcaatcaggtaaacattgccgacatcaaaaaagacccaaattcaggttcatcatctaaccgcactgtcatcaaagcaggcacggtacttggcggtaaaggtaataacgataccgaaaaacttgccactggtggtatacaagtgggcgtggataaagacggcaacgctaacggcgatttaagcaatgtttgggtcaaaacccaaaaagatggcagcaaaaaagccctgctcgccacttataacgccgcaggtcagaccaactatttgaccaacaaccccgcagaagccattgacagaataaatgaacaaggtatccgcttcttccatgtcaacgatggcaatcaagagcctgtggtacaagggcgtaacggcattgattcaagtgctgctggcaagcattcagtggcgataggtttccaggccaaggcagatggtgaagccgccgttgccataggcagacaaacccaagcaggcagccaatccatcgccatcggtgataaagcacaagccacgggcgatcaatccatcgccatcggtacaggcaatgtggtagcaggtaagcactctggtgccatcggcgacccaagcactgttaaggctgataacagttacagtgtgggtaataacaaccagtttaccgatgccactcagaccgatgtctttggtgtgggcaataacatcaccgtgaccgaaagtaactcggttgccttaggttcaaactctgccatcagtgcaggcacacacgcaggcacacaagccaaaaaatctgacggcacagcaggtacaaccaccacagcaggtgccacaggtacggttaaaggctttgctggacaaacggcggttggtgcggtctccgtgggtgcctcaggtgctgaacgccgtatccaaaatgtggcagcaggtgaggtcagtgccaccagcaccgatgcggtcaatggtagccagttgtacaaagccacccaaagcattgccaacgcaaccaatgagcttgaccatcgtatccaccaaaacgaaaataaagccaatgcagggatttcatcagcgatggcgatggcgtccatgccacaagcctacattcctggcagatccatggttaccgggggtattgccacccacaacggtcaaggtgcggtggcagtgggactgtcgaagctgtcggataatggtcaatgggtatttaaaatcaatggttcagccgatacccaaggccatgtaggggcagcagttggtgcaggttttcacttt

SEQ ID NO: 26764 - DNA, 1035 bp, Moraxella catarrhalis
atggcattggtttcattacgccaattattagaccacgcaggcgagcatagctatggtttgccagcgtttaatgtcaataacctagagcaaatgcgtgccatcatgatggctgccgataagacagactctcctgtcattgtacaagcttcggcaggtgcacgcaaatatgctggtgcaccatttttgcgtcatttgattttatcggcgattgaagagtggccccatattcctgtggttatgcatcaggaccatggtactagccccgcagtctgtcagcgttccattcagttgggatttagttccgtcatgatggatggatcattgcgtgaagatggcaagactccagctgattatgagtacaatgttgccgtcacaagagaagttgttaagatggcacatgcttgtggtgtgtctgttgaaggtgagattggtgtgcttggcagtcttgaaactggtatggcaggcgaggaagatggtgtgggcgctgaaggcgtcttggatcacagtcaattactaacttctgtagaagaagcacgccaatttgttgccgataccaatgtggatgcacttgccattgcggtcggtacttctcatggtgcttacaaattcactcgcccaccaacaggcgatattttggcgattgaccgtatcaaagaaattcacgaagctttgccaaacactcatatcgttatgcatggttcaagctcagtacctcaagagtggctaaaaattatcaacgaaaacggtggtaatattggcgaaacttatggcgttcctgttgagcaattggttgaggcgatcaagcacggtgtgcgtaaaattaatatcgataccgacttacgcttggcaagtacaggtgcggttcgtaaatttttgaacgaccatccagcagagtttgatccacgcaaatatttgacagcttcaatgaaggcaatggaggagatttgtgttgctcgctacgaagcttttggtgctgcaggtaacgcaagcaagattcgtccaatcagcttagaaaaaatggttgattattatcaa

SEQ ID NO: 26765 - DNA, 2151 bp, Moraxella catarrhalis
atgatttatcaaggaaaaaatattcaggtcgatttttttgaccaaacacaaggtatcgtgcagtttcattttaatgccactgatgaaagcgttaataaatttgatcgcaaaaccactcaagaatatcaagaagcggtaacagtacttgaaaaccgtgatgatattcaaggcttaatcgccacttcaggtaaatcggtgtttattgctggtgcggacattactgagtttaccgaatattttagtcgctctaaagatgaaattgaggcatggcttttggatatcaatcatatttttaatcgctttgaggatttgcccttcccaaaagtggcggcgattaatggtgcagcgttaggcggtggctgtgagatggctttggtatgcgattaccgtgtggcgggtatttctgcccaaattggtttgcctgaaactaagcttggtatttttccaggttttggcggttcggtgcgtctgccacgcctgattggtattgataacgcccttgaggccattgcgacaggtaaggcttatcgacctgatgaagcacttaaattgggattggttgatgcggtggtggctgatgagctgcttgagcaggcagcggctgatttggtcaaaaaatgcttattaggcaagtttgattggcaggcgaagcgtcaagaaaaacaagtaccagttaagctcaatcagctggagcaggcaatggcatttaattcggctaagggtgtcatttttgccaaagccaatccaaaacattatcctgcggtggcgattgcccttgagaccatcgaaaaacacgccaatttaaaccgtgatgatgcgattgcccttgaagccaaaggttttacaaaagctgcaacaaccccacaagcggccgccttggtcggcttatttttaaatgaccaaacagttaaaaaacttgccaaaaagcacagtcaaaatgcacaaaccatcaagcaagcagctgtacttggtgcaggtatcatgggtggcggtatcgcttatcaggtagcggtcaagggcttgccaattattatgaaagacattcaagccaagcagttagaccttggcatgaatgaagctggtaaactgttatcaaaagaggttttgcgtggtaaatcaacgccagctaagatggctcaaaccttaagccacattcgcccaaccttaaactatggcgattttggtgaagttgatattgtgattgaggcggtcgttgaaaatcctacaatcaaagaagcggtattgtctgaggtggagagcttggtaaaacaagagaccattttggcctcaaatacctcaacgatttctatcactcgcttggcgaatgccctaaaacgccccgaaaactttgtgggtatgcacttttttaacccagtacatcgcatgccgttagttgaggtgattcgtggcgagaagaccagcgatatcgccattgcaacaacggttgcattggcacaaaaaatgggcaaaactccaattgtcgtcaatgactgcccaggatttttggtgaatcgtgtgttatttccttattttggtgcgttcgatttgctggtcaaagaaggtgccgattttgttagtattgataagaccatggaaaaatttggctggccgatgggtcctgcgtatcttttggatgttgtgggtatggatacaggcgtgcatgctgccaaggtgatggcagagggtttccctgatcgtatgaagccagattataaaggtgcaacgcagctgatgtttgagcatgagcgtttgggtcaaaaaaatggtgttggtttttatcaatatgaaactgataagcgtggcaaacctaaaaaaattgccgatagtaccacttatgagctgttaaacttggttcaaactggcgatcagacttttgatgagcaagaaattatcgaccgcatgatgattgcattttgcaatgaaaccgtacgctgcttggaagataatatcgtcgcaagccctgctgaagctgatatggcgatgattatgggtgtgggtttcccaccatttcgtggcggcccttgccgatatatcgaccaaatcggtgtcgcaaactatgttgcattgtgcgataagtacgcatatttaggcaaggcatatgaagcacctgccaaattgcgtgatatggctcaaaatggcgagactctttac

SEQ ID NO: 26766 - DNA, 1170 bp, Moraxella catarrhalis
atgacaactctaagtccaaaagatgtagtaatcgttgatggtgtgcgtacggcaatgggtaaaaccaaaaatggtatgtttcgccatgtgcgtgccgatgatttgtcagccaagctgattttggcactgattgtacgcaatgatattgatccaagcgagcttgaagatgtgatttggggatgcgtgaaccaaacacttgaacaaggctggaatattgctcgttatgcagccttattggcaggcgtaccaaaaactgtggcagctcagactgtgaaccgtttgtgtggttcatccatgcaggcgttacataccgctgccgctcagattatgaccaatcaaggcgatatgtttatcatcggtggtgtggagcatatggggcatgtgtcaatgatgcatggcgttgacccaaacccaaaggcgtctaaacactatgccaaagcatcaaatatgatgggtctgaccgccgagatgctaggtcggttaaacggtatcacccgtgaagagcaagatacctttggggtgcattcgcataaaaaagcatgggcagccacccaagcaggccgttttgataatgaaattgttggcgtagaaggacatgattctgaaggtaatctgcagttatgcactgtcgatgaggtgattcgtcctgatgctaatttagaggcattccaagcacttagacctgtatttgaccccaaaaatggtacagttactgcaggcacagcctcggcactgtcagatggtgcttcagcaatgcttatcatgtcagcccaaaaagccaaagatttggggttaaaacctcgtgcacgcatccgtggcatggcggtggcaggatgtgatgctgcaatcatgggttacggtcctgtgcctgctacccaaaaatccttaaagcgtgctggtcttaatctgtctgatatccaaaccattgagctaaatgaagcgtttgctgctcaaggtctatcggtactcaaaggcttggatttacttgacaagcaagatatcgtcaatcataatggtggtgcaattgcgttgggtcatccgcttggctgctctggcgctcgtatcacaaccacgctgttaaatgtcatggagcaacaagatactcagctggggcttgcgaccatgtgtattggcttaggtcagggtatctcaaccatcattgagcgtatc

SEQ ID NO: 26767 - DNA, 1320 bp, Moraxella catarrhalis
atgattaacgaatttgataccgcccatttgtggcacccttacacttctatgacgaaccctttgccagccttgcctgttgcttgtgccaaaggttgtcaaattcatctacaagatggcacggtactcatcgatggcatgtcatcatggtggtgtgccattcatggatacaaccatcctgttttaaatgccgccatcaccgaacagctcaccaaaatgtctcatatcatgtttggtgggctgacacacgaacctgccatcaaacttgggcaattattgcttagcattgtcccaaaaccgcttcaacacattttttatgccgattcagggtcggttgccgttgaggtggctttgaaaatggcggttcaatatcagcatgctttgggcaagaccaccaaaaacaacatcatgacaacccgctcaggctatcatggcgatacttggaatgccatgagtgtttgcgaccccatcacaggcatgcaccaaatttttggggatgctctgcccagtcgcatttttgtggatgcaccaacgattaagattgatgacccttgggatgatgcggccatggacgatattcgcttggcatttaagagacaccataaaaacttagcggcttttatcattgagcctattgttcagggggcaggtggcatgcggttttatcacacaaattatctaaggcagctgcgtaaattatgtgatgaatatggggtgttattgatttttgatgaaattgccacaggctttgggcggacaggtcgtctgtttgcttgccagcatgccaaggtagtgcctgacatcatgtgtttgggcaaggcattaacgggcggttatatgacattgtcagccgtactcaccacaaccaaagtggcacataccatcagccatggtaaggtgggtgcgttcatgcacgggccaacatttatggcaaatccattggcatgtgctgtggcactggcaagtgttcagcttttattacaaagcccttggcaatatcatgttcggcgtattgctcggacatgtcgcatgacattaacccatcttaaacagttgccacatgtcgctgatgtgcgtattttgggggcgattgcagtggttgagatgacagacccggtagatatggcaatcattcaacaagaatgcgtcgcacgagggatatggattcgcccctttggacggctggtttatctgatgccaccatttatcatcagcgatgatgagctggcaactttattgcatgagtttaccgatttaatctgcacaaccttatcacccaattttaaaaaacagtcaatgaacccaataatcaatgaagatgaa

SEQ ID NO: 26768 - DNA, 1200 bp, Moraxella catarrhalis
atgatgaatgaccagttattaaatttttatgccgaacagctgtctgctttaaaagcatcgcacaatcaccgccaattacaacgcttaaaacatcaagggcaacgcattggtgtcaatgacagcaagcctttgctcaatttagccagcaatgattatttgggcattgccagtcaaacatcactttatgaagaattcttagagctgctgcatgaacagcgttggccgtttagtgcgtcttcttctagattattgacagggaattttgaaaattttgagcgattagagaccaaaatggcatcattatttggtcgcccttgcttattatttaatagtggttatcatgccaatatcggtatcttacctgccatttgtgatgataaaacggtgattttggcggataaattggttcatgccagtatcattgatggaatgcaattggctgccaaacatggcaccaaaaccatccgctatcaacatcaaaatctcccccagcttgaaggattaatccaaaaatatcaatcagataatggcatttgtcgtatcattgtcgttaccgaaagtatttttagcatggatggcgatatcacaaatttatcccatcttagccatttaaaggcacaatacccaaaggtgatgctttatgttgatgaagcccacgccatcggtgttcgaggtgggcgtggtttgggctgtgtggaagaatatggtgttatcaatcaagttgattttattgtcggtgcatttggaaaagcattggcatcagttggcggatactgtatttgccatcccattttgcgtgattatctgattaataaaatgcgtcctttgatttttagtaccgccttaccacccattaacattgcttggagctgttttattttagagcaaatacctttgatgaaccaaaggcgtaagcatctgatgaaacttagtgatgatttatcaaaagtggttcacttggcaaagctgccatgcccctctgccagtcaaatcattcccatcatattgggtgataatgctcgtacactaaatgccgccgctgatttgggcagacaaggctatcatgtgctggctgtacgcccaccaaccgtaccaaaagggcaatcacggttgcgaatttgtttaaatagtaccattaatgatgatacaatgacaaagtttacccaagtgcttactcaaatcgtcagaggtgagagtaaa

SEQ ID NO: 26769 - DNA, 1707 bp, Moraxella catarrhalis
atgaacatacaagctctactgcctcgttgggttttacagctcattcagcacccacgcactgctttatcagacattccagctgggctgatgatggcagtgctggttattccccaaagtttaggctacgcaaccttagcaggattaccgcccatcatgggtctgtatgccgccattacccctgtgattgtctatgcatggataggcgccagtagcgtctcctccatcggtcctgtggcaattactgccatcatgactgcatcggcactgtctggctacgctacaggcagcttacaatatatttcacttgccattgttcttgcctttatggtaggcgggattttattgattgctggactggttcgtttgggctggattatgcagtttgtcagtcgtggtgtcgcctcaggatttatcagtggggcagcggtattaattatttttagtcaactcaagcacatcattggcatacctctaaataccgacagcttaatcaacttatttttaagtatttataccagcaatcagcccatccatttgccgacagcgttacttgggattggtgccaccttgttatttattatcagccgttatggtgaggcgatgatttggggctggctacccgctcagtggcgcggctttggcaatcgcttttttgtcattttaattgttgccacctctatttggctcagccatcatatcggatttgagcaaatgcagatcagattgctacaacctttgcccacaggattgccaaagattaccttacccaatttttctgtaaccactttactagatttattaccctcggcactcttgatcgcactaatcgcttttatctcatcaagtacgatctctgcacagcaggcacggatacgaggtgagtcatacgatgccaacaaggaacttggtggcttgggcttagcgaatatcaccagcggcctctttggtggttttgcggtctcagggggcatttcacgcaccagcctaaacctatctgtgggtgccaaaacaccattggcatccatcatttgtgctttgggcgtattgctgattttgcttgttttcgggcaatatttgacaggcctgccctacgctatcttagcagcagtcatcatcagctctgtcatctcaatgattgataccaaaaccttgatcaatgcatggcagctggataaatccgatgccatctgttttggcattacttttttcacctcaattcttttcggtttaaatagcggtttggttgtcgggcttttggcaagttttgcaatgatgatttatcggacacaccaagtacacattgcgatcgtggggcgtgttggcgacagcgagcattttcgcaatattgagcgacatacggcaactacttttgatgggctgttacttttacgcatcgatgaaagcctgtattttggtaatgctcagtctgttcatgccaatttaatgcgattatctgatgataccaacattcatgatattgtgctgattatgactgcggtcaatcatatcgatttatccgcccaagagatgctatgtgcctttaatcaaagctgtatcaagcgaggtcagcacctacatttggccgaggtgaagggccctatgatggatattttaaagaccagtcctgtgattgaaaatctgtcagggtgcatttttttaagtgccaatcaagccgtacaaagtctaactaagcctagcacagatctt

SEQ ID NO: 26770 - DNA, 267 bp, Moraxella catarrhalis
atgatgttaacgaataaagatcgtgaagcggtaattgcaaaatatcagcgtggcgagaatgatactggtagcccagaggtgcaagtggctttattgaccgctcgcattaatgacttacaagaccatttcaaagcacacaaagccgaccaccacagtcgccgtggtcttatccgcatggttaaccaacgccgtaagctattggactacctaaaaggtaaagatttgaaccgctatactgacttaatcggttcattgggtctacgccgt

SEQ ID NO: 26771 - DNA, 2085 bp, Moraxella catarrhalis
atgtttaatcccattcgtcaagaatttcaatatggcaaccaacaagttgttttagaaacaggtcgcattgctcgccaagccaatagtgtgcttgtgcatatgggcggcgtttcagtcttggttgctgtggtcgtgcgtcctgaagccattgctggtcaaaacttttttcctttgacggtgaattatcaagaaaaaatgtacgcttcgggaaaaatcccaggcggttatggcaagcgtgaaggtcgtgcgtcagagtttgagacgctgacttctcgcttgattgatcgcccaatccgtccgctatttccagagggctactttaacgaaattcaggtaacagcaacagtcatttcatcagataaaacccaagatgctgacattgcagcgatgattggtgcatcagcagcgttagcaatttcaccagcaccatttaatggtcctatcggtgctgctcgtgttggttttatcaatggcgagtatgtactcaacccaactttggctgagatgaagcaaagtgatttggatttggtcgtggcaggcaccaaatcagcggtactgatggttgaatctgaagctaaagagctatcagaagaccaaatgctgggggcggtgctttatgggcatggtcagcagcaggtggtgattgataatatcaatacattcgcccaagcggtaggcaataccaagcaagaatttgtcgcccctgccatcaatgaagagctaaatactcagctaaaagagcagttcaccgctaaagttagtgaagcctacacgattaccgtcaaacaagaccgctacgcacgcttagatgagcttgccgcagaagctttggtactggcaggcgatgagacaagtgatgactatgccgataaagtcgcccaaattaaagagctatttgaaaccctaaaatatcgtaccgtgcgtgataatatcttatcaggcaagcctcgtattgatgggcgtgatttggagactgtgcgtgccttggatattcaagtgggcgtcttgccttatacacacggctcggcactgtttactcgtggcgaaactcaagcgttggttgtaaccactttgggtacaacacgggatgtgaaccttgtggatacgctggcaggcacaaagcaagatcactttatgctacactataatttcccacattattcagtgggtgagacaggtcgtgaaggtgcaccaaaacgccgtgaaattggacatggtcgcttggcacgccgtggtgttcaggcgatgttacctgccgctgaacgcttcccatacaccattcgtgtggtctctgaaatcaccgagtcaaatggttcatcatctatggcgtctgtctgcggtgcgtcgttatctttgatggatgcaggcgtgccgctaaaagcccctgttgcaggcatcgccatgggactggtcaaagaaggtgagcgttttgctgtgctgtcggacattttgggtgatgaagaccatttgggcgatatggactttaaagttgcaggttcggtaaatggtatcacagctctacaaatggacattaagattgaaggcattaccgccgatattatggaacaagccctaaaacaagcacacgcaggtcgtatccatatcctaaatgccatgaatgaggtcatcgcaacctctcgtactgagattaacgctcatgcaccaaattatgccaccatcactatcaaccctgaaaaaatccgtgatgtgattggtaagggtggggcgaccattcgtcagctgactgaggatacaggtgcaaccattgatattgatgataacggcacaattcgtatttttggtacagataaagcatcaacccgtgccgccattactcaaattgaggcgattactgccgaggttgaagtgggtacagtgtatgaaggtacggttgctcgcattgttgattttggggcgtttgttaccattttaccaggcacagatggtctggtacacatcagccaaatctctgatgagcgtgtggagaatgtgagcgattatctaaaagaaggtcaaactgtcaaggttcaagttcaagacattgataatcgtggtcgtattaaattaaccatgaaaggtgttgaa

SEQ ID NO: 26772 - DNA, 669 bp, Moraxella catarrhalis
atgagccaatttactttaaatggtgttgcgcgtgctgaatcgcagcagggtaaaggtgcgagccgccgcctgcgtaaagacaatcttgttccagcaatcatttacggtggtaatgatgaggctgtggccatctgtgttaaaaccaacgaaatcgttaaagccttgtctaacgaaagctttttttctagcgttatcaccatcaatctagatggtgctgagcatgaagttatcatcaaagcacttcaacgccacccatcaaaaggctttccattacatatcgattttcaacgcatcgttcgtggtcaaaccatgaatttcaatgtgcctgtaaatatcatcaatgaagacagctctgtcggtaaaaaagaaggtggtattcttacaatcttggtgaatgatatcgaagtgaattgcttaccacgcaacctaccagaagccattgaagttgatgtagcaaaccttgccatcggcgattctattcatcttagcgatgtcacactgccaaatgaggtaactttggtgacgcatgatgaagctgacctaaaccgtaccatcgctaccatgcagccacctgctgtcattgaaactgctgatgatgccgaagcttcaaccgaagagacaacagaagcagaagtagcaccagctgacgctgaagagactaccgaagag

SEQ ID NO: 26773 - DNA, 1185 bp, Moraxella catarrhalis
atgaataaaatgcttccgaatctggcagatcgagcaatttttaatttgggtttccgaatattttttgcaagtgcggcggtatatgctgtgattagtatggtgctttggctatttgtatatcgtggcggcgtgtttagtgcccatatgagcattgcaccgcaatattggcatggtcatgaaatggtttttggctactcaatggcagttgtggcaggatttttattgaccgctgttggtaactggacaggaaaaaccatgccgagcggacaacaactttatcttatttggttgccgtggttatttgcacgcattattttcattgttttaccacagtttttatggctaggtgtattggcagatattgtatttacgattttatttttaataagtattacaaagcctgtgataaaaaccaaacaatggcgacaaatgggcattttatcaaaaattatcctaatgctgattgcaaatttattctgtcttgcagcaacattaggctggcacattggttggtattatgcactttatttaggggcttttgtgattatcggtcttgtccttaccataggaaggcgggtaacgcctttttttatctcacggggtgtgggctatgcgtttgaaccacgcaataatcactacatcgatcgcatcagcttgattagtttcgtgattttcttcttgcttgaggtttttgcctcacagcagctgcttgccagtttatgtgcgttggtttgtgcattagtacaagcttggcggcttcaagggtggtatacgcaagggatttggaaaaaacctttgctctggagtatgtttatttcgatggcctgcattgtatttgggcagctcatgtattttttgcgaattttccaatttggcatcaccaattcattagcaatgcatatgatggcagttggcggcattggcatactcagtctttctatgatggcacgcgtcagccttggacactcagggcgtagcatccatcaaccaccaaaaacagtgccttgggctatcagtttattaagcgtggcaacagtttttcgtgtgattttaccgtggcttatgccacaacatctggtaatatggatcattcacgcacaaatattatggttgatagcctttttcttgcttagcgtcagctacatgaatatatggcgaacacctcgtattgatggcagagcagga

SEQ ID NO: 26774 - DNA, 2208 bp, Moraxella catarrhalis
atgtcggacaaatcaccaaatcctcatttttcccctgagcaagtgcatgaaattactgagcaatttgccatcagtggcatgacttgccaatcgtgtgccacacgcatcgaaaaagtactaagcaaaaagtccgccattcatcaagcgacagtcaattttgcaacagaggtattgcatatctcttatgatgccaatcagaccaatcgtgatgaagtgatggcttgggtggcaaaaacaggctttgaggctgtgccaatggcggatcgccaagaccaacacaagatgccttgggatttgatgattctttggggattgtcattaccgttttgggtaggtatgcttggtatgttgtttggatcacacgcattgatgatgcctgtgtggattcagtttatcttggcaagtgtggtgcaagttgtgttcggtgcacgcttttatttgggtgcttgggcgagcattaggggcgggcttgctaatatggatgttttggttgcacttggtacaacagcaatttgggcatattcaagctatgtatggctgaccgatctgcacgccatgcatatggtatattttgaagcatcggtgatggtcattgcatttgttaggcttggtaaatatcttgagcatcgcaccaaaacacaaagcctaaacagcttaggcttattgacgcagctgattcctacagaagtcaatcggcgtatcgatgataaatgggtcaaaaccaacattgagcatattaaagttggtgatgtgctactggcgaatactggtgataagatcgccgtagacggtgtggtgcaaggcggatttggtgtctgcaatgaatctcatctgacaggtgaaagcttactcattgataagaatatcggtgatacggtgtatgcaggcagtagcgtagaagatggctcaatacactaccaagcagccgcaacaggcacaaaaactcagcttggtgatatgatgtcagcacttcaagatgcacaaggtactaaggcagatattgccagatttgctgataaagttgcagccgtctttgtgcctgtggtggtggcattggcaatgatgagttttttggtcaattatctacttggtgcagagtttgatatcgcattaatgcgtggcgtcgctgtgcttgtgattgcttgcccttgtgcgcttggacttgcaacacctgccgcgattatggcaggcatgggcacagcagcacgccatggtgtatggtttaaagatgcggtcagccttgagtctgctggtggcattgataccatcatttttgataaaacaggcacgctgactttgggtcatccaagtgtccaaaaaatccaatgcttaagcagtaagataaataaatcgcaggcccttgagttgacagccagcatagagcagtacgccagccaccctttggcaaatgccttggtggaagctgctaaagataaaaatttacctttatatgaggtatctgatatccaaagcaccaccggtcaagggctgatggggtatgttgatggcatcggacaactaaaagtggggacgcccaaatttattggtctagagacatggcaggcagatgatcagtggtcggatacaagtttggttgggttagccatagatgatgagccgatggcggtctttgggctaagcgatacattaaaggcagacgcacacagcatcatcagccgcattcatcatgatgggatcaaaacttatttaatgagcggtgatcgccaatcggttgtcgatggcgtcgcaaatcagcttggcattaccgccgcgtttggacaaatgtcgccacgagataagatgtccgccattgagacattaaaaacccaaggtaagcgggttgttatggttggtgatggtgtcaatgacgcacctgcgatggcggcatcacacgccagttttgcagttggcagtgccactggcgttgctaagcataccgcatcagcacgcttgttaggcgattcactcaaccatattttttatgcttatcgtatcgcgcgcatgactttaaccaatattaagcaaaacttcttttttgcactggtttataattgtatcggtattccattagctgcaatagggctacttaatcccatgatggcggcagctgcgatggcactaagttcaatctcggtgctgttaaatgccatgcgactaaagcgtgtacagcttacaccaaacgatatgcactcagataaatccgtgggc

SEQ ID NO: 26775 - DNA, 966 bp, Moraxella catarrhalis
atgtcacagacagtaaataccaccacacaacaaaccgcaccaaaaaaattggtggaagtgaaagatttggaaatctcttttggtgaaggtaaaaaacgcttcgttgctgttaaaaatgcaaacttcttcatcaataaaggtgaaactttttctttggttggtgaatcaggcagtggtaaaactaccattgggcgtgccattatcggacttaataacattacaggtggtcagattatctatgatggtaaagtcattagtaatcaacctaaagatgcagagctgatttgtaagattcagatgattttccaagaccctgccgccagcctaaatgagcgtgcgacggttaattatatcatctcagaagggttatataattttaaattatataaagatgatgctgatcgcttagcaaaaattaaacaaatgatggcggaagttggtttgttacctgaacatctgacacgctatcctcacgaattttcaggtggtcaacgccagcgtattggtattgccagagcattggttatggatcctgaatttgttatcgctgatgaaccaatttctgcattggatgtctctgtgcgtgcccaagtgttgaacttgctaaaaaaaatgcagcgagaaaaacatttgacttatttgtttattgcacatgatttgtctgtggtgcgttttatttctgataggattgctgttatttataaaggcgtgattgttgaaatcgctgaaactgaagagctgtttaaaaatcctattcatccgtatactaaatcattgttgtctgctgttcccattccagacccgatacttgagcgtaaaaaacaactgattgtatatgatcccacgcagcatgactattctagcgatgagccaggcatggtggaaattaagcctaatcattttgtttgggcgaataaacaagagcttgaacgctatcaacaacacatttcaaaccaaacagtcgta

SEQ ID NO: 26776 - DNA, 903 bp, Moraxella catarrhalis
atgacaaaactctaccaaagaacggtagccaaagcaatcacagcaacaggtatcggactacatagcggcaaaaaagtgacactcactttgtcgcctgccaagcctaatacaggtatcatatttgaacgcaccgatattggtgcaacagttccaatggcagccgagcttgtacaagataccatgatgtcatctaatttggttttgggagatgctagaattggtacggttgagcatttattatcagccattgcggcttatgggcttgataatttaatcattcaagtggatgcagcagagattccgattatggatggttcggcggcaccttttttgtatctgattgatcaagcaggtatcactgagcaagatgaactcaaaaaattcattaaaataatttcaccgattgaagtaaatgatggtgacaaatgggcacgccttgagccttatgataagggctttttgctagattttgagattgattttaatcatgccgccatcgctgctactgaacaaacaacacagcttgattttaatactgcaaatttcgccgcagaagtggggcaggcgcgtacttttggctttctaaaagacatagaatatctgcaaaaaaataatttggcactgggcggtagcttggataatgctgtcgtacttgatgagaattctgtggtcaatcaagatggcttacgctatcccaatgaatttgtccgccataaaatgctagatgctgtgggtgatttatttgtgattggacaccctttacttgcgaagttttctgcttataaatcagggcatgcactgaataatgcactgatccgagaggtattagtggataaaagttgctatgaaattgtaacattttatgacaaaaaatcttgtccaattaattatgtagctgctgtt

SEQ ID NO: 26777 - DNA, 354 bp, Moraxella catarrhalis
atggctcgtattgccggtgtaaatattccggacaacaaacatgctgtgatttcgctaacttacatttttggtattggtcgtacaactgctaagcaaatccttgctgctgttggtatcgaagaaaccactaaaattggttcgttagatgattcacaactggatgctgttcgtgcagaagttgcaaactacacagtagaaggtgatcttcgtcgtgaagtttcaatgaatatcaaacgtttggtcgatcttggttgctatcgcggtcttcgtcatcgtcgtggtctaccagttaatggtcagcgtactaaaacaaatgcgcgtacccgtaaaggtccacgcaaagcaattaaaaag

SEQ ID NO: 26778 - DNA, 390 bp, Moraxella catarrhalis
atggcaaaagacactcgtagccgcaaaaaagtggctcgtcgttcggtatctgaaggtatcgcccatattcatgcgtcttttaataacaccattgtaacgattactgatcgtcaaggtaatgcattggcttgggccacttctggtggacaaggcttccgcggttcacgcaaatctacaccatttgcagctcaggttgcagctgaggttgctggtaaaacagcacaagaaacctatggtgttaagaatgttgatgtcttggtaaaaggtccaggaccaggtcgtgagtctgcggttcgtgcactgggtgcattgggttataaaattaatagcataagcgatgtaacaccaattccacacaacggttgccgcccacccaagaagcgccgcgtt

SEQ ID NO: 26779 - DNA, 639 bp, Moraxella catarrhalis
atggctcgttatattggtccaaaattaaaattgtctcgccgtgaaggtactgacctgcaattaaaatcaggtgtaaagccttacgatgttaagacaaaaaaagcaggtcgtgtacctggtcagcatggtaatagccaaaataaaacctctgaatacgcatcacaacttcgtgaaaaacaaaaagttaaacgcatgtatggtgtattagagcgtcagttttctaactattataaagaagcagcacgtgagcgtggtgcaactggtgaaaacttgttggttacccttgaacgccgccttgataatgttgtttatcgcatgggctttggtgcaacgcgtgcagaagcgcgtcaattggttagccatcgtgctatcatgctaaaaaaagctggtcgtgatgagtttgtacgcgttaacattccttcaattcaagttcaagatggtgatgtgatcgcagtgcatgaaaaatcaaaagagcaacttcgtattaaaaacgcagttgagcttgcgacacagcgtggcatcccagcatggttagaagttgatcacagtaaactacaaggtactttcaaatctgcgccagagcgtagtgaattaccagctgaaatcaatgaaaacttaattgttgagctatattctaaa

SEQ ID NO: 26780 - DNA, 1002 bp, Moraxella catarrhalis
atgacaaatgcaactgagtttctaacaccgagtgcgattaatgtcgatacggtcaatgaaacgactgcaaaggtcacgctcgagccgttagagcgcggttttgggcatacgctaggtaatgctctacgccgtattctactttcttcgttatcaggtgctgcagtagtagaagctgagattgaaggtgttgatcatgaatattcaacactagaagggttgcaagaagatgtactcgatcttcttttaaatctgaaatctttggcgattattctgcatgaccagaatgaagcatatttgactttggataaacggggtgcaggagttgtgactgctgctgatcttgagctaccacacaatgttgaaatcgctaatcctgatttggtgcttggcacattgagtgagcgtggccatctgaagatgcgactacatgtagtaacaggtcgtggctatgagcctgccaatcagcgtcgtgaagatgccaattctaaaattattggtcgcttaaagcttgacgcaagctttagcccaattattagagtggcttatgatgttgaaaatgctcgtgttgaacagcgtaccgatcttgataaactgattatcgagcttgagaccaacggcacgattgacccagaagaagctattcgcaaagctgcaacgattctacaacaacaaattgctatttttgtggatcttgaagctgaagaagcgcctgagcctatcaaagaaaaagaagagattgatcctgtgctgttacgcccagtggatgatcttgagttaacggttcgttcggcaaattgcttgaaagctgaaaatatttattacatcggtgatttggtacagcgttcagaaactgaactattgaagacaccaaatcttggtaagaaatcattgactgagattaaagatgtgcttgcatctaaaaatcttgaacttggtatgcgtttagataactggccgccaagtgatttgcgtgtcgatgatcgtttttcttatcgtagccgc

SEQ ID NO: 26781 - DNA, 357 bp, Moraxella catarrhalis
atgcgacatcgtaaaagcggagtcaagctgggtcgcaccagcagccatcgtaaggctatgttccaaaacatgactaattcattgtttgagcatgagctaattaaaaccactttgccaaaagcaaaagagcttcgccgtgtggcagagcctttgattactttggcaaaagaagatagcgttgcaaaccgccgtcttgctttcagccgtatgcgtaataaggatatggttggtaaattattcagtgagcttggccctcgttaccaaactcgtccaggtggatatttgcgtatcatcaagtgcggttttcgtgatggcgataatgcaccaatggcttatgttgaattggtagatcgtcca

SEQ ID NO: 26782 - DNA, 720 bp, Moraxella catarrhalis
gtgactaaaatctctatgaagacaatgactgtaaagccatggcattctgcattgatgataattgtattgattgcaatttttgggttgttgaccaactacttattaaataatgaaacagttaaacccattgttatagaaccaaatcagctaaccaaatcacagtttggtgcactgcagcaggctattgaaccgattggtaaagtacaattttttggggcagatttggtaaaaatccaccaaactatcagccagctgacttgggtggaatctgctaatgtgcagcgtgattggaataatggcgtggttgtttcggtcattgcacgcaaacctattgctaactttggtagtgatagattgcttgatgccgatggcgtcgtgtatgagcctgccgaaagcagtcagctgatgaatcctaatttggttaatttgcatgggcaagataccgaatctcagcagatcatgcaaaagcttaagcggatcaatacttggtatgcgcctttagatgttcaggttcaggatttgattttgacacctcgtcaaacttggattatacgatttaataatggcatgcgtatcatggttgatcatgaagatgcagagcaaaaattgtacaatttagccatacagttgcaaagtgctttggcaaatgattttggacgcattgactctgtggatcttagatataagaatggttttgcaatcgcttggcgtaaccaagct

SEQ ID NO: 26783 - DNA, 1296 bp, Moraxella catarrhalis
gtgactcttcaagcggtaatacatattagctctacggctgtctgtacagtggttgggtattttgaaaccaaaggtttggaaaaacaccttagggtttcggctgtcggcttggcgcacacagatgctttttttggtggtcgcgttgatcatcgtgaatatcttttatcggcaattcataaatctgttcgtgaggccagcgatatggcgggtttacaaatcatttcacccgtcttgtgcatggcatctgccatgatgaatatgcagaatatgagtaatgaggttaatatcgatacagctgatcgtatggtaaccccagagcatattcgtcaagcaactcaagcgatgtctgatcaaatcataagccaagaccgtgcaccgtttcagatgaatcgccaattgatttttttagaagattatcatgtccaagatgccaaagggttgatgacggataaaatttgtgtggcaagtcatgtaattgatatgccaaccaatcagttaaaacagatgatcagcttggttgaacaagatgatttgcaggttgcatcatgtctgtttgatgggattgctggtgctgaatacgccttatctgaggatgaaaaacaagcgggggtttgttttattgatattggtgcgggcatgactaaggtgtgtatctataaagatggtattttgatttatagccattgcttggatatgggcggtgtgaccgtggatatggacattgccaaagagtgcggtattttacttgcagacgcggacagctttaagagacaagaaggaacattgaatcgtcataaatattcgtcaggtgctgtggtgacctataaacgacataccaaacacgaaaaaaccatgctcagacgagagctaaatcaggtcatagaggcacgctatcgcaagctatttgataaagtcattgatgaaattgatgcatctttattggttagtttggatgctggaattgtcttggcaggcggtggttcgtctatggatggattacttgattttacaagaaaccatatcggcatgaaagtacggctaattacgaataatccaagggtgaaattggatcctgagcgtctatctgacgataatattaagctacttaataagcatctgtgcgataatacgctacatactgcgatcggtgcacttttatttatgggtagcgctcaatatgctcgtgatcagcagacccaagaagctgatgaactggatgattcttggatgactgagcgtgtgagtatgatcagccagctttttggacaatttaatggggggattaagccaggtttt

SEQ ID NO: 26784 - DNA, 2721 bp, Moraxella catarrhalis
atgagtactgtcaaagtcccccacattttctaccaaaaacgcacccttagccttgccatcgccagtatttttgctgccgtggtgatgacaggctgccgctctgatgacatcagcgtcaatgcacccaatgttacccaactgccccaaggcacggtttcaccaataccgaacacaggtcatgacaacaccaataacaccaacaatcagggcaacaacacggataacagcaccagcacaactgacccaaatggcgataacaaccaactgacacaagcacaaaaaactgccgccgccgcagggttttttgtgatgggtaaaattcgtgataccagcgaaaaaaatgacccagattataccaaagatttacaaggcagcgtacatacagcagggcaaggcttacagtacttaggcaccaaagagcctcggccagatggcacaggtacaggtaaaaacttacgccagcccatcacagctgatgacattacaccactttattttgataaattccccaaaatatccgatctgcacctagaaaacagcgagcatgtgtttgatgctaaaaaagcaaataacatcaaaatatatggttatggtgcattgtcatcacctgccaaaaacccaacctacatgaattatcaacaagaacaaaacatcaaaaacaaaaaaccaggcgatgattatcaaaacattcgttttggctatatggagctaagagagctggacctaaataaaaaaggtgcagacacccagagcgacaagaaccgtgccatcattttcaccacacctactttattttatcatggtgagaatgccagcacccatctgccaaaggcgggtaaatttgactatgagggcaattggttgtatctgaccgatgtcaaaaaacgcccatttttagataaaacagacgataaagtaggcacttattttaactcaaccagaaaatcaaatgaaggcgatttggtgagtgcagcacacatttatctaaacagctttaaatataaacacaccccggccacttatagcgtggactttgatcaaaataccctaaaaggcaaattgtcttattatgacaacccaaacaagcaaacagccgatgggcgttatatcagaagtcagtttgataccgacaaaaaggtcaatgaagccgatgtctatgagattgacgccaagattaatggcaaccgctttactggcacagccaaatctttgattgatgataacaccaataccgcaccttttgttaaagagctgttctccaaaaaagccaatcccaacaacccagaccccaactcagatacgctagaaggcgggttttatggtgagtcgggcgatgagctggcgggtaaatttttatccaatgacaacgcaacttttgtggtctttggtggcaaacgagacaaaacgaccgaacctgtcgccacaaaaacggtgtattttagtacaggatttgaaaaacccagcaccagctttgttggcaatgaagagattggtagcattattgacggtaaaaagttaaatgatgaagtcaataatcaaattgaagatgaaactgtccctgtcagtaataaagaatattatgaatataattatggacgacccaacaaacaattcaccaaaaaaataaacgccagcgtccaaaaaaaccctgcttattttggtcagcatgataagttttattttaatggtaactattatgacttatcagccaaagaagcaaacaagcttggtgtctcccaagataccagcaccaataagagtattttggctaaatacccagatgccaaagtaagcacagacaataaagttaccaaaatcgttctacaacaagccaaagataagccgtataccgccattcatgccaaaagctatgaccacatcagttttggtgaagtattgtataatgataacaaaggcaacccaacacgcagttattttgtgcaaggcggtcaagcggatgtcagtactcagctgcccagtgcaggtaaattcacctataatggtctttgggcaggctacctgacccagaaaaaagacaaaggttatagcaaagatgaggataccatcaagcaaaaaggtcttaaagattatatattgaccaaagactttatcccacaagatgacgatgacgatgacgatgacgatagtttgaccgcatctgatgattcacaagatgataatacacatggcgatgatgatttgattgcatctgatgattcacaagatgatgacgcagatggcgatgacgattcagatgatttgggtgatggtgcagatgatgacgccgcaggcaaagtgtatcatgcaggtaatattcgccctgaatttgaaaacaaatacttgcccattaatgagcctactcatgaaaaaacctttgccctagatggtaaaaataaggctaagtttgatgtaaactttgacaccaacagcctaactggtaaattaaacgatgagagaggtgatatcgtctttgatatcaaaaatggcaaaattgatggcacaggatttaccgccaaagccgatgtgccaaactatcgtgaagaagtgggtaacaaccaaggtggcggtttcttatacaacatcaaagatattgatgttaaggggcaattttttggcacaaatggcgaagagttggcaggacggttacatcatgacaaaggcgatggcatcactgacaccgccgaaaaagcaggggctgtctttggggctgttaaagataaa

SEQ ID NO: 26785 - DNA, 474 bp, Moraxella catarrhalis
atgttgaaagttgcaagcatttttgagccgatattgacaggtgatgataggcctaagctgttgcatgactatcctgtcgttcatgtgcagccaattgcatggggcgatatggacggctttaatcatgtgaataatgtggcttattatcgctatgctgaatcggctcgtattgcctacatgcgtgcgattggttttatggcagcacgagaggatttattgacgattttagcaagttcatccatacagtatcgccgtcctgtaacctatcctgatacgctactaatcggcgtgcgtattaagcacctcggtagcaccagtgttgtccaagaatatgcaatgtacagtcaagcccaacaagcgctggttgcaagcggtgaagcggtcattgtccgcacggatatgaacatggtcaagatgccgtggtcagatgaggagcgtgctttgattgaacggtttgagaaccgtcgttttgat

SEQ ID NO: 26786 - DNA, 3153 bp, Moraxella catarrhalis
atgtctcgtttttttatacatagaccgatttttgcttgggtgattgcaattctcatcatgctggtcggtattttggcaattaataatttgccgattgaacaatacccaaaaattgcaccgcctcaagtaaaggtgcgtgccgtctacccaggtgctgatgctgagacggttgaaaactcggtcacgcagatcatcgagcagcagatgaaagggattgatggactgatgtacatgtcatcaaattcatcagcggcagggtctgcctctgtgactttaacatttgaaaatggcactgatccagatactgcccaagtacaagtacaaaataaattacaatctgccatgagttcattgcctgaaacagtacaacgcacgggtttgaatgttgaaaaatctgccagcgattttttgatggtgacagcttttgtgtctgaagatggcagtatggatcagtcagatattgccgactatgttgcaaccagtattgttgatcctatcagccgtgtggagggcgtcggtggtactaatgtgtttggttcatcttatgccatgcgtatttggcttgatcctgccaaattgcgtgcctacaacttgataccgtcagatgtctcatctgccatcagatcccaaaatgttcaggtttcagcaggacaattaggcactttgccaaccaatactgaccgtgtggtgattaatgcgaccgtcagcgtacaaagctatctgcaaacaccagagcagtttgaagatatcttattaaaaacagatactgcaggcgctcaagtacgcatcaaagatgttgctcgtgtcgagcttggtagtgaaaattaccaatttagagctcagtataacggtcaagcagcatcaggccttgccattatgcttgcaccaggtgctaatgcacttgaggtgcgtgaagcggtgggcgtgcgattagatgagctgtcgcaaaatttcccaacaggactaaaaatggtcgtgccttatgacacaacaccatttgttcgactgtcaattacacaagttgtatatacgctgttagaagcagttgtactggtttttttggtgatgttcttatttttacaaaactggcgagcgacaatcattccaactttggcagtgccagtggtcattttagggacttttgcggtattatcggtgtttgggtatagtattaatatcttaaccatgtttgcgatggtacttgccattggtcttttggtggatgatgcgatcattgttgttgaaaatgttgagcggattttggaagaaaatccatctatccaagtgatggatgccaccattcaatcgatgcgtgagattagtaaggttgttattggtattgcactgattttatcggtggtttttgtaccgatgattttctttggtggatcctcaggcgtgatttatcgtcagtttgcggttactttgatgaccagtatggcactgtctgcatttattgcacttgtgtttacaccagctttgtgtgtgaccattttaaagcgtcaagcacataaagatatcaacattcaaacaggattttttggttggtttaaccgctttttttatcaaaccagtcgtcgttatgaaaactttattggtaaaacttatgcctcaaaattggcgtatttagcagtatatactggcattgtggcggttatggcattgatctttatgcgactgccaagctcatttgtacctgaagaagatcaaggtgcggtcatgactttggtgcaactgccagcaggttcaacacttgataagaccaatgcggtgatggataaactggcaaattattatcatgataaagaaacggataacatcgaatcggtgtttacgatttctggatttggcttcatgggcagcggccaaaattctggtatggcatttatcaaactcaaagactgggatgagcgagcaggcagtgaaaataccgctcaaagtattgcacgccgagcaatggtgatgaatatgatgatcccagaggcaagtctgatttttccaatcgcaccgccgccaatccaaggctttggtaataccagcggctttgatttacaattaaaagatgttggcggtgtaggtcatgaagccctgctggatgcacgcaatcagctgatgggtatggcgatgcaaaatccagcgattgcctcgattcgcccaggtggtcaagaggatgcacccaaactaaaagttgacatcaatcaggcacaagcagccgcttatggcgtacctttgacagcgatcaatgataccattgcacaagcgtggggaggcagctatgtgaatgatttcattgatcgtggacgcatcaaaaaagtctacatccaaggtgagccagacagccgtgtggtgcctgaggacagcaatcgctggtatgtgcgtaatcaatctggtgagatggtgagctttggtgctttttctggcagtcaatgggaatatggcagcccaagtttggcgcgttataatggtgtgtcttcgatggtgttgactggcagtgctgccctaggtgtgagtacaggcgatgccatggaggcgatggcacaaatggcatcacagctgcctgctggcattgattttgagtggacaggtctgtcgcttgagcaacaaaaatcagggggtcaagcaccaatactatatgccttatcaattttggtggttttcttgtgtttggcagcactgtacgaaagttggtctgtgccttttgcggtcattttggtcattcctttgggggtaattggctctttattactcacaaaaatccatgggcttgctaatgatgtatacctacaagttgccctattgactgtgataggtttatcggcaaaaaatgccattttaatcattgaatttgccaaagaaatccaagaatctggtcaaacgctcaaagcgtcaatcatgatggcggcgcgtatgcgtctgcgtccaatcatcatgacctcgcttgcttttggtgtgggtgttgtgccactatatattgccacaggtgcaggttcaggcagtcaaaacgctgttggtacgggggttttgggtggggtgttgacatcgacattcttggggatattttttatcccaatgttttatgtttgggtgcgtacgctatttccctataagccaaaagctcagcctgtaacccatgctaaatctcatgaacatgtt

SEQ ID NO: 26787 - DNA, 897 bp, Moraxella catarrhalis
gtgtattttatgtcttattctatgaccaaatccattcgccaccgtaataaagtcatgacttttgatgtgccaaaggtgatgggcgtacttaatatgacaccagattcattttcagatggggggcgttttaaccatttggatgctgctttggttcacgccgagcagatgatcgcctatggtgttgatatcattgatattggtggagaatccacacgcccccatgccccaaaggttagtactgatgaagagcttgagcgtgtgatacccatcatcgccgctattcgtgaaaattttggtgaagatttgtggctttctgtggataccagtgaccctgcggtgatgcttcaggcaattggtgcaggtgccgacattgtcaatgatgtgcgtggtctaagccgagagggcgcttgtgatatggtggctgatcttgagtgtcctgtggtcatcatgcacagccgtggtacgcctgataccatgactcagacgatgaatgagttgacaagttataacgatgtgcttgctgagattagcactgagcttcaaataagaattgataaggcgatggacgcaggcattaggcaagaaaaaattatcattgatattggtatgggattttcaaaaaattatgaacatcacattcaaattatgcaaaatttacagcaaatcattcagcattttcagatgcctatgttgtttggcgtatcccgcaagcgatttttgggtgaggttttaaccaatagcggacttgagtatcttaaaaatcatcaaccgattgagagagataatttggggacgcttgcacattttatcgcactacagcaaggcgtgcatattgtgcgtgtacatgatgttaagccgatggcacaagccgtgcgactgtggcaggcgttatacggc

SEQ ID NO: 26788 - DNA, 738 bp, Moraxella catarrhalis
atgccaagattttttgttgatacaccgctcaccaccaacctgattggacaaatcatcgccctgcctgatcatgtcacacatcattggtgcaaggtgctgcgcgcttcggttggtgattgtgcctttttatttgatgggatgggcggtgagtacacagtaacgctgacacatattcataaaaaatctgccagcgtcaagattgacgcctatcaccccatcaaccgtacgccaccgtttcgtgccagtatcggcttggtgatgagccgtggtgatcgtatggattatgccatacaaaaagccaccgaaatgggcgttcattgtattcatctattgaccagcgaccgttgccaagcccacctcaaatacgacagagattttaagaaactcacacattggcaaagtgttgccgtcgctgcttgtgagcagtgcggtatgaatatcattccaaacattatcgcacccatcttacttgatgaatgggtggccaattgtcaagatgaactgaaactggtacttgcacttagtgaaaataaccctacttttaacaaacttgtaccaaaaaatatcagcctgttgatcggtgccgaaggcggcttaagcccaagggagattgatttggcgattcatcatggttttgtgccatggcagattggcgagcgtgtgcttcgtacagaaactgcgcccgtggtcgccttgagtgcattgacacttttggctagcctcaaccaatcaccactt

SEQ ID NO: 26789 - DNA, 246 bp, Moraxella catarrhalis
atggtagttattcgtctagctcgtggcggttcaaaaaagcgtccattttatcaagttgttgttgctgataagcgcgcatctcgtgatggtcgttttatcgagaaaatcggcttttttaacccaatggcacgaggtcaagaagttgaaacccgcattgatttagaagcttataatgcttggattgccaaaggtgcacagccaacagagcgtgttgcttctttagtcaaagctttgaataaagctgct

SEQ ID NO: 26790 - DNA, 504 bp, Moraxella catarrhalis
atgattaagattgctaccttaaaaaaaccttacggcatcaaaggttggctctgggtttttagccagaccgacgaaagagccagcatttttcagatgcaaccttggtggatgaaaacggcaacagggtttaagccattaactgttaaagattggcgtatccaaggtcagggtttggttgcttgctttaatgaagtgcctgatcgcaatgttgctgaaacgatgaacggtacgagtatttgggtttgtaaagaccatttacctaagcttgctgatgatgaatattattggtcagatttgatcggtttgactgtgatgaatgagcaagcagaaaatcttggggttatcaaagagatgtttgagacaggcgctcatgagattatctcgcttaagccaacagcacagagcattgataatgaacctcgtttgatcccatggcatagcgatgtggtgctttcggttgatttgagtgctgggacgatgcttgtagcttggcagtctgattat

SEQ ID NO: 26791 - DNA, 1494 bp, Moraxella catarrhalis
atgaaccaacctacaaatcaatctacgacccaaccctcatcgattccgcttaactgccccaatctgctaaagcaagcctgtttgattgatggagagtgggttggtgctgattctggtgagaccatcgcagttaccaatccattcacaggcgatgtgcttggtacgatacctagcttatcaaaacaaaccgttctaaacgccgttgagtgtgctgatgctgcccaagaaagctgggcaaataccaccgccagtgagcgtgccaaacttttgcatgcttgggcggatctgatcgatacacacaaggaagatttggcactgatcatgacctatgagcaaggcaagcccatcacagaatcacaaggtgagattgattatgccaatagcttcatacgctggtttgcagatgaaggcaaacgcatctatggcgatgttattccaagtaccaatcagtcgctacgctatgtggtactcaagcagccagtcggtgtgtgtgctgcgattacgccttggaatttcccttcggcaatgattgctcgtaaagctgcacctgcgttagcggctggctgtaccatgatcatcaagccagcggttgagacgccattttcggcattggcactgggatatttggcaaaacaagcaggtattcctaaaggtgtgttacaaattgttactggtaaatcctctgtggtcggcgaggtactgaccaaagatccacgcattcataagctgtcattcacaggttctaccgaagtggggcgagtactgatggagcaatgtgcaagcaccatcaaaaagctgtctatggagcttggcggtaatgcaccttttatcgtctttgatgatgccgatcttgaaaaggcggcagaagggctgattgcttcaaaatatcgaaacgctgggcaaacttgtgtgtgtgccaaccgtatctatgtccaaagttcaattaaagatgagtttttagcgaaatttaaacaaaaagtagaagtactgaaagttggcaatggtgctgatgaagcaaccgatatcggaccgcttatcaatcaacaagcactcaaaaaagtgcaggcacttttggatgatgcgctaaacaaaggggcaacgctaatcacaggtggcgtgccacatgacgcaagccaactgtcatttaccccaactgtcatcagtgatatcaccgatgagatggatcttgcccatgaagagatatttggtccgattgctccgatcatgacttttgaagatgaaaaagaggtaatccatcgtgccaatgataccatttatggattggcggcgtatttttatacccaaagccatgctcgtgcttggcgtgtttcagaggcactagagtatggtatggttggtcaaaatacagggcttttatcaactgaagttgcaccatttggtggtgttaagcaatcaggttttgggcgagagggttcaaaatacggtattgaagagtatattactaccaaatattggtgtatggatatcagcgaa

SEQ ID NO: 26792 - DNA, 645 bp, Moraxella catarrhalis
attctgacacctttattgatgctattttttagttttcatatgatggtgatggggctgttggtggtgtgggggaatttgcctgttcaaaattctgcttttatgctttggcataggttatcaggcggtcgtgttacccaaatttgggtagattatgatcacattgccaagtctgccaagcaagctgccattgccagcgaagatggtaaatttgttgcccattatggatttgattttgacagtatgcaaaaagccatgcaccgtaacgagagtcagggtgcggtatcggtaggcggctcaaccatcagtcagcagctggcaaaaaacttatttttgacatcgcatcgctcttatgtcagaaaagcagaagaagccatcattgttgtgatgatggaaaccttatggtcaaagcagcgtattttggaggtatatctcaatgttgctgaatttggcgaagggatttatggtattgaagctgcgtcacggcattattttgggcgttcggcagcaaatttaagccgtgatcaggcagctttattaatcagtttgttaccaaatcctaaatattatggtaaaagacccaatgccaagcgtcttaaaaataagcaaaggattatcatgcggcggatgaatggtgtgcagattcct

SEQ ID NO: 26793 - DNA, 381 bp, Moraxella catarrhalis
ttgatgcgatctcgctacagtgcgtttgtcattcaaaatattgattacatcgtacaaaccactctaccagctttgcaaccgcttttggatgtcgctgcactaaaggcatgggcagagcaaacttggtggacttatcttaagataatatctactacgcctaaaattggtaagcgtcatgcccaagtgcatttttgtgcgtattttgaagagttgggcgttcaagggtgtcataatgagtgttcggcatttgttaaaatcaatgaaaatggacaaaatcggtggtattttcttgatccgacattgccaatcactttgagtggcaagcagccatgtttatgcggttctggcgaaaaattcaaggtctgttgcggtaaattttta

SEQ ID NO: 26794 - DNA, 1104 bp, Moraxella catarrhalis
atggcaggtaataccattgggcaactatttactgtaacaacctgtggagagtcgcatggcacaggtttgatggcgattgtggacggcgtgccaccagggcttaagcttgatgctaaagatttacaatgtgagctcgatcgccgaaagcctggcacatccaaatttgccacccagcgtaaagaagaagataaggttgagattatctctggtgtctttgagggacatacaacaggcacaccgattgggcttttgatttataataccgatcaaaaatccaaagattatggcaatattgccaatacatttcgcccaaatcacgccgattatacttataccatgaaatatggttttcgagattatcgtggtggtggtcgttcatcagctcgtgaaacagccatgcgtgtggcagcaggtgcaattgccaaaaagtacctcaaagagcgtttgggcatcgtgatacgagggcatgttacccaaattggtacacaaaaagcccatgcacttgattgggacttggtgaataccaatccgtttttttgtggtgataaagatgccattcccagatttgaagcactggtgacatcgctgcgtgaacaaggcaccagttgcggtgctaagcttgagatatttgccgaaaatgtccctgtcgggcttggtgagcctgtttttgatcgtctggatgccgatattgctcatgccatgatgtcaatcaatgccgttaaggcggtagaaattggcgatggttttgatgtggtagctcaatttgggcatgaaagccgagatgagctaacgcctgatggatttactggcaatcatgctggcggcattttgggcggtatctcaagcggtcaacgcattcgtgttgccatcgctctaaagccgaccgccagtatcaccacacctggtaaaacaatcaatttggctggtgaagcggttgatgtgattaccaaaggtcgccatgatccttgtgtgggtgtgcgtgccacaccaatcgctgaggcgatgcttgcaatggtgattttagatcattatttgcgtcatcgtgctcaaaatgctgatgttgtgccaccaattgaaccgatcaataagccagcaacatcctat

SEQ ID NO: 26795 - DNA, 906 bp, Moraxella catarrhalis
gtgatggataaaatcaccatcagccttgacgatatttcggttcgatacaataacggacataccgctttgtatgatgtttcgctacatctacaaggcggtacaacctgtgccttggtcggcatcaatggtagtggcaaatccaccttatttaaggtgctgatgggactaattaaaccccaaacaggttatgtcaagctttgtgatttgaccatcgctcaagcacttaagaaaaatttggttgcctatgtgccacaaagcgaagaagttgattggcaatttcctgtatcagttttagatgtcatcatgatggggcgatatggacatatgaattttttacgccgaccaaaaccaaaggattaccaaaagattgatgaagccatgtcacgcgtccaaattaaccaccttgccaatcgacaaattagcgaattatcaggcgggcaaaaaaaacgggtatttttggcaagggctttggcccaagaaagtaaaatccttttattagatgaacctttcacaggcgttgatgtaaaaaccgaaaaagccattatgaatcttttagatgaattgcgtcaagaaggtcatctcattttaatctcaacacataatttagggacagtacctgaattttgtgaccaagttatcatgataaatcgtaccattttagcaatgggaagcaccaaaagtacattcacccaagccaatcttgaaaaagtttttggtggtgttctaaggcagctgcacttggtgggtgaagacttgcacgatgatgatgataaacgcactttgacgattttggcagacgatgaaattcctgctgtcttttatggtcatcatcaaaaccgcagctcttatcatcgcaaaaatgtcaaatccagcgaaaatccccaagctgagcaagaggataagtca

SEQ ID NO: 26796 - DNA, 960 bp, Moraxella catarrhalis
atgaccacccaaaattccgcactcgccgccagactcagtcgccaaaagcgacttgacggcgcttttgtttggacaaccaaactgtctgcactgcttgtacttttaactttaggcggtatcatgctgtcactagtctttggtgcaataccgagtattcgcgaatttggtttaaatttttataccagcagtaactgggatccagtcgctggtcagttcggtgcgttggcaccaatttatggcacaatcgttacctccattatcgcggtcgtgattgccgtgccagtcagttttggtattgctgtctttttgacagaactttgcccaaacttcctaaaaaagccattgggtatcgccattgagctgctggctggtattccatcgattatctatggtatgtggggtttgtttgtctttgccccttggttcggtgataccgtgcagccatggctaatcaatcatttggcaggactgccgatcatcggtcagatgtttgttggtgcgcctattggtatcggtcttttcacagcaggtttggtacttgccattatgatcattccattcatcgctgcgaccatgcgcgatgtgtttttggtggtgcctgatttgctaaaagagtcagcgtatggcatgggtgcgactacttgggaagttgttaccaaagttgtgctgccttataccaaagcgggtgtggtcggtggtctgattttgggcttgggtcgtgcgcttggtgagaccatggcggtgacttttttgattggtaacacctttaatatcaatacaagcctatttacttctggggtatcgatcacctcagccttggctaacgaatttgctgaagcctcaagcgagatgcacttatcgtcgctgctacacttaggtttgattctgtttgtgattagtttcattgtattatcagcctctaagcttatgctgatgaagatcgacaagcgagttgaaaaa

SEQ ID NO: 26797 - DNA, 837 bp, Moraxella catarrhalis
atgaatacacttaaccaaagtctaaatccaaccatgaacacagcgtttactaatagcaatactgatgacaaaactctaagccaaactgccgccaaagtacaagtgcgtaatcttgacttttattatggtgattataaggcgctcaaaaatatcaatttagatattttggataaaaaagttacggccttcatcggtccatcaggctgtggtaaatcaacgcttttgcgcacgctaaaccgtatgtatgacctgtactcaggtatgcgtgcaacaggtgagattatcttggataaccaaaatatcttagacagccgcgtcgatgttaacttgctacgcgcgcgcgttggcatggtgtttcaaaagccaaccccatttgctatgtcaatttatgataatgtggcgtttggtgtgaagttatatgaaaatttatctaaatctgagcttgacgatcgcgttgaatgggcacttcaaaaatctgccctatggaatgaagtaaaagacaagttgaaaaaatcaggtctatctttatcaggcggtcagcagcagcgtctatgtatcgctcgcagtgtggcgacgcgccctgaagtgttgctacttgatgagccgacatcagcactagaccccatatcaacaggtgcgatcgaagagctgatccatgatctaaaacaagactataccatcgcaatcgtaacgcataacatgcagcaagcggttcgctgctctgacttcaccgcttatatgtatttgggcgatatgattgagatgggcgaaactagccaaatcttcaacaatccgcaaaatcaagcaacggcagattatatcgctggtcgtcacggc

SEQ ID NO: 26798 - DNA, 1047 bp, Moraxella catarrhalis
atgatgaaatactctgcggtcgattttggtttattggtagagaatttgaccgatggtattgtggtcatggatatgagtcgcttgataattgagtacatcaatcctgccgccaaaagcttacttgccatcacctctaatgatacgcatgctcctatcttgccaagtatgatatttaaaaatagcgtatttaaaaagctttatgatatttatcaagaccaaagcttgcccagttcgttttaccaaaatcaccctacaattataggtaatgtcctaaatctaagcttgatgcgactggttgataatcgctgtgctgtcatcatcaaagattatacacacatgcagcagcttgagcagatgcggacagactttgtgggtaatgtatcgcatgaattacgcacgcctttgacggtgattttgggttatcttgaaaattttacactaactgatgatattaaacctgcatggatgcgtggactaaaactcatgcacgagcaagccattcgcatgaatgacttaatcaatgatttacttatgctgtcacgccttgaaagtgacgaaaccaagccaatggctgaggtcaacatgccacgcctgttgatgcaggtgtttgatcaagcgtctgccagcaatcaagctgggcatctgattgatattcatctggacactgataaaaatattttgggcattgaggcttatttgtacagtgcaattattaatttggttttaaatgccatcaaatatacaccgtcaggcggcatgattgatatcatttatgaagaagatgatggcgatgtacatctgtcggtgacggataatggtattgggattggtggcgagcatcttgggcggctgactgagcgattttatcgggtagacagtgggcgtagccgtgcgacaggtgggacggggcttggacttgccattgttaagcatgtgctaaataagcataacgcccgcctagaaatcagctcagaagaaggcgtcggttctatgtttcgtatcatcttccctaaaattcaaaccatctctacacagaccttgtcaaca

SEQ ID NO: 26799 - DNA, 909 bp, Moraxella catarrhalis
atgattgtccgagataaatcaaacagtttcaaactactatttgcatggcgtggcacagtgctacccaaagtgttgccaacgatattaggtatcatggtactgtctttcatcgctggttttgtggcacagtttcagtggtattatattgccaccgtgcctgcggttggctttacgatgtttggtgtcatcatctctatttttttgggatttcgtaataatgcttgctatgatcgatggtgggagggtcgtaagctttggggtgctttggttgctaatacgcgtcatctaagccgtgatagccatcttttagcaccaaatgagcgagaatcactactgtatcagatgctactatttgtggcgatacttcgtgatcggttgcgtggacaaaatattcagcgatcacagtttggctacacgaagattgatgatcattatttggattggcttgatcaacagatcaatgcaccgcaacgagttttggaggcgatgcagcaacaattaataaaattagttcagcaaggtcaaatgagtgatgtcatttatatgacaatccaaaaacatgtgattgaaatggggggcatccaagcgggctgcgatcgtattcatagcacgccattgccatttccttactcagcactactgcatcgggcggtatattgtttttgttgggctctgccgtttggtttgcaagccgtcatgggtttttggacaccgttattggttgggtttatttcttatttattgcttgggctagacgagctggcacggcaactagaagagccttttggctttgaccatcatgatttggcacttgatatgatggtgagaatgattgagcgtgaaaccttgatgctgatggataagccactgcctaagccgtgggagattgataagaattttaatatgagc

SEQ ID NO: 26800 - DNA, 1158 bp, Moraxella catarrhalis
atgaactactcagtatttacctcagaatctgtgagtgaaggtcatccagataagatggcagaccaaatctctgatgcactgcttgatgccattttaacgcaagataaagatgcacgagttgcctgcgaaactttagtaaaaactggtgctgttgtcttagctggtgagattagcacccatgccaacattgatgttgaaacgattgtgcgtaatacagtcaataaaatcggctacaatcattcagatttgggctttgatggctcaacttgtgcggtgattaacatgattggcaaacagtcacctgaaatcgctcaaggtgttgatagacagcgtcctgaagatcaaggtgctggcgaccaaggcttaatgtttggctatgccaccaatgaaaccgatgttctaatgccagctccaattcagctgagccatcgactgatggagcgtcaagctcagttacgcaaagatggcactttgccttggctacgccccgatgccaaagctcaggtgacattgcgttatgatgaacatcatcaacctttggcggtagatgcactggtattatcaacccaacacaatcctgatattagccaaaaacagctccaagaagccgtcatggaagaaatcattaaaaaagtcattccatctcagctattacacaaagacacactatatcacatcaatccaacaggtaaatttgtcattggtggacctgtcggtgatgcaggtctgacaggtcgtaaaatcatcgtagatacttatggcggtatggcacgccacggtggcggtgcttttagcggtaaagacccatcaaaggttgatagaagtgcagcctatgcgggtcgttatgttgccaagaatattgttgcagcaggtctggcggagcgttgtgaggtacagatcagttatgccatcggtgtcgctgaaccaacctccatttcggtcaatacatttaatacaggtaaaattagcaacgctgatatcatcaagcttatccgaactcactttgatttacgcccttatggcattactggcatgcttaatttactacagccaatgtatgaaattaccgcaagttacggtcattttggtcgccaaggcgtagataccgcttttacttgggaaaaaacggataaagcacaattgctgcgttctgctctt

SEQ ID NO: 26801 - DNA, 2679 bp, Moraxella catarrhalis
atgaaaaccatgcaatcaaatgaagtacgccaagcctttattgacttttttgtctcaaaacagcatacccatgttccctcatcaagtctcattccgcacaatgaccccacgctgctgtttaccaatgcaggcatgaatcagtttaaagacacttttttggggttagaaaaacgcgactatgtgcgtgctgtgtcatcacaaaagtgcgtgcgtgctggcggtaagcataatgaccttgataatgtgggctacaccgctcgccatcatactttttttgagatgctgggcaattttagttttggtgattattttaaaaaggacgccattgcctttgcgtgggaatttttaaccgatgaaaaatggcttgccttgccaaaagaccgtctttatgtgactgtttatcacaccgatgatgaagcctttgacatttggcacaaagacatcggtctgccccaagagcgtatcattgccattggcgataataaaggcggggcgtaccaatccgataacttttggatgatgggggatacaggcccttgcggcccttgcacagagattttttatgaccatggtgagcatatttggggtggtctgcccggtacgcctgacgaagatggcgaccgctatattgagatttggaactgtgtctttatgcagtttaaccgccaaaaagatggcacaatgcagccgctgcccaagccgtcggttgatacaggcatggggcttgaacgcatcagtgccatcatgcaaggggtgcatggcaattatgagaccgatatttttaccaagctgatgacaaaggcggtcaacatcattggcttaccaaccgataccgacattcaaaatgagccatctttgaaggtgcttgctgaccacattcgttcggtggcgtttttgattgctgatggggttatcccaagcaatgaaggtcgtggctatgtgttgcgtcgcatcattcgccgtgcggtgcgtcatggcaacaaacttggggcaaccgatgcgttcttttatcagctggttcacccacttgctgacatcatgggcgatgcctacccccaactgcgtcatgaacagcacaaaattgaacaagcgattttaaaagaagaagaacaatttgccaaaacattatcgcaagggctaaaactgctgtcgcaagaattggacagcttacagcaaggcgatgtcttagcgggtgaaacggtgtttaaattatatgacacctatggctttcctgcggatttgaccgctgatatcgtgcgtgaaaaaggcatcaccattgatgaggcgggctttgagctgagcatggcagagcaacgcacaagggcgcgtgaagcaggcaaatttgccatggattatcacgcactcattcaagtagacagtgccaccgaatttttaggctatgaacggcttgataatgacagcaccgtgattcatctttatcaagatggcaaggctgttgatacactggcagaaggtgatgagggcgtgttaatccttgataaaaccccattttatgccgaaagtggcggacaggtgggtgagcttggcgaaatcagcaccgaatctggcgtatttgatgtgttagacacccaaaaatcaggacaagccatcattcatcatggggtggtgaaaatggggcatattaacaacaatcagtcagcgaccgcccaagtggcaagtcaggtgcgtgcgtccagtgccaaaaaccactctgccactcatttgctacacgccgctttacgcaccatattgggcgatggggttagccaaaaaggctcaatggtgagcagcgatttgcttcgttttgatttttcatatgacaaaccattgaccgaacaaaacatcagccaaattgaaatcatggtaaaccaacaaatattggccaacacccctgcccatgttgagattttggacattgacagtgccaaaaacaaaggggcgatgatgctctttggcgaaaaatacggcgatacggtgcgtgtgctgtccatgggtacaaccgataaagatggcaaaccattttccattgaactgtgtggcggtctgcatgtgactcgtacaggagatattgggctgtttaaaatcataagcgaacaaggcatttcagcaggtgttcgccgtatagaagccgtcacaggcatgggagcggttaattatgtgcaacaaggcgataagcaattaaaccaacttgccaatcagtttaaagccaaacgccatgaaatcgcccagcgtgtggcacaattgagcgacaaaaaccgtcatctggaaaaacaaattgaacggctaaaccaaaaacttgccagcctgcacgccaattcattgacggacaacctaaaagacattcatggtcaaaaagtactgattgccacggtcaacggcatggataataaagcattacgcaccttatcagatgacatgaaatcaaaactggctgatggcattgtgatactggcaagcgtctatacggcagatggtgaagacaaaatcgccatgaccgcaagcgtgggcaaacacttaacaagcaaaatcaaggcaggcgacatcatcaagtacctaagcgaaaacttaggcggcaaaggtggcggcaaaccagactttgcccaagggggtgcaaccgacgtggcgaacctgccaaagctgatgactggcttgacagattggattggggagaaattgggt

SEQ ID NO: 26802 - DNA, 708 bp, Moraxella catarrhalis
atggacgctatgataaccattgatgataatcagttgctgaccaattaccgcttgattaagcaggcacttaataccgccaatgatcaagctgtgcagatgaatccaactcatcgtcctgccaaactgattgcagtttctaagaccaaacctgttgcgatgatacaaaccttatttcatcagggtcaacaggattttggtgaaaattatctgcaagaagcactgggcaaaatcagtcaattatcacaattacccatcatttggcattatattggtagcattcagcgtaacaaaacccgagatattgccaagcactttgattgggtgcataccttagagcgtgaaatcattgcccagcgtctcaatgagcagcgtgcaggcatgcagccgcttaatgtattgatacaaatcaatattgatgatgaaagcagtaaatcaggctgtaaaccaaccgaactgcccacgctcatagaacaaatcatcaactacaaaaacctaaacttgcgtggcgtgatggtcattccaagtcagcaaaccgtagatgcgtttgcccgcacaaaagtactatttgatgcgatagcaaggcgttttgacttgccaaactgggataccatcagcatgggcatgagtggcgatatgacacaggcggtagcacacggttcaaccatggtgcgtgtgggaacagcgatttttggtgagcgagaccatcgg

SEQ ID NO: 26803 - DNA, 777 bp, Moraxella catarrhalis
atgacaaccatgcgttcacatgatgcaattcgtgattttcaattcaccaaagacagtctaaaagataaaattattttggtgacaggtgcaggcgatgggataggcaaagttgctgctttgacttatgccaaatgcggtgcaacggttcttttgctgggtaaaactcaatcaaaacttgaagtggtttatgatgaaattgaggcacttgggttggcgttgcctgccattttgcccatggatcttgagcgggcagattttgcacagatgcaaaagctggcaggcttaattgaaaaagaatttggacatcttgatggcgtgctacataatgcagccattttggggacattgacgccacttgagatgtacgatccgatcacctttgagcaggtcatgcgggtgaatatgacagccgtattcatgctgacccaaagcctaattccgctactgcgtgcagcccaaagcggctcggtggtatttacaagcagcagcgtgggtgcaagaccaagagcgttttggggtgcttatgcactctcaaaacaagcggttgaaggcatggcaaccattttcacccaagaaacccaaaacatgacagcacttcggtttaattgtatcaatcctggtgcaactcgtaccaatatgcgtgcacatgcttttccaggtgaggacccttatacacttaagacgcctgaggatatcatgccagtttatgtgtatttgatgacagatgaggcaagcggtattaaaggtcaagtgattgattgccaaccaaaaaacgct

SEQ ID NO: 26804 - DNA, 1320 bp, Moraxella catarrhalis
atgggtgttactgtgagtttgtttcaaaactttatgattattcttgtactgattttgacatcgagttttttctcgatttcagaaattgctttggcaggttcaagaaaaatcaaacttaaattactggcagaatcaggcgatgaccgtgccgagaaagtcttaaaattgcaagaaaattcagctgatttttttgccacttcacaaattggcctaaatgctgtcgccattttgggcggttcggttggtgaaagtgccttgcgtccttatttttccgaatggattggcttggtatatcaagggatttggcttgacagcatcgcttttttttcgtcgtttgttttggtaacactgctatttattttatatgctgacctgattcccaaacgcattgcaatgattaatcctgagcgagtggctttggtggtcatcaatccgattttatggacaattcgtgtggtcaagcccttggcatggatcatcaataccatcgcagatgtgacttttcggctttttaaatttgatacggctcgtgatgacagtatcacctttgatgatatttctgccattgttgatgctggggcagaggctggcgttttgatggaacaagaacagcactttatcgaaaatgtttttgaacttgaagaacgcaccgtgccatcatcgatgacggctcgtgaggatgtggtatattttgcactcagtgaaagcgaggagagtattcgtcaaaagattgccgattatccttattctaaatttttggtctgtaatgagcatatcgaccaagtcatcggttatgtcgataccaaggatattttggtacgaattttaagcgaacagccaatttttcagctgaatgaatctaccattcgtaatgtactgattattccagatacactcactttatccgagcttttggataaatttcgtgccagtaatgaaaaaatggcggtagtcattaatgaatatgcattggttgttgggctaattacactatcagatattatgatgactgtcatgggcgattgggcagccgctgagcctgaagatttacaaatcattcgccgtgatgaaaattcatggctgattgatgggattacgccgattgatgatgttaaacatgcccttgatattaatgagtttcctgattgggatcactatgagacgctggcgggctttattatgtatcgcctgcgtaagattccacgccctgcagactgggtagagcatgagggctttaaatttgaggtggtagatatcgaccattataagattgaccaacttttggtaactcgcctagagcaactgcccaagcacgaagac

SEQ ID NO: 26805 - DNA, 1077 bp, Moraxella catarrhalis
atggcatcaaatacacgatttggtttacccatttggtcaatgctcttgccattggtggcttgggggttattttttgtgggcataaaaacccatctgctgttacaaattttggggggcgtgtttttaattggtagtgtgttatcggcagtttatcacacagaggtggtcgcgcataaggtcggagagccttttggtaccattattttagcgttagccattaccatcattgaggtcgcactcatcatctcgctgatggtcgcaggcggggataatgcggcgtatttacctcgtgatacggtttttgcagcaattatgttgattttaaatgggattcttgggatgtcgctgatgattggcggtctaaaacatcgagaacaattttttgggcaaaaatctgccagcaccgcattaattacactggtctcaattttggtgatgaccttaattttaccaaattttaccacttccaccacgcaaggcacttattcatcagcacagcttatgtttgtggcggtggcctctttggtattgtatggttcattcatcatggttcagacagtgcgtcatcgtgattattttttggcagctgatgatgatttggatcaccatgcccaaccaccaagcacaaagattacaaccatcagctttatatttttgttaatctgtttgggcattgtggtcatgcttgccaagagcctaagccctagcattgaggcggcagttgcttatatgggtgcacctgtcgcgttggttggggtgatcattgcagcggtggtgttactgcccgagggattggcggcattaaatgcggcacgccacaatcgttttcagaccagcttaaacttagcattaggttcagcattggcaagtattggcttaactattcctgctgtcaccattgtttgcttaatttatgatattccattggtgctaggtttagatggtaaatctatggtattgcttggtttatcaacttttattgtcatgctgtcacttaatcaaggacgcacgaacattttatacggcattgtattgttggtgaatttatcggcgtatgttttcaccatcattgcacca

SEQ ID NO: 26806 - DNA, 1416 bp, Moraxella catarrhalis
atggctaaagctaaatcaagctacatttgccaaaattgtggggcgatttatggaaaatgggcagggcaatgtacagactgcggtgagtggaatactcttgttgaggcacctaacaccagtttgccacatcatcataaatcaaaaactaccacagcacccagaaaaaccgctaactatgctggagcggtgagtgctgtgatgacattggaccatgttggcgttacgctagaaacacgcatgccaacgggaattggtgaatttgaccgagtgcttggcggtggacttgtggcaggctcggtggtgttaattgggggcgaccctggtattggcaaatccacaatcttactacaaactgccattaacatggcagcaggtgattcactatcgggttctgctttatatatcacaggcgaggaaagtctgtcgcaggttgccatgcgtgcagtgcgacttggactaccaaccgatcgcctgcgtgtcttagccgaaactaatgttgataccatttgtgcagcactcaccaccgaacagcctgccattgctgtcattgattcaattcaaacactctttaccgaagccatacagtccgcccccgggggggttgcccaaatccgtgaatccgccgccgtcttaacccgttatgccaaacagacaggcacggcactgtttttggtgggacatgttaccaaagaaggagcattggcagggcctcgtgtgctagaacacatggtggatacggtgctgtattttgagggtgaatcagacagtcgttttagaatgattcgtgccatcaaaaaccgttttggggcggtcaatgagttgggaatttttggcatgacggatacaggattaaaggaggttgccaacccctccgccatttttctaagccgctatgataagcccattgcagggtcggtggtgatggtcagccgtgaaggtacacgccccctacttgtggaggtgcaagccttggtggatgactctcagggtcaacccagacgcatggcacttgggcttgattatcagcgtctgtccatgctccttgcggttatgcaccgtcatggtggcattcacactagtggtatggatgtgtatgtcaatgttgtaggcggtgttaaagttatggaaactggttcagatttggcggtgctgattgcttgtgcatctagcatcaaagaaaaaccactgcctgtcagactgtgtgtatttggtgaggtgggattgtctggcgagattcgccctgtgccaaatggtcaagaacgcctaaaagaggcaatgaagcatggttttacccatgccatcgtccctagagccaatgcacctgcagccaatcatccacaatttaaaaatattcaaatcattgcggttgataggcttgatgaagcgatttatcaagcttttgagattaatgcaggt

SEQ ID NO: 26807 - DNA, 1466 bp, Moraxella catarrhalis
acaccgattcctgagctggacttattagataagcccaatttatccaataaacctaaagtgagcgatgatgaactgcagcaagcttcagagcttttggagattaaacttcaagaatttaatattcaagctcaagttgtctcagccatggttggccctgtggtcacacgctttgaggttgagcttgcaccgggtgtcaaggcaagccgagtcacacgcatctctcaggatttggcacgctcgatgtccaaagcatctttgcgtgtggttgaggtgattccaggtaagccgtatattggtattgaggtacccaatcaaaagcgtgagatggtgcatttgcttgagctgttggatactaaagattatcaaagtccaaataaccaaattgccatcgctgtcggtaaagacatcagcggcaagcctgtgattgctgatttggcaaaagcaccccatatgctggtggcaggcacgacagggtcgggtaaatcggtattggtgaactcatttttattatctatgctactaaaatacacgcccgatgagcttaaacttgtactcattgacccaaaacagcttgaacttgccaactatggcgacattccgcatctattgacccctgtcatcactgatatgaaagatgcggttgctgctttgacttggtgtgtcaatgaaatggaacgccgttatcagctgatgagcaagcttcgagtgcgaaaaatcagtgaatttaataaaaaagtggaagtcgccgaagctgagggtgaaccaatttatgaccctttatggcacattaatcaaagtgtcagccaagataagccgcccaagcttaagccactgccaacgattgtgattgtggcggatgaatttgccgatatgatcatgcagcttggtaaaactgccgaagagccgattgtgcgtttggcacaaaaagcacgcgccgctggtattcatttattgcttgctacccaacgcccgacggtgaatgtggtaacaggtttgattaaggcgaatattcctgctcgtgttgcctgcgtgtcagctctaaagttgatagtcgcacaatcatcgaagaaggtggcgctgaggatatgttggggcatggcgatatgatgttcattgggccgggtaaaaatcatcctgagcgtgtgcatggtgcttatgtggatgacgatgaggtcaatcgagtctgtgatgcttggcgtgagcgtggcaagcctgactatattgatttatctgacagttattcttttgaaggtgagggtagcggtgatgcaggtggtagcgttgcaggcgatgagttatatgaggcggcagcggcttttgtggttgagactaaaaagccatccatctcatcggtgcagcgtaagtttagcatcggatacaatcgatctgcgcgtctgcttgatcaaatggaagagcgtggactggtctcatcgatggataacagtggcaagcgtcagctgcttttg

SEQ ID NO: 26808 - DNA, 195 bp, Moraxella catarrhalis
atgaaaaccaacgaattacgcgaaaaatcagtagatgagttggctcaattgcttgatgaaaagcaacttgatgcgttccgtctgcgtatggctaaggccacaggtcagcttgccaatactcatgaaatcaaaaacaatcgtcgtacgattgctaagattttgactttgattaatgaaaaacaaagaggtgaggca

SEQ ID NO: 26809 - DNA, 786 bp, Moraxella catarrhalis
atgataaaaccatttgccactttggcaactgtcgcttgtgttactttggcgggttgtaccaaagaagaaaccagcacccaaacaacagcacccgctcagccaagccaaaaaagcattgtgatcgcaactgaagccgcctacccaccatttaatgacacggatgccagcggtcagattatcggttttgatgtggatgtgatgaatgccttatgtgccgaaatgcacgctcactgtcagataattgctcaggattgggatggcttaatcccaagcttattggcaggcaaatatgacgccatcatcgcaggcatgtccatcaccccagagcgtcaagcacaagtagatttttcggactcttatttttcaaatacgatcgtttggcttgccaaaagtgatggcagctttgatcccaataatatcaccaatcaaacccttgccagtcagcgtggtactactggtgctgcctatatcaccgaaaaatatgatggtaaagatggcaatcgtgttcagctgcatgacacctacaccaatgcttatttggacacaaaagcaggacgcaatcatgcagtcatggctgaaaaagtatcggctattgactggctaaagcaagagggcaatggtgagtttggcttaatcggcgaagagattgataataacgatcacttgggtatcgccgtacgcaaaggcgacagcctaaaagctgagtttgatgcagctttagcaaaaatcaaagaaagcggtaaattggcagaaattgaaaaagctcactttcaatcagatactttt

SEQ ID NO: 26810 - DNA, 801 bp, Moraxella catarrhalis
gtgatcatgacaaccgtgttaaaatttaccacagccgcattttgtgtttctttacttgctgcttgtagcaatgagtctacgaccaataccaaaactgctgctgcacctaacagctcgacctcacaaaaagaattgattatcgctactgaatctagctttaagccatttagctatcttgacaagcaaggtcaattggtcggctttgagattgatttggcaaatgcactatgcaagcagatgcaagcagattgtcaaatcgtaagccaagactgggacagtcttattccaagcttgaacgccaataagtctgatgccatcatggcgggtatgtccattaccgaagaacgcctaaatgcagtggactttagtgagccttattttgataatacgcttgttttgattggtaagaaagacaataccgccaccatcaatgacatcgctggtaaagctgttgcaacgcagcaggcaactgtttcagcggaatatcttcaaaaacattatccagacgccaacatcaaaacttatgataagcaagacaacgcttatcttgatttgaccgctgggcgtgttgaatttatgttgtctgatgtcgtgcctgctactgactggcttgccactgaagctggctctgaatttgagatcaaaggcatgcccattgatatcggtgataaagtcggtatcgctgtgcgtaaagatagcagcctaaaagcggattttgacgctgcacttgccagcctaaaaactaatggcaaatatgatgagattgttgccaaatactttaacagccaagcattaggtcaa

SEQ ID NO: 26811 - DNA, 2358 bp, Moraxella catarrhalis
atgtctaaaaacactttttctgcgtcattcatcgccattttatcaaaagttattttgggcgtattggcattatttgcaatcttaattttagcatttcccattgggttttatggcatggtcatgtatcttgagccaactttgcctgatgtcaaaaatttggacaattcccgctttgagatgccgctacagatttatactgccgacaacaaactgatcggacaatatggtaatcgctactctttgcctgtcacctttgacgaaattcctgagcgtatgattcaggcatttttggcagcagaagacgatactttttttgaacacagtggcatcagtgtcaaaggcatgggacgagcattgaccgaagttatcagtgataatgacgctcaaactggtggttcaaccattaccatgcaagtggcaaaaaactattttttaagccctgagcgtaccattaatcgtaagctgaccgaactttttatcgcccgcaaaattgaaaatgaactcacaaaaaatgaaattttaacactatatgttaataaaatttatttaggtgaaggcacttatggtattcaagctgcagcacgccgctattattccaaaaatctagaaagcttgaccattgcccaaatggcgatgatcgcaggcttaccaaaagccccttcggcctacaatcctgtcgttaatcctgaacgggctatggagcgacgcaactggattatcggacgcatgcaccaagaaggctttattaccgcttctgaaaaagatgccgccattgctgaaccaatggggctaaatatctatcaagaaaaacttgatctaaatatgccttatgttgcagagatggtacgctccactttggttgaccgctatggcgaggcggtgatggattcaggttggcgtgttcaaaccacaatcaatagtagctcacaacttgcggccaatgctgccttagtggggggtttacgtgattatgaccgtcgtcatggttggcgaggtgttgaagcagaatcagggtcgcttgaaggtcgtaaaaattttgatcatatttatcctgccaaagttactaaggttcataaccaaagctttgaagctaagcttcaatctggagaaaccgtaaccatcggttggtcaggtatgaattgggcgcgtcgctactatgatgctaaccgtgtcggtggtggctacagtaatgctcatcagatggtcaaggttggtaatattgtgcgaatctctccgatcaatgaagcaaaaacagcttggcgtatggaatctattcccaaagttcaaggtgcattggtctctttagaccctgaaaatggtgctttgcgtgccgttgttggtggttttcattttaatcacagcaaatttaatcgtgctatccaaggctatcgccaaccaggatcgatcattaagccttttatttttgctgcagcacttgagtctggtcaatatacgccagatagcttaatctctgatgctgccattcgtgttggtaggtggcaaccaaaaaatgccgatggacgctacacaggcgatatgacactacgccgtgcacttactttatcacgcaataccccagccattcgcctgctgcgttcagcaggtgttgatgaatctcgccacctaatgaatgccatgggtggacttgagatagaacgcatgccgtctacattggcattggcattgggtgctgctgacgctacacctttacaaatggcaactggttttgctaccatcattaatggtggtcatcgtatccagccttattttatcgaaagaatctataattttgacaatgaaaccatctatcaagccaacccacagcaagcctgtgcactttgctttaatgaaaatctttcggcaactaatgccaaattgcttgaattatttgaagccaataaatcagagatttctacagacacgcctagcgcaccagctggcgataggctacaaccaagaagcgctccacaatatgtcgctgccactcaagcaccccgcgtgctttcccaccaaacggcttatgacatctccaatatgatgcgagaggttattactagcggtacgggtcgcagagctcgtgctttgggtcgtagtgatgttggtggtaagactggtaccactaaccttgccaaggatgcttggtttgcaggctttcatcctactaatgtggctgtggtttgggtgggttttgatacgccatcaactttaggaaatagtgagtacggtggcgtggctgcattaccaatttgggtgaattttatgagccatgaacttcgcaacacgccttcgcaatggatcagtcaagaagatcggtcaaaagccgtcaaagcgacccaacaagttattgatttgaaagat

SEQ ID NO: 26812 - DNA, 1932 bp, Moraxella catarrhalis
atgaccaatcctaccgctcatcattttgaagctgaagtgtcacagctattgcatttggtaacacattcactgtactcaaatgctgatatttttgtgcgagaactggtgtcaaatgcctctgatgcttgtgataagctgagatttttggcaacctctgatgatggcttgtatgaaaatgatggcgagcttgcgattcgtatcgacattgataatactgccaaaaccattacctttagcgataatggcatcggtatgaacgaagaggatgccattgagcatttgggtacgattgcaaaatctggcactaaggcatttttggataaattggctgatagcgataaaaaagatggtcatctgattggacagtttggcgtcggtttttattcaggatttattgttgctgataagattgttgtagaaagccgtaaagcaggcgaatctgctgataaaggcgtgcgttgggtgtctgatggtacggggcaatttaccaccgagagcattcataaacccaatcgtggaacatcaattacgctatatcttaaagatgagtatgctggtggcggcgagagtgagacaaattatttaaacgaccagcacataaaatcactggtaaataaatactctgaccatatcagcctgccgattcaaatgcataagcaaatttggcaagatgagctgggtgaagatggtgaaccgacaggcaaaggtgaatacattactaccgatgactatgaaacagtcaaccaagccaatgcgttgtggacaaaaagcccaagcgatattagcgacgatgagtatcatgaattttataaaaacttaagctatgattatgccaagcccctagcctatacgcataatcgtgttgaaggacgagtgcaatacacgcagcttttatttattccaagtaaagcacccatggacttgtacgctcgtgaacagcaacatgggctaaaattgtatgtcaaacgagtatttatcatggaagatgctgagcagttattacccatgtatttacgctttgtcaaaggggtgattgatactgctgatttgccacttaatgtcagtcgtgaaatcttgcaagaatcacgagatgttaaggcaattcgtgagggtaatgctcgccgtgtattgacgctactatcaagtcttgccaactctgaagatgctgataagcaacaaaaatttgccgatttttatcaagaatttggcgatgtactcaaagaaggtttgggtgaagatcagaccaatcaagaacgcattgccaagctattgcgttatgcaaccagtaccgatgataagattgcaacaggttttggtgattataaagcccgcatgaaagatggtcaaaaagccatttattatctcaccgcagataacttggcggccgccaaaaacagtccacagcttgaattattcaagaaaaaaggcattgaagttatcttaatgactgctcgtgtggatgagtgggcaatgaactttttacatgaatttgatggtacgccattgcaaaatattgccaaaggtgctgttgacttgggtgaattgaccgatgaaaatgaaaagcaggaagccaagcaggctgaagaaaaaatgcagcctgtggttgaaaaattaaaaacaacattgggcaagcgtactaaagatgtgcgtgtctcaagccgtctggtagatagcccagcctgtttggttgttggtgaaggtgagcttacgccacagatggcacagatgctcaaagccatggggcaaagtgtaccagagattaaacctgtgcttgagattaacccaaaccatcctttgattgataaactgcaaaatagccatgattttgatgacttggcacaagtcatttttgatcaagctttattggcagatggtggtcagcttgatgacccagcaggctatctaaagcgtgttaataagcttttgatgggc

SEQ ID NO: 26813 - DNA, 1347 bp, Moraxella catarrhalis
atgcaatatgcttttgcttatggggcagatgcggtgtatgcagggcaagcccgttactctttgcgggtgcgtaacaacgactttgatgaagaaaatttggcaaaaggcattgcctacgcccattcgcttggcaaaaagttttatgtggtggtgaacattcaagcacacaacgccaaattaaaaacctttattgaagacattcgccctgtcattgaaatgaaacctgacgcgcttatcatgtccgatgctggcatgattatgatggtgcgagaagctttccccaatcaagtcattcacctgtcagtacaagccaatgccgtgaactgggcaacggtgaagttttggcagcagatgggcattagccgtgtgattttaagccgtgaattatcactcaaagaaattgagcaaatcatcaaagaagtgcctgacatggaggttgaagtttttgtgcatggggcgctgtgcatggcatattctgggcggtgcttgctctctggctatatcaacaaacgagacgccaaccaaggcacttgcaccaatgcctgtcgctggaattacaacacttataaagcggtggagaatgaaacaggcgatatcgtccctgccaacccagaagtgttcgtccccagtcaaggcgagattagcaatgtcaacctaaatggcgatgtcgtcatggacgatgattatgtagaaaaaccgtccgatgaggttgtactcattgaagaacaaggtcgcaagggtgagctgatggcgatgtatgaagacgaacatggcacttatatcatgaattcaaaagacttgcgtgcggtggagctggtgcctgatttggtcaatatgggcgtgcattctttaaaaattgaggggcgtaccaaatcgcattattatgtcgctcgcaccgctcaggtctatcgccgtgccattgatgatgctttggcaggcaagccatttgatacaggactcatcactgcgcttgatgggcttgccaatcgtggttataccgaaggatttttacgccgtcatgtgcattctgattaccaaaattatgaatacggctcatctaagaccgacaatcagcagtttgtcgctgaagtggcggacatcagcgatgagcgtttgactttgactgtcaaaaacaagctgatggtgggcgataccattgaaatcatgactccgcaggggaatgttagctacacgctaactgagatgtgggataaaaaaggcgaggcgattgatggtgcgttaggctctggttgggtgtgtcaaattgccaatccctttaaggatatggataaagacgtgctaaaatttgccctagtgatgaaaagcgtgagtgaggcgatttatagc

SEQ ID NO: 26814 - DNA, 708 bp, Moraxella catarrhalis
atgagtgttaataaagtcattcttgtgggtaatttaggcaatgacccagaagttcgtaattttgataatggcggcatgattgcaacggtatcaatcgctacctctgaacgctggacggacagaaacacaggcgagcgtaaagagcataccgaatggcatcgtgtggtatttaataaccgattggcagaggttgcctcacagtatctgcgtaaaggttcacagatttatgttgagggcagtttacgcacacgcaagtggcaggatactcagacgggtcaagagcgttataccacagagattcgtgcggataatatgcagatgcttggcaatcgtgcaagtggcgataatggcggttatgccaattcccaaggtggttatgccaatccaaatcagcaatatcaaaatcagggcaatcaaggcggacagtatccaaatactgcctatcaacaagccaatcaatttggtggtcaaaattcatcaggctatacgcagcctcagccaaaccaagcctacccaaattcaggttatccccaagagcgagcatctcagcctcagagtagctcgatggcacaaaaccatgcttttgggcaaccaacacacattgagcaaaatacaggtatgtcgcctatccaaaagccaaatacgccatcgacaaatcagcctgtcatcacgccatcacagggcttatcggatgatgatatgccgttt

SEQ ID NO: 26815 - DNA, 234 bp, Moraxella catarrhalis
atgagtgatatcgaagctaaagtaaaagacgcagtcgcagaacagcttggtttaagtgttgacgaaatcaaaaacgaggcatcttttatggatgacttgggtgctgattctttggatttggttgagttggttatggcatttgaaagcagctttggcatcaccattcctgatgaagattcagcggaactgacgacggttcaaaaagccatcgactatgtttctgacaaagttgct

SEQ ID NO: 26816 - DNA, 1470 bp, Moraxella catarrhalis
atgacccaacaagcccccctaattgacggctatgaagttgtgattggtattgaaatccattgccaattaaacactgacagcaaaatcttttcaaacgcccccaccgcctttggacaagagccaaacacccaagccaccattgtggatttgggctttccaggggcgttgcctgtcttaaatgcaggcgtgattgaacgtgccttaaaatttggcatgggtgtcaatgccgagcttggcacttacaacacctttgaccgcaaaaactacttctaccccgacctacccaaaggctatcaaatcacgcaaatggcaaaccccattgttggcgagggctatattgacatccttgtcaatgcagggcaaaaggatgaatacaccaaacgcattggtatcacacgggctcacctagaagaagacgctggcaaatcggtgcatgacgctgtgccacagatgacgggcgtggatttgaaccgtgcaggtacgccgctcattgagattgtctctgaacctgacatgcgttcggttgatgaggcggttgcttatgtcaagaccattcacgaactggttacatggctgggtatcagtgatgccatcatggcagaaggctcgttccgtgcggacattaatgtgtcggtacacaagccaaacacgccctttggtactcgctgtgagcttaaaaacctaaactcatttcgctttattcatcgtgccattaaatccgaaattgaacgccaaattgatgtcatcgaagacggcggaaaagtcgtgcaagccacacgcctatatgaccctgagcgtgatgaaactcgtgccatgcgtaccaaagaagaagccaatgattaccgctactttccagaccctgacctgttgcctgtcatcatatcagatgagacacttgccaaggtgcgtgccgatatgccagagctgccaagcgtacgcaaagagcgatttgtgagtgaatttggcttgaccgcctatgatgccaatgtactaaatggcagtcgtgaactgtcggattatttcttgcaagtacttgatatcattggtaaaaataatgccaaaatcgcagccaactgggtcatgggtgagctgtcaggctcactgaacaaaaatgagctgaccattgaccaatcacccatcagtgccaagcgtttggcagggctgattgtgcgaattttggatgataccatcagcggtaaaatcgccaaagaggtgtttggtcatctgtgggagtctgacaaaagtgctgatgaaattatcaccgaaaaaggactaaaacaagagaccgacacaggggcaattgaagccatcatcgtcgatgtacttgccaataaccaagccatggtggatgaatacaaaggcggaaaagaaaaagcctttaatggactggtcggacaagtgatgaaagccagccgtggcaaggcaaaccccgctcaggtcaatgcgttgttaaaacagatgattggagcg

SEQ ID NO: 26817 - DNA, 1842 bp, Moraxella catarrhalis
atggcagacgacattaagcatttacgcaatattgcaatcatcgctcacgttgaccacggtaaaactaccttagttgataaacttttacagcaatcaggcgctttgggtgagcgttctggtgaaatcgaacgcgtgatggactcaaatgcccttgagtctgaacgagggattacgattctggcaaaaaataccgccattcgatggactgataagcgtactaacactgagtatcgtatcaatatcgttgataccccagggcatgccgattttggtggcgaggttgagcgtgtcatgtcgatggttgactgtgtattattattggtggattctcaagaaggtcccatgccacaaacacgatttgtgactcaaaaagcatttgctcgtggacttaaaccgattgttgtcattaacaaaattgacaagccagccgctcgtgcagattgggtaattgaccaagtctttgatttgtttgacagtttagatgcgactgatgagcagttagattttcctattgtctatgcatcgggtattaatgggattgcaggacttgaaccagataatcttgctgatgatatgacgccactatttgagacgattgttgatatcgttgagcctcctaaggtggatgtcgacggtccatttcaaatgcaaatatcaagccttgactacaatagctttgttggggtgattggggttggtcgtattcaaagaggctctgtaaaaacaaatacgcccgttgcaatcattgataaagatggcaataagcgcaatggacgaattttaaaaattatgggctaccatggtcttgagcgtgttgatgttgaatcggctcaggcaggagacattatctgtattacaggtattgattctttgaacatctctgatacgatttgtgacccacaacatgttgaagccctgccagcactgtctgttgatgagccgacggtctcgatgacttttcaggttaacgactcaccatttgctggcaaagaaggtaagtttgtaacttctcgtaatatccgtgaacgccttgaccgtgaattgattcataatgttgcactgcgtgttgaagatacagacagccctgaaaaatttaaagtttcaggtcgtggcgagttacatttgtcggtattgattgaaaatatgcgtcgtgaaggttttgagcttggcgtatcacgcccgcaagtcatcatgaaagagattgatggcgtcatgtgtgaaccgtatgaaaatgttacttttgatgttgaggaacagcatcaaggagcagtcatgcaggagatgggcaaccgtaaaggtgagctgacgaatatggaggttgacggcaaaggtcgtattcgtattgaagctactgtgccttctcgtggcttaattggttttcgctcggcgtttttgaccatgacttcaggcacaggtattatgacttccagctttagccactatggtcctgtcaaagatggtgcggtagccaagcgtcaaaatggtgtgctggtatcaatggtaacaggtacctgtttggcttatgctttatttagcctacaagagcgtggtcgtttgtttgctaagccacagcttgaagtgtatgaaggcatgattattggcattaattctcgttcagatgacatggtggtaaacccgaccaaggccaagcagttgactaatattcgagcgtcaggctctgatgatgcgattattttaaccccagcgctggattatacacttgagcaggcacttgagtttatcgaagatgatgaattggttgaggtgacacctaaatcgatccgtatccgcaagcggtatttgactgaaaatgagcgtaagcgttttggtcgtaaaaaagat

SEQ ID NO: 26818 - DNA, 1359 bp, Moraxella catarrhalis
atgacactacataccattattttagctgctggtaaaggcacacgcatgaaatccaaccgacccaaagttttacaaaccttggcaggcaaggctttggttcagcatgttttggatacttgtacacaaattcaagcagatggtacgattttggtttatggctttggcggtgagatggtcaaagaggcactatctacccatacagttatatttgccgaacaaacacagcagttaggcacaggtcatgcggtcaagatggcattaccccatctgccaaaagaaggtaaaagcctgattttatatggtgatgtacctttaactcaggccgaaaccttacaaaaccttgttaaagccaataccagcggtatctcaatgctgactttaacagttgaacagccgtttggtttgggtcggattgtccgagatcagggtaaagttgttgccatcgttgaagaaaaagatgccgatgtacaacaaaaattaatcacagagattaacagtggcatctattgtgtggataatgcgttgcttcataaatatctacccatactgaacaataacaatgctcaaggcgaatattatttgacagatattatcaaattggctgttgatgatggcgttgaaattgtaaccattgaacctaagtttgcctttgaaattgaaggcgtgaatgatcgtattcagcttgccaatcttgagcgagattttcaatcacaccaaattcatcaattacaaatcgctggcgtacagtttgccgacccaaatcgtgtcgatattcgtggcaaattgacctgcgatcgagatgtttttattgatattaatacagtatttgtcggtgatgtccatctgggcatgggcgtgcagattgatgcaggcaatgtcattacaaatagtcatattggcaaccaaacacatattaaacccaactgtgtcattgatgatagtatgattggtcaaaatgttagcattggaccatttgcccatataagaccaaaaaccatactatcagatgatgtcaaaattggtaattttgtagaaactaagaaaacgaccgtaggtgttggcagtaagattaatcatctaagctatgctggcgatagtatcatcgggcaaaatgtcaatattggtgctggtgtaattacctgtaactatgatggcatcaataagtttaccaccacaattggtgatcgtgcgttcatcggcagtaattcaagcttagttgctcctgtgactgtcggtatgggtgcaacaatcggtgcaggatcagtcatcaccaaagatgccaaagacaatgctttgaccttggctagagcgaaacaagccaccattatcggttggtcacgccccaaaaaaaatcaagtt

SEQ ID NO: 26819 - DNA, 1791 bp, Moraxella catarrhalis
atgcgtagcacctattgcggtcaagtgaccgaagagctaattgaccaaaccattaccatcgcaggctgggtacatcgtcgccgtgaccatggcggtgtgatctttttggatatgcgtgatcgtgaaggtttgttacaggttgtgattgaccctgatacgcccgaagcatttgcgaccgccgatgctgctcgctcagaatatttgcttaagattacggggcgtgtgcgtcgtcgctatgaaggtaccgaaaatccaaatatggtcagcggtcaagttgagcttttgggtaaagagattgaactgcttgccaaatcagacacgccaccatttcctttgaatgatgacaacatcacagtctcagaagagctgcgattaaagtatcgttttttggatatgcgtcgcccagaaatgcaggagcggatgaaatttcgtgccaaagcaacctcaaccattcgccgctatttggacgaccatggctttttggatgttgaaacacccgttttaacccgtgccacacctgagggtgcccgtgattatttggtaccatcacgcactcgccaaggcaacttttttgcattgccacagtcaccacagctatttaaacagcttttgatggtggcaggttttgaccgctattaccaaatcgccaaatgcttccgtgatgaagatttgcgtgctgaccgccagccagaatttacccaagttgatatcgaaacttcatttttatcagatgaagagattatggacatcaccgagggcttaaccaaaaatttatttaaaaccatgctggatgttgagtttgataccttcccccgcatgacttacgcagatgccatgcgtgattatgcctcagataagcctgatttacgcattcccttaaaacttattgatgttgctgacatcatgcaacatgttgaatttaaagtattttcagggcccgcccaagatcctaaaggccgtgttgttgccttacgcattccaaatggcggtaacatgagtcgcaagcagattgatgagtacaccaaatttgttggtatttatggcgctcgtggattggcatatattaaggtcaatgacgcaagcaatatcaataatggcgttgaaaaagaatcaggattacaatcacccatcattaaaaatatgaccgatgaggttttgattgagctgattgagcgtaccgatgcccaaactggcgatatcattttctttggtgccgataaagccaaaatcgtcaatgatgctatgggtgcattgcgtgttaaaatcggtactgatttaaatttatttacctgtgaatgggcaccgctttgggtcgttgattttccaatgtttgaggaaactgatgatggtaagtggacatcagttcatcatccttttacacgcccaaaaggctcggttgaggaactcaaacaaagtcccgaaaccgccctatccattgcctatgacatggtactaaatggcacagaaattggtggcggttcgctgcgtattaatacggttgacatgcaagaggcggtatttgatgccttgggtatttctaaagaagaagcagagcttaagtttaagtttttgatggatgcattgcgttttggtgcaccgccgcacggtggtttggcatttggtctagatcgcctgattatgctgatggttggtgccagctcaatccgtgatgtgatcgccttcccaaaaaccaagacggcagattgcccattgaccgaagcacctgctgaagttgataatcgccagttgcgtgagttgggcattcgcattcgtgaaaaacaaaaagcagaa

SEQ ID NO: 26820 - DNA, 957 bp, Moraxella catarrhalis
atgacagaagccaacagcggtatgacaaagcgtttggcggtagtttttcccggtcaagggtctcaatctgtcggtatgatggatgagcttgataaagcattcaaaagtgtgcgtacgacatttgatgaagcaagtgaagctttgggctttgatttatggtcagtcacacaggatgaaaactgtttgaataagactcaatatacgcagcctgctttattaacttcaagtatcgcaatttggcaaattattgagccaatcttatcagcccaatccattaagccgatgtatcttgctggacattcgctaggggaatatagtgctttggtcgcagcaggtgtgctcaaccttaaagatgcagtgaagttggtgcatgagcgtggtaaatttatgacagaagctgtacagggtattgatactcagatggcagcgattttaggcttggatgatgaacaggtggtaagcttatgtgaagaagttagcacaaccacaggcacagttgatgctgctaattttaacagcccagggcaggtggtcgtcgcaggcacagcggtgggcgtgtcaggtgttttgtcagcagtagaggcacttggtaaaaaagctgttccgctcaaggtttctgtgccttctcactgtgctttgatgaatcctgccagtgatgctttggcaaaacttttgggtgagacggattttggtgaagcaagtattcctgtcatacaaaacccccatgctaaaattcatacacagacaacacaaattaagacagctttgattgaacagttatcgatgcctgtattgtggtcaaaaaccatggaaaaattatcagagcgtggtattaatttgatacttgaatgcggtccaggtaatgttttgtcaaatttggccaagcgtcaagcaacaccgataaccgctttaccaacagataaattggcacgcctagaaaaattggagaatttggta

SEQ ID NO: 26821 - DNA, 399 bp, Moraxella catarrhalis
atgaaccaaacgaagcttactaaggtgcgtgctgataaatggctatgggcagcacgattttttcgcaccagaagccttgccaaagaagccatcgaagcaggcaaggtacatatgaacggtgctaaaatcaaagtcagcaaagagctacaagtcggcgatacactcaccattcgccaagggcatgcgacacgccttgaagacaaaacaatcatcatcaaagccctatctgaaaatcggggtaatgctacccttgcagcgacattgtatgaagaaactgatgcaagcaaaactcagcgtgcttttatggctgaacaaagaaaactgcttaatttggcgcgtccagacagccggcctgataaaaagcagcgtcgagaattaaataaatttaaacaccattgg

SEQ ID NO: 26822 - DNA, 426 bp, Moraxella catarrhalis
atgcgtgccaaactgaccaattttttgcctgatgtttatttggattcagcaggtacagcgggctatcacattggcaatccacccgatccacgcgccatcgccactggtgagtcacttggttttgagttaagtcagcttcgtgcacgccaagtttctttggaagatttttatgaatttgagctcatttttgcgatggatgacaccaatttatcagacttacaaactcttaaaactactgccatgatgcatgctaatggtcgagatatggcaaagcttagcttatttgatccagaaggtcggtcggttgctgacccttattatggcgatgagcaagattttgagcaaatgtacacccatcttcagcaaattgccgatcggtatatcacggtatggcagcttgatcatcaagattcactggctgcggat

SEQ ID NO: 26823 - DNA, 1041 bp, Moraxella catarrhalis
atgcttgacacttaccaaaattatgacctgtcttcgatgaatactatggcactgtcgtctgttgcagatacagcgatcgtcattcatgatgcagccgctttgccaacacttaagctaaataacacttggtttgtgctatcaggtggcagtaatgttttattgccaagcagactgcataccaccgtgcttttacctcgcatgatgggtaggcgtgtgctgtttgaagatgaccaagaaatcatcttacaggtgcaagcaggtgaaaattttcatgatctggtaaccgattgcgtgcataaaggctggtttggacttgaaaatcttgccttaattccagggcttgtcggtgctgcacctgtgcaaaatattggtgcttatggtgtacaacttgacgatgtgttggtcagcgtacaggtttatgaatgggcgagcaagcagtttaaacagttgtctaaacaagcatgccaatttggctaccgtcatagcatttttaaagatgagccaaatcgctacttcatttgtgcggtgacactgcgattacataaaaacccaacacgcattctaagtagctatggcgatttgcacacatatgcaaaacagctggcaaatcatcaaggcaggactaccgttaccacgacagatgtgtatcatgcagttattgccatccgccaaagcaaactacccgacccaaaagttttggccaactgtggctctttttttcaaaatccaatcatctcaacagaacattatcaaaaactgtgcgtggattatcctaatttgccatgctatcttattaccaaaactttggttaaagtacctgcaggatggctgattgaccaagcaggacttaaaggtcaaggtgtgccgccgatattaacccacgccaaacaagcacttgttttaaccaatcacgcgccactgactgctacccaagaggatatcaaaaccacagctgatatgattatcactgcggttaaacaaaaatttgacataaccttagtgcgtgaacctgtctggattaatgctgatggcagctacaac

SEQ ID NO: 26824 - DNA, 867 bp, Moraxella catarrhalis
atggcagccgaacagacatctacagaatatattgctcaccatttgaccaattggacatttggacaccaccctgaattgggctggaaagtggctcatgatgccgctgaagctcagcagatgggatttatggcgatccatgtggactccatgctttggtcaattggtttgggtattttctttttggcgcttttttgggcggttggtcgtaaagcgacttcaggcgttccaactaagctacaagcttttgttgagatgattgttgatttcgtagacaacagtgttcgtgagtcttacaatggtccatcaaagctgatagcaccgctgtcattgacgatttttgtgtggatttttttgatgaacttaatggatttggtgcctattgactggataccaagcctggctcaatgggtaggttcattaatgggtcatgatccacatcatgtatatttcaaaattgtaccaaccacagacccaaatattactttgggtatggcgattggcgtatttttcttaatcattggttttggtttgaaatataaaggcgttggtggctttattgcagaatttacattgcatccttttagtgcaaaaaatccaattttgcaagctatcttaatcccaattaacctagtgcttgaaattgttaccttattagcaaaaccaatctcattgggactgcgtctatttggtaacatgtacgcaggtgagcttattttcatcttgattgcactgatgccattttggattcagtgggcactgagcgtgccttgggcaatcttccatattctagttattactcttcaggcgttcgtgtttatgatgttgacgattgtatacttgtcattaatctcagcagaatccgaacat

SEQ ID NO: 26825 - DNA, 243 bp, Moraxella catarrhalis
atggatccagtaatcgcacagtacacactacttgcagtagctctactaatcggtgcaggtgcactagcaacaggtattggttttgctatcctaggcggtaaattcctagaaagtaccgctcgtcaacctgagcttggttcacaactacagaccaaaatgttcatcgttgcaggtctgcttgacgctgtaccaatgattggtgttggtatcgcaatgcttctattgttcgccaacccattcgca

SEQ ID NO: 26826 - DNA, 465 bp, Moraxella catarrhalis
atgatcaatttaaccattttcggtcagctgattgcttttgcaatctttgtgctattttgcatgaagtttgtatggccaccactgatcggcgcgattaatgagcgtcaacgcaaaatcgaagaaggcttaaatgccgcagaaaaagcaaaagcggatttggtttctgctgaaaagcaagtagaggcagaatttgcagctgctaaaaccgaagctgcatctatcattgagcgtgcgaataaaaccgctaaccaaatgattgaagatgctaaagaacaagctcgccttgaaggcgaacgcatcatcgttgcagctcatgcagctgtagagcaagaagctgcccaaactcgtgaacaacttcgctcacaggttgccagtcttgctgtactgggtgccgaaaagattttgcaagacaaaatcaatgaacaagaacacgccagcatgcttgaacagttggcggctaagctg

SEQ ID NO: 26827 - DNA, 546 bp, Moraxella catarrhalis
atggctgaacttactaccttagctagaccatatgccaaagcagcatttgattacgctaaagagcataatgcgatcagcaattgggaagcttttttgttgattgcaagcgatgttgtacgcaatgaagattttgcttcactgctgaacaatccagccatttctgcacaacaaaaagcagatattctgatggatgcctatggcaaattaacagcagagcaagcatcacaagcgttaaccaactttataaaacagttggcagagcatgacagattggcgcttatgcctgagatcactgctcattacaccaagctaaaatcacaagagcttaaacaggttgatgcttatgtaacttcagcctttccactaaccgaagctcaaagtaaaaagcttcaagagcgattagcactttcaacaggttctatcgtgattttgcacgaatctgtagacccaaatttgttgggtggagctacgatcaaggtgggtgacaagtttactgatggctcagtgcgtggcaagttaaaacaattaaagactcagctaactgcg

SEQ ID NO: 26828 - DNA, 1542 bp, Moraxella catarrhalis
atgcaacaattgaatccagccgaaatcagcaatctgattaagcagcgtattcaagaccttgacgtaagcgcaactgcaaaaactgaaggcgttatcgtcagtgtctctgatggtattgtgcaaatccatggcctagaagaagctatgtatggcgagatgatcgagtttgaaggcggtgtgtatggtatggcactaaaccttgaacaagattcagtcggtgcagttgtactgggtgaatatctgtccctacaagaaggtcaaaaagcatattgcacaggtcgtattttggaagtacccgtaggtcctgaactacttggtcgtgtcgtcgatgcattgggtaacccaatcgatggcaaaggtcctattaatgccaagttgaccgataaagttgaaaaaatcgctcctggtgttatcgctcgtcagtctgttgatgagcctgtcatgactggttataaagcagttgataccatgattcctattgggcgtggtcagcgtgagcttatcattggcgaccgtcaaactggtaaaaccgctttggcaatcgatgcgattattgctcagaaaaactcaggcattaagtgcgtgtatgttgctattggtcaaaaacgctcaaccattgcaaatgtggtgcgtaaattagaagaaacaggcgcattggcttatacgactgttgttgttgcgtctgcctctgagccagcagcattacaatatatcgctccatattctggttgtacgatgggtgagtacttccgtgatcgtggtgaagatgccttgattgtttatgacgacctatcaaaacaagctgtcgcttatcgtcagatttccttgctattacgccgtccaccagggcgtgaagcataccctggtgatgtattttatctacactcacgcctgttagagcgtgcatctcgtgtcaatgctgactatgtagaagcatttaccaatggcgaggttaaaggtaaaactggatctttgacagcattgcccatcattgagactcaagcaggggatgtatcagcattcgtacctactaatgtgatctcaattaccgatggtcagattttcttagagtctaatctatttaactcaggtattcgccctgcggtaaacgctggtatctcagtatctcgtgtgggtggtgcagctcagaccaaaatcatcaaaaagctctcaggtggtatccgtacagcacttgctcagtatcgtgaacttgctgcgtttgcccagtttgcctctgatttggatgatgcaaccaaacaacagttggaacatggtgtgcgtgtgactgagctgatgaagcaaaagcaatacgcaccgatgtctattgctgatcaagcggcagttatctacgcctcaaatgaaggctatttgtctgatgtacctgtagaaaaaattggtgcatttgaagaggctttcttacgctacctacgcaacgatcatgctgcattgatgagtgaaattgatgaaactgccaactataatgatgacatcgaaagtcgtctaaaagctgcagttgagtcatttaaagcatcagcaagctac

SEQ ID NO: 26829 - DNA, 1353 bp, Moraxella catarrhalis
atgactgatgatattttgacaagcttatcgagtgcttttgatgaattggcattgcctgctcatgctaagctatatcttgcttgtagtggcggtagggattccttggctttggcttatgcatgtttcttgttatatagacaaggtaaaataataaggctgcccaccatattacatgtacatcatggttggcaggcggcaaatgatgcttggatgcaattggttcatcgctgggcgattgagcatggatttgattgtcaaattttacggataactttggcaaaaaatagtgagacgcatgcccgtgatgcacgctatcaagcctttggcctggtcatgaaccaaggtgatgtactgatgcttgctcaccatgcaaatgaccaagccgaaacagtactgatgcgactggtttcgggtgcaggactgcaaggactgtcaggtatgaaagtttggcaagccaaaactgtgcatacagacgaggcagccaaaaccatcaccttgtggcgaccttggcttaagatatctagaaatcagatcagtcaatttgctaacgcccatgcactgccttatgtggatgatatcaccaataccgatcctgcttatgctcgtggacgcattcgccaagacattttgccgcatcttttgacgctcaatcctaaggcggttgagaatatcattcggtcggctggcctgctatcgatggcgtccaccatggtgggtcagcaagtggggactttgctggcatctttggatcatcctgccaaccaaatgccttatcagcaagtgcttggcattaaagactttcttaatttatcaaaatccgagcaagccttagtactgcaccgctggttgcaggcagatgaagcactgcccccaagccatcagttgacccagcaggttattgagatgatttgccgacaggataatgatcacagtagccagcttgtgtggcaagctgaacaggcggcttatgtgatgtgctgttatgatgactgtttatatcgttatcgtgcagatatttgggcattgtttggtacatcagggcataccaaaccaagtagccaaggctggattttgtctgatgatggccgttgtcaacttatcttgatggctaaaattgatgatatccaaaaaatcaccaaaaccgatacgataaacattggtaaacatagatataaaggcaaaaaattggctcaaaaattacgcataccattttggctaagagacagcttatggaaaatcaatcatcaaggtcatccatatttgattgcaccgatgatggtgtgggatttgagcagtggtcagcgtttggatagttttgcaccaatagggcgaatggtgtacaatgcacctgat

SEQ ID NO: 26830 - DNA, 1749 bp, Moraxella catarrhalis
atgagtacacaaccaaccgaaaaaaatgattttattcgcacaattatccgtgatgacttggcatcgggtaagcatgacagcattttgacacgcttccctcctgagccaaatggatatttacacattggacatgtgaaatcgatttgcctaaactttggcgtggcaaacgaatttggcggtgcgtgcaatttaagatttgacgacactaaccccaccgccgaaaaacaagattttgttgatggcattaaagaagatgtcagatggcttgggtttgaatgggcaggcgatgtacgctatgcatcgagctattttgatgaattatatggctgggcagtccaattaatcaaacaaggcgatgcatatgtagatttacaaagcattgatgaaatccgtgccaatcgtggctcgtttactgaggttggtgtgccatcaccacagcgtgatgccagtattgaggagaatttggctcgatttgaggatatgcgacaaggtaagtttgctgatggtgaagcggtattgcgtgctaaaattgatatgacgcacccgaatcttaatatgcgtgatcctgtgatttatcgtgttatgcatgctcaccaccatcaaacgggtgatcaatggtgtatttatccgatgtatgattttgcacatccattatctgatgcttatgaaggtattacccactctttatgtacacttgaatttgaagaccatcgcccattttatgattgggtcgtgcaaaaagttggctttgatgtgccgccacgccagtatgaatttagccgcctaaatattgaccacactctaacctcaaagcgtaagctcaagcggttggtagatatgggcgtggtatcaggttgggatgatcctcgtatgccaactgtggcaggtatgcgtcgccgaggctatacacctgaaggcttgagggatttttgtgaacgcataggcattaccaaatctgaggggctggtagatcatcgtatgcttgaatttagcgtgcgtaagtcgcttgaggagacgaccgctcgaggcatggcagttttgcgtcctttaaaggtgaccatcacaaattttgatgatgctgtctctaaatttaatgagcttaaaaatgaaaaaacactggcagaatttgatggtgaagcactttggctaactcagccgaagcatccgcatttgaacatgggggagcgtcaaattccttttaccaaaaccatctatattgatgccaccgattatgagattgagccgccagcaggctataagcgtctatcgccaaataatccagagattcgcctgcgtaacagctatatcctaaaagtcaatgagcataagacggatgatgcaggcaatgtgattgaattgattgcaacgattgatgagcatacactgggtaataaccctgaaggtcgcaaagtcaaaggcgttatccattgggtttctgccactcatggtgttacagctttagtgcgtttatacgaccatttattgctagaagaagatgaaattgatgcatctttggcacagaatgctttaggggctgatgctgatgcgttttggattaacagacaccttaacccaaattcattgactgtatatcaagcggtggttgagcctgatttagcaaaagcagcggctggtgagcggtttcagtttgagcgtgaaagctattttattgccgatagtgttgagcatacgcaatcttcacccgtatttaatcaaatcgtaagcttaaaagacagctttaagcctgaa

SEQ ID NO: 26831 - DNA, 1089 bp, Moraxella catarrhalis
gtgataccaaataacccacatcatcgagcacatgtaccaaaattacgcttggccatcaatggttttggtcgcattgggcgtaatatacttcgagcttatctgcaacagttaagtacttttggtcatattgaaattgtcgccattaatgatattgccgataaccaaatgcttttgcatttattaaaatttgacagcacgcatgggcgttttgatcaaggtgatcataatgcagcacaggtttcattaacgaccaatcaagataactcatatttgacgatcacaaaaggcgagttattacatcagattcttttgctaagctgtgatgagccaaagtatttgccttgggcagatctgaatgtcgatgttgtgctggagtgcacaggtcaatttcgttcctatgccgatgccaatcgccatcgcacagcgggcgcaaagcaagtgattattggtgcagcaccatttgatcgtgttgatgccagtattgtcattggggtcaatgatcacaagcttcatgctgatttgccaattatctcaggggtgtcttgtacgacacaagctttagtacctctattatctgtacttgatgataaatttggtatccaaagtgctatgatgactgagatccatgccgtaacagcagaccaaagcgtattagaccaagcacaccgtgattttcgccgtgcccgtgccagtggtcataatatcattcccacaacatccagtagcattaatgccaccgaacgagtgttacctctgatgcgtggtaaaattaatgggcattccatccgagttccaacaattaatgttgctgcgattgatttgactgtcaaatttaacaaaacagtgagcttagatcagattaaagatgcattgatgacagccagtcaaaaccagcttttgggcatcatggattattgtgatgaacctttggtatctagtgattttattggtaatagccattccttgattatcgatggacagcagttgatgatggcaggtgagcttgctaagatttatgcttggtatgataatgaatggggttatgccaaccgtttgcttgatatgtgtcaaaagctggcagacttaagg

SEQ ID NO: 26832 - DNA, 1947 bp, Moraxella catarrhalis
atgatagcatttaaaaatgttgcggtgcgtcgagaagggcgactgttattcagcgatgttaattttcagctgcacaagggtcaaaaaattggcttgacgggcaataatggcacaggaaaatccacactgttcgccaccattttgggtacgcataatacagatgttggcagtattagtttgcctgagtcatggcagattgctcatatggcacaagaggtcagcgcaacagcgatgagtgcgatagactatgtgctgtcaggcgatgaagaatggtggcagctcaattggcaaatcaaccatcaaaccagcttaactgatggtcaaattgcaccaatgtatcagcgttttgaggaaattgatggctatcgtacacctgccaaagcggcgatgattttgtcaggacttggctttggtgaagctgaccacagcaagcaagtatccatgttctcagggggttggcgtatgaggcttaatttggctcggacactgatgcaccgagctgatgtgttattacttgatgaaccaaccaaccatctggatttggatgccattttttggcttgaagaatggttattaaaattcgagggattgattttattaatcagccatgaccaagcttttttagatacagtgtgcggacatattttgcacatcgagcaaggacaaatcacactgtatacgggtaattatagccaatttattcgtacacgagctgaaaggcttgctcaagaacaacaggcctttgaaaagcaacaagccgtgcgcgctcatcttgaggattatattcgtaggtttcgtgccaaagccaccaaggccaaacaagcccaaagccgcattaagcagcttgaccgtatgacacagctgtcgcctgtgatggcagaaaatggctttagttttcgtttttatgaaccgcaacacatggcatcaccgctgatttatttggataatgccaccattggctatgatggtataccaatgctaacaaagatcaatctacgcatcaccccagatgcacgattggggattttgggtgccaacggtgcgggtaaatccacactcatcaaagcattggtgggcgagttgccactcattgatggtatctacaaagtctctgaaacattacagcttggctattttaatcagcatcagatggatagtctagatgacgatgccacacccatgataatgctaaggcgtctgtcaggtcagacatctgatgccaatttgcgtgcctttttgggtggttttgggtttcaaggtgaacgcatcgatacccaaagccgcttattttcagggggtgagcgtgccagattaatgctggcattgcttgtttggcaaagacctaatgtgctgatacttgatgaaccaaccaaccatctggatctacagatgcgaaatgcacttatgttggcattgcaagattttgctggggcattgattttggtatcgcacgatcgagatttgattatgtcggtgtgtgatgagctattgttggtctttgatggtcgtgctactgagtttgtgggggatatggcggactatgctgagcatctacgccaagccaaaaaagcgcatcaagccaatcaaaaaatggacaaatccattcatcaacaatctacaaatacggcaactggtcaagagatatgcttgcatgacagcctaagtaaagaagataggcgtaagaaaaatgcccaaatccgtgaacaaacagcaccgctaagaaagcaaatcgctaagcttgaggatcggcttggtaaactgagcgatacattggcgatcttagaaaatgagttgtctgatgctcgtctgtacgaagatgattataagtcagaattattggacaaactcaatcatcaaaacacactaaaatcacaaattgatgacatcgaagagcagcttttgacggcgatggctgagcttgaggcactagaagaggcattgtcagga

SEQ ID NO: 26833 - DNA, 1485 bp, Moraxella catarrhalis
atgagaaagtatattttaagccgtattttcagatcattactctctgtagttgtcgtgacggctttggtttatgtcattgtttataccttagtgccaacgagtcttatttttaaacaagaccccaactacaataagatgaccaaaactttggataagaaagttgattatgaaaatacaacttttgattccatgggatatattgactatttatctgctggggagctgcaaaagcgtgttagtagccaaggcggcgatattaatagtgaagctgcctaccaaaattatctgtcaaccttaaatggtcagtggcagttaaaaacctatccactgagcgaacagttttatgccacgcgtgatatccctatctatgagcgggtgtggtcttttttctctaatctgatagaaattgatcatccttggaagatacaagatccagacaatcccaatttaccaagatatatgcggtttgaaaaagatgctgcagcaggttgggcgttggttggttctggtactcaccataaatatttgctatataccaatcgtgaatttccttacctacaccaaaatttcattaatctgaatttgggaacttcttacccaacttacagcaatgtccctgtatggcaggtgattacacaaggacaaggtcgtatcgatttacaggaagtgactttcccaacaggtgtgaccaaaaagtcatctgtagatatttatagcagaacctataaaaatccgaataccatggatgatattgcccgtgctaattatggcgaaaatgacaactattccaaaactaaaaccaattataaagatccatctatgatttataattcatttgttattgggttgtttggcgtattattctcttatggaataggcttgcccattggtatgcttatggcacgctttaaagatggattgtttgataaagtttccacggcaaccatgacttttatgctggcattaccaagtattgcgttaatttatgtcatccgttttgctggtagtcaactgacaggtttgcctgactctttcccaatcttaggtgcctcggatattcggtcttatattttgccagcactaattttggggatatttagcttaccatatactgtaatttggtttcgtcgttatttggttgatattcaagccagtgattgggtgcgttttgctcgtgccaagggattatctgaatcagaaatttacaaaaagcacttatttaaaaacgccatggtgcctgtggttgttggtattcctgccagtattattttagccattggtggtgcaacactaaccgagaccatttttgcgtttcctggcatgggtaaaatgctcattgactcgattaaggcagccaataatgccatgattgttggactgacatttatttttactgttttatcaattatctcgctactattgggagatatcgccatggcattggtggacccacgcatcaaactatctgaagacaaaaaaggtgag

SEQ ID NO: 26834 - DNA, 1044 bp, Moraxella catarrhalis
atgactacaaataatgttatattggaagtaaatgatttggtggttgagtttacagtgcgtaaacgcattttaactgccattcgcaatatttctttgaagttacatgaaggtgaaattttggctttagtgggtgagtcaggatctggcaaatccgtcttaaccaagacttttacaggcatgttggaaaataatggtcgcattgcctcaggtgatattttataccgtggacaagatttaaccaaacttaccaataatgaagattggcttaaaattcgtggttcaaaaattgcgaccatctttcaagaccccatgaccagtttaagcccaattaaaacgattggtgcacagattgtagaggtaattaccaaacaccaaaaagttagtcgtaaagaagccaaaattcaagcgattgactatatgcgtaaggttggtatttccaatcctgaaaaacgctttaatgattatccgtttgaatattcaggcggtatgcgccaacgcatcgttattgcgattgctttggcgtgtcgtcctgatattttggtatgtgatgagccaaccaccgctcttgatgttaccattcaagcacaaatcattgatctgctaaaaagcctacagcaggaatatcgctttaccatcatctttattacgcatgatttgggtgtggtggctagtattgctgataaggttgcggttatgtatgcaggtgagattgttgaatttgcatcagtcaatgagatattttacaatccacaacatccttatacatggagcttattatcaagtctgccacagcttgttaatgattcaggagagctgtacgccattcctggtacgccgccatccttgtactcgcctattgtgggcgatgcctttgctttgcgttcagaatatgccatggaaattgactttgaacaacgaccgcccatcatcaatgtctctgatacccattgggcaaaaacatggcttttgcatcccgatgcacccaaggccaacaagcctgaagcgatctgtgatttgcatgaaaaaatattgcaaaaactatct

SEQ ID NO: 26835 - DNA, 618 bp, Moraxella catarrhalis
atgcaagggaaatttatcagttttgagggtactgagggcgtgggtaaaaccacggcaattgaagcactcattactcgtttggtggatcgtggcatacaagtcgtacgcacacgagagccaggtggtagtgagctggccgagcagttgcgtcaactatttttaaatccgaatgccaatatgaatgctgacacagagattttgctgatgtttgctgcacgcagtgatcatttgcatcaggtgattttacctgcaattaaatcgggtaaatgggtggtcagtgaccgcttttttgatagtacggtggcttatcagggttttggacgatatcatggaaaacaagcggcattggctaagattgagcttttgattgagcagtttgtgcccatttatccagatgtaacactttggcttgatttggatgtggtgatgggtatgcagcgtgccgccaaacgaagtgctgctgatcgattggaagccaacgacattgctttttttgagcgtgtgtatcaaggtttggcatatcagcacagccagcactccaatcgtattcatcgcattgatgccaatggcactgtggcagaagtggcggcacggatagataccgctttgggtcttgat

SEQ ID NO: 26836 - DNA, 1521 bp, Moraxella catarrhalis
atgagttcgcaaaatcaaccacagcgtaacgaagccgccatttcggaaaatgagctaatcgcacagcgtcgtacaaaactggacgccttacaacaaaaagccaagcaagcaggcaaaagtgcttatcctaatacctttaagcccaagaactattgtggtgatttgcaagcacagtttgatggcgttgataaagctaccattgaaagtggggataaggtatatgctaaggttgcaggtcgtgtgatgctcaatcgtggctcgttcattgtgatccaagacatgaccgaccgcattcagttatatgtggatcgtaaaggcttaccaagtgagacgcttgagctgattaagtcattggatttgggtgatatcgtggcggcaagtggctatattgggcgttcaggcaagggagacttgtatgtgcatcttgaagcatttgagttattgaccaaatctttacgcccattgcctgataaatttcatggcttgactgatacagaagtcaaatatcgcaagcgttatttggatttgatggtcaatgaagagacacgaaacacatttgccatccgtgccaaagtagtggcgggtatccgtgcatttttgacccaagaacgctttatggaagtagaaacaccgatgatgcatgtgattccaggtggtgcgtctgcacgcccttttgtgacgcatcataatgcattggatatgcagctttatttgcgtattgcacctgaactgtatcttaagcgattggttgttggtggctttgatcgtgtgtttgaaattaaccgtaacttccgtaatgaaggggtttcaacacgccacaaccctgaatttacgatgattgagttttatcaagcttatgctgattataaggatttgatggccttgactgagcgtatgcttgagacattggcgatggatattttgggatcgactgatgtatcgtatcaaggtgaagtgtttagctttaaaggtccttttaagaaaattacgatgtttgatgccatcttagaatacaattctgattttagtgccgatgatatcaatgaccgtgaatttttggcaaaatttgtcaaagatgaattaaaacaggaggttaaaccaagttttggtctggggaaattacaaaccatcgtttttgaagaaacggtagagaccaagttgcgtcagccgacttttatcactgaatatcctgccgaaacttctcccttggcacgccgaaatgacaccaatccacatgtaactgatcgctttgagatgtttattggtggtcgtgagcttgccaatggttttagcgagcttaacgatccaattgatcaagctgagcgattccgtgcccaagtggctgaaaaagatgctggtgatgatgaagccatgcattatgatgccgattttattgaggcacttgaatatggcttaccaccaacagcaggcgagggcattggcattgaccgtcttgtgatgctgtttgctgacgccgccagtatccgtgatgtgattttatttccacacatgcgtcataaa

SEQ ID NO: 26837 - DNA, 2394 bp, Moraxella catarrhalis
atgaacaagcaagtccaagtcattacctttaatcaacttggtaaaaatgatgttgacattgtcggcggtaaaaatgcctcattgggcgagatgattagccatttgggcggcttgggcgttaatgtgcctaatggttttgcaaccacggcagatgcgtttaaccgctttttgaatgaaacaggcttgcttgataaaatcaataccgaacttaagggtttggatgtcgatgatgtggatttattaacccaaataggtgccaaaatccgcagctggattatcgaacaagagctaccaaaagatttagaaaatgaaattcgtaccgcttttgcagaattatccaaaggtgaagatatcgccgttgctgtacgctcgtcagccacggctgaggatttgcccgacgcctcttttgcaggtcaacaagaaacctttttgaacattcgtggtattgataatgtgcttatcgccatcaaagaggtctttgccagtctttataatgatcgtgcgattgcctatcgtgtgcataaaggctttgagcatgcaggcgtggcgttgtccgcaggcattcagcgtatggtgcgttcagaaacgggtacttctggcgtcatgtttacgcttgacaccgagtcaggctttaatgaagtggtgtttatcacagcaagctatggcttaggcgagatggtcgtccaaggggcggtcaatccggatgaattttatttatcaaaagtattgcttgaacaaaatcgccctgcagttatacgccgtaatttgggttctaaacaaaagaaaatgatttatggcgatgaaggcagtaccaccaaatcgaccaaaattgtcgatgttgataaagctgagcgtcatcaatttgctttaagcagtgaagagctaacccgccttgccaaacaagccatgattattgaaaaacattacggttgtccgatggatattgaatgggcaaaagatggcgatagtggtgaaatctttatcgtacaagctcgtcctgagacagttaaatctcgtcaagacaaaaaccacatggaacgctatgtcatcaactcaaaaggtgctaaagtcttgacagaagggcgttcaattggtcagcgtgtcggcagtggtaaagtacgcatcgtgaccaacttaactgaaatgagcaaagtgcaagatggcgatgtgctggtctctgatatgacagaccctgactgggaacctgtgatgaagcgtgccagtgcgattatcaccaaccgtggcggacgcacttgccatgctgccattatcgcacgagaattgggcgtgcctgcgattgttggttcaggcaatgcaaccgaagttttggttgatggtcatgaggtgacagtttcttgtgcagagggcgatactggctttatttatgaaggcattttggattatgaagttcagcgtaattcaatcagcaccatgcccgaacttgcctttaagattatgatgaatgtgggtaaccccgaccgtgcctttggctttgcacagattcccaaccaaggcgtgggtttggctcgacttgaattcatcatcaatcgcatgattggcgtacatccaaaagctttattaaaccttgatacgctaccacaagaaaccgtgcaagccgttcaagaacggatggcaggctataattctcctgtggaattttatatcaataaattgattgaaggcatctcaactttggcggtagcattccgtgataagcctgtgattgtgcgtatgagtgactttaagtcaaatgagtatgccaatttaattggtggtaagctgtatgaaccttcagaagaaaacccaatgcttggttttcgtggggcaagccgttatgtgtcagacaatttccgtgactgctttgaacttgaatgccgtgcgttaaaatatgtgcgtgatgacatgggcttgaccaatgttaaaattatgattccatttgtacgcacgacaggcgaagccaagcaagtgattgaactacttgaaaaaaatggcttaaagcgtggcgataatgagcttgaaattatcatgatgtgtgagttgccaaccaatgcagtgcttgccgatgaatttttaaaatattttgatggcttttcaattggatcaaatgatttaactcagctgacattaggtcttgatcgtgattctggtattgtgtcgcatttatttgatgagcgtgatcctgctgtcaaaaaaatgctaagcctagcgattgatgcctgcaataaggctggtaaatatgtgggtatctgcggtcaaggcccctcagaccatgccgatttggcctattggctgatggagcaaggtattgactcggtttctttaaatccagattcagtgcttgatacttggttctttttggcagataaaaataaccaaccagcagacgattacgca

SEQ ID NO: 26838 - DNA, 1659 bp, Moraxella catarrhalis
atgcaaatcgaacgagactctatggaatttgatgttatcatcgtgggcggtggacctgctggtctatccgctgcaatccgcttacgccaattggcaatcgctgctggaatggatgagttcaccgtctgcgtcatcgaaaaaggctcagagtttggggcacacaccctatcaggtgccgtgatagaaacgcgcgcacttgatgagctgattcctgactggaaagagcgggacgcaccgatcacagtagaagccaaagaagaccgtgtgtatatgttgaccagcgaaaagggcagcaccgccctacccagctcaattgtaccaagcagtatgcataatgatggtaattatatcgtatcgcttggcaatgtggttcgctggctggctgagcaagcagaaagcttagaggtgatgatgttcccaagctttgcagccagtgatgttttatatcatgaagatggctcagtgcgtggtgtggtgacgggtgatatgggtctaaatgcacaaggcgaaccaaaaaacagctttgagcctggctacgaactgcttgccaaatacaccatctttgctgaaggctgtcgtggacatcttggtaagcgtctgattagtcgttttcatttggataaagacaaagacccgcagcactatggcatcggactcaaagagctttgggagattgatgccgacaagcacgaacaaggcgtcatcatgcatggttcaggctggccactgtcagaaactggtactacgggtggctggtggctgtattttgccgaagacaatcaagtcagctttggtttggtggttgatttgtcttaccataatccatatgtctcaccatttgacgaacttcagcgtcttaagcttcacccaatcattcgccctattttagaaggtggtaagcgtctgtcatatggtgcacgagccctaaccaaaggcggtctaaatagcttaccaaaattaacctttgctggcggtgtgctggtgggtgatgatgcaggttttctaaaccctgccaaaatcaaaggcacccacacttcaatgaaatcaggcatgcttgccgccgaaagcatctttaatgccattcaagcaggacgcagctctgatgaagtggtcgaatatcaaactgcttttgagaattcttggctatttgaagatgctcatcaagctcgcaacttctcaccatcattacatcgcatgggtacttggatgggcggtgtgttcacttttgttgagcaaaacttatttggcggtaaaatgccattgaccattcatgacaacaccccagattactcaacacttgataaggctgaccatgcctataagcccaactatccaaagcctgatggcaaactgacttttgacaaattatcaagcgtgtttatctcaaataccaatcacgccgaagatcaaccaaatcatctgcgtctgacagatccagcagtgcctgtctcactcaatctaccgctttatgctgaaccagcgcaacgctattgcccagcaggcgtctatgaaattgtacacaaagaaggcaagacgcctaaatttgtgattaacagccaaaactgtgtccattgtaaaacctgcgatatcaaagatccatcgcaaaatattacttgggtaacacctgagggcggtggtggccctaactatccgaatatg

SEQ ID NO: 26839 - DNA, 1341 bp, Moraxella catarrhalis
atgaaattagctgtcatcggagtcaatcataagactgcccccgtttcattgcgggagcggctttcgtttggctcggatatgcctcaggcaattgagcaactatcaacattggcaaatggctgtaccatcgtctcaacttgcaatcgtagcgagctttatgttggtatcgttgatgatgtgggcagtcagcacgagtctcaagatgagcaatcaggcgggctaatttctgctaagcttcaggcgattggtgaatggttggcagagtttaagggcatttcatttgatgagattgctccttatttgtatacttatgaagactcacgtgcacttaatcattggctaagagttgcagcaggtttggactcaatgattcttggtgagccacagattttaggccagattcgccaagcggttgcactgtctcgagagtatggcggtgtagacagtgattttgggtggctgacgcagcaggtttttgctgcggcacggacggtacgccgtgataccaaggttgggcagcaagcggtaacattaggttttgcaaccgctcgtcttgctacgcagatttttgatgacccaagtgagttgaccttcttattggttgcagcaggcgagatgaatcgattggttgcacataatgtcgccgctttgggtgttaaaaaaatcatcatttgcaaccgaagccctgagcgagcccaagcactgtcagatgagctatctgagatggctcagcaggcggggcgttttcttgagattgagcttgcaggtttggacagattgggcgaagttttaccacacgcagacattgtcagtagttgcagcgggagcatgcaggcactcatagataccgccatggttaaatatgcgcttaagatacgccgtcatcagccgatgttgcttgtggatttggcagtgccaagagatattgatcctttggttggacagcttgataatatctacctgtattcggtggatgatctacagcatgtcatcgcaggtaatatcgctgagcgtaagcaagcagcagttgaagcggagcttttggtcggtcagctggtagcagatatcgaagcacagatgcaaggacaggttgcccgcacgcatatccgagattatcggcaaatggctgaggcacgcactcaagttttacttgcacgggcgatgtcacagattgatcaaggtgatgatgccaaagcggtgttaagcgagttttctcatacgctcagtcaagcacttatgcacagcccttcaaggctgattcgtcaaattgccaaaacatacgatgcagataccctagatttggtgtcgcatgaactcattcatagttatcgtaagccaatt

SEQ ID NO: 26840 - DNA, 567 bp, Moraxella catarrhalis
attgaaaattttacccatctgttgattatttggcagtttcatcataatcgaccccaagctaactttcgtccacaagtgaggccaccaagatttggcggtaatgctaaaatgggcgtcttgcaaacccgcagcatgtatcgaccttcacctttggggttgtcggtagtccgtctagagcgtcttgaggtgattaatcataaagttaggctgtatatcattggcgcagatatggcggatggtacgccaatttttgatatcaagccttatttggctttttctgatagtatcaccgatgccatcagtcagcagatagacacgccatccatgcgtaaaactgccatagataccaaggctaaacaggtgtttgatgggcttattaggcaaggtgtgttagaggatgctgatgttcagattatccaaggtcttatcgctcaagacccaaggcctgcttaccgtcaagatgaggtgggcaccatttttgctttgcgttatgatggcgtggatgtggattttttgatgaatgagacaggcgtgcttatgattgttggggttcgcttgattgggtct

SEQ ID NO: 26841 - DNA, 947 bp, Moraxella catarrhalis
atgtcatatatggctgtcttttcaggtagtgccaaccctaaacttgcccaaaccgttgccgataatctgcacattcctttgggtaaggcagacatcaatcgtttttctgatggcgaaatcgctgttgaaatcaaagaaaatgttcgaggtaaagatgtattcattctgcagccaacctgtgcacccaccaacgatcatttgatggaagttattttattggcagatgcactgcgtcgctcaagtgctggtcgtatcacagccgtgattccttattttggctatgctcgccaagatcgtcgccctcgttcagctcgtgtgcccatctctgccaaggtggtcgctgatatgttgtcgattgctggtattgaccgtattatgatggttgatttgcacgccgatcaaattcaaggcttttttgatgtgcctgttgataacttatacggcacgcctgtgctattgcgtgatcttaagcaacaaaactatgaaaacttaatggttgtttcaccagatgttggtggtgtggtgcgtgcgcgtgccatggcaaaattacttggtgatgctgatcttgccattattgacaagcgtcgtgctcgtgccaatgaatctcaagtgatgcatattattggtgatgtatctggtcgtgactgtgtcattgttgatgatatcgttgataccgcagcacactgtgtaaagccgctcaagcactcaaagaccatggtgcacgccgtgtggttggttatattacccatcctgttttatcgggtaaagccatcgaaaccattcaaaaatctgccctagatgagctggttgttaccgataccattccactttctgaagctgcctctgcttgtgcgaatattcgccaaatcagtattgcctcgatgattgcagaatcattacgccgaatcaataatgaagagtcaatcagcgccatgtttgagtatgat

SEQ ID NO: 26842 - DNA, 1373 bp, Moraxella catarrhalis
atgccgttatctgcccttaccgccctatccccacttgatggtcgctatgcttctaaatgcgatgctttgcgtccgtatctgtccgaatttggacttatccacgctcgggttactgttgaaatccgttggttgcaagcccttgccaatcacccacaggtgatagaaattcagccattttctgccaaaaccaaccaacgccttgatgaaattgtgcaaaattttagcgaagaaaacgccctgcgtatcaaagagattgaacgcaccaccaaccacgatgtcaaggcggtggagtactttttaaaagagcaaatcgctgatattgacgagcttaaaaatgcgggcgagtttatccattttgcctgcaccagcgaagacatcaacaacttatcacatgccttaatgttaaaggcaagtcgtgatgtgctggcaagcagcatgcaacaactcattgacgccatcgccacgcttgcccaaacgcacgccaatcaacccatgctctcacgcacacacggtcaaaccgccagccccaccacattgggcaaagaaatggcaaatgttgcctatcgcctacaccgccaattaacccaatttaatcatgtggaattattaggaaaaataaacggtgcggttggtaattataacgcccatttatccgcttatcccaacattgactgggcagaccatgcccaaaaattcgttaccagtcttggtttaacattcaatccatacaccacccaaattgaaccacatgattatatggcggagttatttgatgccctgcgtcgatttaacacgattttaatcgactttaaccgtgatgtgtggggctatatttcgcttggttactttaaacaaaaacttaaagatggcgaggtgggttcatcaaccatgccccacaaggtcaatccgattgactttgaaaactctgaaggcaaccttggtttggcaaatgcggtcttggctcatttgggcgaaaaattgcccatttcacgctggcaacgagatttaaccgactcaaccgtccttcgcaacatgggcgtggctttgcccaaagtttgattgcctttgatgcctgcttaaaaggcattggtaagttggagataaacgccaatcgtcttaatgaagatttgcacaatgcgcaagaagtgcttgccgaacccatccaaaccgtcatgcgtcgctataatatagaaaaaccgtatgaaaaattaaaaaccctaacccgtggacaagccatgacccgtgagatgatgctggattttattcatggtgatgagctaaatgccgtgccagcaagtgagaaaaaacgcttggcggacttgacccccgccacctatattggcaatgctgatattcaagcaaaaaatattaaa

SEQ ID NO: 26843 - DNA, 885 bp, Moraxella catarrhalis
atgaactacaaacatgcctatcatgcaggtaactttgctgatgttgtcaagcacattttattgttacaattattaagccaatttagtgctaaagccaagccattttatgtgcttgatgcctatggcggtcgtggcttgtattcattggcaagcagcgaaacccaaaaaacccaagaagcacagcgaggtgttgttgtgcttgagcaagccgttaaggcaggcttggacggactgccaaacgctgtcagccgatatttatcagacttagcgtttgcccgccaaaaatacgaccaatatgtctatcctggttcaccctggtggattgcccatcatggtgaatatcactctacaaatgcaccactacgagcagaggcatttgaaacggtggcagatgagtatgatgcactcaattatcagctttatcagttgccaatcggcattcatcatcgagatgcctttgagggcgtgcgtgctgttataccgcccaaagaaaagcgtggcatcattttattagatccgccatttgaacaagaacataaagactttagccgcttggtagatttattggttagcagccataaaaagtttgcgacagggacttttattttgtggtatcccattaaaaatattgaggcagttgaattattttataaaaaaatgaaacgcactggtatcaaaaaacaactggtctgcgagttaaatttatatcctaatgatgtcgctgttggactaaatggaacgggtctattggtcatcaatccaccgtggcaatttgccgataatgcccaagaagtcattgagtttttggcacccattttaaagcccaaagatgcaccccaaatgactcttggtgagatggcagtggttaagtggttggttgcagaa

SEQ ID NO: 26844 - DNA, 993 bp, Moraxella catarrhalis
atgaaaaaactagttatggctgcattggtgatggcaactgccgcaccagcgtttgccaatgaaattgtcgtatattcagcgcgtgctgatgagctattaaagcccatcgcagaagcctatcaacaaaaaactggcacaaaagtgaccgttgtcagtgataaagcaggccctttgatggaaagactaaaagctgagggcaaaaatacccaagccgatgtgcttatcacggttgatggcggtaatctttggcaggcaacacaagctggtgtcttacgccccattaactcttctgtattaaaaagcaacattccatcgcatttgcgtgacccaaaaaaccattggtttggattatcagtacgggctcgtaccattttttataacccaaataaggtcaatccaagcgaactttcaacttatgccgatttggcagacccaaaatggaaaggcagattatgcttgcgtacctctaataatgtgtacaaccagtctttggtggcaacgatgattgcaaaccatggacaagccaccaccgacagagtggtcaaaggctgggtagcaaatttggcagccgcaccatttgcaaatgacacagcactgttagaagccattgatgcaggtcgctgtgatgtgggtattgccaatacttattattatggacgcttgctaaattctaagcctcaggttgctaataatgttaaagtattttttgccaaccaagcaggtaaaggcacgcatgtcaatgtttcaggtgcaggcgtggtaaaacattcagacaaccctgccgaagcccaaaaatttatcgaatggctatctagcaatgaagcacagcgtttgtatgctgaccgtaattttgaatatccagccaatatacaggtaacgccaacgcctgctgtagctcgctggggcagatttaaacaagatttcatcaatgtatcggtagcgggtcaaaaccaacaaaaagccatcatgacaatgaaacgagcaggttataaa

SEQ ID NO: 26845 - DNA, 1071 bp, Moraxella catarrhalis
atgacacaacaaacccaacctgtcttacttagcgactatgactaccatttgcctgacgacctaatcgctcggtatcctttaaatgagcgtaccagctcacgcctattgcatgtctcaaaaaacagctgtcaagatttacgatttaccgatttaccaaacttattaaaaagtggggatttattggtactcaatgacaccaaagtcatcaaagctcgcctgcatggtcaaaaacaaacagggggagcggttgaggttttgattgaacgcatattgcccgatgaaatcaacaacaatctttataaagccttgtgccatgtacgctcaagccgctcaccaaaagtcgggcaaactctaaatttagccaataatcagatgcaagctaccgttatcggtcgccaagacaatttatttattctaggctttaggtcgcccattttggctgatttggataactatggtcaaatgcccattccgccctattttgagcgaaaggctgatgaaacagatgatgagcgttatcaaactgtctttcataatcccaccaaatccgccagtgttgctgcaccaacagccagcctacactttgatgacgcattattgacacagcttagaaaaaaaggcgttcaaattgcttttgttactctgcatgttggttctggtacatttacgccagtcaaagtcgacaatctagccgatcatgtcatgcatgctgaatacgctcatcttcctgcgtctactgccactcttatcaataacaccaaatctgcaggtggccgcatcattgccgttggcacaaccgttactcgtacgcttgaaacggcacaccttcatcgtattcatggtgaattggttgaatttttgggagatacccaaatttttatttatccaccttatgaatttggtgtggtagattgcttgattacgaattttcacttaccaaaatcaacgcttttaatgttagtctcagcatttgctggcactcaaaccattcaagaagcttacaatcatgccatcaaaaacaaataccgtttctttagctatggcgatgcgatgtttttggaaaaagcccag

SEQ ID NO: 26846 - DNA, 1878 bp, Moraxella catarrhalis
atgcgtgaacataatcatattaacgaagatcacgacacttcttcatcacagttaggtgcactgattcgcctaggcaaggagcaaggctatctcacctatgctgaagtgaatgaccaactgccagagtctgtcaccgaaagcgatcaaattgaagacatcattcagatgttgaccgatgtgggcattcaagtctttgaggtagcaccagatgatgatgatattttattatcagacactggtagcgatgatgacatcgcaaccgatgaagcagcagcagtactagcctctgttgaaactgagcctggacgcactaccgaccctgtgcgtatgtatatgcgtgagatgggtacggtggatttgctgacccgtgaaggcgaaattggcattgccaaacgcatcgaggaaggcactcgtgaggttcaatatatcatggcgtattggcctggcacagtaaaatttgtgcttgatgaatatcagcaagtgcttcttggtgaaaaaaagatttccgacattgtctctgggtttttaaatggcgatgatggcgattttattttaaacgaagaagaaattgagctggatcttggatcacccaaaaccaccgataaagatgatgctgaagaagatggtgagtctgatggtactgaacttgatgataccgatgattcaagcctagaccctgaagaggtgcgtgtccgttttgaggagattcagcgtttgtatgatgtagcccaagaagccttggctaagcatgggcgtggtagtgaagcggttaaagtcgcttatgatgagctggccaatcatttcatgctcattaaactcaataatcgcttgtcggatcaagtcatgagtttgatgcgtgaagtttatgaagatgtgcgaagtaatgaacgccgcatcatgaaacttgtgattcgccatggtaaaatgcctatggatgagttcaaaaaaaccttcccaagcaacgaaactaatctcgaatggctgtctcatcgcatcaaaggcggtcctgcttttgccgaaactttagccaaaattgagcctgaagtggttgccttacagcaaaaactcttagcacacgaacaggcacttcaaatggacatccgtgatatgaaggcagtcgctcgccaaatggccatcggtgaggctaaggctcgtcgtgccaaaaaagatatggtggaggctaacttgcgcttggtgatttctatcgccaaaaaatacaccaaccgtggcttacaattccttgatttgattcaagaaggtaatattggtcttatgaaagcggtggacaaatttgaatatcgccgtggctataaattctcaacctatgcaacttggtggattcgccaagccatcacccgctcgatcgctgaccaagcacgcacaatccgcattcctgtgcatatgattgaaacgattaacaaaatcaaccgagtatctcgccagctactccaagaaatggggcgtgaaccaacaccagaggagttgggtgagcgtttggatatggacgaagccaaagtgcgtaaagtcctaaaaattgccaaagaacccatctctatggaaacaccaatcggtgatgatgaagatagccacttgggtgattttattgaggataataccatctcaagcccaattgaaaacgcaacggcagaaggcttgcgtgaagcgactcgtgaggtgcttgataatttgaccgaacgagaagctaaagttctaaaaatgcgatttggtattgatatgccaagcgaccatacgcttgaagaagttggtaagcaatttgatgttacccgtgagcgtatccgccaaatcgaagccaaagcattgcgtaaattacgccacccttctcgctctgaacatttacgctcatttttggaaaatgat

SEQ ID NO: 26847 - DNA, 780 bp, Moraxella catarrhalis
atgttggatcaattgattattggcagtagaagttttaattcgcgtttgttggttggtacaggcaaatataaagacctaaatgaaaccaaagatgctatccatgccagtggtgccaatattgttacggttgccattcgccgaactaatattggacaaaataaagatgagccaaatcttttggatgtgatttcaccgaataaatataccattttaccaaatactgcagggtgctttgatgccgatagtgcggtgcgtacttgcatgttggcacgagagctgcttgatggccataatttggttaagcttgaagtgcttggtgatgaaaaaaacctttatccaaatgtcaccgaaacactaaaagcagcaaaggtattgattgatgatggttttgaggtcatggtctatacttcagatgacccaattgttgccaaagagcttgaaagcatgggctgtgtggcaattatgccattgggtagcttgattggctcagggcttgggattttaaaccgccacactctaagcttaattattgagcaaaccaaagtacctgttttggtcgatgcaggcgtaggtacagcatcagacgctgcaatagcgatggagcttggttgtgatggtgttttaatgaatactgccatcgcccatgccaaaaatccagtgatgatggcttcggcgatgaaccatgcagttgtcgcaggtcgagaagcgtttttggcagggcgtatgcctgcacgccatatggcacaagcaagctcaccgcagacagggtacttttttaaa

SEQ ID NO: 26848 - DNA, 1440 bp, Moraxella catarrhalis
atgagtgcattacgccagacccaatcgcagttacagctttatgataccctaagtgccagcaagcgtccatttaaaccgattcatgcagggcaaattgggatttatgtgtgtggtatgacagtttatgactactgtcatatgggtcatgcgcgtgtcatggtggggtttgatgtgattgtacgctggcttagagccattggctatcaggttaattatgtacgaaatattacggatattgacgataaaattattcaaagagcctacgataacggcgagaccattaccgagctgaccgaccgcttcatcacagctatgcatcaagatgaacaatttttgggttgtcaatctcccaacatagaacctcgtgcgaccgaacatattgaaaatatgcagcatctgattgatgttttgctgacaaaaaacttggcctatcaaggcagtggcggcgatgtgtattatgcaatcgaaaaatttcctaattatggcaagctctccaagcgtcatgtagatgatatgcaagcaggtgcatcagagcgtgtgagtaccgcagaagataaacgccatccttttgattttgtattatggaaaaccgccaagccgtctgaaccacattggcaatcgccgtggggtttgggtcgacctggttggcatattgaatgtagtgccatgagtacttgctgtttgggcgaaacttttgacattcatggcggtgggcatgatctgcagtttccacatcacgaaaatgagattgcccaatctgaaggtgcaactggtaaaacctatgccaatcattggatgcatatggggtttattaatattgatggcgaaaaaatgagcaagtctttgggtaattttttcaccattcgtgaggttgtggataagtttcatcctgaaacgatacggttttttttattatccagtcattatcgcagtcctgttaatttttcagatacagcactcaaagaaagtcataccgcattatcacgcatctaccaatcactaaaatcggccgaaaactttggcgtcatatcaatcatgccaaatgcttgggagagtgaagcagggcaggcatttgccaaagcgatgaatgatgattttaatacccccaaagcggtgagcgtgctttttagcgttgttactgagattaatcgagccatgaaagcaggcgaataccaaaaagccactcaagaagcatcgacgctcaagacgctggcctcggtgcttaatatcgcccaatcatcgccccatgagtttttgcaagccaatattggtaataagcctgatggcttaagtgatgccgagattgccaataaaatcgcccaaagacaacaagccaaagctcaaaaaaactttgccaaggcagatgcgatccgtgatgagcttaaccgtcaaggcattgagcttgaagatggtcgtatgggtacgacttggcgacggata

SEQ ID NO: 26849 - DNA, 1260 bp, Moraxella catarrhalis
atggataagtttaaaattataggggcaagtcgtatcattggtgaggtcaccatttcaggttcaaaaaatgctgctctgccactgttggcagcaatgctactacccaatggtgaaacggtgcttcataatgtgccgacactaaaagatacagccactttgattgaactgattgcaggtactggcgtaaaaatttataaagaaggtaatacggtcacagcagatgcaagtgttgtgacaaattattatgcaccttatgagttggtgcgtacgatgcgtgcatcgattttggtgctaggtccattgcttgcacgctttggtgaagcggaagtcagtttaccaggtggctgctctattggctcacgacctgtggatcagcacctaaaggcactagaagccatgggtgcaactatcgaagttgaaaatggctatgttaaagctcgtgcaccagcaggcggtcgcttgataggctgtgattttagctttgatatggtgacggtcggtggtaccgaaaatatcatcatggcggcaacgcttgctttgggtaccacacgcttagaaaactgtgcgactgaacctgaggtggtagatttggcaaatatgttggttgccatgggtgccaaaatcagcggtatcggcacaacaacaatggttattgagggcgttgagagcttgcatggctgtgaatacagcgtgatagcagatcgtatcgaaacaggctcttatttggcaggtgcactcatgagccgtggtgatgtcttagtgctcaatacatcggcagagtttttacatcctgtactcaaaaaatttgaagccatgggtgcgaccattaccacaggtcacaactggattcgtgcggtgatgaccacgcgtccaaaagctgttgatattcgtactcaagtacatccaggatttccaaccgatatgcaggcacagttgatggcggtgtgctgtttggcagaaggtacaagcacgattattgaaaatatctttgaaaatcgtttcatgcatgtgccagagcttcagcgtatgggggcaaatatccgcatcgatggtcatactgccattgttaaaggtgttgaaaaatttatgccagcgcccgttatggcaaccgatttacgagcatccatgtcgcttgtgatggcggcggcgtgtgccgaaggtgaaagtgttattgatcgcatttaccatatagaccgtggctatgatgatgttgaaaataaactgcgtgggttgggtgttaatattgagcgtatcaaaggc

SEQ ID NO: 26850 - DNA, 654 bp, Moraxella catarrhalis
atgataaccatgacagaaaatttttcaggcttaaccattgctctatcaaaagggcgaattttggacgaaaccttgcctttatttgctaaggcagggattgtaccgctagaaaatattaaccagtctcgaaagcttatttttccgaccacacatcccaatgttcgtttgttgattttgcgagcttctgatgtgccgacatatgtagagcatggggcggcagatattggcgtggcgggtaaagatgttttgatcgaatatgatgcacagatttatgagctgctggacttgggcatcgccaaatgtcgtctgatgactgcaggtgtcaaaggtgcagtactgcctaatcgccgcttgcgtatcgccaccaaatacaccaatgtagcacgcaactattttgcgtctcgtggtgaacaagtagacatcatcaagctgtatggctctatggagcttgctcctttggtggggcttggtgatttgattgtggatgtcgtagatacgggaaataccttgcgtgtcaatggtttagagcctttggaaaccatctgccaagtgtcatcacgcctgattgtcaatcctgtcagctataagcgtaaattggtacagattgagccaattttacaaattttggaaaaagctgtcttggagcagggtgct

SEQ ID NO: 26851 - DNA, 1218 bp, Moraxella catarrhalis
atgaccatcattaaacaagatgatttcattcaaagtatcgccgatgcatttcagtacattagttactatcacccgacagattatattgaagctttggttgaggctttggcgcgtgaagaaaaccctgctgccaaggatgccatgacccaaattttggttaatagtcgtatgtgtgccgaaggacatcgtcccatttgccaagatacgggtattgcaactgtatttttaaaagttgggatgaatgtcacttgggatgcgaccatgagcgttgaagatatggttaatgagggagttcgccgtgcttataatcatgctgataataccctgcgcgcttcggtattgactgacccagcaggcaaacgccaaaataccaaagataataccccagcggtcatccatatgcagattgtggcaggtgataaagtggaagtgacttgtgcggccaaaggtggtggttctgaaaataaatcaaagcttgccatgctaaatccatcagatgatattgttgattgggtactaaaaactatccccacaatgggtgcaggctggtgtccacctggtattttgggtattggtattggtggcacaccagaaaaagcagcactgcttgccaaagaatctttgatgagccatatcgatattcataaacttaagcaaaaagccgactctggtgcccagctgtctacgacagaagcgttacgcttggaaatttatgataaagtcaatgcgttgggtattggtgcacaaggtttgggtggattgacaacggtattggatgtcaagattttagattacccaacacatgccgcttcaaaacctgtggcaatgattccaaactgtgcagcaactcgccatgtggaatttgagcttgatggttcaggtcccgttgagcttatgccaccaagcttggatgtgtatccagatgtgacttataatcctgaaaatggtaagcgtatcaatgtcgatacattgaccaaagaagagatagccaattggcaaacaggtgatgtgcttttactgagtggtaagatttacacaggccgagatgctgcacacaagcgcatgacagatatgctcaataatggtgataacagctgtcagttagatttataccaattaagtgtgcatactatcgagagacatgctacaactgagcggatgatatttatgcatccaaacgcacccaaaaaatatttctgtgcttgtagctcagttgga

SEQ ID NO: 26852 - DNA, 1368 bp, Moraxella catarrhalis
atgaatttttttgggtataatacagaatttaattttgataggtatgatttgggggtgatgatgaatgctgttttgcttgccgtcattgtgatggttggcttatcgcttgtacgggtacatgtggtactaagcttggtggttggggcacttgttggcggtttgatggcgggtatgtcggtcgctgatacgctgacttcttttcaagatggtattaaaaatggtgcacaaattgctttatcttatgccatgcttggtgcttttgcgatggcaattgcccattcaggattgccacagatattggcagataagctgattgctcggttgcagtacgctgatggcacaggtgggcttaagtttttgttattttttatcttaattattatggcaatcatgtctcaaaacattgtgccgattcatattgcctttattcccctaatcgtgccgccactgttatcggtgatgaatcgcttgcatctggatcgccgtgcgattacatgtattttaacttttggtttggtcaatacatacatgtttattccttatggatttggcgatatttttttgaatcaaattatccttaaaaatatcaatgaagcaggcatgataaccaacaacatctcaatgatgcaaactatgatgatccctgctttgggtatgctgattggacttttgattgccatttttgtcacgtatcgtaaaccgcgtcattatcaagaaaaagtcgtggcggtcggtcaggcgtctattcaagtcggtacgcttaatatcgtcgtggcaatggcggcaattgttgcggcatttgtcgcacagctaatgacagattctttattgattggctcactcgtgggttttgcgatatttatggcaacaggtattgttaaatggcgtgatgccaatgaggtttttaatgatggcattaaaatgatggcgatgattggctttatcatgatttgtgctcaaggttttgcagaggtgatgaaagccacagggcagattaatgcgttggttaatggggcggtgggtctttttggtgataacaaaatgcttgcggcagtatcgatgcttttggttggtttggtggtgacacttggcattggttcatcattttcgactgtccctattattgcgaccatttatgtaccattgtgtatggcgatgggctttagtgtacctgcgacagtggctttgattgcaacagcaggcgtactgggtgatgctggctcacctgcatcagattctacattaggtcccaccatggggctgaatgcagacggccagcatgaccatattcatgattctgtgattccaacttttatccactataatattcctttgattgtttttggttggattgccgcgatggtgctt

SEQ ID NO: 26853 - DNA, 2460 bp, Moraxella catarrhalis
atgacaaccccaaatacaacttatgacaatgccaataatcatcataatttacaacaactgcccttaattgctgttcgtgatgtcatcatttttccacagacacaagtcgccttatttatcggtcgtgagcagtccatcaaagccattgaacttgcccaaaaatcacatgagggtaaactgattgcggttgcccaaaaagattcactgtctgaacagattgatattgaagatttacatcgctacggaacactttgccgaattgtcagtaccatgccacatgactccgatgataaatgcttaaaggtgttgattgagggtcttgagcgtgttgaaatcggtcgcatccaaaatgccaatgatgatactgatgatagctttatcgctgagttcacggctgccaatgttgacctcaatcttagccaagaagaagctgatgctcaaaagtcggtgctacttgagctatttagtgactatgctgaaagtacgctgagaaattcgcgtgagctgatccgtgttgccagcggttttgataatttgcttgagctaatttactttgtcgtgacacgcacacagctacctcttgataaaaagcaagcgttgcttgaatcgggtgatgctgctgaatactttaaggtgctaagcgaatatttcactaacactaaaaccgagcatagcatcgaaagtcagctacaagacactgttcgaaagcaaatggaaaacaaccaacgcgagtatttcttaaatgaaaaaatgaaagccatcaaatcagaactatccgatttaaatgatggtgccgatgatgacgatgttgagcttgaaaatcgcttaaaagaagctgatttgcccgatgatgtccgaaaaaaggccgaaagtgaatttaaaaagctcaaacaaatgccagcatcatcatcagaggcatcggtggtacgaggttatgttgagtggattttagacacgccatggaacaaagccagtaaagttagcattaatcttgataaagccaaacaaacactggataaagatcattatgggctagatgatgtcaaagaccgcattttggaatatttggcagtacaatctcgagtgaagcagcttaaagggcctattttatgtttagttggccctcctggggtaggtaaaacttccttgggcgagagcattgctcgtgccacaggtcgtaagtttgtgcgtatggcattaggcggcgtgcgtgatgaagctgaaattcgtgggcatcgccgtacttatatcggtgcgatgcccggcaaaattgtacaatcacttgccaaagttgaggttaaaaatccgctatttttactcgatgaaattgataagatggcacaagattttcgaggagaccctgcttctgccttacttgaggtcttagatccttcccaaaataaatcctttaatgatcattatttggatttagatttggacttatcgcaagtgatgtttatttgtactgccaacagcatgaacattccgcctgcattgcttgaccgtatggaggtcattcgcttacctggctacactgaagatgaaaaaatggccattgccaataattatctaaccccaaaagctttagaacaaaacggcctaaaacccaatgagcttgatattactgatgatgcattaaccagtattatccgccattataccaaagaagcaggcgttcgtaatcttgagcgtgagattaataagattagccgaaaagcggtacgctcccaaatcgaaaaatatggcgtcaaacccaaaaaaggtgttaatatcgatagcttaaccatcaccgatgataatatttcagattatttgggcgtcaagccacatgattatggtttggctgaaaaagaccctgagattggacgcattacaggtttggcgtggacttcggttggtggtgagcttttgaccatcgaatctgcaaccatgcagggcaaaggcgagcttgtctttacagggtcgctcggtgatgtcatgaaagagtccattcgtgctgccatgagtgttgtgcgtgccaatggtgagcgatttgggattacttatgaaaaatttaaaaataccgatttgcatatccatatgcctgaaggtgcaaccccaaaagatggcccatcagcaggtattgccctaactactgccatcgtctctgccatgacaggcatcgccattcgtgctgatattgccatgacaggtgaggttactttgcgtggtaaagtattacgcatcggtggattaaaagaaaagctcttggcggcacatcgtggcggcatcaagcatgtcttgatacccaaatccaatgagcgtgatttgatcgagattcctgacaatgtcaaagaaggtcttgtcattcaatctgttgaaaccattgatgaggtgctggcggtagctttggttgagccaattcgcccacttcctccacaagcggtcactcacaagaccagtagcgatactgtacgcagc

SEQ ID NO: 26854 - DNA, 636 bp, Moraxella catarrhalis
atgaaagccttatttgactatattccactcattatattttttgttctttataaaacgaccgaaccaacagacagcacgcatccgattttacaactcattgggtcggcaggtacggataataaccacattttagtggcaacatttgggctgattgccgcaactgtaattatatatgggtatttattcatcagccaaagatttcacctagaaaagcagcagtggtttgtgttactgatgacggtggtttttggtggaatcaccttagcacttagcgacgcattttatatcatgctaaaagcagtgttaattaatggtgcatttgcactggggctactcatctccccattatttagcaaagataaaagccccatcatcaaacgcttgtttgaacctgtatttcacctaacgcatcaaggttggcagtatcttaatttggcttgggtgagtatgtttactgtgatggcaggtttacatacattttttgcattcatttttgcagaggggaaatactggggcgaatttaccgcttttggtgatatgattgtcatgtttatatttttgggtgtgatgtttttttgcctaagaaaaaatatcagaaaggacattactgagaattctaaaaaatcacttaataaa

SEQ ID NO: 26855 - DNA, 1266 bp, Moraxella catarrhalis
atgttagaccctaaatttttgcgtggtaacctagaagagctaaaagccaagcttgcggtgcgtggttatgatttggatgtggcattttggcaggaagttgaaaatcagcgtaaatctatccaagtaaagaccgaagcattacaagccaaaaaaaatgcaggtgccaaaaaggtcggtgagctcaaacgacatggtgaagacacaagtgagctgatgaaccaaatgcaattggtcagtgaagccatgaaggctgccgaaaatgagctaaaagaactacaaaacaccatcacaaccgccgcactacaaatcccaaatctgcccgatgatagtgtgcctgtgggcagtgatgaaactgataatgttgaagtgcgtcgctggggcgtgcctcgtgagtttgattttgcaatcaaagaccacaccgatattggtgaaagcttaggtcagcttgattttgagttggcagctaaattgacaggtgctcgttttagtgttttaaaaggtcatcttgctaagctcaatcgtgcgttggtgcaatttatgcttgacacgcatacccaaaaatatggctataccgagatgtatgtaccttatatggttaattctgatagtttacaaggtacaggacagttgcctaaatttgaagaagatttgtttaagcttcgtggcgaaaaagaatattatttaattccaacatcagaagtgccactgaccaacagtgttcgtgataccattcttagccctaaggatttgcccatcaaactgaccgcacatacgccatgttttcgtagtgaggcaggcagtgcagggcgtgatacacgagggctgattcgtcagcatcagtttgaaaaagttgaaatggtgcaagtaacacgggctgatagctcaatgcaggcattagaggatatgactgcacaggcagaatatgtcttgcaagcgcttgagctgccatatcgtgttatgacactttgtacaggcgatatgggctttagtgccgttaaaacttacgatattgaggtttggttgccatctcaaaatatgtatcgtgaaatctcaagttgctcaaattgtggcgattttcaggcacggcgtatgagtgctcgcctaaaagatggcaaacacagtgaattggtgcatacgctaaatggttcgggtttggcagttgggcgcactttgttggcaattttagaaaatcaccaaaatgctgatggtacgatcacgattcccaaagctttacagccttatatgggtggacttgaagtgattgcc

SEQ ID NO: 26856 - DNA, 2016 bp, Moraxella catarrhalis
atgaagcaaattttgttaggaactttgctgatgccaatcgaacttaaccaacgccataacgccaatgctatccgtattcttgcgatggatgccgtccaacaagccaactcaggtcacccaggggcaccgatgggtatggcggatatcgcagaagtgctatggcgagagtttttacgccataatccaaaaaatgccaaatgggtaaaccgtgatcgctttgtgctatctaatggccatggctcaatgttattgtatgctttactgcatttgactggttatgatttaagtattgatgatcttaaaaatttccgtcagctgcattcaaaaaccgcaggtcatcctgaatacggttatgccgatggtatcgagacgaccacaggacctttaggtcaaggtattgctaatgccgttggttttgcgttggctgagaagactttggcagcacagtttaacaaacctgacaatgcaatcattgatcattttacctatgcgtttttgggcgatggttgtttgatggaaggtgttagccatgaagcatgctcactggcgggtactttggggcttggtaaactgattgcttattatgatgataatggcatttcaattgatggcgaggttgaaggttggttttctgatgatactgccaaacgatttgaagcgtatggctggcaggtattaaaaattgatggtcatgatgctgatgccattcgtgatgccaccaatcaagccaaagcagaatcagccaaaccgacattgattatttgcaaaaccattattggtttgggctcgcctaataaacaaggtaaagaaattagccatggtgcacctttgggcttagacgaaattgctttgacacgcacgcaaatgggctgggcggacaccacgccttttataattaccgatgagatgtatcgtgcttgggatgccaccgccaaaggcagtaccgatgaagcagcttggaataaacagtttgctgagtatcaagataaatatcctaaggaagctgctgagcttttacgccgtttcagtggtgatttgccagagaactttgatcagctggcagatgaatttatccaaacttgcatccaaaaagcagaaagtatcgccacacgcaaagccagccaaaacgccatcgcagcacttgcaccacacttacctgaaatcttgggcggttcagctgaccttgcaggttcaaacctaactttgtggtcaggtgctaaaggtgttcaagagtacgccgatggtaattatgttcattatggtgtgcgtgaatttggcatgacagcaattgccaacggcgtggcactgcatggcggatttatcccctacacagcgacatttttaatgtttatggaatatgctcgtaatgctgtgcgtatgtcatcgctgatgaagcagcgtgtgatcaatgtttatactcacgactcaattggtctgggtgaagatggcccaacgcaccagcctgtcgagcagattgctaatttacgtatgaccccaaatcattatgtatggcgtccttgcgatactgttgagacagcagtggcatggaagatggcgcttaaaacaaaaaccgctccttcatcattgattttatctcgtcagaatttggcatttcaatctcgcagtgatgagcaaattcagaatatcgaaaaaggcggatatattttagcacccgaaaaaggtactcttaaagccatcatcatcgcaacaggttctgaagttgagcttgcgatgcaggcgtatgagcaactagaaggcgtgcgtgtggtttctatgccatgtgctgagatttttgttaagcaggacagtggttatatcgaaagtgtgttaccatctgatgttcgtgtgcgtgttgctgttgaggcggcaatcacggattattggtataaatttgttggcttagatggcaaggttgttggtatgacgacatttggagagtctgcacctgccaaggtattgtttgagcattttggtatcacaacccaagctgtggtggatgcggtaaattctttactt

SEQ ID NO: 26857 - DNA, 723 bp, Moraxella catarrhalis
atgtctgataaaaatccacaattttcacgcattttattaaaactatcgggtgaagcgttggctggcggtcgtgatatgggcattgatgctaatatcttggatcaaatgagcctatccattgcacatcttcgagggctgggtgttcaagttggtattgttgttggtggtggcaatttgtaccgtggtagtacgctacaaaaacaagggttggttggtcgtgtgacaggtgaccaaatgggcatgctagctaccgtgatgaatggtttggcgatgcgtgatgctttggtacgccgaaatattaaaactcgcctaatgtcagcgattgccattgatacagtagttgagtcatattctagccgtgatgcgatacgccacttaaataatggcgaggtgtgtatctttgtggcaggtacgggtaatccattttttaccacagataccgcagcgtgcttgcgtggcatcgagattgaagcagggctgattttaaaagccaccaaagttgatggcgtttatgataaagacccaacaaccgatgatgatgcggttaaatttgacagtttgagttttgatgaagtgcttgaaaaaaagcttggtgtgatggatttaacagcgattgcgttatgccgagagcataatgtaccgctacaagtatttgatatgaataaaccaaatgcgctattgaatgtggttatgggtgaggctgaaggtacacgagtttatcac

SEQ ID NO: 26858 - DNA, 552 bp, Moraxella catarrhalis
atgattaatgaaattaaaacagatggcgaaagccgcatgcaaaaatctatcgaagctttggaagctgcttttagtaagctgcgtacgggtcgagcccatccagggattttatcaggcgtgatggtcagctattatggttctgatacaccgttaaatcaggtagccagtatcaatgtagaagacagtcgcactttattggtgcagccatttgagcggtctatggtacaagctgttgataaggcaatccgtgaagcggatttgggtctaaatccaatgaccgctgatgtgattcgtgtcccaatgcctgctttgaccgaagagacacgccgtgatatgcaaaaaattgctcgcaatgatgctgaacaaacacgcatttctgtgcgtaatattcgccgtgatatgctaagtgatattaaagatttgctaaaagataaagaaatatcagaagatgatgaacgccgtgctgcagatgacattcaaaaattaacggacaaattcatcgcaaccattgatagtcgcctagagaaaaaagaaagcgaactgatggaagtg

SEQ ID NO: 26859 - DNA, 744 bp, Moraxella catarrhalis
atgacaacccaaatttgtgaatctttacccatcattcccaagcacattgccatcattatggatggtaataatcgctttggtaaatccaaacagctggcaacaggtgcaggccatgtggcgggtaaagatgcacttgatccgattgttgagcattgtttggctttaggggttgaggtgctgacggtatttgccttttcaagtgaaaattgggcacgcccaaaagatgaggtggatcttttgatgcgtcttttgtcccaaacgatttacgagcagctaccacgcatgaatcagcaccgtatccgtctgcgttttatcggtgatagaagtcaaattgatggcgacttggtaaagcttatggcacaggcagaagccaagacggcagattttgatgcgatgactttggtgattgctatcagctatggcggacaatgggacattaccaatgccgccaaaaaacttgccaaacaagttgaattgggtcacttatctgctgatgatatcgatatacaaatgataaaaacgcagcttgaattggcggatttaccttctgtggacatgctgattcgtacaggtggagagtaccgcatttcaaattttttactttggcagacggcatatgctgaattattttttacgcccacattatggcctgaatttggctgtgatgagcttgatgagatgattcgtatttttgctggtcgtgagcgtcgatttggcatgacaagcgaacaaatccaaaaaacc

SEQ ID NO: 26860 - DNA, 846 bp, Moraxella catarrhalis
atgtggcaacgaataaaaacggcaataattttggttttgattgttggatttgcgttatttgcaagctcaatgccgatttttgtgttgccactattagccattggggttttgatcgctgcacatgaatggacaaaactcatgccaaaatgcagacagcctgtacagtttattttggcagttttaatcatcaccatgttatcagttgcactgccttggacttgggtattttggtgggcagtatcgctgggtatttgggtaatggcaacggcatgggtggcacaataccccaataaagaacgctggtatggtaggcggctggtgtatatgggtgcggtcattctcaccgctgctatcaccgccatgtatgggctttggcagatgtcgccttggtggctgatgtatgtgtttttattggtatggtgtgctgatagtggggcttattttattggcagaaaatttggcaaacgaaaaatggcacccaatgtatcacccaataaaagtatcgaaggcttatgcggtggattgatggtctctggggtggtcactgtggcagttggttattatttgcagctgtctggtatgtcattggtattgtttttgattttgtcttggctaactgtacttgccagtatactgggcgacttatttgaatctatgctaaaacgccgtgcaggtattaaagattctgggacaattctaccaggtcatggcggtattttggatcgaattgattcgctactttcagcgataccgatatttgcattgggtttttggctattattaaaacttggtatttttacagaagtttggataaaaatgtactttgcaaccatgcaagtgcctttt

SEQ ID NO: 26861 - DNA, 852 bp, Moraxella catarrhalis
atgcacattatcccaaagtccccgcaacaagccaagcatgcacctcgtaagcgttttggtcaaaattttttacacgatactcatatcatctctcaggttgtgaccgctattcggttagacaggcaggataatttattagagattgggccaggtcttggggcattaaccgagcctttgcttgctgaggttgatggcatgacggtgattgaacttgaccgagatttagcatctcagctgaagattaatattggtgccaatagtcattctgattttacgatcatcaatgataatgcgatgcatgtcaattatcgtgcgttggcggagcagattggtaaaggtgtttttcgggtggtgggcaatttgccttataatatttctacaccgattttatttcgcttgcttgaatttagtgatgtgatcaaagatatgcactttatgctccaaaaagaagtggttgatcgcatcacagctgagcctaattcaaaagaatatggcagattatcggtgattatgcaatattattgtcaatcggattatttactcactgtccccaaaggggcatttaatccaccacccaaagttaccagtgcagtttttagactaacgccttataaaaccaagcccattacagcaatggatgagtcggtgtttgctttggtggttcgtgaaagctttaatcatcggcgtaagactttaagagcaatttttaaggcaaatgggctattaccgactttagatgaatcagattttgaaaaaatcggcatcaatccaagtgcacgccctgagacattgtgtgtgcatgagtttgttttacttgctgatttggtcgtcaaaaaccgtcagccatcacct

SEQ ID NO: 26862 - DNA, 321 bp, Moraxella catarrhalis
atgacttttgttgtaactgataactgtatccgctgtaaatataccgactgtgttgaagtttgtcctgttgattgcttttatgaaggtcctaattttttggtcatcaatcctgatgaatgtattgattgtgctttgtgtgaacctgaatgccctgccaatgccattttctctgaagatgaagttccaagcggtcaagaagaatttttaaaaattaatgaagagttatccgctgtttggccaaacatcaccgagaaaaaagacgccctacctgactatgaaaaatgggatggtgttgagggtaaacttcaatatttagaacgc

SEQ ID NO: 26863 - DNA, 264 bp, Moraxella catarrhalis
atggcaaactctgcacaagctcgtaaacgcgctcgtcaaaatactaagcgtcgtcagcacaacgcatctcaacgctctatggtgcgtacctacatcaaacgcgtcaattctgcaattgaagcaaaatcttatgagcttgcaaccgaagcctataacaaagctgtaccagtcattgaccgtatggctgataaaggcattatccataaaaacaaagccgctcgccacaagagccgcttgaatgccgcaattaaagctttaaaaggc

SEQ ID NO: 26864 - DNA, 2664 bp, Moraxella catarrhalis
atgagtgattcggtcagtccaattggcattgtcgaagaattaaagcgttcgtatttggattatgcgatgagtgtcatcgtttctcgtgcgctacctgatgtgcgtgatggacttaagcctgttcaccgccgtattttatatgccatgcatgagcttggaaatgattataataaaaaatacctcaaatcggcgcgtgtggtcggtgatgtgattggtaaatatcatccacatggcgatactgccgtctatgatgccattgtgcgtatggcacaagattttagcttgcgttatatgctggtcaatggtcaaggtaattttgggtcaatggatggtgacccgccagcagccatgcgttatacagaaatgaaaatgcagaagctaacgcataaaatgcttgccgatcttgataaagagactgtcgattgggaagataactacgacggttcgatgaaaatgccaagcgtgttgcctgctcgcattccaaatttattggtcaatggtgcaacagggattgctgttggtatggcaaccaatatggcaccacataatctcacagaagtactcaatgcctgcttagcatacgccgaagatccaaatatttcaaccgatgagctaattagccatatttcagggccggacttcccaacgggcggcattatccatggcagaagcggtatcatcgatgcttatcgtactggcaaaggtcgtttgcacattcgtggtcgctatcacattgagccaatgggcgacagcggtgcaaacaaagaccgtgagcgcattatttttacacaaattccctaccaagttaataaagccaatctgatcaagcatatcgccgatttggtcaatgccaaaaaaattgaaggcatcaccgaaatccgagatgaatcagataaagaaggtgtgcgagtggcgatcgatttacgccgtggcgaaaattgtgaggtaatggttaataatttatttaaccaaacgccacttgaaacaagctttagtattaatatggtggcattggataatggtcagcctaagcttatgacgctgcgtgacttggtggcggcgtttattcgccatcgtcaagaggtggtcacacgccgtacaatttttgagctgaataaagcattggcacgtgggcatttgcttgaaggattggccattgcacttgccaatattgatgatatcttacagaccatcaagcaatcagccaatcgcagccaagctcgagaaaatttattggtgcgtacttggcagtcagctggcgttgttgcaatgcttgacgcagcaggtgctaaatctatccgccctgagatgattgatggcgaggatctcaaagcaccgtatggcttgattgagaataaaacccgctatcgtctgtcacctgaccaagtgaacgccattttggatatgcagttgcatcgcttgactgggcttgagcaggataaattaacgggtgagtatcaagaaattttgggtgagattgcacgcctgaccctgattttggatgattttgatgtcttaatgggtgtggtgcgtgccgaattgattgacattcgtgatgaatttggtgatgagcgtaaaaccgatattgtcgatgcgcgtcatgactttaatcgtgaagatttaatccctgaacaaacggttgttttgacggtttctcgcacaggctacgccaagactcagccgatcagtgactatcaggcccaaaagcgtgggggtaaaggacgctcagcgactgccatgaaagaagatgatgttattgagcatttgttggtaaccagtacgcatgcccatattttatgctttaccaatacaggtcgtgtctttagattgcgtggttttgaaattccgattgccagtcgtggctcaaaaggtcgtcctttggtgaatttgattaatcttgagtcagatgagttggtcacagcaattttgcctgtcaatgacttaaaagacgaaaatagctttgtgttctttgcaacagcatcagggacagtcaagcgtgtggctttatcacaatttgccaatctgcgtgctggaggcttacgagcgattgatctagcagaaggtgataccttaattggtgttgcgatcaccgatggcgaacaagagattatgctatttagtaatgaaggtaaagccattcgctttaaagaacagagtatccgtgccatgagccgagttgccaaaggcgttcgtggtatgcgtgtgaatctgcttacaacaattgatgaagaagagctgttggatgaagatggcgatgaagtcggcgatgattttgcggtgagccgagtggtgtctttggtggttgcacccaaacaaggtgagatcttgtgtgcttgcgaaaatggttttggtaaacgcacgccgattgatgattatccaaccaaaggtcgtggcggtaaaggcgttattgcaatcaagacctctgagcgtaacggacaattggtcaaggcgattgcagtgactggcgaggaagatgtcattttgatttcggataaaggcactttggtgcgtacgcctgtggctcagattgctaatgctggtcgcaatgctcaaggcgttaagctgattcgcattgctgatgaagaggtattggttggcatggcatgtgttgaacatgatgacgatgaaatcgaagagtcagaggtgttagctgatgtggtgcaa

SEQ ID NO: 26865 - DNA, 1479 bp, Moraxella catarrhalis
atgagtcgtgaaattttgactgtggttgagaccgtcagtaacgaaaaaggactaaatcctgaagatatttttgaggcgattgagcaagcgcttgtcgtctcaaccaagaaaaaagtctatactgagcagcctgaagttgccatccgtgtacatattgatcgcaaaacgggcaattatgatacatttcgttattggacagtggttgctgatgaagatcatgagatgccagcgtgtcagcttgcgatcagtgatttggacgaaaacgaatggcagattggtgatgtcaaagaagaacaaattgagtcgattgaatttggtcgtatcgctgccacgcaagccaaacaagtaatcattcaaaaaatccgtgaagctgaaagagcgttggttgccgatgcgtttgagtcacgcattggtgatttaatcagtggtgaaattaaaaaacaaagccgtgatgcttatattgtggatttgggtgaaggcggtgaaggttatttggcaaaagatcagacattgccgcgtgagacattgcgtgtcaaaagccgagtttctgccatcttatctcaggtcaatcgtgatggtcgtagcccacagctgatgttgtcacggaccagcaatgagatgctgattgctttgatgaataaagaagtgccagagattagtgagcagattattgagattcgtgatgtggctcgcttacctggtttacgcgctaaaatttcggtaaaaaccaatgatcaccgtattgatcctgtgggtgcgtgtattggtatgcgtggtacgcgtattcaagctgtacaacaggagctagatggtgaacgcattgatgtgattgtttggaatgaagatccagcacaatatatcatcagtgcgcttgagcctgctgatgtcattggtcttgtgcttgatgaagatgctaaaactgctgaagtgatttttgcaacgaatgatcaattagcccgtgccattggatctcaaggtcaaaatgttcgcttggcttctgaattaactggctacaagctgaacatgattttggagtctgaatacagcgagcgccaagcttctgaaaatcaagcagtgattgacctattttatgaacgcttggagcttgatcgtgatttggctgaagtgttggcggaagtgggttttgccgatattgaaactgtggcgtatgcaccagtagaggaattctatgaaattgatggcttagatgatgaaaccattactgccatccaagagcgtgccaaagaagtcatcatcagtgatgaaattgccaagcagcaaaatatcaaagagccaagtgccgagcttttggctttagaagacatgacgccagcaatcgcttacaaattggccgagcgtgatatcattacgctggatgatttggcagagcaagccatttttgatatcgaagatatcgagggcttgaacagccaaagtgctggaaaattcattatggcggcacgccaatcatggttcgaa

SEQ ID NO: 26866 - DNA, 2546 bp, Moraxella catarrhalis
ccaaaactacctcaaccgctcaagtgacaggcacatcaggtaaggcaaaaacggtcaatgtcgtgcgtaccaaaaaagtcgtctatgacaaaccagatccagctaagattgaagcgaaaatcgcagcccaagctaaggctgccaaagaagcacgcctaaaagctgccgaagaaaaacaagctgccgaacgcagtaaaaaagaagcagctgagcgtcaagcggcaaccttggctgcgatgcgtgcaagcagtgagcctgtaaaaaatcatgaggttaatgcgacggttgtcgtcaaaaagataaaaaatccagaagacgccaagcctgctgataaagcagaaaaaaccgataagaaaaaacctgccaaacccatcaaaaaagaatcggcaactgacaaaaaagcgcgtgaagctcgtgaagcagaagaagagcgtttgcgtcagatggaggcagaaacacgccgtaaagctgccgaagaagctcaaaaacgcacacttgagcagatgaaacaaatggcgtctcgctatagcgatgctgatgacggtgcgactgccgctattgttcgtaccaaagacgatgcaccgttggctgatggcttggtgggtgctgcgcttgaagaatcatttgaaaaagagcgtcgtgaaattaaacgaggtgcaacaggcactgctggcaaaggcggtaaaaaaagccgcaaaggtcagcaagaagagcgtgaaatgaaaacccgtgcaaagggcttaaaatcatctcaagccaataaacataaatttgaaatgcctgttgaaaaaatcgtccataatgttgaggttggtgaaaatatcgttttatccgatttggcacaaaaaatggcggttaaggtgcgtgaagtcatcaaatcactgatgaagatgggtgagatggtgcgtgagtcagacagtatcgatcaaatgaccgctgcacttgtcatcgaagaatttggccataactttgtaccgatcagcgatacccagctagaagatgatttacaagtcgctgttgatgaaaaatcaggtaatgtccaaacacgcccacctgtagtaaccatcatgggtcatgttgaccatggtaagacatcgcttttggataaaatccgcactactaaagttgcaagcggcgaagcaggcggtattactcagcatatcggtgcatatcatgtaacaacagatcgtggtctaattacctttttagataccccaggccatgctgcttttaccgccatgcgttctcgaggggctcaagcaacagatatcgtggtgcttgtggttgctgctgatgacggcatgatgccacaaaccgaagaggccatcgatcatgctcgtgctgcagggacaccgctcattgttgcgattaacaagatggataaagataccgccgatccagatcgtgtgattaatgagttgtccgtcaaagaagtcattccagaagagtggggtggcgatactcctatggttaaagtctctgccaaatcgggtatgggtattgatgagcttttggaggttattagtatccaagcagaactgatggagcttgaggcaccgattgatggtgctgcccaaggtgtggtgattgaatcacgcttggataaaggacgaggtgctgtggcaagcttattggttaagcgaggtacattaaatcaaggtgatttggttttggcaggcgaatactatggtaaggttcgtgccatgactgatgaaaatggtcaacgcatcaaaaccgcaggcccatcaattcctgttgagattttgggtctaccagaagcacccgcagcaggcagtgaatttttagtggtatctgatgagaaaaaagcccgtgaagttgctgattttcgggcagcacgggagcgtgaacgcacgcttgatcgtcaaaataaaatgcgacttgataccttatttgaaagtatgggatcggcagaagttgcaactttgaatatcatcttaaaaacagatgtccgtggttcactagaagcgttattaaatgcattagacgaactttcaactgatgaagttaaagtgcgtgtgatcagctcaggcgttggtgcgattaccgaatctgatgtcatcttggcagaatcaagtgaagcggtattgcttggctttaatgtccgtgctgataatgcaggtaaacgcaaggcagatgaagcgggcatagatattcgttattatagcgttatctacggtcttattgatgatgtcaaagcagcaatgagtggcatgcttgcaccagagcatcgtgagcagattttaggtatcgctgaggttcgtgatgtcttccgctcaagtaaatttggcgcagccgcaggctgtatggttcaagaaggtactatttatcgcaataagccaatccgagtcttgcgtgatgacaaagtcatctttacaggccatttacaatctttgcgtcgctacaaagacgatgtcaatgaggtaaaagcaggtatggaatgcggtcttgcggtcaagggctatgaggttgccgtgggtgataagattgaggtctttgagatccatgaagtgaaacgagagctataa

SEQ ID NO: 26867 - DNA, 939 bp, Moraxella catarrhalis
atgatgaatcggccgaccaaaaaagtggtgatttcaggcattttattattagataaacctgctgatatcagctcacacagtgctttggcaaaagctaagtatttatatcaatccgagttgtatgattctaaaaaagcaggtcatacaggcacgcttgaccctatggcaacagggcttttaccgatatgttttggtgaggcaaccaaatttgcacagtatgggcttaatgcagataaaagttatgtcgcactgttaagcttaggcgtgaaaacagatactgctgatagatatggtcaggtgatacaacgcaccgatgcaccaagctttaatcagcaaacgcttgatgggattgccaacgctttaataggcaaacaaatgcaagtaccgcctatgtattccgccttaaaaaaagatggtaaaaaattgtatgaatatgcacgattaggcaaggtggtcgagcgtgatgccagacccattatcatacataatttgacactcacaaaactggataataccacaattaaattgattgtctcttgctcaaaggggacttatgtgcgtgtgctgggtgaaagtgtggcagagcatttggactgtgtggggcatttaacggatttgcgtcgcacggccacaagcggttttgatgtggcggatgcggtcggtcttgatgtgttaagccagttatcattgcctgataaaatcaatcggctattacctgtggatgctctgatgacgcatatacccattttaagcattgatggtttggaagctgagcgactaaaaatggggcaacgattaaatgtcaaagaccgtctagatagcttgcttgagtttgatgatgtgttgcttgtgcgactgtatgcccaagatatatttattgggctggcagaagtatccaacagtggacgattacagcccatcaaagtggtgcattgctat

SEQ ID NO: 26868 - DNA, 870 bp, Moraxella catarrhalis
atgtctgatgacaattcaagcacttggtcgatgcgtggtcttaggcgttggttatccaccgcacctgaaactcgagatgatttattaaagctggttcaagactctcgccagtttttagagcctgatacggttgatatgcttgaaggggtgcttgatctgccagcaacccaagtgcgtgagattatgacaccacgcccgcaggtgcatgcgattgccagcgatgatgatttatctgatattttatcggtggtgcttgaaacagagcattctcgctatcctgtttttgacagtttagatgatgatgctgtggttgggattttgctgattaaggacttaataccatacctaaaagccaaagctgacggtaaagagcagccgctcaaattggctgatattgtacgaaagccgttgtatattagcgagacggcacgctcagatacactgctacgctcacttcaaaaagcccaagtgcatatggcgattgtggttgatgaatttggctcggtctctggtgtggtgacaatggaggatttgcttgaggagattgtcggtgatattgttgatgaacatgatgatattgacgaggacagcgacattaataacatcattccacaccctgataaatcaggcgtttggttggtgcaagcttccacactcatcagtgattgcaatgagattttaggcagtcattttgatgatacagatgttgatacaatgggcggtttggtcatgcaagcattgggctttgttagccatcttcaaggtgcggttgttcaaatcgatgaatggcaaattaccgtggttgatgttgaggcacgatttattcatctgttggagcttgtgctgataccacagcttgagaatgctgaa

SEQ ID NO: 26869 - DNA, 2793 bp, Moraxella catarrhalis
atgcttacaaaaattatcagtacagtcattggtacaaaaaacgaccgtgaattaaagcgtatgcgtaaaattgttaccaaaataaacagttatgaatcaagcattcaatcgttatctgatgatgaattacgccaaaaaaccgaagagtttaagctgcgtcatcaagcaggcgaaagcctagataaactcttgcctgaggcgtttgctgtttgtcgtgaggcgtctaagcgtgtcaatggcatgcgtcattatgatgtgcagttgattggtggcatggcattgcacgaaggtaaaatcgctgagatgaaaacaggcgagggtaagaccttgatggcgaccttggccatttatctaaatgccatcagtggcaaaggggttcatgttgtcacagtgaatgactatttggcaaaccgtgatgcacaactaaatcgcccgttgtttgattttttgggtttgacagttggtgtgatttatagccaacaagccccccaagaaaaatttgccgcctatcgagctgatattacttatggcaccaataacgaatacggttttgattatctgcgtgataatatggtgtttagcctaagtgaaaaaaaacaaagaccattaaactattgtattattgatgaaattgactccattttaattgatgaagctcgtactccgctcatcatttcaggccaagccgaagactcagcacatctgtatgctttgattgataatatcgttgagcgattggtgcgttccaaagatgaagaagataataaaaataatactgatggcgacttttggattgatgaaaaaaaccgtacgattgagattagcgaaaaaggctatgaaaaaatcgaaagctttttggcggaagtcggtgagcttggcgaaaatgaaagcctatacagcccagcacgattaccattattagcacatgcacaagcagcgatacgcgcacatcatttatttgtcaaaaatattcattatatcgttcaagatggtgaggtgatcattgttgatgaaaatacaggtcgtaccatgccaggtcgacgatggtcagatggtttacatcaagcggttgaagccaaagaaggggtagagattcaggcagaaaaccaaacgatggcaaccaccactttccaaaattatttccgtctgtatgataaattatcaggcatgacaggaacggcagatactgaagctgctgaacttaagtcaacctatgatttagatgtggtcatcattccgacacatcgaccgattgcacggattgatatggatgaccagatttttttgaccaagcttggcaaatataaaggcatcattcgtgagattaaacaaatcaccgaaaaaggtgcgcctgttttggtgggtactgcgaccattgaggcttctgaggagctgtcttatttattaaatcaagaaggtattgctcataatgtcttaaatgccaagcagcacgagcgtgaggcagatattatcgcacaagcaggtcgtcctcgtgcggtgaccattgcaaccaacatggcaggccgtggtacagatatcattttgggtggtaattggcaggccgagcttgaaacacatgaagtcatcaccgatgagatgcgtcgtgaggcactcacagcttggcaggcacgccatgatgaggtgttggcagcaggtggcttacatatcattggttctgagcgtcatgaatcacgccgtattgataatcagctgcgtggacgggcagggcgacagggcgaccctgggcaatcacgattctttttatcgcttgaagatgatttgatgcgtatttttgcaggcgatcgtattaccagtatgtttcgtgcagtgggcttaaaagaagatgaagccattgagcataagatggtttctcgtgcaattgaaaacgctcaaggcaaggttgaagctcgagattttgatgcccgtaaaagcttgcttaagtatgatgacattgccaatgaacaacgcaaggtcatctattcacaacgagatgatttattggcagagatggatttgcaagcaggtattcaggcgatgcaccatgaagtatatcacgccttaatcaatcaatttgttccgcctggctctatcgatgaccaatggaatattgatgggttagaagatgaaatcgaagaggcgtttcgttttgatatgccaattaatgattggcttgatgctgatcgtcgtttggatgaagagggtcttcgtgccaaaatcatcgaaactgccattgagcgttatcagactcgtcgtgagcaaatgggcgaacagacagccgcccagcttgaacgccatttcatgctaacaagcttagataggcattggaaagagcatttaacccaaatggatcagctcagaaaaggcattcatctgcgtagttatgcccaaaaaaatccagaacaagaatataagcgtgaatcatttgagctatttcaatcgatgcttggtgcgattaagtcagatttgattcaagatttggcgcgtgtacatgtgccaacgcctgaagagcttgccgccttagaagaacagcgtcgccagcaggccgaacaaatgcgtatgatgtttgagcagcaggcacagcttgatgatgttcaaagcttggataatcgtcctgctgaagaaacaccacgctcattgggtcgtatgacagtgactttaggcgctacttctgcaccacaagcggctgatacaacaacggatgaggcattggtgattcccaaaaatatccatcgtaatgcaccttgcccttgcggttctggtctgaaatataaacaatgccatggcaaactaagc

SEQ ID NO: 26870 - DNA, 999 bp, Moraxella catarrhalis
gtgagcaccatgtcaaacaccatttccacctctgatgaatttagtcatacgacggttttgttaccagaaacagttgcgatggtgcttggtgtcaaacaattaaacgatgtcacttcaaaagtttcaggtgtgtatgtggatgccacttttgggcgtggtggacatagccagcttttgcttgaatatttggcacctgaggcaactttggcggtctttgataaagacccagaagccatcgctgtcgccaaaagtctggcagcacaagatacacgcattaaggttgtgcatgacagctttgctcacttaacaaaaaatttacaggcattgggtattgataaaattgatggtttgatggcggatttgggtgtctcaagcccccagttagacgatggaactcgtggctttagtttcatgcgtgatggcgtagttgatatgcgtatggataccacacgaggtgagcctgtctctgagtggttacagcgtgtatcggcggatgagctggctgatgtgttgtatgaatatggcgaagaacgccattctcgcaagattgcccgagcgattaagtccatgcaaaattacacttccacacgacaattagccgaagtcatcaagcaagcccatcctgcatggcaaaaaggcaaacatcctgccactcaaagctttcaagcaatgcgtatttttattaataatgagcttggagatgtggaggcatttttggcacaaagtatcggggtgctaaaagcaggtggtatgcttgcggtgattagttttcattcgcttgaagatcgtttgattaagcagtttttgcagcgtcacagtcgtggacagtatgaagaagatgcacgcctgccgatcatccctaagcgtccaaaatattttggtaaaccaaagcgtattgggccttgtgatcaggaagttaaagccaatcccagagctcgcagtgcgtggctgcgtggtgctgtgcgtagtgatgtcgctttggtggcacaagacgaagat

SEQ ID NO: 26871 - DNA, 1956 bp, Moraxella catarrhalis
atgaccaaacaaagaaaaaatccaaaaactggctcagcgacgacagcagcgtctttacaccgtccaaaggcgtctgccaagacttttgggattttaaccaaaaaacgcatcaaaaaatctggcgctaatttggctggtggcaagcaagatgcttggcgatatttgatcattggggggttgatgctgtgtatatttatggcgatttttgcacgcgcattttatctacagatcgtcaatccgcagttttttattgataaaggtgatgagctgattacgggcaaacgcattgaacctgcgtatcgaggtgtcatcacagatcgtgaaggtgcacctttggctgccaatgcaccattatatacggtattttttgatccttatgcctatgccgaagaatattatcgcttagacaatgaaataaaaaccaccaaaagtgaaaccgccaaacaaaaagcactcaaaaaactcaaagaaatggacttggttaggttggcagcggcggcaaattatccgcttgaaaaacttgaagcggccgttgggattgatcatacacttgacacctctaatagccaaaaagtcaaagaagctttaccaaaaggtgcaagctcacgccgtttggtgctattaaaccgtgtatcacctgaagttgccaaatccgtcacagatttggggttatttgccattggtcgtgagcagtattttcaacgctactatttacaagctgaacccaatgcacagcttttgggttatatggctcagtcaagtgacgagactcaaggcggctatattgggcgtgcaggcattgaggctaaatataatgagcgtttggcgggcaaagatggcaaggtacagattttgcgtggtactggtcggcagcccattcaagagattgagcaaattgaaccgcttattgaaggcgaaaacattcgcttaacaattgactcacgattgcagtatgtgctttataaagagcttgagcaggttgggcgtttgcagtcggcgcgttcaagctcaggcatggtggttgatgttaagacgggcgaagtgttggcgatggggtcatggccatcttttaattctaataatttgtccgaacgagatggtgctaacgaaagaaaccgccccgtgcttgatgtgtttgagccaggttcggtgatgaaaccgttcacagtggctgccgcacttgaatcgggtgaatacaccaccaattctgtcatcgataccagtccaggcagcgtgtcagtgggtggatatacgatccgtgacggcggtaattatggcgccatcacgctagataaactgatccaaaaatccagtaatgttgcctcaacaaaaattgcgttaaatttaccgactgatgctatcgctaatatgcagcttaaatttggttttggtagtaagacggcactggatttccctgctgaggcatcgggacgagttagtattccaaaagagcgtgagctggcacgccgtgcaacactaagttatggctatggtcagcaagtgacattggcacagttggcccaagcttatgcagcacttggcaatcgggggctgatgcagccattaaaacttgttaaagatcaaaaaacgcccgaacctacccaagtcattcatgcaggtcatgccgaagccattgtgcgtatgatggagcttgtgacaggaccaggtggcacaggtcaagccgctgccatcaatggctaccgtgtggcgggtaaaacaggtaccagtcggcgtaccaatccacaaggtggttattataccgatcagcatcgtgtgatttttgtgggcttggcacctgcatcagatccacgctttgtggtggtaatcttggttgaagacccacgccgccaatcgtatgcagggcaagtatcagcaccagtattccaccaagtgatgaaagaggcactacgcttatataatgtgccttatgataagcctttacgggtgttatcaccc

SEQ ID NO: 26872 - DNA, 1563 bp, Moraxella catarrhalis
atgatgacgccaataagttttcgtgaagtgatccaaaaggcggtggctaccccccacactgtggcggcaaaacttggtttgatggcacttgagtctgtgttttcgccgattttggcgtgtcaatttgaccaattttgcttggatagtcgtaagattggcgtagatgatggttttgtacttttaaaaagtagtagtcaagatgctcaaacaaacctaaataatgccaatcgttatcttatgtcggtcaaagacagtgcggcatttgtcatcagtgagtttgatttggcggggctggatttagatgacatacaaattcctatcattagcgtgccaaatattcgcacctatttgggtgatttgattgctgctcgccttcagctacatcatgccgtggcattgcccaagattattgcggtaacaggtacgaatggcaaaaccacggtcagtcagctgatcgcacagctttgtcaagcgtctggcatcagctctgctgtgatggggacggcaggtaatgggcgactgggtcaactgatgcagtccgccaacaccacaggcgatgtgctattgacacatacatttatccatcaaatggcacaagaaggcgtacaaatgattgcacttgaggcaagctcacatgggcttgatcagtatcgcttacaaggcataccaattatcggtgctatctataccaatttatcccgagatcatttggattatcatgctgatatggcgtcttatcgtgatgccaaagccaagctttttgatcaatcattgttcccaacactaagatttggtgtggtgaatttagatgatgagcctgctttgtttgattatgagactgcagattttcagataattggatatagccaacaaaagccaaacgctgatttttatgccaaagcagtacgcctaagccttgattgtgttgagattgaggtacaaacaccccaaggtgagatgacggcgataagtcctttgcttgggttgtttaatgtggataatttgcttgccagtatggcggcatttacggctttaaaccctgcaagggcagcagatttgccaaatttgattactcaattacaaggtgcaagagggcgtatgcagcgtgcgtcatctcagacgggtgcttttattattgattatgcacacacgcccgacgcacttaagcaggtcttatcaagcctgcgtcgccactgtacaggccggctaattgccgtctttgggtgcggtggtgatcgtgatcgaggtaaacgcccgcagatgacccaagcaggtttggcgtatgcagatcaagtgattttgactgctgataatccgcgttctgaatcgccatctgccatcttagcagatatgcaaaaagggctgtcttgtgaggatcattataaaatcatcatcgagcctgatcgaaaaaatgccatcgaattggcggttaaaaccgcaggcaaaactgatatcgttgtgattgcaggtaaggggcatgaaacttatcaagaaatccaaggcgtgcgttatgattttgatgatttggcagtattgggtgagtttttacaaaaatatcaaaaa

SEQ ID NO: 26873 - DNA, 1482 bp, Moraxella catarrhalis
atgacaaattcaagtgcatatttttggaaccaagataacctaaaacaagccacacaggggcagtggcatcacagtgataaggctgagattgacgcccgtcgtattgtgactgatacacgccaaatccaagcaggcgatgtttttttggcaatcaaaggtgagcgatttgatgcgcatgattttatccaaaatgcgtatcagcaaggtgcatctgcggcgattgttgagcgtgttgttgattgcgatatgccacagcttttggtggcagatactaagcttgctttggggaatttgggtaagtttcggcgagacgctcaccctgatttgacggtcattgccttgactggttctagtggcaagacgacgaccaaagagatgattggtgctattttaagtcaaattgcaccgacgctcatcacgcgtggcaatttaaataatgatcttggcgtgccgatgatgttgcttgagctgactgatgagcatcgttttttggtgatagagcttggggcaaatcatttgggtgagattgcttatacagcgtcaatggtgcgtcctgatgtggcgttgatactaaatatcggtacagcgcatttgggtgagtttggtggtcgggctaatattgcgtgtgccaaatcagagatttattcggcactgaccagtcagggcgtggcaattttaccattttcagatgacttttatccagagcttttaaagcaagcgtctcaatttacaaagctgcatttatcgtttggtgagcgtgccgtgccgattgagcaagcggggcttgaagcgacggatcaagctatgcttaaagccgaaggtatcagctcggtgctgatgatgggggatttatttgctgatgatatcgaaacttttgctacgcacagcacatttactctaaataccaatattgatattgatcaaattgacagcttgcctgttcatctaccgttcattggtgagcataatgtggcgaatgcgttggcggcagcttcggcgacttttgcactgggcgtaccacttgaacaaatcgccaaagggcttctgcgtgcgacgccacctaagggtcgtttgatgcgtctgtcaatggatggatatcacattattgatgatacttataatgccaacccaacttccatgctcgctgcagcaaaagtgcttgaagctgaattagacactaagatattggtgcttggtgatatctttgagttaggagatgcggcagatgatgagcataccaaactggggcatcagttggctttacttgagattgatcatgtatttactttgggcaatcacatggcacacactgccgctgcaatcaatgaacaaaaacccattgccagacattatacagataagccaagtcttttaaaggatttgtgtcagttattgtcacatggttctgccaccgtgttatttaaaggatctcgtggcatggcaatggagagcctgattgctgatttgaccgcttgtaaccat

SEQ ID NO: 26874 - DNA, 1095 bp, Moraxella catarrhalis
atgttgtattggctattacagcaaacagacattgccatcggttcattgactttgcgggcactgcttgcggtgattacatcgctgcttattgttatcattggtggtaagcctgtgattcattatctgcgtaccttaaaatacggtcaagccgtgcgtgatgatggaccaaaaactcaccttgccaaacaaggcacgcctacgatgggcggggtgctgattttggtggcgattggtattgctaccttggcatgggcggatttaggcaatccttatgtttggattttaatggtggtcatggtcatttttggtgcagttggctgggcagatgattggctaaaaatcaagcacaaaaacccccaaggactgattgctcgcaaaaaatatttttggctatcggtcggctcgctatttgctggctgttcgatgtattacatcgccacacagcaagataccactgccatgatcgccatgcaagacatgctaatcccactgtttaaagacattgtgattccgttttcagcgattccattgggtttgggatttattattgcgacttattttgtgttggcaggctcatctaatgcggtgaatctgacagatggtttggatggattggtgattttacccgtagttttggtcgcagcaggcttgggcgtttttgcttatatttctggctcgccacattttgctgattatatgcatgtgccttatattgcttataatgctgaggttaccatcgtctgtgctgccatgattggcgcaggcttgggctttctttggtataatgcagcacccgccgatgtatttatgggcgatgtgggtgcattgagtcttgggggtatgcttggtaccattgctgtgatgactcgccaagagttggcgtttgcgatcatgggcggtatctttgtggctgaagcggtatcggtgattttacaggttggttcttatcgtctgcgtaaacaacgcatttttttgatggcacctttacatcatcattttgaagagcttggactcaaagaaaccaaagtagtcgcgcgtttttatattgtgtgtattattttggtggtgcttggactgatgaccttaaaattacgc

SEQ ID NO: 26875 - DNA, 1212 bp, Moraxella catarrhalis
atgacaacacaatttaagtttggacaatatcctgatatcaatggatattttggtagacacggtggtcgttttgtgtccgaaactttgatggcggcacttgaagagcttgacgaaatttatcaaactgccaaagctgaccctaagttttgggatgaatttatggcggatttaacggactatgttggtcgtccgacaccgctatattttgctgaacgcttgacccaacaagttggtggcgctcagattttttttaagcgtgaggatttaaaccatacaggtgcccataaagtcaataataccatcggtcaagcattgctcgccaaaatggtgggcaaaaaacgcattatcgctgaaacaggtgcaggacaacatggcgttgcaaccgctaccattgccgcacgccttggcttggaatgcgtggtttatatgggtgcagatgatgttgagcgtcaaaagatgaatgtatatcgcatgcgccttttgggggcaactgttgtgcctgttacttcaggttctcgcaccttaaaagatgccatgaatgaggcgatgcgtgattgggtggcaaatgttgacaccacttattatatcattggtacagtcgcaggcccgcacccatatccgatgcttgtgcgtgattttcaggcgattattggtcgtgaggcacgcatacaacatttacaaaaaacaggccgcttgcctgatgcattggttgcatgtgttggtggcggttccaatgccattgggctattttatgattttttaaatgatcatgaggtggtgatgtatggtgtggaagccaatgggttaggcattgatacacccaatcacgccgctcctttgcaggctgggcgtgtcggtgtattgcacggcaaccgaacttatctaatggcagatgatgatggtcaaattctaggtacgcattcgatttcggcaggtttagattatccaggtgttggccctgaacacagctttttaaaagatattgagcgtgttcattatgtcggtgtaacggatgacgaggcattacacgcctttaaagaagtgacttcaaaggagggtatcattccagcacttgaaagctcacatgcggtagcttatgggctaaaattggcggcgaccatgaagcctgagcaatcaatgattattaatatgtcaggtcgtggtgataaagatttacatacggttatggcaaaagatggcatgcaaattgat

SEQ ID NO: 26876 - DNA, 504 bp, Moraxella catarrhalis
atgcgtttaacaactcgtggacggtatgccgtcactgccttattggatttggctgtccaagagagtcgccatcaaggcgcagtgtctttatcagacattgccaaacgccagtccatctccatatcttatttagagcagctgttttcaaaactgcgtaaaaaaggattggtgaatagtactcgtggtgctttgggcggttatcatttagcaaaaccacttgaagatattgacatcatgagcattattaccgccgttgatgaaagcatcaatgccactcagtgtggcggaaaaggcaactgccaagatggcgcaatgtgcttgacacatgatttatggcacaatctgtctcatcatattgaaagctatcttaaaaaagtgactttggcacagcttttagaaaccaaaaatacacaaaccatcgctgatcgccaagtcaatcgcctacatcagtttgaaaaagataattcacaaatcacaaccatcactttaattgggaatccagca

SEQ ID NO: 26877 - DNA, 381 bp, Moraxella catarrhalis
atggcatattcagataaagttattgatcactatgaaaatccacgcaatgtgggcaatttggataaagctgccaaaaatgtcggcacaggcatggtcggagcccctgcgtgtggcgatgtgatgcgactacaaattcaagtgagtgatgatggcatcattgaagatgctaaatttaaaacttatggctgtggctcagcgattgcctcaagctcattggtcacagaatggctaaaaggcaaaacacttgaccaagctgccgccattaaaaataaagacattgccaatgagcttgccttaccgcctgtcaaagtacattgctcagtactggcagaagatgccatcaaggccgccattgaagattatcaaaccaaagcacaagca

SEQ ID NO: 26878 - DNA, 1373 bp, Moraxella catarrhalis
atgtttgatactttaactgaacgactctctggtagtttgcgtcatatcgcaggtacaggacagctgaccgaagacaacatcaaagatactctaagagaagtacgcatggcactgcttgaagcagatgttgcattgccagttgcacgcaactttgtcgcacgcgtcaaggaacaagcacttggtcaagaagtactcaaagaactcgccccagggcaagcgtttgttaaaatcgtttatgatgaactcactgagatgatgggcagtgccaatcagacgcttgagatgacgggcaagccgcctttggtgtatctgctggcaggtttgcagggtgcaggtaagacgactactgcaggtaagcttgctaagtttttgcaagacaaacaaaacaaaaaggttatgctggtatcagctgatatatatcgtccagcagccatcaagcagcttgaacaggtggcagcacaagtcggtgcaagctttgtaccttcgacgactgatgaaaacccaattgatatcgcacgccgagccatcgatgaggctaaacttcagtatcaagatattttgatcattgataccgcagtcgtctgcatattgatgatgagatgatgagtgaaatcaaggagttaaccaaggcagtcaatcctgtggagacgctgtttgtggtggattcgatgacaggtcaggatgcggccaatactgccaaagcatttaatgatgcactgcctttgacgggtgtgattttaaccaaaaccgatggcgatgcgcgtggcggtgcagcactttcagtgcgtgcaattacaggtaagccgattaagtttttgggtcgtggtgaaaaactagaagcgcttgagttgttccacccagagcgtattgctcagcgtattttaggtatgggtgatgtgctgtctttggtcgaggaagttgaacaaaaaattgaccgtgaaaaagccgaaaaaatggcaaaaaaaattcaaaaaggtggcgagtttgatttagaagacttactgacccagttccagcagatgaaaaacttaggtgggatggcaggctttttggataagatgccaggcttgggcggtgctgatatccaaaaagccatggaagaagctcgtcctgaagaaaaagtcaaagaaatggaagcactcatccactcaatgacaccgtttgaacgccaaaatccagataaaatcacaccaagtcgcaaacgccgtatcgctgcaggctcaggtaggcagattcaagatgttaatcgcctgctcaagcagcacaaacaaatggcaaaaatgatgaaaatgatcagccgccctgatgggattggtaaaatgatgaaagcggtgcagggtctggctcgtggtatgtcaggtggtggcccttta

SEQ ID NO: 26879 - DNA, 1626 bp, Moraxella catarrhalis
ttgtttgaagtggttttttcgtttatctttggtgaatttatggtaaattctacaaaacaagccacgccgatagcagtcaatctattttttggtttgctattggctggaatgagtatctattttatccaatggggcttggtctacacaatgcatcagcaggtgctattgtttatgattgcaagtttctttggtatttttatggcattcaacattggcggtaacgatgttgccaactcatttggcacatccgtgggtgcaggtacgctatcagtcactcaggcgttggcagttgcggcaatttttgaggtatcaggtgccgttttggcgggtgcagcggtcacagatacgattcgtagcggcattgttgatatcggtcaattgggcgtttccccaaatcagtttatttacttgatgctttcagcactcgttgcagcggcattttggctattatttgcaacgaagcgtggtctaccagtatcaaccacacatgccattattggtggtattgtgggcagttcaatcgtgcttggcattagtatcggtggggttgattttgcattttcaacggtcaaatggtcaaagattcgtgatattgcactttcttgggtgatatcgcctgtattaggcggggcattatcatatttattatacagtattattaaaaaaaatatattggcatataatgataaagcggaattggtcgttaagaccattaaagccaaaaaaaaggcacttaagcgtgaacaaaaagagtattttgagacacttgatgataaagaaaagttgccatataccaatgcgttgctgcgtgaccaagaggcttttaaagacggtgattgtcagcgtgatgatttagaaacccaatattaccgtgccatttttgaccttgaacgccgccgtgacaatcttgatacactaaaggctttaaagacatgggtgccactcattgccgctttgggtgcggtgattatgacagcgatggttgtatttaagggtttggcaaatacaggtttacaattatccattctccaagctggtttggtgatgggtatgctgggtgctttggtatggttgaccgcttttatttataccaaaaccattcgtggtaaacataaagaagccttaggtaaagcgacttttgttatgttcagctggatgcaggtatttacagcatgtgcctttgcttttagccatggttccaacgatattgccaatgcagtcggtccttttgttgccattatggatgtgattaaaaataacgcagttgaggctcaggcaacggtgccagcacctgtcatgctaacctttggcgtttcactgattgtaggtttatggtttattggtaaagaggttattcaaacagttggtaccaaccttaccgaaatgcatccagcttcaggtttttcagcagagcttgcagcagctgcagttgtcatgggtgcttctagcttgggcattcctgtttcaagtacgcacattttggtgggcgctgtgcttggtattggtttggtgaataaaaataccaattggcgtttgatgaaacctattggtttggcttgggttattaccttaccagcagcagcaactatcagcgctatttcattcctattgcttacatattttctt

SEQ ID NO: 26880 - DNA, 837 bp, Moraxella catarrhalis
atgacgccaaccgacaattttgatgatttgcttgcattgatggcacgccttcgcaccgattgcccttgggatgccaagcaaaccaacgccagtttacaaaaatatgccatcgaagaggtttatgagctgattgaagccattcagaccgatgatggctcagcatttgccaccgagcagctcaaaagtgagctgggcgatgtgctattgcaggtgatttttcatacgcatttatatcaagaggcggggcgttttgatatgtcggcggtgattttggcattacaagataagctgatccgtcgccatccgcatgtttttgagcaagaaaatttacaaaccgatgctgatgtcaaacgccgatgggatgagattaaagcccaagaaaaagcacatttggcggctttgggtcagcccatacgcctgttgtctgatgtcaaggcaggtagtgcactcatgcaatctcagcatttacaaggcaaagcagcaagcgttggctttgattggtcaaatctgcaaggtgtacttgataaactcaatgaagaattgggcgagctttatgagttattgcctttgggtgattttaattataaaacagataagctaagcgataatcaaaagcaaaaattatctgatgagctgggcgatgtgctgtttgtgttgaccaatttggcacgccatttggatattgatagcgagatggcacttcaaggcactgtcggtaaatttcgccgccgttttgcatttgttgagcagtcgctgatggatcagggtaaatcgtttgagaatagtgatttggcagaaatggatcgttattgggagatggcaaaggcaaatgaaact

SEQ ID NO: 26881 - DNA, 1797 bp, Moraxella catarrhalis
atgggcaaagtgcctaaaaagccaaaacaaaccaaaaagagtatttgtaccacacattcagccaaatcgctgcgactacaaaaaggcagtttgccgcacagtattgtcgaggtcatcggcacactacaaaaagcaggatttgatgcttatattgttggcggtggcgttagagacagcttacttggtttggcacctaaggattttgatgcggtgaccgatgcaagaccgcatgagattaaggcaatttttgggggtcgttgtcgtatcattgggcggcgttttcagttggcacatgtgtattcaggtcgtgagatgattgaggtggcgacttttcgcgctccgcccaaagacgatacacataccaccgaagatggcatgatcacccgtgataatgtttggggcgacatcgagcaagattttgcacgccgagattttagcattaacgcattgtattatcagccaattaagggtgaagtgctggatttttgtggtgcattaaaagacatcgacagtcatacgcttcgcttacttggtgatgccaaggtgcgtattgaagaagaccctgttcgtctgctgcgtgcgttgcgatttaaggcgaaactgggttttgaatttgatcaagatttggcaaatcaatttcatcaagacaattggacgcttttggagcaagtctctacccatcgtctttatgatgaaactcaaaaaatgttcggtggtggctatttgacgccgctgttgccactgttgtttgaacatggggcgatgtcaagtttgatgagctttgcacccaatgagccgacgcctttgatgatggtggtcgcccgaaataccgatcggcgtatcgcagcagacaaaagtgtcaatccagcatttttttatgcagcgatgctgtgggaaaattatctgtatcaattggcgaaatataaaaagcgtggcttaccgtttcatgaagcacagattaaggctgccgaaaaaaccattgacgcccagcgtatcaaaactgccatacctaagtttgccgaacaattcattacagatatttggttgcttcagcctaagcttgtcaatccaagggtgcgtgatatcgctaatttggagcgtctgccaaaatttcgtgccgcatttgattttttggtactcagagaaggttatgatacccatccattatctgagccgacccaaaatatgggtgcttggtggcaggcgtatcaggacgccagtgctgttgataaagcgatcatgattgaggcgtttggtacgcaagcaggcacgccaaagcgtcgccgtgatcgtaatgccaaaaaagataccaagactcgtgagcttgagcagcttaaagagttgtctttgcgtagtgacgatgagctaatcaaaacacgccctgaaccattatttgtggtggcgggtgcagaagatttggtcaaaaaaaccaaagcacgaaccaaattgccaacgcctgccgtgcctacgcctgtctttgagccagtgaattttacacaagctgattttgaaaaattgcttgccaatgatgagccgtatattccagcatctcgccatcgtaagcgtaaaccatcatccactttatccatcaaagagcgtgaacaagggttgatcaagcagtcagacgagcattggtctggctctaaacaatcggctcaaacaaaaaaaccatcacgccatcaatctaaacaagttgatggtgtcactgatattgagcctaagcttgtagaaaatcaagccaagccaaaaagaacacgccgccgtaaatctaatgccaaaccaaaggcagatagcata

SEQ ID NO: 26882 - DNA, 486 bp, Moraxella catarrhalis
atgaccacttgttttattggacttggtggcaacattaccaatgaacttggcactcccaccgagcatatcatcaacgccgtacaagccttcaaacagtcgccacattttaccgatgtgaaaatgtcatcactgtatcaatccaaagcctttggcatcaccgaccaacccgattttattaatgcggtattaagtgccaataccagcttaccaccgcttgagttgcttgatttttgtcaaggtcttgaacagaccgccaaaagagtgcgattgcgtcattggggtgagcggtctttggatgtggatattttgttatatggtgataaacgcattcatcatgaacggctgaccgtgccacatcaaggcttatttgaacgaaattttgtgttaattccaatgcttgaaattgatgagtgtttgctggttaatgggcaaaaattggcggatttaaatgaaagtaacagctggcaaggtttgaataaactgaca

SEQ ID NO: 26883 - DNA, 840 bp, Moraxella catarrhalis
atgagcgaccaagccccatcatcaatcacccccaaacccaaagcacccatcaccctatctactttaaacaaactaaaagcagagggtaaaacattttcttgcctaacttgttacgaggcaagttttgctcacgccatgcagttggcagacattgacaccattttaatcggtgatagtctgggcatggttgtccaaggacaaagctcaaccttgccagtgggcgttcaagacatggtttatcacactcaaaatgtggtgcgtggtaattctcatgccttaatcttatgcgatttgccattcatgagttatgccaccttatctgatgccatcaccagtgccaaggcggtcatgcaagcaggggcgaatgtggtcaaaattgaagggggcagcgagcttagcgacactgttaaggtcttgaccaataacggcgtgcctgtgtgcgtgcatttgggattaacgccgcagtcggtcaatgtctttggtggctataaagtacaaggtaaaacagacgcccaagcggataaattgatgagagactgtacggcggtggtgaatgctggggcgagtcttttgttgcttgaatgcgtgccagcaccgcttgccaaagccgttaccgagcggtttgatgtgcctgtcattggtattggggcgggtgtggatacagatgggcaagtgttggtcatgcacgacatgcttggcatttatacccgaaaacctgccaaatttgtcaagaattttttgaccgatgacagcaaccaaaccaaagacattgttggggcgtttaaggcctatcatcatgcagtcaagcagcgtgcctttccaacaaaacagcacagtttt

SEQ ID NO: 26884 - DNA, 888 bp, Moraxella catarrhalis
atgatgcccaaactcattgccccaaactcaatcattgtggtgtcagggcgttcaggttcaggaaaaacctccgtactcaacaccttagaagattttggctattatccgcttgataatttgcctttatccatcgtgccacttgccatagaaaaattggtcaatgacagccagattcatcgcattgctgtggggatagatgtccgcacccccaaagcggatttatccaactttggtcaagtgtatgacagcttgatacaaacctatggcaagaccgctttgagtgtgttatataccaccgcccaagatgatgtactggtcgcgcgctatgatgccactcgccgagtacatccattgatggcgatggctggcaatctgcccaatgccattcaaaaggaaactgcgctgcttgaaccgattgcctgccatgccgatatcaaaattgacaccagtttgttaaacattcatgagctaaaaaacagcctaagacaacatttgggcgtggataatcatatcatcgttaatgtgctgtcgtttgggtttaggcatggcacgccaaaagatgctgattttgtctttgatgtgcgtaccttgccaaacccacattggcagatggatttgcgtcctttgacagggcttgatgcacctgtgcaggaattttttgctcaattttctgccgtgcatgagatgacgcatgacatcagcacatttttattaaagtggctgcctgattttattgagaacaatcgccattttgtgaccattgccattggttgtacagggggtaagcaccgctcggtatttgtcagccaagcggtgggggagatattaactggtcatttgcctgataaaatgcaggtgaatgttaagcaccgtgaaaaatctttttgg

SEQ ID NO: 26885 - DNA, 1200 bp, Moraxella catarrhalis
atgcatacccagtttgtcctaaatcaagcaaagaaagagactgttatgaaaaacctacttccccaagactggcagcagccgcacatctcagaggcggacactgcggataaatggctgataccacccatcgtggatctgtgtgcgcacctaagggagcctgggcatcagtcacatggtacgctggcaagcgaggggcgagcggcacgccaaaatggctttttgcatgtggtcatgccacctgataccagccctgtgctagaaaacggctcactgttaaagggtctcaaacaaaaagcatgggcagacggtggcatttacttgcatgttttgggggcattgagtgcaggcttagagggtaaacaacctgccaatctggcaggactaaaacaaggcggtgctatcggcgtgagcaatacagcggcaggttttgagagtgatttggtattgttacgctgtttagaatatgcagcgacctttgacatcaaagtctttttctaccctgatgaacccagtttatcggcagggggtgtggctcacgatggctatatcgcatcttttcatggattgcaaggcattccgtggctggctgagaccattgcactgtctaagcaaattttgatgaccgaagagacaggcattcatgcacattttagccaaatcacttgtcgcacctcggtagagctaatccgtcatgccaaacaaaagggcttgcccattacctgtgatgtggcgatgcaccagttgcacctgaccgatgatgacattgagggttataacgctcatgcttatgtattgccccctttgcgtagtaacaccgaccaaaaagctcttatcaagggtcttcaagacggtacgattgacgccatctgttctcatcatgaaccactgtcaagcagtgccaaacaagccccctttgcccaatgccaagcaggcatcagtaactttgacacctttgtgtcattgggggtgaaactggtggcagatggcgtgttaagtactgagcagttggtagaaaaaatctgcctaaatcctgccaaaatcgcaggcattacagattatgagcgcattggtggggcggtactcattgacccaaatcaagcatggacggtaaccaaagacaccatgctatcagcaggcaagaacacgccatttttggggcagacgctgacgggaagggtggagaaagtcttttttgatggc

SEQ ID NO: 26886 - DNA, 810 bp, Moraxella catarrhalis
atgaataaaaccctatttttatttgtgccagcaacacgccttgattgggtatcaaaagccaagcaatctaaagcaaatgccatcatcattgacctagaagatgccgtcgcagatgaccaaaaaaatcacgcacgcacagcactgatggcattagatgccaaaggcgagtgcagctattggctgcgtatcaatgccgtgcatagcatgcatcatcttgatgatattacttgtatgcttaagcttaatcatctgcttggtgttgtgttgccaaaatgccaaaataaacaccaagttgaaagcgtgtatcaccacattcataagcctgtcattgccatgattgagacagcggtggggatggcaaatattgctggtatcgcacacgctgatgggctttgggcgatgagttttggtagattagatttgatgtatgagctgggtgtgcaaccagattcgccagcatcacagctgatttttgataaaattcgtactgatttattgattcattctgtggcaaatggtcttcatccgcccattgagaccatttttaatgattttgaagatgaaacaggattggccgcttgtgtacgccactggtgcgattttgggtttgcaggtcagatgatgattcatccaaaacaaattgctgttgctgatggcgtgctaacagcacaagccgaacaaatggcttttgcccatgccatttgccaaaaataccaaaaaacaggcgagacggtctttgccattgatggtaagatggttgatttgccactgattaactgggcaaaaaacctaataaaagtcgccaaaaat

SEQ ID NO: 26887 - DNA, 1281 bp, Moraxella catarrhalis
atggcattaatcgtacaaaaatatggcgggacttcgatgggaaacatcactcgcatcaaaaatgtcgcccagcgtgtcaagcgttggtatgataatgggcatcaggttgtggtggtggtatctgccatgagtggtgaaaccaaccgcttaatcggtttggctcgtgagatcagctctgacccggaccctcgtgaatatgatcagatggtctgtacaggtgaacaagtttccatctctttgcttgccatggcattgcaatcacttggtgttgatgccaaatcgatgacaggtgatcaggtcgctattcatactgatgatactcatactaaagcacgcattcaaagtattgataccgattctattctaagcgagcttaatgcaggtcgtgtcattgtagttgctggctttcaagggattgatgaacatggtgatgtgaccactttagggcgtggtgggtcagatacaactggcgttgctttagcagcagcccttaaggcagatgaatgccaaatctatacagatgtggacggtgtgtacaccactgacccacgagtaacacccaaagccaaaaaactctccaaaatcacttttgaagaaatgttagaaatggcatctcttggttcaaaagtgctacaaatccgctcggtagaatttgctggtaaatatcaagtgccacttcgtgtcttatccagttttgacgagggtgatgatggaatatttgatgataaatttaaacaaactgtcggtacgctaattaccgctgatgaaggagatgatatggaacgcgctgtaatctcaggcattgcctttaaccgtgatgaagccaaaattgttgtacttggcgtgcctgatcatccaggcattgcatctgccattttaagcccaattggtagagccaacattgaggttgacatgattatccaaaacatgtccgaaaatggcgtaaccgattttagttttaccgtgccacgcggtgattttaataaagccatgaaaatcctaaatgagcaagtcaaagatgacattggagcaagcgatgttgttggcacaagcgatgttgtcaaagtctctatcgtgggcgtgggcatgcgttcacatgctggcgtggcaagtaaaatgtttgaaacactggcatcccaaaacattaacctacaaatgatttcaacctctgaaatcaaagtctctgtactcatcaaagaagagtgtctggaaaaggcagttaaatcactacataccgcctttggtcttgaccgtgaagatggtgagagcaaagtagcgggc

SEQ ID NO: 26888 - DNA, 1101 bp, Moraxella catarrhalis
atgtcaaaaaaaatcaatgtactcatgatggcagcaggcacaggggggcatgtgtttcctgccttggcggtggcagatgaaatggtggctcgtggggctgtcattcattggcttggcacgccaaagggcatggaaaatgagcttgttgccaaacacggtcataccatgcaccacattgacatgcaagggcttcgtggtaaggggctggtgcgtgccattaagttaccttttatgctgttcaaagcggtcatggcaagcaaaaatatcatcaaaaacaataacatagatgtggttatcggctttggcggttatgtaaccgcaccgggtggcttagcagctaagctgtgcaaaattccactcatcattcatgaacaaaacgccatcgctggcatgagtaataaaaatttggcgcgtcatgctgataaagtattacaagcctttgatggggcgtttgacagcgatggcaaaaaggtgctaaccgtaggtaatccagtacgccagtccatcgccaatattgcaccgccaaaagagcgttatttgaatgatgattcaccgcttaaagtgctggtggtgggcggttcgcttggggcaaaagccatcaatgaagcggtggttgaactgttaaagctgtcggataagcccctaaccgtgcgacatcaatgcggtaaagataaccacaacaccatgttggtcgcctattcacaagcacagattgacacaagccgtcatgtctttgaggttatgccatttattgatgacatagcacaggcatacagttgggcagatgtggttatttgccgtgctggggcattgaccgtaaccgagatagccagcgtaggtgttgcagcgatttttgtgccgctaccacacgctgtggacgaccatcaaaccgccaatgccaagagcttaactgacaaagaggcagggattttgttgcctcaacatgagctgtcgggtgagacattggcacagattttaactggtcttgaccgccaaaaatgcttagacatggcaaaaaaagcacaagagagtgccaaacatcatgtcgcaaagacagtggcagagctggttttggcgtatggtgatgataaaggcagtcag

SEQ ID NO: 26889 - DNA, 1458 bp, Moraxella catarrhalis
atgccaaattcaaccaaagtcaaaacgctcccaaaacgcctaatagaaatcccagagatgcgacgcattcaaaacattcattttgttggcattggtggggctggcatgtgtggcattgccgaagtgcttgccaatcaaggctatgtggttactggctcagacattaaggcaaatgcgatgaccgagcgtctggaaaacttaggtgtaacggtacatgttggtcatgatgccagcaacatcaaaatggccgatgtggtggtggtgtcatctgccattgaccgacaaaaccctgagattagggccgccttaaaagcacacattcctgtggtacgccgtgccgacatgttgggtgagctgatgcgataccgtcatggcattgcggtggcaggggctcatggcaagaccacaaccacaagtttattaaccatgatgctcaccgaagcggggcttgacccaacttatgtgattggcggtaaattaaacgcctcaggcaaaaatgccgccttgggtgccagccgttatttggtggcagaagctgatgaatctgatgcgtcttttttatctttgcgacccatggcgtgtgttgttaccaacattgatgaagaccacatggagacctatgaaggcagctttgataaactaaaacaagcctatgtgcagtttttgcacaacatgcctttttatgggctggcggtgttgtgtggcgatgacaaagagctgtatgccatgattgatgacattgcaagacctgtcatcacatatggccttgaaaaacacaacgatgtgcaggcggtagatgtgattgcagacggcacaaaaacccatttcaccgtactaagaaaagacaaaaaacccttacccatcaccttaaatatccctggcattcacaatgtctataatgcccttggggcaattaccatggcaaccgatgaaggcgtgagtgataaagccatttgccaagcggtagaaaaatttgcaggcgtgggcagacgctttgaaaacaatggcagctatcccctaacagatggcagcggtgatgtggtattgattgatgattatgggcatcaccccaccgaaatcgccatgaccatcaaagctgcccgccaaagctatcctgaccgccgtttggtgatgatgtttcagccacaccgttacagtcgcacaagggattgttttagcgagtttgtcaatgtgttatcgcaggtggataagctgattttgcttgatgtgtacagtgctggcgaggagctgattaagggggcaacaagcaatgatttggcgcgttcattgcgtgagcgtgggcaggttgaaccgattgtgttaaatgtcaatgacaaagaacaaatcacccaagtgcttaaaatcaccctaaacgccaatgatttgctgatgacccaaggggcgggcaatgtgggacaactgtgtcaagaattggtcaaaaatgggttgtttttgggg

SEQ ID NO: 26890 - DNA, 999 bp, Moraxella catarrhalis
gtgtcaagaattggtcaaaaatgggttgtttttggggtgattttaaaagggcttaaaaacttaaaaaaaggcaaaaacatgagcaagcttaatacaaaagatgggcaaaactttggcaaagtggcggttgtctgtggcggaacaagcacagagcgtgaagtgtcgctaaatagtggcatggcagtgctaaatgccttattatcaaaaggggtggacgcccatcattttgaccctgctgataccgacatatctcatttgcgtgcctatgaccgtgtgtttaatgtgttgcatggcacttttggtgaagatggcagcttgcaaggcgtgcttgatggctttaatctgccttatacagggtgtggtgttttggcatctgccatcgccatggataaatttcgctgtcgtttgctgtggcagtcgctcgggctaccaaatgtgccttatgtggttttgcatgatgacagcgatttttctgccgtagagcgtgaatttggtttaccgctatttgtcaaacctgctgccgaagggtctagcgtgggtgtgtttatggttgagcaagcaggtgatttggcaaaaatttatcccaaattaaagcaataccatggcgagattttggcagaaaaagcgatgatgggcggcgaatatgccataccactgcttggtgagcaagttttgcccagcatccgtattatccctaagggtaaattttatgattatgaagccaaatatttgcgtgatgacaccatttatcaatgcccatctgatttgacgccagagcaagagaggcaaatgggtgaattggcattaaaagcgtttcgtgcgattggggggcgtggttggtctcgtgtggattttttaaaggggcatgatggcaagctatatgtcctagaaatcaacaccgtccctggcatgaccgaccacagtcttgtgccgatggctgccaaagaagcagggattgggtttgatgagttgtgcttacaaattctacgccaaacgcta

SEQ ID NO: 26891 - DNA, 564 bp, Moraxella catarrhalis
atggcagcaattattaatcaaaccattccagaattttcaacccaagcctatgtgaatggtgagtttaaaaccatcacttctgatgatgttaaaggcagctgggcgattttcatgttttatccacatgattttacttttgtttgcccaacagagctagaggatatggcagcacattatgaagagctaaaaggcttgggcgttgaagtgtatgcagtatcaaccgatacacattttgtacacaaagcatggcatgatgcgtcaccagccattggtaaagtacaatacccaatgcttggcgatggcactggcaaaatcactcgtggctttaatgtgatgattgaagaagacaatgcagcactacgaggcactttcttggtagatccagatggtgttattaaagttgctgaaatccacgatttgggcattggccgctctgctaaagacatggttcgtaaagtaaaagcagctcagtatgtgcgtgataatgacggtgaggtttgcccagctgcttgggaagcaggtcaagaaaccttgaagccaagcttggatttggtaggtaaaatc

SEQ ID NO: 26892 - DNA, 1299 bp, Moraxella catarrhalis
atgaccgttcaaaatcatccagcagacaatccaccaagctcatgggcttatccaaaatctcaaataaaacaatatgatattgccattatcggtgctggtgttgtcggtatggtctgtgccattttacttgccaaaagaggcaagcaggtcattattttggatagtaagcctacccctagtaaggcatcgtttgatcagagattggctcagcgagatgccagagtctatgcactcaatcttagcagtatcgatttattaaaaagtgccgatgtatgggacggtatcaccagacgcgccgattatgaccaaatgcatgtatgggcgagagatgattttggtgaattgatttttcaagatgaacacgcctttgaaaatatcatgcttgggtctatggttgagccatcagtattggatgaagcactttggcatcgtgcaaaagcttatgaaaatttaactttaaaatatgagatcagcttggcggctcatggcatggcttttgatgagatgcctgacggtgtgtgcatacgctatcaagctgacaatcaagccaagatggtgaaggctaagctattgattggtgccgatggccgtgcgtctttggtacgccgtgagatgggggtgggggtagataccttaaattatcaccaaaaagccatctgctgtgccatacgaaccgatcagccacatggtaacacagcacgccaagtgatgttgccaacaggcactttggcactattacccattgccaatctcaatcaagatgatcaatgccgatggcagtcgattgtttggacattgcccaagcagattgcagagacatatttgagcgactaccaccaaaatcctgatagcctaatcaataggctggctttggcaagcggctatgtacttggggatattcataagatacagtcggtcgcaagttttccactatctgcacaagccgccaatcgctatcataagggtttaatcgcactgatgggtgatgctgcacatggggtacatccgttggcaggacaggggcttaacttgggcttatctgatgtgaaggcattgctggcattggtagatgtgtatcatgccaaaaatatgcccttaagcacacgcttattaagcgattatgaacgcacggtcaaagggcataattcgctgatgatgcatagcttttctatgattaattttgcttatacatcagcactgagtaatatttctgtgatacgccatgcacgcagtgagattgtcaaggcgatttctaagtcaccatccgtcatgcgtctgctgattgagcgggccaattgc

SEQ ID NO: 26893 - DNA, 1407 bp, Moraxella catarrhalis
atgtcaaacaaattatttgacctgattgaatcatcaggggcgaaatgggtggattttcgctttacagatacgcacggcaaagagctacatttaacttttccagcatcgaccgtggacgaagatacgctagaagatggtaaaatgtttgatggctcgtcagtggcaggctggaagggaattgaatcttcggatatgattttactccctgatgccaaaacagcatatttggatcccttttatgaatcaccgactgtcgtggttagctgtgatgtgattgagcctgcgacaatgcaaggttatgaaaaagacccccgctcaattgcacgccgtgccgaaacttatcttaaatcaacagggattggcgatacagcttattttggccctgagcctgaattttttgtttttgatgatgtgaagtggcaaattgatgaatcaggggcacagcacagcataagctccgaagcggcatcttggtcgtcaaataaagagtatgcttggggtaataatggtcaacgcccagctttaaaaggtggctatgcggtgactgcacccatggattattatcacgacatgcgtgcagttatgtgtgatcgtattgaagatatcatgggcgagggtcgtgtcgaggtgcatcatcatgaggtggcatcgggtcaacttgagattggtgtgtcttttaatactttggttaaaaaggccgatgaggttcagcaatttaagtatgtggtgcaaaatgtcgccaatcaatttggtaaaacagcaacctttatgccaaaaccgattgttggtgataatggttctggcatgcatgtacatatttccatctcaaaagagggtgtgaatactttttctggagatgagtacgctggcttgtcaatgacggcattgtattttattggtggtattattaaacacgctcgtgcgttaaatgccatcaccaacccaaccgtcaatagctataagcgtttggtaccacattttgaggcaccgattaaattggcgtattcagcatcaaaccgctcggcgtccattcgcattccacatgtctctagcccaaaagcggtgcgtattgaggcccgtttcccagatcctgcagcaaatccttatttgtgttttgcggcattgttgatggcaggcattgatggtattgaaaataagattgacccaggcgaggcagctgataaaaacttgtatgatttgccaccagaagaagaagcattgattccgaccgtggcagaaaatctagaaactgccttaaaagctttaaaacaagatcatgcttttttattaaaaggtgatgtgtttagcaaagatatgattgatgcttatattgatctaaaaatgcaagaagttcataaattaaatgaagcggtgcatccgcttgaatttgatttatattatcgctgc

SEQ ID NO: 26894 - DNA, 1833 bp, Moraxella catarrhalis
atgacgcaacaaactacccaatccccaaatatgacggggcatactcaaaccaaagatgctgctgcgcactttcgtgaactccaagatatcatcgcacgcggtgaaatagccatgatgtcaggcgctgagatgcttgttcaagcattgattgatgaaggtgtcgagtatatttttggctatccaggcggtgcggtattacatatttatgatgctttatttaagcaagataaaattgaacatattttggtgcgtcatgaacaagccgcagggcatatggccgatgcatacagtcgtacaacaggcaggacgggcgttgttttggcgacttcaggtccaggtgcaaccaacactgtaacagccattgcaactgcttatatggattcaatcccaatggttgtgttggcaggtcaggtaccatctagtttgattggtgatgatgcgtttcaagagtgtgatatggtcggcgtttcacgccccatcgttaagcacagttttcaagttcgccatgccgaagacattccaacaatcatcaaaaaagcattttatattgcaggctcgggtcgtcctggtcctgtcgtggttgatattccaaaagatatgaccaacccaagtgataaatttgcttatatcatgccaaagacagtcaatatcagatcatatcagcctaccaataaaggtcatggcggacaaatcaaaaaagccatcgaaacgctactatcagccaaacgccctgtactgtattcaggcggtggggtggtgcttggtaatgccagtaaagagctgcgtcaattagccgatacgctcaaactacctgttactaataccctaatgggactgggtgcttatccaggctcaggcgaacaatttgttggaatgcttggtatgcatggcacatatgaagcgaacatgaccatgcatcatgctgatgtgattttggcagtgggtgtgcgttttgatgaccgtgtgaccaataatgtcaaaaaattctgcccaaatgcaacgatcattcatattgatatcgatccagccagtatctcaaagacgattatggcacacattccgattgttggcgatgttaagctggtactaaatgaaatgcttgccttgctagcagagattgataagtgtatcgatgaacatgcgctcaatgattggtggcaacaaatcaatgaatggcgtaaacgccatggtcttcgctatgatgcagatgatatgactgccaaaacacatgccatcaagccccagcatgtggttgagatgctttataagctgacgaatggtgaagcaatcattacctccgatgttggtcagcatcagatgtttgctgcattgtattataagtatgatgagccacgccaatggttaaactcaggtggcttaggtacaatgggcgttggtttaccttatgctatggcagcaaaattagctcacccaaaaaagacagttgtttgtatcactggcgaaggctcaatccaaatgaacatccaagagctgtcaacttgtctacagtataatctaccagttaaaattttaaatttaaataatgctcagcttggcatggttaagcagtggcaggatatgctttatgaaggtcgccatgctcaatcttatatgcaatctttacctgattttgttaaattggcagaaagttatgggcataaaggtgtaaaaattaccaatcctgctaccatgcaagaagagctaaaacaagccctagaaatggatggtttggtatttattgatgtctatgtggataaaggtgaacatgtttatccgatgcaagtcgctggccaatcaatgcgtgatatgtggttatcaaaaggggagcgtacc

SEQ ID NO: 26895 - DNA, 540 bp, Moraxella catarrhalis
gtggttatcaaaaggggagcgtacctaatgccaaatcaagtacataaacatctgatttctgtattaatggaaaacgaagcaggttcgctgtctcgtgttgtcggtttattttctcagcgtggctataatattgatacgctcaatgtagcagccacggatgacccaacgatctcacggctgactttgacaaccattacaacacatgacaaaatcgaacaaatcaccaagcagctgcataaactgatcgaggtggttaaagtccaaaatctgtccgagctgtcaggcggtcatcatgttgaacgagagttgatgctcattaaggtgcgtgcaacgggttcaaaccgtgaagaaatcaagcgtaatgccgatatatttcgtgcccaaatagtcgatgtcagcacaaacttgtatacaattttaattactggtgatgctggcaaattggatggttttatcgatgtgattggtcgtgaccgtatcctagaagtggtacgctcaggtgtgattggtatcgctcgtggtgagaaaactttggcgatt

SEQ ID NO: 26896 - DNA, 1020 bp, Moraxella catarrhalis
atgagcctaaatatttattatgacaaagattgtgatttatcaatcatccaaagcaaaaaagtcgccatcattggctacggttctcaaggtcatgcacacgcattaaacctaaaagatagcggtgtggatgtgactgttggtttgcgtcaaggttctgcttcatggaaaaaggctgaaaattctggtcttaaagtggctgaaaccagcgaagcggttgcaggtgctgatgtggtgatgattttgacgccagatgagtttcagcgtgaactttataaagaggtgattgagccaaatatcaaacaaggtgcaactttggcttttgcacatggctttgctattcattacaaccaagttgagccacgcgctgacttagatgtcatcatggttgcaccaaaagcaccaggtcatacggttcgttctgaatttaccaaaggcggcggcattcctgatttgatcgccatttggcgtgatgcatcaggtggggcaaagcagcttgcactatcttatgcagcaggtgtgggcggtggtcgctctggcatcatcgaaaccacttttaaagatgaaaccgaaacagatctatttggtgagcaagcggtactttgtggcggtgcagttgagcttgtcaaaatgggctttgagactttggttgaggcaggctatgcacctgagatggcatattttgagtgcttgcatgagctaaaactcatcgttgatttgatgtatgaaggtggcatcgctgacatgaactactcaatcagtaacaacgctgaatatggtgaatatgtgactggtcctgaggtcatcaatgagcaatctcgtgccgccatgcgtcatgcgttaaagcgtatccaagatggtgaatatgctaagatgtttatcgctgaaggtcaaaccaattatccatctatgaccgctcgccgtcgtaataatgctgcacatcctatcgaaacaacaggcgaaaaattgcgtgcaatgatgccttggattggtggcaataagattattgataaacaaaagaac

SEQ ID NO: 26897 - DNA, 2658 bp, Moraxella catarrhalis
atgcaatgtatatttattgatattttgtcattaataaatcttaatgaatatatagtgccaatgattatatttaaggataattatatgaattttgagaaatatactcgaacactgcaagaggttattcgtggggcacagcaaagcagtcttgggcatcatcatactgcaattgcccctgtgcatttgctgagtgctgtggctgataatcatactgcactgtccatcattgaggcgagcggtgcaaatttagcacggctacaagatgagattaagacactgctttcttatcaagcggtgatcaatcagcccacaggacaagtgaatttatcacctgaaactatcaaggtcttacaggcaacagaaaattatgcggccaaagcaggcgatgagtttgtaccgattgaatggctgattttggcactatttgagaataaatcactcaataaagcctttgtatcatcaggtgtgaccgcccaaaatttacaaacaattatgaaaaatattcgaggagatgaggctgtgaccaatcaaaatagtgaacaaaatcgacaagcattagataaatataccatcaatcttactgagcgtgcgatggcaggtaagcttgaccctgtgattgggcgtgatgatgaaattcgccgtactgtacaggtgttatctcgccgtaccaaaaataacccagtgcttatcggtgaagcaggtgttggtaaaactgccatcgttgaagggcttgctcagcgtatcgttaatggtgaagtgcctgaaagcctaagaaataaaagcgtgctatcgctggatatgggttctttgattgctggtgcgaaatatcatggtgagtttgaggagcgactaaaagcggtgctaaatgagcttgccaaacaagacggcaatatcattttatttattgatgagctacataccatggtgggtgctggtaagaccagtggtgcaatggatgctggcaatatgcttaagcctgcacttgctcgtggtgagttacgctgtgtgggtgcaacaactttggatgagtatcgtcaatatattgaaaaagatccagcacttgagcgtcgtttccaaaaagtcttggtagatgagccgactgttgaagataccatcgccattttgcgtggtctaaaagagcgttatgagctacaccatggtgtcaaaattatggattcggccatcattgctgccgctaagatgagccaccgctatatcaccgatcgtcagctgccagataaggcaattgatttgattgatgaagctgccagccgtatcaaaatggagcttgatagtaagcctgaaagtttggataagctagatcgtcgtatcattcagctaaaaatgcagctagaagctgtaaaaaatgaagaagatgctggtgcaaaatcacaagtcaaatcacttgagcagcaaattgatgacgcacaaaaacagtatagtgagcttgaagaggtttggaaagctgaaaaagtaggtgttgaaaaaagtaaacagcttcaagccaagctagataccgcacgcatcaccttagaaaaagcattgcgtgaaggggattatgctcgtgcttcacagctacaatatggtgaaatcattgcacttgaaaagcaattggcagaagagcagacagatgagccagaacatgcacccaagctacttcgtaataaagtgactgataacgaaatcgctgaggttgtgtcgcatgccacaggcattcctgttgccaaaatgcttcaaggtgagcgtaataaactgttggcgatggaagatgtattacatgagcgtgtcatcggtcaaaatgaggcagtggcggcggtcgcaaatgcggtacgacgcagccgttcgggcttgtcagatcctaataagccaagcggttctttcttatttttgggaccgacgggcgtgggtaaaactgagctgactaaggcattggcaaatttcttatttgactctgaagatgcgatggttcgtatcgatatgagtgagtacatggaaaagcacagtgtttcacgcttggtgggtgcacctccaggttatgtcggttatgaagaaggaggtgtgctgaccgaagcggtacgccgtaagccgtacagcgttgtactctttgatgaagttgaaaaagcacatccagatgtctttaatatcttactgcaggtgcttgatgatggtcgattgactgacagtcaaggtcgtgtggtgaactttaaaaatactgtcatcattatgaccagtaacttgggcagtcatgcgatccatgagatgacagactcgccttatgaagacatcaagactgcggtaatgacctcggtcactggacattttagaccagaatttatcaaccgtatcgatgagattgttgtctttcatggtttgggtgcagatcaaatgacgggcattgctgaaattcagcttgatcgtctgcgtacacgccttaaagagcgtgagcttggccttagtgtgagtgatgaggcgatgaatcatttggtatcggtgggttatgatcctgtctttggtgctcgcccattgaagcgtgcgattcagcaagagattgaaaatccattagcacaacttttattatctggtgagttcaccacgggagataccatctttgttgagtggttgaatgatcaattcacctttaataagctgcgttatagc

SEQ ID NO: 26898 - DNA, 621 bp, Moraxella catarrhalis
atggcaaatttacctcatctttctttaacacaatttattctttatgctgatcatggaattaatagccatatcgtacggctattgcttgaagaaaaacacttaaattatgaaactgtgttcattggtgaggagcgccctgaagagctgattgagctaaatccttatcacaccctgcccatattggtcaatcgagacatttcactatatgaacataatgtcatctttgagtatcttgaagaacgccaccgagtcccacggctgatgcctgatgcaccaagtgagcgagccaaagtgcgtcaactggcgtggcgactacaaaaagactggctaaagcacggctatactctactgacccattctgacagctttgatattcaggctgcgacagccgccagaaagtcattaagcgattcactggtaacaatcgcaccgctgtttgggcataaaccgtattttatgtcggatacttttggatggtgtgatgtgttattactgccactactttggcgactaaataaaatgggcgttcatcttccgacacatctcatacgcccattaatacactatcaagaacagcaatttgccagaccaagctttattaatagtatttcttttaaggaa

SEQ ID NO: 26899 - DNA, 1198 bp, Moraxella catarrhalis
atcatcacctcgctgcttgataatgatttgtataaatttaccatgctacaagccatgttacaccaattcccacaaacgcatggcgtatatcgatttcgttgtcgtaataatcatgaaaccgcctttgctttgggtgagattaaagcagatcttgagcagcagctggattatttgtgtcagctaaaatttactcaagacgagcttgattatctgcgtggcttaagatttatcaaatcagattttgtggattatttagaattattttcactcaaacgccgcgtttatcaccgtttcaactgatgaaaatcattttttaaatattgacattgaaggtccaatgatccaagcgatgttttttgagatttttgtactttgtcttgttagtgagctgtattatcgccgcttggcaactgatgatatcatggcagaaggtcaaaaacgactggatgctaagattgccttattgcatgagtatcacgccaaacaaagcacgcagccaatgcctgccgataacgcttttacggtggctgattttgggacacgccgccgatttagtaaagcttggcaatatcatgtggtcaaatcgcttcatgaggcttgccctgtcattgttcgtgggacttctaatgtttatttggcaaaacagcttggtattaccccaattggcaccatggcacatgaatttttacaggcatttcaggcattggatgtccgcctaagaaattctcaaaaagccgctcttgaaagttgggtgagagaatatcgaggtgacttgggtattgcattgaccgatgtggttggtatggatgcgtttttgcgtgattttgatttgtattttgccaagttatttgatggtcttcgccatgatagtggcgacccatacgaatggggtgataaggcgatcgcccattatcaccaactaaaaattgacccaaaaaccaaaatcttgacttttagtgatggtctaaccctacaaaaagcatgggatttacatcagtattttaaagataaaatcaaaacgggatttggaattggtacaaatttaacgaatgatttgggtgaagtgcagttaaacattgttctaaaactggttgcttgtaatggccagcctgttgccaagttgtcagacagccctggtaagacaatgattgatgacgatacttatttggcatatcttaagcaggtctttgaaatcaaa

SEQ ID NO: 26900 - DNA, 885 bp, Moraxella catarrhalis
atgcaagtatccaatcggttagccctaacaggtctaaccattaaacaaattcgtgcaatctttaagcagcttcagtctgatgtattaccaatgcattggcttgatggttggttgatgcatgtgcttgataaaccctttatatttctgatgacggatgaagattatcagccaactttggaggaatcatcaaaaattaccgcaggtattatgcagctgtcagcaggtaagcctttggcatatctgactgggcaacaaagcttttgggggcgtcattttttggtgaatgcccatacgctgatacccagagctgatactgaaattttggttgagacaatcttaaattatgccaaagctcaacaaaaaatccgccaaacagacaacaaaaatttggttaatattttggatttgggtacaggtacaggttgcattggtattacgctggcactggagttggaatttgctcaggtagttttggtagatatctcttctgaagcacttaaagttgctgagcaaaataaccatcgcctgaatgcacggtgtcaacttttgcaatcacattggttgcagaaagtcagtggtcaatttgatattatcgtcagtaaccccccttacatcaaagaaaatgacgagcatttggtaaatcttaagcatgagccaatcacggcacttgtggcagctgaagatggtttgacagatattcgccatattattgaaacaggtagggcgtatctcaaagatggcggattgatggcaattgagcatggttttgaccaagcggaggcagtgcgtaacttgtatttgtcatctggttatcttgatgtatatacgatccaagattatgggggtaatgacagagtaacgcttgggagatataaaaactgtgga

SEQ ID NO: 26901 - DNA, 759 bp, Moraxella catarrhalis
atggacagtcatacagttgatggtcatcttactgatgatgaaatgatgcgatatgctcgtcaaatcttgctagatgattgggatgtcacatcacaaattcgcctaaaaaatagccatgcgattattgtgggtatgggcggcttaggctgtcctatcgcacaaatcttggtgcgagcagggattggctcaatagatatcattgatcatgatgttgttgatgtcagtaatttgcagcgacagattttatacactgcgttggatgtcggtaaatctaaagcgatggcagccaaagatgcactacaaaagcaaaacgaatgggtgagtatcaccgccatcactgataaaatcacccaaaccaatactgatcaattcatcaaacataccgatcttgtgattgattgtacggataattttttgattcgtgatatattaaatcgcacttgtcatcagcacaagcttgcactgttatcaacatctgccatcgctcagacaggtcagattgcgctttatacgactgatacggcgtgttatcagtgcgtctttggtgatgcgttaggcgatgagatgaactgtagtacctctggtgtgttggcaagtaccgtatctgtgattggtgctttggcatcacaggttgcacttagttttttgggcaagcatatcaatccgattgccaatgaattgctgatttggcaaggtgagcaatttcaattaaaaaaactaaacatttgccgtgatgagcattgttcggtttgtggcgca

SEQ ID NO: 26902 - DNA, 1059 bp, Moraxella catarrhalis
atgaacacaactaaaaaacgcatcctaacaggtatcaccaccactggcattccccatttaggtaattatgttggatccattcgccccgccattgccgaggctcatcgtgcctttgagaatcatgatggagatgcgtttttctttttggcagattatcatggtattattaaatgttttgaccctgatgaaattcatcgctctactcgagcgattgccgccacttggttggcatgtggtcttgatcctgaaaaagttattttttatcgtcaatcggacattcctgagattcctgaattggcatggatactcaattgctcatgtgccaaggggctgatgaatcgtgcccatgcttataaagccgccgtcgatatgaatttaagtaaagaagataccgatcctgattatggcatcagcatgggattatttggctatcctgtcttgatggcggccgatattttgatgtttaatgccacccatgtccctgtgggtaaagatcaaattcagcatattgaaatggcaagagacattgcaggatcgtttaattttaaatacaaacccttatttgtcgagccttttgccgttgtcgacgaaaacacaccgctactgactggtttggatggacgaaaaatgtcaaaaagttatggtaacaccattccactttttggtgatggcaaccctcaaattgaccctgaaaaagcgcttaaaaaggcagtcatgcagattgtcaccaattctcaaccacccgaagagccaaaagaccctgagcattgcaccatttttgaaatctacaaagcctttggtacgcctgaagagattgaagcattggcaacacattatcgtcgtggtattggctggggtgaagctaaagagattttatttaataaaatcaatcatgaaattgccccttatcgtgagcgttatttacatctaatgaataatccaaaagagcttgaagaaattttacaaatgggtgctactaaggctcggcgtgttgcccaaaagcagctggataaaactcgccgtgccattggcatcaagccacttgccaagcttaaatca

SEQ ID NO: 26903 - DNA, 984 bp, Moraxella catarrhalis
atgaatcaatcaaaacccaaaaacaactccaccatcaacgaacaaaacgcaaccaacaaacctgctggcgaaaaactacaaaaactgcttgccagattgggtttgggttcacgccgtgggcttgaagagatcatcaaatcaggtcgcatttccattaatggtaaagtcgccacattaggcgatagggttatcttaaccgacgaaatccgcattgacggccgtcaagtacgcctgaaagccgagcgtgaaaagcgtcgccgtgtcattgcttattataaacctgaaggggaaatctgttcagcctctgaccctcaaggacgcccgaccgtttttgaccgtttaccaaaactcactaacgatcgctgggtgatggtgggtcgcttggacatcaattcatcaggtcttttgctgtttacaaatgatggtgagcttgcacatcgcctgatgcacccttctagtgggataatcagagagtatgctgtacgagttttaggcgaggttacatcacaaattgccagtcaactcaccgctggtgtagagcttgaagatggcgttgccaaatttgatgacatcaaagaaggtggcggtattggtgtcaataaatggtatcatgtgaccatcaaagagggtcgaaaacgagaagttcgccgtatgtttgaaagccaaacactcaaagtatctcgcttgattcgtacacgctatggcaccgtaattttgcccaaagaattgcgtacaggtcgttttattgagcttgatgccagtgatattggcaagctggttgattctgttggtctgcgtcagcgtcaaggtacagggctaaatcacgctaccaaagaaaaacaagcacgcattcacaaaaaacctttaaaatctcgtgagatacgccgtcaaaagcacgaagcccacgagcgacgagaagaacgcaaaaaacacacaccaaaacatcgtacacccaatcttagccgtaccaaatttaccaaaatt

SEQ ID NO: 26904 - DNA, 1515 bp, Moraxella catarrhalis
atggcggctttgtctgctggtgcaatgtttagtttggcacttgcgccttattttattatccccattgcagttctctcaccaatgctgttgtatgcactgttaaaaaagtgcgatagccctaagcgggccttttggttgggtgagttctacggatttgggacttgggtggtcggtgcattttggctatatcactccattcactactatggcggagtaccaagttgggctgcacttgtattaattggggtaatgtcgctgattatggggctgtttcatgccttgatggcatgggcatttgttcgatttagtgccaaacagccgatatcttttgcaggattttggatacttcaagaatggctaaaaacttgggttttatcaggatttccttggctttttgtggggtatgcatttacagatgtcagttggctaaatggtattgcaccgatttttggggtgtttggcttgtcgtttttggcggtatttgttggggcggctgtgatcgagctattttatcgcaatattgggcatattatgattggcggtattttaacaaccgctgttatcatgatttcattgataggggtaaattggacaaagccaacaggtaaactgacttccgtttcactcatccaaggcaatattccacaagacctaaaatggcaagagggttttggtatacaaaccttggggatttatgcaggattatcacaatctgaatgggggcgtgatttggtggtttggccagaggctgccattccgctatttcaagacgaagccagcgaccacatcaatgctctagcaaaacaggcaaacgctgatggcagtgcatggataacgggcattatgtatcgcaagacaccaagcgatgcctcaaatcaggcagaattttataacagtgtgatgttatacgatgccaatcaagtatcagtttataaaaaacaacagcttgtaccatttggtgaatatataccatttggtggtttgttggatattttaccagggcttgagggtgtcgctagcctaagccgtggcgatgataagcaaccaccgctcaaattgggcggcggcgtgggcgatacgattggtgcggcaatttgttatgaggtggcatatcctgagacgacgcgtaaaaatgcacttggcagtaattttttattaaccgtctcaaacgatgcttggtttggtacaacagcaggtcctttgcagcatttacaaatggtgcaaatgcgaagcttggagacggggcgatggtttgtgcgtgcaacaaacaacggagtgactgcattaattgaccatcaaggacggattatcaagcagataccgcagtttcagcgagatattttgcgaggtgatgtacccagttatgttggacacacgccttatatggtttgggggcattatcccatgttggggttttctttggtgctgatttttcttagtatcatggcaaagaaaatgaaaaataccaccgccaaacgagaaaaattttataccgctgatggtgtggtagaccgc

SEQ ID NO: 26905 - DNA, 474 bp, Moraxella catarrhalis
atgacaagcgaaaccttgacacttgctttagattatggagtcaaaaaaatgggcatggcactgggcaatagcatcacccataacgcacgcccctttgatattttggcgatgaataatgggcaacctgattgggataatctgcttggtatcattgagcattggggtattgatagggtgctggtgggactgccgctgaatatggatggcaccgagtcgatgctcaccaagcgtgctcataaatttgcacggcgattggcacatcggctgggcgagcgtcgtcaggcggtttcggtgtttatttatgatgagcggcttagctcaaaagaagccaagatgattgcacttgataacggctggattgcgtcatcatctgaaccaatcgacgatattgccgcatgtcttttgcttgatagctattatcatgcgcctaatcatgccatctatgtcagtgaacgaaaagactctcacaaagac

SEQ ID NO: 26906 - DNA, 921 bp, Moraxella catarrhalis
atggcaaaatctaccatacctcgagccgatagtgcggtgatctatgacgacgacccagagtatctgagcgaatttcgtgcagcaatgttggcgcgtgggttgtcgatagccaccagaaatgcgtatagccaagatgtacgcttgtgcattcgtttatcagatacgccagtgaatctatggcagccatcagatgtgcgtaatcacttgatgtgtctaaaagatgccaagaaatccgagcggtctatcgcacgcgcgttggcaagtctgtgccagttttttttgtggcaaattgagtcaggctatcgagaggataacccttgtgaatccatcaaaacacccaagcttggcaaaactttgcccaaaacgctctctgagcaagaagttagctcactgctagatgcaccagacatctcaagcgtgcgaggccttagagataaagccatgcttgaggttttgtatgcgtgtggcttgcgtgtcagtgagctgacaagtttatcacttgagcatctaaacttaactgctggttggctgtcggttacaggtaagggtaataaaatgcgtctgattcctttgggagaatatgcactgtctgcactcaatgagtatttggctgtgcggggcagtttgctgattggtaaaaaagactgtcaagcggtatttttgaccgaacaaggtggttacatgacacggcataatttttggcatttgattaaaaaatatgccttaatggctggtattaataccgccatttcgccccatacattgcgtcatgcctttgcaacgcatttggttaatcatggtgctgatttacgcagtgtacaattattgcttgggcatagtgatttatccaccacgcagatttatacacatgtggcgaccacaaggctacaaaatctccatgccaagcatcatcccagaggg

SEQ ID NO: 26907 - DNA, 1743 bp, Moraxella catarrhalis
atgaccgaatcaaccacccaaaccactgacagcaccaccgaaaattttgtaccacagtttagtgacttgggacttaataagcccatcttaaaagcactgacaaaaagtggttataccacacccacgccaatccaagcaaaagccattccgcacgctctaaatggtcgtgatttgcttttgtcagcccaaactggctctggcaagacggcagcatttgttttacctgtcttggataaaatgagccgtaagccgaccattgaaaagcatgtacaagcacttatcctaacaccaacgcgtgagcttgcactacaagttcaagacagtgtacgacgctatggcgatggcatgcgtaatatgtttagcgtgcctttggtgggcggtgcaccttatggcggtcagttgcgtgccttaaaaaaaggcgtacaagtcatcatcgcaacgccaggccgcttgattgaccatatgcgtgaaggccgtgttgacttatcaaaactagatatgctgattttagatgaagcagatcgtatgcttgatatgggatttgcagatgatatcaaagaaattctacaaaatacgccccagacacgccaaaccgtgatgtcctcggcgacttgggatggtgcagttggtaaaattgctgaaagctttacggttaatcctgaaaaagtttctattaaagttgagtcagcacatatcgatgaaagtgtgtattattgtgatgattttaaccacaaaaataatatcttgcttcaagtattaaataaccctaaaattaagcaagcagtgatttttgcagccacaaaaatgtccacagaaaaattggcagcgcagcttgtcgaagcgggttttaaggcacgctatttgcacggtgatttgcctcaaggcaagcgaaatcgtatcgttagcgacatgaaatcgggtaaatgtgatgtgttggtcgctactgatgttgctgcacggggcattgatatttcagccattagccatgtgataaattatgatttacctcgccaagttgaggattatgtgcatcgtattggtcgctgtggtcgggcaggtcgtactggcgtggcggtgaatttatgcagtatcgatgacaatcgtcagcttgagcatattaatcgttatctgaagcgacaaatgagcgtctcaaccatcgaaggattagagccacgccgtaattttggtatccaatcacaagagcgtcgccgtggtcgcagcaagtctcaaaaccgtactcgccaagatggtcgacaaaattttgagcgtactgatcataaatttggtagccgtaatcgccatgaacatcgtcatgagcgttcatttgagggtaagcgtgaacgatttgaggatcgtgaacgcagcgtcaatcgtcgtgaaaatgatgaaaatcatgagcgtcgcaatagtcgctttgaggctcgctctgatcgccgttttgataaaaatagacaaggttattatcaagctgatggcacagctcgccaagataaaaaagcgtatacacgcaattttgatcgccgtgacaacgatcgtaacgatactcgatttgataagcctaccaaaaaatttggcacacaaactgactttgatcgtccaagacgcaacaaagcatttggtgataaggtcaagccaaatacaggttttgataaatttggtggtaagtctcgtccaaaggcagttgaagagatcttttttgccaagcgacaagataaaaaagccaagcgtagatttggtgaattt

SEQ ID NO: 26908 - DNA, 927 bp, Moraxella catarrhalis
atgaatattgcaaaaagtgtgactgaccttatcggtaaaaccccgcttgtcgaactcaatcgcctcaccgaaggcttatctgctcgtgtggtggtcaagcttgagtatgccaatccagcaagttcggtcaaggatcgcattgccctttctatgattgacgatgccgaaaaatcagggcttttgaccaaagacaccaccatcgttgaggcgaccagtggcaatacaggcattgggcttgccatggtggcagcggcacgaggttaccgcttggtgattaccatgcctgagagcatgagccttgagcgtcgtgcgttgcttcgtgcgtatggggccaagcttgtgttgacgccagcggctgagggcatgggtggggcgattgccaaagccaatgagcttgctgcccaagacggctattttatgccacgccaatttgataatttagccaatccacaaatccaccgtacaacaacagccgaagagatttgggcggatacagatggtcaggtggatatttttgtctcaggtgtgggtacaggtggtacagtgacaggtgtcggtgagacactcaaagccaaaaaagaagccattcaaattgttgcagttgagccattggcatcacctgtcttatcaggcggagaaaaaggcccgcacccaattcaaggcattggtgcagggtttatcccatcagtactcaatacggatatctatgatgaggtcatcaaagtcgctaatgaagatgcctttagtgtggcacgagatatggcagccaaagaaggcttgcttgttggtatctcatcaggtgcggcagtttcggcggcacttgaattggcggcacgagaagaaaacgcaggtaagcttatcgtcgttatcataccatcatcaggtgagcgttatttgtcaacagcattatttgctgatttggcacaa

SEQ ID NO: 26909 - DNA, 258 bp, Moraxella catarrhalis
atgcgtaaagacattcacccagaataccgtgaagtattgttccacgatactaatgctgatgtgtactttttgactcgttcaacggtttcaaccaaaacaactcgtgaatacgaaggtcaagaatacccatatttcccattggatatttctagtgcttctcacccattttatacaggcgagcagcgtaaaacagccaacgaaggtcgtgtggcaagctttaacaagcgctttggtgcatttgcaagccgtagcaaaaaa

SEQ ID NO: 26910 - DNA, 528 bp, Moraxella catarrhalis
atgcgttggtatatcattcaagcgttctctggttacgaaaatcaagtacagcgttctttggttgaacgcattaaacgtagtgaatttgctgataaatttggtgaagtgcttgtaccgactgaagaagttgttgaaatgcgtgaaggtaaaaaatgcaccatgcagcaaaaacttttcccaggctatgtcctgattaatatggaaatgaatgaagatacttggcatattgtcagatcttgcccaaatatcacaggatttatcggtggcacgccagagagtcctgcaccaattactcagattgaagcagatcgtatcctaaatcgtattaataaaactggtgatgcaccgcgtccaaaaaccatgttcgagcctggtgaagaagtgttggttattgatggtccgtttacggactttaaaggccttgtcaaaaaagtggattatgataagtcaaaattacatttgactgttagcgtatttaatcgcccaactgaagttgagcttgaatttaataaagttgaaaagattaat

SEQ ID NO: 26911 - DNA, 429 bp, Moraxella catarrhalis
atggcaaagaagattgatggctacatcaagctacaagtgcctgccggaaaggcaaatccatcgccaccaattggtccagcgttgggtcaaaaaggcgtgaacatcatggcattttgtaaagagttcaatgctgcttctgcaaatattgagccaggcttgcctattcctgttgtaattaccgtttttaatgacaagtcattcacttttgtgatgaaatcacctcctgcagcagttttattgcgtaaagcagcaggtatttcaaaaggttcaagtacgcctaacacttcaaaagttggtactgtaaaccgtgatcagcttgaagaaatcgtaaaaaccaagcaagcggatttaaccgctgctgaacttgaagcggcaattcgtaccattgcaggtactgctcgttcaatgggtatcactgtggagggtgtg

SEQ ID NO: 26912 - DNA, 699 bp, Moraxella catarrhalis
atggctaagctaactaagcgtcaacaattaatcaaagatcgtgtcgatagcaacaagctatacacgatcgaagaagccgttgcaattttgaatgatttgccagcagtaaaattcaaagagtcaattgatattgcgattaatttgggtgtagatccacgcaaatctgatcaagttgttcgtggtgcaaccaatctacctgcaggtactggtaaaactaagcgtgttgcagtatttgcacaaggtgctgttgctgatgctgccaaagaagcgggtgcagatgtcgttggttttgaagacttagcagaaagcatcaaagctggtaatatggattttgatgttgttatcgcatcacctgatgctatgcgtgttgtcggtcagcttggtaccattcttggtccacgcggcttgatgccaaacccaaaagttggcacagtaactgctgatgtcgctactgccgtaaaaaatactaaagcaggtcaggcacagtatcgtgttgataaagcaggtattatccatgcttctatcggtcaagtgggcttcactgctgatcaaattgagcaaaatgcaacagctttattaaatgatcttaaacgtgctaaaccagcaacttctaaaggtatttatattaagaagattacattatctagtactatgggtcctggcatcacaattgatccagtgccacaccgtgttaataag

SEQ ID NO: 26913 - DNA, 501 bp, Moraxella catarrhalis
atggcactaaatcttcaagacaaacaagcaattgttgctgaagtaaatgaaactgccaaaggtgcgctctctgctgtagttgccgactcgcgcggagttacagtagcaaagatgaccgaacttcgtaaagctgctcgtgaggcaggtgttgatatgcgcattgtacgtaacactttgttgcgtcgtgccttagctgatacctcttttgagtgcatgaacgatgtattcgttggtcctacattaatcgcattttcaaatgagcatcctggtgcagcagcccgtttgttcaaagaatttgcaaaggccaacgataagttcgaaatcaaaggcgcagcttttgaaggtgaatttattgacgcaaaatctatcgatcgcctagctaccctaccaacttacgacgaagctattgcgcgtctaatgggtacgatgaaagaagcagcagcaggcaaacttgcacgcactttggctgcacttcgtgataagatggaatcagaagcggct

SEQ ID NO: 26914 - DNA, 372 bp, Moraxella catarrhalis
atgtcactaactaatgaacaaatcttagacgcaatcgcagaaaaatcagttatggaaatcgttgaacttatctctgcgatggaagaaaaattcggtgtatctgcagcagctctagcagcagcaccagcagctggcggtgatgctggcggtgcagctgaagaaaaagatgagtttgatgttgttctaaccagcgcaggcgataaaaaagttgctgtaattaaagttgtgcgtgaagttaccggtctaggtctaaaagaagctaaagacctagttgaaggtgcgccacaaactgttaaagaagctgcatctaaagctgaagctgaagagcttaagaagaagcttgaagaagctggcgcaagcgttgaacttaaa

SEQ ID NO: 26915 - DNA, 4089 bp, Moraxella catarrhalis
atggcatattcttataccgaaaagaaacgtattcgcaaaagtttttcaaagcttccagatgtcatggatgtgccttatctgcttgccatccaagtggattcttatgagcaattcttacaagagcataaaaaaccaaaagctcgtgccaacattggtttacaagcggctttttcatcaatttttccgatcgaaagccactctggtaatgctcaattgcaattcgttgagtattacttgggcgagcctgaatttgatgagcgtgaatgtattatgcgcggttcaacttttgcggcacctttgcgtgtaaaaattcgccttattattaaggataaagaaaataaaactgccattaaagatgttcgtgaacaaagcgtttatatgggcgaaattccattgatgacagataatggtacttttattattaatggtactgagcgcgtcatcgtttctcaattgcatcgctcacctggtgttttctttgaccatgataaaggtaagtcgcattcaagcggtaaagtgctttataacgcacgcattatcccttaccgtggttcttggcttgattttgaatttgatgctaaagatttggtgtacgcgcgtattgaccgccgtcgtaagttgttggcaacgattattttgcgtgccattggtatggataccgctcaaattttagatcaattttttgaaaaagttgaagtatttaaaggtgatgaatcctttgaaattgaactggttgctgatcgtttaaaaggtgagatggctcagtttgatattgtcggtcctgatggtaatgtgattgttgaacaaggtcaacgcattaacgcacttcgtgtaaaacgaattttaaactcaggtatgaccaagcttgcggtacctgatgaatatttgtatgagcgtatcattggcgaagatattgtggttggggatgaggttttggttcgtgccaataccttgatcgaccatgagattctggtaaaacttgctgaaaaaaatgttcaatcatttaagattttattcacgaatgatatcgatcatggtgcatatatcgctgacacgctacgcgccgatacaattgtgactcgtgaagaggcattgattgagatttataaagtgatgcgtccaggtgaaccaccaacacttgatactgctgaaaaactttttgaatcaatgttctttagccaagagcgttacgacttgtctaatgtgggtcgtatgaagtttaaccgtcgattgggtcgtgagttcattgataccgatgatatggatgtgcaacgcgaacaaggtgttttatccaatcaagatatcgttgatgtcttaaaagagttgatcgagatccgtaatggtcgtggcgaggtggatgatattgaccacttgggtaatcgccgtattcgctctgtgggtgaaatgactgaaaaccagttccgtatcggtttggcacgcgttgagcgtgctgttaaagaacgcttaaccacagctgattctgataatttgtctcctcaggacttgattaactcaaaacctgtggcagcatctattaaagaattttttggctcaagtcagctatcgcagtttatggatcaaaataacccattatctgagattacccataaacgccgtgtatcagcattgggtccaggtggtttgacgcgtgagcgtgcaggctttgaggttcgtgatgtccatacgacccactatggccgtgtgtgtccaattgaaacccctgaaggtccaaacattggtttgattaactctttagcgacttttgccaaaacaaataattttggcttcttggagacaccgtacagacgcgtcgttgatgggcgtgtgactgacgaaattgaatatgtttctgccatcgaagaagtaggcatggtaatcgcacaagccgactcaccaatgaatgacaagggtgagctgaccgaagagatggttagtgttcgtcacgatggtgaatttgtgcgtatgagcgccgataaagttactcatatggatgtttcaccgcgtcaggtggtatcggtagcagcaggtctaattccattcttggagcatgatgatgcaaaccgtgccttgatgggttcaaacatgcagcgtcaggcagttccaacactgcgtagtgataagccacttgtaggtacgggtatggaacgccatgtggcgcgtgactcgggcgtgtgtgtggtcgctaagcgtggtggtgtgattgaagaggttgatgccagtcgtatcattgtgcgtgtcaatgaggatgaaatgactgcaggtgaagcgggtattgatatttataatttgattaaatacacccgttccaaccagaatacctgtattaaccagcgtgttatcgtcaatgaaggcgatgaaattgaacgtggcgatatcttggcagatggcccatcgactgatcttggcgagcttgcacttggtcaaaatatgcgcgtggcattcatgccttggaatggctataactttgaagactcaattttactttctgagcgagtggttcaagaagaccgtttcaccacgattcacattcaagagttaacttgtgtggctcgtgataccaagcttggaccagaagaaattacaggcgatattccaaatgtcggtgaggctgcattggcaaatcttgatgaagcgggtattgtgtatatcggtgctgaggtcgatgctggtgatattttggttggtaaagtaacaccaaaaggtgaaagtcagctgaccccagaagaaaaactacttcgtgcgatttttggcgaaaaagcggcggatgttaaagatacctctttgcgtgtaccatcatcaaccaaaggcacggtcattgatgtgcaagtctttacccgtgatggtcttgaaaaagacagccgtgccaaatctattgaaaaagccatgcttgatgattaccgtaaagatttaaaagaagaactggtgatttttgaagcagctgcaaaaggtcgtattttaagcttacttgatggtaaaaaagtcagcggtggtgcaggctttaaagcaggtacgattctaagcactaaagacatcgaaaatttgccactagaaagcttgctagatatccagcctgctgaagaggaagtttcagagcgtttgggtcagattgctgaattcttaagtgataagcaaaaagatatcgataataaatttaccgagaaaaaacgcaaattaactcaaggtgatgacttagcacatggcgttcagaagattgttaaggtgtatttggcggttaagcgtcgtatccagccaggtgacaagatggcaggtcgtcatggtaacaaaggggttgtatcacgcatcatgccagttgaggatatgccatatgatgaaaatggtaatcctgtagatatcgtactaaacccattgggcgtaccatctcgtatgaatatcggtcaggtgctagagacccatttgggtatggcagccaaaggtttgggtgataagattaatgccatgttgcgttcgcaagttgctgtgagtgagcttcgtgaattcttagataagatttataaccaagtcggtggtgagcaagtagatttagacagcttgtctaatgaagatttattggcactgtgtcagaacctaaaagatggtgtcccaatgggtacggccgtttttgatggtgccaaagaaactcaaatcaaagagctgttaagtttggccgacctatcaaccacaggtcagcaaacactttatgatggcagaacaggtaagaaatttgatcgtcctgttacggttggctacatgtatatgcttaagctaaaccacttagtcgatgataaaatgcacgcccgttcaactggctcttattcactggtaacacagcaacctcttggcggtaaagcacaatttggtggtcagcgttttggtgagatggaggtttgggcgctagaagcttatggtgcaacttacactctacaagagatgctgacggtgaagtcggacgatgttgagggtcgtacacgcatgtataagaatattgtcgatggcgagcagtatatgaatcctggcatgccagagtcgttcaatgtcttaaccaaagagattcgctcgctgggtattaatattgacttaaaagaaaagaag

SEQ ID NO: 26916 - DNA, 4236 bp, Moraxella catarrhalis
ttgaaagatttattagatatcatgaaaggccctgctgacaatggcgtcaaagaatttgatagcattcaaatttctttagcgtcacctgaggcaatcaaatcttggtcgcatggtgaggtcaaaaagccagaaaccattaactaccgcacctttaaacctgagcgtgatggtctattctgtgccaaaatttttggtcctgtcaaagactttgagtgtttgtgcggcaaatataaacgccgtaaatttcaaggcatcatttgtgagcgttgtggtgttgaagtgactgcggctaaggttcgccgtgagcgtatgggtcatattgagcttgcctctccagttgcgcatatttggtttttaaaatcgctacctagccgtatcggtcttcttttggatatcactttgcgtgatattgagcgtgtgctttattttgaaagttatatcgtgaccgatcctggtatgaccagtcttgaaaaatatcagctgttggatgatgaagagtattttaatgcacttgaacaatatggcgatgagttcattgccaagatgggtgctgaagctgttcaagatttactgcgtgatattgatgtggatggcgaaattgatgagcttcgtactgcaattccacaaactggctctgaaaccaaactgaaaaaaatgtccaagcgcttgcagttacttgagtctttccgtgactcaaataacaagcctgagtggatggtgatgactgtgttgcctgtgttgccaccagatttacgccctttggtaccgcttgaaggtggtcgttttgccacatcagacctgaacgatttgtatcgccgtgtgattaaccgtaataatcgtttaaaacgcctgcttgagctgaatgcacctgatatcattgtgcgtaacgaaaagcgtatgctacaagaagcagttgatgcactactggataatggtcgccgtggccgtgctattacagggtctaacaagcgtccattaaaatcgcttgctgatatgattaaaggcaagcaaggtcgtttccgtcaaaacctacttggtaagcgtgtggactattctggacgctcggtgattgtggttggtcctactttgcgtctgcatcagtgtggtttaccaaagaaaatggcacttgagctgttcaagccgtttacctatgccaaattgctgcaaaatggcattgcaagtaccattaaagccgccaaaaaaatggttgagcgtgaagagccagccgtttgggatatgcttgcgatggtcattcgtgaacatcctgtcctactaaaccgtgcaccaacacttcaccgcttgggtctgcaagcatttgagcctgtgttaattgagggtaaagcaattcagttgcacccactggtgtgtgctgcgtttaacgccgactttgacggtgaccaaatggcagttcatgtaccgctgactttagaagctcagcttgaggctcgtgctttgatgatgtcaaccaacaacatcttgtcgcctgcaaatggtgagccgatcatcgtgccttctcaagatgttgtgcttggtttgtattatattagccgtggcggtgtgaatgccaaaggcgaaggcatggtatttagtacggtgaatgaagctctaagggcaattggttcagatgatttatctgtgaatgccaagattaaagttcgtgtcgctgagacaattttggatgaaaaaacaggtgaaaaaatcagtcataccagtatccaagataccgtagctggtcgtttgctaatttggaatatcatgccagaaggcatggcgtttagtgagtgtaacacggagatgaccaagaaaaatatctctaagctgttaaactcatgctatcgtaagctgggtgttaaagaatcggtaatgtttgctgaccatctgatgtatttgggttttgcacaagcgactttatcgggcatttcgattggtatggaagatatggttattccaccaaccaaaaagcagatcgtggatacagctgatgctgaagtgcgagatattgaacaacaatttgagcaaggctttgtcactgcaggtgagcgttataacaaagttgttgatatttgggcgcgtacttcagataaaattgcaaatgcgatgatggataacttgtctaaagacgatgtgatcaacgcagacggtgagaccgaaacgcaaaagtcattcaactcaatttatatgatggccgactcaggtgctcgtggtagtgccacgcagattcgtcagcttgcaggtatgcgtggtctgatggctaagccagatggctcaattattgaaacaccaattaaagccaatttccgtgaaggcttaacggtacttcaatactttatctcaacgcacggtgcccgtaaaggcttggcagataccgccttaaaaacagcaaactcaggttatctaacacgccgtttggttgatgtcgcacaagacttggtcatcacccaagatgattgtggtacagatgcaggtcagcgaatgacacctgtgattgttggtggtgaaattgttgaacgcttgggtgatcgtgtgcttggtcgtgttgctgccaaagatgtcgtgaatgcagatggcgatgtggttgtaccatcgggtgctttgattgatgaaagattggttgaaaagttagatgccaatgcgattgatgaagtgtatgtacgctcagtcattacttgtgaagccacccaaggcgtctgtgctaagtgttatggtcgtgatttggctcgtggccatttggtcaatattggcgaatctgttggggtgatggcggcacagtcgattggtgagccaggtactcagctgaccatgcgtactttccatgtcggtggtgctgcttctgctgcttctgttgataacagtgtctcagttggtaatgcaggttcggttcgttttcacaatatgaaaactgttcagcatgccgatggtcatttggttgttgtctctcgttcggcagagattggcgtggctgatgatcaaggtcgtgagcgtgagcgttataaagtgccttatggctcaagcgtcttggtgcgtgatgcagatgctgttgaagcagggcaggtaatcgccaaatgggatccacatacccatccaattattacagaattctcaggtaccgcacgctttagtgacattaccgatggcatgacagcaacggttaaggtagatgagatgacgggggtgagatcatttgaaatcttgaccggcaaagaccgtccaagtattgctaaggatttgcgtcctgcgattattcttgataccgatgaaggtaaagaagtggtttatttcctaccgaacgaaaccatcattcgtgtatctgaaggcgagcatgtcacggcaggttcggtgcttggtcgtgtaccacaagcaacctcaggtactaaagatattaccggtggtctgccacgagttgccgacttgtttgaggcacgccgtccaaaagatcatgccattatggctgagatgagcggtgtggtcagttttggtaaagaaaccaaaggcaaaaaccgctttatcatcaccaatgaagatggtgatgtgcatgaagagctgattccgaaatggcgtcaaatcaatgtctttgaaggagagaccgttgagcgtggcgaggtggtttctgatggacctcaaaatccgcatgatattttacgcctaaaaggtgagaccgcattggcaaattatattgtcaatgaagtgcaagaagtttatcgcctacaaggggtaaaaatcaacgacaagcacattgaagtcatcgttcgtcagatgttgcgtaaagttgaggttgtcgatggtggtgattcaagctactttaaaggcgaccaagcagaatactcaaaaatccgtacgcttaatgctgaattgatcgctaataataagtttcctgttcaatacgagcgtcagcttttgggtattactaaagcaagtttggcaaccgaaagctttatttcagcagcgtccttccaagaaacgacccgtgtcttgaccgccgctgcagtgatgggtaaggtggatgatttgtctggcttgaaagaaaatgtggttgtgggtcgcttaattccagcaggtacgggtttggcatatcatcaatctcgccaaagaaaagctcaaaatgctggtaaccaaactgcccaagtggatgagttattatcagtcataacagctgaaccgcctacaacttcagaagataatttgagtattgaagacaactttgccaaagcattcgctgatgagctgggttctcaagag

SEQ ID NO: 26917 - DNA, 564 bp, Moraxella catarrhalis
atgaaagaagctcaaaataagacgggtgagtctgaaggcttggtggtcatggcaggcaagcttaaacatttggatatcattgcttgtgcgtttgattttcggtttatgggcggttcgatgggttctgtcgtgggcgaccgctttgtacaagccgccgaaaaagccttgacagagaacaagcctttggtatgctttgctgcctcaggtggggctcgtatgcaagaaggcttattatcactgatgcaaatggcccgcacttcagcagctattgaaagattgaggctggcaggcgtaccttatgtggttattttgaccaaccctgtctatggtggtgtgacagcatctttggcaatgcttggcgatgtacatatcgccgaacctaaagcaatgattggctttgcaggtaagcgagtgattgagcagactgtgcgagaagtgctgggtgagccttttcagcgtgctgagtttttgcttgaaaaaggtacggtggatatggtggtgcatcgccatgagcttatcaataccacgcatcgtattttagcaaaactaacaaaatctgccgtt

SEQ ID NO: 26918 - DNA, 2748 bp, Moraxella catarrhalis
atgccaaattctaccgcccaaaattttaaacacttagccaaaacctgccatctaactattgcgttgccgccaaccattcaagatacattcataagcagcgagccgattcaagcctatcttaagaaattaaatcaagccattgatgatcaagtcgtcgcttatggcatgcatgcggttcatcatattgccaatctgctcaaagtgcgtacacttgccattgatatcatcttaaggcagttgtttgatttttatcaatttcccaaagattttgcgttatttgcggtgggcggctatggtcgcagcgagcttttgccagcttcagatgtggatattttattgattggtgatgagattggcaaagccaccaagccgattgagtcttttgtggcgatgctttgggatattggtatcacacctgctttttcggtgcgaagtgtcgatgagctgcgtgctgccgtccgtgaccaaaccattgcttctgccatgcttgaggcaagagttttggcaggtaatgaagatttgtcttggcaaccaattcaggcggttaaagaggtctgggatatagggtctttttatgatgccaaaatggcagaatcaaaagcacgctatttggcacataatgcgacagaatataatcttgaaccaaacatcaaaaacgcagctggtggacttagagatatccacatgattggatggcttgggcgattttattttggtagctcagatatcaaattgcttgcaaccactgattttatcaacgaaaacgaatgcaccatcttgcaggcaggtcagcgatatctatggtgcattcgccatcatttgcatacactggcgggtcgtggcgaggatcgattattatttgattatcaaaaagccatcgctgagcggtttggctattatacacgcactttagataccacccatcaagatatcacacaagctctagagacaatgatgcgtgtgtattatcagcatgccatgaaaattgcagctttttcagaggtattgtgcaaatatttttatgaaaattatttgtcagccactgcacgcctgattgatatcgatgagacattttatttgatacagtctggttctgaccatcaatctagacctgctaaaattgctatccgtcgcccagatgcttttttggtagatccagccaatttattaaaaatttttttggtcatgggtcaaaagggcattcgtcagatcgcagcaagtacacttcgggcaatttatgcttcaagcgatttgattgatgaagaataccgcaaaaatcctgtacatcgccaattatttttagccaatttacaagagttaaattatctgtttcatcgcttgcgtctgatgaagcgttttggggtcttgggtaattatttacctgccttcggtaaaattatggggctgatgcagtatgatttgtttcatcgctacacagtggatgcacataccctattattggtgcgtatcctgcatcgctttggtgatgacagtcttgataatcaagataaatacgggctggtagctgagatttatcaaagaattgcccgtaaggacattttggtcattgcagcgattttccatgatatcgccaaaggtcgagggggtgatcattctaagcttggggcggctgatgcttatgaattttgtttggcacatggtatgagtgaggcggatagtaagcttgtgcggtggttggtattagagcatttgacgatgtcgctgaccgcccaaaaacaagacatcagcgatcctgaggtgattgctaaatttgccgaatttaccagttccatcactcggctaaatcatttgtatgtcttgactgtggcggatatgaatgcaaccaatagccaactttggaatacttggcgagcgacactacttaagcagctgtacaccagcgtccaccaagtacacagtttgggcgtccatgttgttgataaagatcgagtgattgatgatagaaaaaataaagcacaagacttattgccaatggtggataatcaccgactaaaagccctgtgggatggttttggggaagagtattttttaaagcaaaagcatagagatatcgcttggcaatccgccgaaatcttggcggcagaacatcggctaaaacaaggcaagccaatcatcgccatccgagagcatagcgatgtgtccttacgagggatgcagctgttgatttgtgcacctgatcaggataatttatttgccacgacggtttgtattttggatcagttgggtctatcggtacttgatgcgacaattttatcagccgatattgacggcacaagtacagcggtggactcttatgtcattattgatcgattgttgccaacggatagtagtataccgttattgttaagccctgaacgcaccagtcagatgatattagggcttgaacatggtctaaaaactggtggtgtgccagtaccttcgagagtttttgaagtggatggtaagcttaaacattttatcgtaccaactcaagtctacttttcagaagcgacatcattggcacaccaagggcatcataaaatgcacctgatcaccaaagaccgaccatcattacttgccaaagtcggtgcagtatttagcgagctaaatattcaagtacatggcgcacgcattaccactttgggcgagcgagcagaggatatcttttatttaagtgggttgcatggtgtatctttgaatgatgatgctttggctaaattaaaatctgcgatcattcaggcattgagt

SEQ ID NO: 26919 - DNA, 813 bp, Moraxella catarrhalis
atgaatatcaaacccatcataaccacattatcgatgattactttgatgatcacgatgcctacactagcaaataccatcagtacacacggctttgatggcgatgatttgccagcttgtgctgccacgccgctgccagaggatgctaaatttgctatcatcggttctgattgcggttatgctgaagggctggcaccaatcatcaaagacgatcactatggttatgtcaataccgtaggcgagcttgttattcctgcagtttatcaggcggcttatccgtttagtgatggcttggcgttgtatcgtgaaaatgatcactatggctatcttgatacatctggtcagagtgttatcgctccacaatataccaaagcttgggaattttcggaagggcgtgccaaaattgagcaaaatggtaaatatggatttattgatacgactggtaaaattgtcatacacccaagctatgaagtgattggcgattggtttgaagaaggtttggttctttttaagcaaaaagataaatatggctttttggataaatcgggtaatattgccatccgcccacagtttgattctgccaaaggattttcagaaggcttagcggcagtaacgatgaaaacagacaaggtggatgaacatggtagatcaccacataaatacggttttattgatagaacaggtaaagtggtgattgatattaaatacgatttggcgtatgattttttatcaggtgtaacctatgtcgtagatggtgataacgcttattatattgataaatcaggcaatcctaccgccatgccaaattattttgaa

SEQ ID NO: 26920 - DNA, 726 bp, Moraxella catarrhalis
atgacaacagtattatcgatgcgtcacttgggtaagcgttatggtcaaagatgggtggtcgaggatgtctcttttgagattgagcaaggtcaagtggtcggtatcttaggtcctaatggtgcaggcaaaaccacaagtttttatatggtgatcggtcttgtgcctatggataaaggtcaggtaattttaggtaaccaagatatttcaaaaaatgccatgcatgagcgtgctgccaaaggtatcggttatctgccccaagaatcttctatctttcgtaagctgaccgtcgaacaaaatatcatggcaatcttacagacacgcaaggatttaacacaaacagagcagcgtcagcagcttgaaaagctgatggctgattttcatttagagcatgtccgccattcgttgggcatgagtgtatcaggcggtgaacgcagaaggtgcgagattgcacgctgtttggcatcaaatcccaaattcatcttattggatgaaccatttgcaggcgttgatccaatttctgtgagtgatatcatgcaggtcatcgaaactttgcgtgagcgtgggattggtgtactaattaccgatcataatgttcgtgaaacactgtcaatttgccaaaaagcttatatcgtttctgaagggaaagttatcgcccaaggtaataaagatgaaattttatttaatgagttagttcgtaaggtctatcttggccaagatttcgttgct

SEQ ID NO: 26921 - DNA, 1410 bp, Moraxella catarrhalis
atgaaactcatgccattggcttttgtgattggtgcggcggttggcttatctgcctgtcaaagtcttgaccatacccaaaacgctatctcaaccacaaaaaccccaagcacccaagcagaacatcacgatatttatacccaaaccttaaaaaatggtctaaaggtcatcatcaaacaagacagccgagcgcccattgtgatgacccaagtttggtatgatgtgggttcaagtgatgagcctattggaaaaggtggtatttcacattttttagaacacatgatgtttaaagatgccaaaggtgtcagtcatgacgactatcaacgcctcattagtcattttgggggtgagttaaatgcctttaccagtgatgaatttacggcctattatgaaagcctgcctgccaatcaatttccattggcactacaaatagaagccaatcgcatgaataacctcatcttaaccgctgaggaggttgccaccgaaaaacaggtaatcaaagaagaacgccgcctaaccacagacgacaaacccaccgccaaagctcatgaagagtttttggcaattgccctaccaaattctcccaaaggtctccccatcattggtagcatgccagagattgaagcaattacggtaacagacttgcaaaattggtatgatcaatggtacgcaccaaacaatgcaacattagtactagttggcgacatcgaccccaaaaccgccctgccttggatcgaaaaatattttggcactctaaaaccatcatcattaccaaaacgcaccccacttagccagccaagtcatcgtggctatacgcaggccaatagctatcaaaatgttaaagtaccaagcttaatcatggggtttaatgtacctactttaggtagtcgtactattaaaaatcataccaaagaagctcatgcattatcactgcttagcgatattgctgatggcggcttatcagcacgttttgagcgtcatctgattcgcaaattacaaatactaaatagcgtttctattcgctataatatgctctcaaaaagtgatgatttatttaccattattgccacacctcgtgagggtgtcagcttggcagatgctgaagctgccatattagcagagcttaatgccatcaccaacgatcaaatcacggatgatgaactggcccgtagtcgtgcaggcttgttatcatctttggtgtttgccaatgatagtatcgccaaacaagcctctaatttaggtgctttgtctgcgttggggttgcctttagatactttagatactctcccaaaagcattggacaaagtcagtaaatcagacatccaagctgtgggtaaaaaatatctgaccaaagacaatctaaccacggtttatgtattgcccaaaaatacacaatcgccctcagacactcat

SEQ ID NO: 26922 - DNA, 1095 bp, Moraxella catarrhalis
atgatttctaaacaaattgtattgggcattacgctggtcattggtagcggcgtggctttttttgccttggcaaaaaatgacactcaaacaaccaaatcagtacaaacgccccagcagataccaagtgataccaaggtggcaaaacctgtggttcagcctttgacggcagatgtggctaccgaagaaaagctacttgccgaaaagcagcgtgtgcgtgaagcacatacgcttcaaatgcaaaagcaagcagctgccttgcttgaagaacaaaataatgcacgcaaacaagcacttgaaaaagccagtgccgaagctaatggacgcatgacgaacgatacccaaacagtttcagcggacagtgctgccaaaagtgagttgatcgcagcaccaacagttcagacacgccccgaagcaatcgaagctgcccgtaaggccgaagaagccaaaaaggctgctgagatgcttaagaactctgaacaagaaacaaaggatgaaaaagccaaaaccgctgataaacccaccgaaaataaagctgaaaataaaaaagagaataaaaacacccaaaccaaagcacctgtgaaggcgggtactcacgatgttcagcgtggtgaaacttggcagggtattgcgaatcgttacggcatttcggttgccgccttggttgaagctaatggcgtgacacgcaatgatattttaagagcagagcgtcgtatcaagataccatctgcatctcaaatagctcgtttggagcgtgataataaagccagagaatccgcatctaaagacggtaataaaaaatctgacaatcagcctcaatctaagacagataaaaaaactgaatcaaaatctcaaagttcccaaacatctgagcggtacatggttcaagtggcaatctctccagataaagatcgggttgatgaggtggttaaaaagtatcgtgatgctggctataaagtcacaaccagcaatacaagtcgtgggttgcgtatcttggttggtaacgaaaaaacagaagaagaagcaaaagcactgcgtactaagattgccgcagattctcgtgtcccttcatcgggtgcttttgtgcataaagcccaa

SEQ ID NO: 26923 - DNA, 743 bp, Moraxella catarrhalis
gaacaccaaatcgccaccatcacactcaaccgccccaataaaaaaatgccatcagctttcagatgatggatgagctgattaaggttgctcataaactcaagcgtaatcgtgaagttcgagcggtgattttgatgggtgcagatgggaattttagctcagggctggatttggtggatttaaatgatcctaaaaatttaggtcttgctttgtatgaacttgccaaaccgacacccagtaagtttcaaaaggtttgcttgatttggcagagtttgcctgtgccagtcattgctgttgtacagggtgtgtgcgttggcggcggtcttcagctggcacttggggcggatattcgtatcgcagcgatggatgcttgcttatcagtgcttgagactaagtggggtttggtcgctgatatgggcattacgcataccgcttgtgatattcgctgagatgtgatgaagcagattgccatgaccgctgagatgatgggtgcaccgattgccaaggattatggactattaacgcatatcagcgatgaccctgtttgtatggcgatatctttgatagatgccatcaagatgcgttcacctgatgtagtacttgcaagcaagcgtatgatgaataccacacagcgacaagattatttggcactgtatcaagaaaagctttggcagatcaaactgatgctcggtgccaaccgcaagcttgccatcaaaaaagcaaaagatagcacggtacaatttatt

SEQ ID NO: 26924 - DNA, 2067 bp, Moraxella catarrhalis
gtgctgattgtcgccaatcgcttaattgtcaaatataaggcaaccatgagtaagctaaatcctcgccaattagaagcgttaaattacacccaaggtccgctacttgtactggctggtgctggctcaggaaagacatcggttatcacccaaaagattgcccatttgatcgaaaattgccgcattcctgccgatcgtatcacggcagtgacttttacaaataaagcggcgcgtgagatgaaatcacgcgttcaaaagattttatctcatgaaaaatctcgtggattgactgtttcaacatttcaccagtttggtctgcaatttttacgctatgaattaaaacacacatcattaaaacccaatttttcaattttggatgcagatgactgccagcgtctgcttgcagaactgatggtgcgtgataatttaagcggtgctgaacgccgtgaactggtgcatgaagccatcaagaaaatctctgattggaaaaatgacctcattgcacccaaagatgccgctgaaacgctcgatgaccctgaagatcttggttttgtgcatttgtatgaattatacgagcgtaatttgcgagcgtataatgcggtggattttgatgatttgattgccatgcctgtgcgtatcttaagggaaagtcatgaggtcaaagataaatggcaaaatcgtatccgctatctgctggtggatgaatatcaagataccaacaccgcacagtatgagttgattaaactattggttgggcgtcttggacgatttacagtcgtgggcgatgatgaccagtcaatttatacatggcgaggtgctaaacctgaaaatatggcacttttaaagcaagatttccccaatcttgaggtggtaaaattggaacaaaactatcgctcaaccaatcacatcttgggtgctgccaatgcggtcatcgccaataatgagcatatgtttgaaaaatcgctttggtctgataaaggtgatggtgaaaaaatccgtgttatcacttgtaataatgattttgatgaagctgaacgagtcgccaaagaaattttgacgcatcgactacgcaataaccagacttgggatagatatgcggtgctgtatcgcagcaactttcaggctagggcgttggaagctcagctaagacagcttgagattccgtataaattatctggtggtacttcattttttgcgcgtaccgaaatcaaggacttaatgggttatcttcgtattattattaatcctgatgatgatgcggcatttttgcgagtgattaatacacctaagcgtggtatcggttcggtgacacttgaaaaacttggactgtttgcacagcactgcggcacatcgctgcttggtgcgtgtactcgtgcaggtgttaaggacgcattgggtgctaaggcaggtgcgatcattgaatcttttggggagtttattaattattatacgcatcagctacatgataatagcgatcctatgcccttggtgcgtcagatgattactgagacaggttatattgactatgtcaaagaaagctccaaaaatccccaacaagaaaaggggcgcttagataacattgaagccttatacttaagtatcgctgcactgattaatcgagctgatgatgagcatgataagaccattgatgctgtgattcgcaagatggttttgttggatatgcttgaacagcaacaagaagaagaaaataccaacaaagttaatctgatgacgctacatgccgccaaaggtcttgaatttgattatgtctacatcattggctgtgaagaaaaactgttaccgcatgtcaattcaatcatgagtgctaatatcgaagaagagcgtcgcttaatgtatgttggtatcaccagagccaaaagtgagctgactttattgctatgtaaacagcgacgatctggagcggattttaaggcggtgacaccctcaagatttcttgatgagttgccagcagagtatctatctggtgctgttaccaaaaaagaagatcctaaaaaagtcgctgaaaactatctggcaaatattcaagcgatgcttgctgctaagaaaaaa

SEQ ID NO: 26925 - DNA, 876 bp, Moraxella catarrhalis
gtgaaaatgattatgaacaccattacccatgccatcattcccaccgcaggctttggtactcgtatgctgcctttatcaaaagctgtacccaaagagctgttgccactgggtgataaacctgctattcattatgtggttatggaggcggtgcgtgcgggcattaaaaccattgtgttggtcaatcatgctcaaaagcaggcgattgaaaactattttgatatcaataccgaacttgatagccagttacgccaaaaaggcaaagatggcttggcagatggcctaaactttttacccaaagatgtacgcattgtcagtgtgcgtcaaggttatccgttggggcttggtcatgcagtgctacaagggcgtgctgtggtgggcgataatccatttgttgtgctgttgcctgatgtcgtgttagatccatttacgaccgattttagggcggataacttggcatatatgatgacaagatttgcccaaactggccgcagtcaaattttggttgaacctgtggcagatagtcaggtgcataaatatggcattgctcggctaaaggatcggcaaagtgtacaaaaatcggataccaatcacccatttgatgtactgggttttgtcgaaaaaccaagtttggatcttgcaccgtccaatcttgctgtagtggggcggtatgtatttcgccctgaaatttttgagtatttggcaaaaaccaagccaagcgtaggcggtgagattcagctcaccgatgccatcgatgcactcatcagccagcagggtatggatgtggtaacaataaaaggggcaagctttgacgctggtgatatgacaagctatattcaggcatttgcttattttgccagtcaagtcgatcagtcgttt

SEQ ID NO: 26926 - DNA, 1626 bp, Moraxella catarrhalis
atgaatacttggcatgacttaaaaagacttgctcactcacccattaatctgcagcattattttaccgctgatagcaaccgtggccaaaaattttcagcgacagcgtgtgatatttatatggattttagtaagcaggccattgatgatgaaagtttgcttaagctgatacagcttgctgatgcatgtgaattatcacaaaaaattaaggcattattggcaggtgaaaaggtcaatgataccgagcaaagggcggcactgcataccgcattgcgtttaccaaaaggtgagtcgcttatcgttgatggcgtggatgttggggagcaggtgcatgatagtttagataaatgtgaagccttggttcatcgtatccgtagcggtatttggcgtggctattcaggcaaggcgatccgtgatgtggtgaatattggcgtcggagggtcggacttaggtccgttgatggcaacaacagcactgtctgagtgggcagatactgatatccatgttcactttgtttctaatatggatggcacacaattagaaagtttattaaaaaaactcaatccgcagacaactttatttatcatatcatcaaaatcctttggtacggtagatactttatccaatgccaaaacagcattaagctggttgctggccgcttatgcacataagccaacaattttacgccgtcattttattggtatatccacacgacctgacaagatgagtgattggggcattcatccagacaatcagcttttattatgggattgggttggtggtaggtttagtatgtggtcagcgattggacttgcgattgcggtgcgtatcggtatggctaattttcgcgcattattggcaggcgcacatgagatggataagcactttgcacaggcagatttttataaaaatttgcctgtactgttaggcctcattggtgtttggaacgcaacttttttgggtattaatgcacatacagtcttgccttatgatggtcgattgagccattttcccaactatttaacccagcttgaaatggaatctaacggtaaatcggtcaaacgcacaggagaatcggtcaattataggacttgcccaattttatggggagacattggctcaaatgcacaacatgcgttttatcaattactccatcaaggaacacagcgggtgtcttgtgattttattaccccaattcatcgctataatgatactcaaatcataaataactctttggtttaccagcataaactgtcattggccaattgtttggcacagtctcaagtcctcgcctttggcaacgctgcactaccgtatggcgtggcaaatgtggcagatgatttggcaaaatttaaaaaatatcggggcaatcagccttccacaacgctgttattgggtgatttaaaccccaaaactttaggggcattaattgctttgtatgagcataaagtgtatgtcatgagcgtactttggcaaatcaatccttttgatcaatggggcgtggaagttggtaaagtgatggcaaatcgtgtctatgacgagctgatcagtaagacaaatacagactgcttcgaccattcgaccaatacgcttttgtctgtcatcaagcagtcaaggataatcaatgaa

SEQ ID NO: 26927 - DNA, 1266 bp, Moraxella catarrhalis
atgaataataatgcctatgtgattggccatcaacacgaagcgattaatacttgtctttggttggcaagcatgaaccaaacggtttatttgttggctgatgagccgtcagttttacaaacgcttgaatattatcaatgcgaccatcagatgaatacattatggcagctgtattgtgttcaacaaaaaattatcatcacagacagtcaaagacaggcatttttatcatcggctcaagctggggttttgtggttatttttagatgatgtggatgatatcacgcttagccatatcatacatgtgctagacagtccgcacagtcggattattttaagcggtgtgcaaaagcttggtaagattgataagattgccaaacaatttaaatcatcttgggtgtattatttgcccatcagctttatgaaagatggtgctaattataatgcgttttatcattcggatttggtgatgattggtgaaaaaaccgcaggcagtgttgcttattgccagatattattaagcttaaaaacctatgccaagcattgccaagttgctgatattttaacggtggaatttgcccgaagtactttgatggcgatgttggcaactcggctgtcttttatgaatgagatggcaagacttgctgataatcaaggggtaaatatcaaatcagttgaacgcatcattgcccaagatggtcgtatcggttcggcttatctgtcggcaggatggggctttggtggcaagacattgccacgagagcttgagcttttaatggataagtttaaacaaaaccgtgtcgacacttcgcttatcagtgctgtcagtcacatcaataacgaccaaaaagagctgatttttcgtaagttttggcaatattttaatggttttattgagcataaaacagtcatgatttggggagcaggttatcgaaatggtgcatcacgcatgattaattctgccattcatccattgattgagctgctttggtcgtatggcatttgtacgctcgtttttgcacataataccgcctttgaaatgcaatcaacttatggcgatcatccattgttaagattgactgatgatccttatcaggatttggtacaagctgatgcactgttcatcatcaattggtctttattaaccaagcctgatattcatgtgctcaatcaaattaacattgcaatttttgatgccaaaaatgttttagatgatgaacaaatcgccatgctgacagcaccttattatggtattgggcgagaaaagtattca

SEQ ID NO: 26928 - DNA, 855 bp, Moraxella catarrhalis
atgacaaccaatcaccaaaatgaccaattcaccaatccaaatatcctacccactggcacgccccaaggtcaaagcgaacaacaacgcccccaaggcgaaaagccagccgatgacgagacgacccattttggctatcaaacagtgcataaatctgaaaaacaagccaaagttgccgaagtatttacctctgttgcccgcaaatatgatgtaatgaatgacttgatgagctttggtattcatcgcctatggaaacggtacgccatcagcttgacaggtgtacgcagcgggcaaagggttcttgacattgcaggcggtacaggtgatttggcgaaggtgtttagtcgtgaggtcggtcgctctgggcgtgtggtgttgtctgatattaatgaagcgatgcttgaggttggtcgcactcgtctgattaatgcaggctgtcataatgttgactttgtgcttgccaatgccgagacgcttgagccttttgaggataatagctttgatttggtaaccatcagttttgggctaagaaatgttaccgataaagataaagcactctctgccatgcaccgtgttttaaaaccaggtggtcgtctgctggtgcttgaattttcaaaacctgtatttgagcctttgtcaaaggcttatgatttatactcatttaccgccctacccatcatgggtaagattgtggcaggtgatgccgaaagctatcagtatttagccgaatcaatccgtatgcacccagaccaacaaacactcaagcagatgatgcaaaatgctggctttgtcaattgtgattatcacaacctaacaggcggtattgttgcggttcatcgtggatttaaggcacgctca

SEQ ID NO: 26929 - DNA, 1077 bp, Moraxella catarrhalis
gtggttaaggtaatgcaaaaaatgcacgctcatactcaagcgatacagcgatgggtgatggcgattttactaccaattttattaatttttggtgagaccgcttgggcttctgagtctgtatctgaagatgatttgacagcactgattatcagtgctaatcgtgcgtcccaaagtaatccaaattcaccactggcagaatctgtgcgtgaatttgagcaggctattaatcccgccaatcaagtagataccaaaccccaatcaacccccatcaatataccaacatctcacgcacaaagtatcagccatgacaagctgattttaaatacacctgtggttgatgttgccaaaatattgacaccatcagaatatctacacttaaccgaacagctccataagatttatcaagataatttggctcaagctgctttggtgattgttccaagtactgatggtatcgatatttttgattatgcacttgccgtcgctgagcgatggcagttaggtcaagcagatacagatgatggtttattaattactgttgcggtgaatgaccgaaagatatatatcctaacaggttatggacttgagggtgtgctgcctgatgcagcattaagtcgtattattcgtgatgatatcacacctgcttttaaatcaggcaattatgctcaagggctgtcagcagggattgcacgcattgatgaacgcctaagagctgatcctgaaagtttggctcgtgctgacgctcagactgatgattctgtggatatagacatcattggcttatttatcattgcgttgattgcaggttcttttttgggggcgattcttggtagatttttgggtgcaacctttggtgcaggtggatttgttattgtggcactgatgagtggtgctggattttttgtggtaatgatcgctgcagtcatattatgggtatttttattggctcgtggtgtcttaccgatcacaggtggtagcggtaactttggtagcggtgggcgaagtggcggttttggtagcggtggctttggtggcggtggcggcagcttcggtggtggcggtgcaggaggttcttgg

SEQ ID NO: 26930 - DNA, 1062 bp, Moraxella catarrhalis
atgacaaagacattaactctcattcagccagatgactggcatatccatctgcgtgatggtgaagctctggcaaccaccgttcggcatgcggcaaccagttttaaccgtgtgatttgtatgcctaatttggtgccacctgttaaaactgccaatcaagccatcgcttatcgtgaacgcatcttaaaggcattaaaagacagtgatttaccagccactcgcaaagatagtttcgatccacgcatggtgctttatttaaccgaccaaaccactgccaaagatattgacgatgccgcacaaacaggcattgtatcggcagttaagctatatcctgctggagcaaccaccaattcagctgatggtgtaactgatattttggcacgcagcttggtatttgaggccatgcaaaagcatggcataccgctactggtgcatggtgaaattaccgatagcaacattgatatctttgatcgtgaaaaacgatttttggatgatgtgctaaataaaattatcacacaatttccgaatttaaaaattgtcatggagcatatcactaccgccgatgcagcggatttttgtcttgctcaaggcaatcacatcgcagcgacaattaccccgcagcatcttttatttaatcgcaatcatctgctggttggcggtattaagccgcactattattgtttgcccattttaaagcgtgctgcacaccaaaagcgtttgcttgaagtggcaaccagtggcaatcctaagtttttcttagggacagattccgcccctcatgccacacacacgaaagaatcatcgtgtggctgtgcaggttgttatagtgccttgcacgctctaccactctacgccatggcatttgaaagtgtcaatgcacttgataaacttgaaaactttgccagccgatatggtgcacaattttatggcttagcaatcaacaccactcaaatcaccctaataaaacaaccacagaccatacctgagagttttcattatttgggtgataagacgctgacaccgttgttggcaggtgaagttttaccttggcaagtggttggcata

SEQ ID NO: 26931 - DNA, 1190 bp, Moraxella catarrhalis
atggcaatcttaaccatgaaagcgttggacttggcaggcaagcgtgtgttaattcgtgaggacttgaatgtccccattaaagatggtgtcatcgccagcgatgtgcgactacaagccgctttaccaaccctaaaagatgccttagcaaaaggtgctgcggtcttagtcgcatcacatttgggccggccaaccgagggtgagcctgaccaaaaatattcgctggcacctgttgctgactatttgtcaaagcatttagatgcacccgtacgctttgaggccgagtatctagatggcatagaagtggcagtaggcgaattggttttacttgaaaatgtacgctttaatgttggcgagaagaaaaattctgatgaactatcaaatgcttacgccaatctttgtgatatttttgtgatggatgcttttggtgctgcacaccgtgcccaagcatcaaccgaaggcgtcattcgtgctgctattgagcaaggcaagcaggtttgttcgggtaatttattaaccgaggagttaaacgctctgtctcgagcgcttgataatcctgccgcaccagtgcttgcaattgttgccggctccaaagtctcaaccaagcttgatgtactgacaagccttgctcaaaaatgtgacagtatcgtcgttggcggtgtatcgccaatacttttttggctgcaacaggcgtgaatgtgggtgcatcattgtatgagcctgatttgattgataccgctaaacaaatcatgaagaaaaccaacattttgttgccatctgaagtggtggtggctgacaaaaacgagatcgattttgatgactttttaggttcgcttgagaaggcagcagcaacggtcaagcctatcaatgaacttaatgatacggacatgattttggatatctcaaaagcaagtgccgatgagattgccaagcatattcataaggccgctaccattttatggaatgggcctgtgggcgtctttgaggttgataaatttggcacaggcacacaagtgctagcaatggctgtcaaagactcatcaggatttagcattgcaggtggtggcgatacattggcagcgattaataaataccaagtagcagatgatgtcagttatctatccacaggtggtggtgcttttttagagtttgtagagggcataaccctacctgcaatcgcagcacttaagtta

SEQ ID NO: 26932 - DNA, 1479 bp, Moraxella catarrhalis
atgagtctatataaatcagcagtagcccccttatccgttgatcatgaatatgaaatcacgatcgtacgattttttacaatcatggcggtattttggggtatcgttggcatggctgtcggtgtattcattgcatcacagttggcatggccagtattgaattttgacacatcatggctgtcttttggacgactaagaccactgcataccaatgcggtaatttttgcgtttgggggttcagcactttttgcaacatcttactatatcgttcaacgcacttgtaagaccagattatttgcaccttatttggcatggtttactttttggggctggcaggctgttatcgtttctgcggtcatcacactgccattgggtgtcacctctgccaaagagtatgcagaattagaatggccaattgatatcgccattgcattggtatgggtcgcttatgccattgttttttttggaacgctcatcaaacgccaaacctctcacatttatgttgcaaactggttttttgcagcattcatcatcacgattgcgttgctgcatattgtcaatagcttggtcgtaccagttggcttatttaagtcatactcacttttcggcggcgcaaccgatgccatggttcaatggtggtatggacataatgctgttggtttttatttgacagcggcgtttcttggtatgatgtattactttattcctgtacaaattggtcgccccgtttattcatatcgcttatcaattgtgcatttttgggcattgattgcatcatatatgtgggcaggtggtcaccatctacattactcggccttgcctgactggacacaatctttgggtatggtgttctcattgattttatttgcaccatcttggggcggtatgattaatggcgtgctgacactttcaggtagctgggataaattgcgtacagacccaattatccgtttcttgattgtggcactatcattttatgccatgagtacttttgaaggtccaatgctctcaattaaagcggttaatgccattagccataatactgactggactgttggtcatgtacattcaggtgcattaggctgggtgggtatgattaccatcggttcaatttatgtgctattgcctcgtatctttaataaggcaaaaatgtattcaaccagcttaatcacactgcatttttggcttgcaacaacaggtacggtattgtatatcgttgcactttggatttcaggcattacccaagggatgatgtggcgtgccactaacccagatggtactttggcgtatgactttattcaaactgttgtggtctcacattggccgtatgttgtgcgtgcattgggtggtgctttatatgttggtggtatgtttgtcatggcttataattgctatcgcaccatcaaaatgccaagcgtgcctgaacatatcgcagagccagaagaggtaaatactggcagtgaacaagcaacggcacaggct

SEQ ID NO: 26933 - DNA, 1632 bp, Moraxella catarrhalis
atgagtacgaaatttatctttgtaaccggcggtgtcgtgtcatcacttggcaagggcattgctgcagcttccattgcggctgttttggaggctcgtggtcttaaagttaccatgaccaagatggatccttatattaatgtggatcctggcacgatgagtccatttcaacatggtgaagtcttcgttaccgaagatggtgcggagacagatttggatttgggctattatgaacgctttttacgccgttcaaaaatgagtaaagccaacaattttaccagtggtcgcatttatcaaaccgtgcttgccaaagaacgccgtggcgattatttgggcggtactgttcaggtaatccctcatattactgatgaaatcaagcataaaatccgtaccagtggtgagggctatgacatcgccattattgagattggcggtacagtgggtgatattgaaagcttaccttttatggaagcggttcgccaaatgcaagttgagcttggtcgcacacattctttactgatgcatttgactttggtgccttatattgcttcggcgggcgaatctaaaaccaagccaacccagcattcggttaaagaacttcgctccattggtctacagcccgatgtattaatttgtcgatcagaacaacccatttctgaagataaccgtcaaaaaattgcactatttacgaatgttgagccacgcggcgtcatcttatgcgaagatgccaagtccatttatcaaattccacgccgcttatatgagcaagatttggatgatttgatttgtgagcgttttggtatcacagcaccagaggcggatttgtcagattgggataaagttgttgatgatttgttcaactcccaaggcgagatcgtagttgctatggtgggtaaatatgtcgaactcccagatgcttataaatctgttaacgaagccctacttcatgcaggtattcacaataaaacaaaagttagcattcgatatatcagtgccgaggccctagaaacagattcagaggcaatgaatcagattaccgatgtggatgcgattttggttccaggtggctttggtgagcgtggtactttgggtaagatgaaagccattcaatttgcgcgtgaaaataacaagccatttttaggcatttgcttgggcatgcagcttgcagtcattgagtatgcgcgtaatgtattgggcatagaagcaaattctaccgaatttgatcgaaaaacagccaatccgattatcggcttgattaccgaatggtttgatgaaaaaggtgaacttcaaacccgctctgatgatagtgatttgggcggcaccatgcgcttaggtgctcaagaagcagaattggtttcaaactctaagcttgctaagatttatggctcacataatatcaccgaacgccatcgccatcgttatgagatgaataatcgctatattgagcctttggaaaatgctggtatgaaaatttcaggctattctgccaaacagcatttggttgagtcggttgaaattgacaatcatccttggtttgtggcggtgcaatatcacccagagtttaccagctctcctcgaggtggtcatccactatttaatagcttcatcaaagctgccatagatgtgaaacaagcc

SEQ ID NO: 26934 - DNA, 861 bp, Moraxella catarrhalis
atgacacagccaatgatagccgctcaatcaaacattaccgtatcagggattgagattggtaatgataagccttttgttctatttggcggtatgaatgtgcttgaaagccgtgaattggcttttgagattgctgagcaatatatcgatatttgccaaaggcttaatatcggttatgtgttcaaggcaagttttgacaaagcaaatcgctcaagcttgcactcttttcgtggtccaagccttgagaatggcttgacttggctaaatgacattaaagaaacttacaatgtccccattattaccgatgtgcatgaaccttatcaggctgcacctgttgccaaagttgccgatatcctacaattacctgcttttttgtcccgccagacggatttggtgagtgccattgcacgcactggcaagataattaatgtcaaaaaagcacagtttttggcaccacatgaaatgcgtcatatcattaataaatgtttggaagctggtaatgatcaagtgattctttgtgagcgtggttcggcatttggttataataatttggttgttgatatgcttggctttgataccatgaagtcaatgaatgtaccagtattttttgatgttacgcacgcacttcaagagccgggtgctcgtggtgacagtgcaggtggcagacgccatcagattaccactcttgctcgtgcgggtatggcgacaggcttggcgggtttatttttagaagctcatcctgatcctgataaggcgaaatgtgatggcccaagtgcattacgcctaaatcaacttgagccatttttgatacaaattaagcagcttgatgatttggtcaaaggctttgaaactttagatacacaa

SEQ ID NO: 26935 - DNA, 1335 bp, Moraxella catarrhalis
gtgattgcgataggagctactatgtacgctgaagatacaaaaaatattgtagaaattaaagacattattgctcgagagattttggattctcgtggcaacccaaccattgaagcagatgttatccttgcaaatggtattcgtggtcgtgcagctgcacccagtggggcatcaacaggctctcgtgaagcgttagaattgcgtgatggtgacacttcccgttatttgggtaaaggcgtcaaaaaggcagtggcgaacgccaatagccaaatccgcaccgtactgcttgataaagatgttacacaacaaactcagattgataatatcttaattgagcttgacggtacagaaaataaaggtaatatgggtgcaaatgctatgttggcagtatcgttggcggtagccaaagcagcggccattgctcaatcattgcccctgcatcaatatattgccaatctgcgtggacaaaccagcttaaccatgcctgtgccgatgatgaatattttaaatggtggcgcacatgctgataataccgttgatatccaagaattcatgattgagcctgtgggatttgcttcattttcagaggcactgcgtgcaggtaccgaaattttccatgcattaaaatcagttctaaaagcacaaggtttaaatacggctgttggtgatgaaggcggttttgcacccaacttacgctcaaacgaagaggcaattactgtcatcatgcaagcgattgataaagctggctataaggcaggtgaaaatatctttttagccttagattgtgcagcatctgaattttataaaaatggtcaatacatcttggcaggtgagggcaataaagcctttgatagccaaggttttagcgattatttaaccagcttatgcaaccaatatccgatcatctctatcgaagatggtttggatgaaagcgattgggaaggctgggcatatttaaccaaacagttgggtaaaaaggttcaattggtaggagatgatttgtttgtcaccaatccaaagatcttgcaagaaggtattgataaagacattgctaatgccattttgatcaaatttaaccaaattggcactttaagcgaaactttagatgcgatctatctggccaaacaaaatggctatgccactgtcatcagccatcgctcgggtgaaactgaagattcaaccattgctgatttggcagttggtacggcagcaggtcagattaagacaggttcactgtgccgttcagaccgtgttgccaagtacaatcagcttttacgcatcgagcagcaagtgcgtgccgcttatcgtggtcgtgaagaatttatcggtctgcgtggc

SEQ ID NO: 26936 - DNA, 726 bp, Moraxella catarrhalis
atgaaaacaacgatttatccgctcattgtcgctgctggcacaggatcaagatttggtgccaataaacccaagcaatatcttaaaattggtactaaaagtatcttgacacacagtatttctcgattaaatcaccccgatcttgatgctttgaccgtggtgattgctcatgatgatgcctatattcaaggcgaaatgttggacatgcaatcctcttttgatcaggcaatttactacacaactggcggcgatgagcgatggcagtcggtgatgaatggacttgacaaaatctgtgctgaagggggtttggatggtgattgggtgcttatccatgatgcagcaagaccatgtttgccttatgctgatttggatcgattgattcataaaatcaaaagcaatcaatgcaatgcagcaatattggcgacagctgtcgtggatacattgaaatttgccaaagataaccatattagccatacggtcagccgagatgatttatggcaagcgttgacgcctcaggcatttaagataggggttttaaagtcggcttttgaatttgtcatcaccaaccgcctgcagattactgatgaggcatcagcgtgtgaagcgatgggggagtctgtcgccattgtgccagcatctcggatgaatattaagctgacttaccctgatgatttgccgcttatggagaagattttaagtggtttgtttgatgaattggtcaaattaagt

SEQ ID NO: 26937 - DNA, 1287 bp, Moraxella catarrhalis
atgggtaagaatgttgtcgtgctgggtagtcagtggggtgatgaaggcaaaggcaaaattgtggatttgctgaccgaaaaagccacagcggtcgcccgctttcaaggtgggcataatgcaggtcatacactggttgttggcggtgaaaaaaccgttctgcatcttattccatcaggtattttgcgtgagggtgtcacttgtttcattggcaacggggttgttttatctcctgaagcactacttaaggaaatgaatggtttaatcgaaaaaggtgtgcctgtgcgtgagcgtttgcgaatctcacctgcatgtccgcttatcatgccttatcataccgcacttgaccaagctcgtgaaatcaaacgaggcagtggcaaaattggcacaacaggtcgtggtattgggcctgcttatgaagataaagtctcacgccgtgcgctcaaagttgctgatttattccgtgcagatttaccagaaaaactagaaaacttacttgaatatcataactttgcacttaccgaatattataaggtagacgccattgattttgataccacgctcaaactgtgccaagaatgggcatctgatcttaaggatttggtcattgatgtgaccgatgcactagagatccgtcgccaaaatggtgaaaatttgatgtttgagggtgctcaagggacgctacttgatattgaccatggtacttacccatttgttaccagctcaaatacaacagcaggcggcgtatctacaggtacaggcttaggccctttatatttagactatgtgttaggtattaccaaagcttataccactcgtgtcggctcaggaccatttccaacagagctgtttgatgatgttggtgctcacttagcaaaagttgggcatgaatttggtgcaacaacaggccgagctcgccgctgtggttggtttgatgcggtcagcttacgccgtgcggttgtattaaactcaatgagcggaatttgtttgactaagcttgatgttttagatggcttagatgagattaatatttgcaccagctatgaagtaccagaaggtgaatgtgctggtgcttatgatgctgaatattatgaaaaagtggtaccaaaatatgaaaccctaccaggttggagcgaatcgacgattggcgtgaccaactttgattcactgcctgccaatgctcaagtatatatcaaacgcattgaggcgcttgtcggttgccctgttgatatcatctcaacaggccctgatcgtgatgaaaccattgtgttgcgtgatccttatgatgct

SEQ ID NO: 26938 - DNA, 2245 bp, Moraxella catarrhalis
aaatctagccgtctgcatctgcccaaacctgatattgcatttggtcaaagccgtgccatcaaagccttaaacaccgcattagacatacacgccaatggctatcatgtgtttgcagtcggtgaaaatgggttgggcaagcgtacactcgtcacacgccttttggctgagcgtgccaagcatatgccaacaccgaatgattgggtatatgtacatcattttgaagacatacgccgacccattgccattgattttcctgctggtatggcaattatttttcagcaaaaagtccataaactttggcaaaatgccaaaaaaaaagctggtcgccaaactgcttggagatactcaccaaaaccacattgaactgataaaatcagccatacccctacaacaaaacaaacgatttgacgctattaatgctgatgccaaacaacataatttggtactaaagaccacaggtgatgagcgtgtgcattttgtggcaattgatgacagcaaacctatagataccaaaaagctcgcccagcttcaaaaacagcttttagaggcacaaattgagcttagtgagcttgaagacagcacgcatgaggcacttgatgagctacatcaaagtactgccaaaaaagtacttgaacccatgtttaacgctgtgatggcaaactttgagaaccacccaaaagccatccgtcatctcatggcgattcaagatgatatggtcaaaaacattacccatatcatcaatgaagatgatgacaattttatcgccaccagtttatcacaagtaccaagccgatatgtcgtcaatatcttggtcagccatcagccatcagctggtgcgccgattgtatttgaagatttgccaacacatctaaacttacttgggcatattgaatataccaccgagcttggtactgtcttaacagatgttagcatgattcgagctggtgcattacacaaagcaaatggcggctatcttttattagaagcccaaagcctacttgaacatccctatgcatggcaaggtttaaagcgtgctttgcaatcaaaacaaatcaaaatctcaagtcttgaacagatgctcactttgacaggcagcctatcgcttgagcccgatagcgtggcattggatgtcaaagtcatcttacttggtgaagctgatttatattatgaattgctagaatttgaacctgaatttaattcggtctttaaagttcgtgccgattttcatgatgacattcaacgagatgactgtagtgaatatggcatggtattaaaaatggtggatatgattaaaagccatcagttgcccaattttgataataccgcatttgctgtaattattgatgaattatccaagcttagcgatgataaaaataagctggacttacacgccgatcgcttgtcaggattattggttgaatctgcacgaatcgctacccttgaaaataacaaaatagtcaccgccaagcatgtacaaaccgcacttgatgacatcactgaacgaaaggggtatttaaaggatttgtattggcaggagattttaaacggtcagcaaattatctgcaccaaaggctgggcggttgggcaaatcaacgcattaaccatcatcagctatgctgatagtgaatttgggctacctgcacgcttgaccgctttgattcagcccaactttggtcaaggtgagattttagacattgaacgagatgttgagcttggtggtagcttacacgccaaaggcatgctcatcatgtccagttttctgcgtgccttatttagcgaatttcatgaattaaatttcagtgcgtctttagcatttgagcaaagctatgggcaaattgatggcgatagtgcaacgcttgccgaagcgtgtgcccttttatcggctttagccaatattcccattgcccaaaatcttgccatcacaggttcaatgaatcaattagggcaagctcaagcggtcggtggtgtgaatgcaaaaattgctggattttttgatgcttgccgtgataaagggcttgatggcaatcaaggggtaatattaccacgcgctaatattgcccaactgatgctgcgtgatgacatcgtacaggctgttaaagatgaacaatttcatatttatgccatcgaccacattaccgacgcccttgcccttttgtcaggcatgctcattgatgataaaaataagcatggcgagtataagcgtaatacattgtttggcaaaatcgtcaaacgtcttgaaagctgg

SEQ ID NO: 26939 - DNA, 675 bp, Moraxella catarrhalis
atgacgcccaaattttccaaaatctcccataaatttcaacgcttcgccgctgccattgatgaggcagcccaatcgcttggattgacgattaccgatgtgcaaaatatgcagattttacggtatttagacggccttttattgtggggtaaagcgtacaatctaaccgctatcacagaccctgatgaggctttggtgaagcatatttttgattgtatggcgattatacccatgctgccgtttgtcacgcaaccaaacaaatctttgctagatattggtacaggtgcaggattgccatcggtaattttggcaattttaaagcctgattggcacattgatgctcttgatagcaatcaaaaaaaaatccgctttattcgccagattagcagtgagattggcttaaaaaatatcacgtcaattgcttctagaattgagcatcatcatgcccaaaaagcaggtgcgtacgatgtgattacttcacgggcatttgcgtcactgactgattttgttagccttgctacaccatgtttggcggatacaggtgttttgtatgccatgaaaggtaaaaatccgaccgctgaggagatggcagatttgcaagcttggcacatagatattgagcccatctgcgtacccaaattagatgacgatcgatgtgtggtttacctaacaaagcag

SEQ ID NO: 26940 - DNA, 783 bp, Moraxella catarrhalis
atggaaataattgcaattgccaatcaaaaagggggtgttggcaagactacaacaacagtcaatttggcagcagcgttggcgataattgccaaaaaaagggtgctactgattgatttggactcccaaggcaatgccaccaccagtgttggtctggataaaaatgccttagaatatacaatggcagatgtgctacttgatggcgtgtctttacaagatgccatcttatctaccgatattggcttggatgtcattggtgccaaccgagatttggcaggtattgatgtatcacttgcaggcgtggcagacgcgccttttttacttaagcaggcgatggcagatgccaagatggcaggcaagcttgagtatgattatatcgtgatggattgtgcaccaagtcttagtatgattacggtgaatgccttttcggcaactgatggcgtgattattccgatgcagtgcgagtattatgcgcttgaaggtgtggcagatttgattgcgacgattgataagctaaaatccatcaatgaatctttgcatattcgtggtgtggtgcgtactttatttgattatcgtaacacattggcacaagatgtttctggtgagcttgaacgccattttggtgatttggtgtatcaaaccagtattccaagaaatgtgcgtttggcagaagcgcccagctttgggcaatcaatttttacttatgaaaaatcatccaaaggtgcaatcgcttatcataaacttatgaatgaagtgattgcacaaacgaaagccaaatcaaacgga

SEQ ID NO: 26941 - DNA, 579 bp, Moraxella catarrhalis
atgaccacagtttattttattcgccatgctgaacccaattatgccaatcgtgatgagtttagccgagacttgaccccaaaaggcattgcccaaagcgagcggttgcttgatgtgtttaggggtattgatattgatgtgtttttttcaagcccttacaaacgggcggtggatacgatttatccgcttgccaacagtcgcaaaaaaaacattcatctaaaagagaagctttgtgaaaggcggattggcacttgggtggataattttgatgaatttagccaaaagcagtggcaagattttggatttcatctaaaaaatggtgaaagtttgcaccgtgtccagcaacgaaacattgctatgttgcatgaaattttgataaattatcccaatcagacgattgtcatcggcacgcacggtacggcattatctaccatcattaagtattatcaggcggattttggttatcaggattttaatgccaataagcacaaatttccgtggataatggcatttgaatttgacggtattatgctaaaacgctaccacgaaattagccatgaaatccacatggacgatacgcca

SEQ ID NO: 26942 - DNA, 969 bp, Moraxella catarrhalis
atgaacgagcaagaacagttaccctactttgctccattacttccttggcaaagacaggcttggcagcagctgacaggtcaattcattgagcagcgtatgccacatggcttacttgctgcaggtcaaaaaggcatcggtaagcgtgagtttgtttggcgatttgtggcgtatttactgtgtttggaaaaaaaccaatatggtgcgtgtggtcactgtcagagctgtcaatggttgcgtgctggaacgcatcctgatttattggtgctaccgcagggtgatagcatcaaaattgatgatattcgtttgctccaagaatacagtcaaaccaaagggcatggggtaaaagtcattgtgcttgatggggcagatacactgacactgggtgctgccaacgcatttttaaagacgcttgaagagcctcgagatggggtatttttgatactcattaccgaccatccttctaggcttttacccaccatcaaaagccgtgtacagacaatgcctttatcttatatagataaagtagaggcgattgattatctgagtgaatttatgtcacctgagctatcaaagcttttattagatatcagcgatggggcggtcttgcaggctaagagcttatcttctgccaaatggtttgatcagcgtacactttggttaaaaacctacaccgctctacaattatccaagcgtaccgccagtgccgctagtagttactggcaaaaaaccttaactttggctgaatttatcacgctatcaagagtcatgttaatggatttatggcgtgtgttcttggggataccaagcttacatcaagatatagatgtggtagcgttgttggctcaagttcagcttgactcttcaaaacttgaatcattactaagctgtattgatgatacgcagacagcttacgcccaaaatgtgcaagagactttgggctttgaccgcattttaattgagatggcaaaa

SEQ ID NO: 26943 - DNA, 1206 bp, Moraxella catarrhalis
atggctgatttaagtaaaattaccgaaattgaagatttgcgtcgtatcgctgagcgtaaagtaccacgaatgttctatgattatgtggattcaggttcatggacacaaaccacttaccgtaataatgaaacggactttgatcgcattaagttacgtcagcgtgtccttgttgatatggataatcgatcgcttgccacacaaatgattggtcaagatgtcagtatgcctgtggcaatcgcaccgactggatttactggcatgatgtgggcagatggagagattcatgcagcgcgtgccgctgagaaatttggtattccattttcactatctaccatgtcaatttgctcgatcgaagatgttgccgaaaataccaccaaaccattttggtttcagctgtatgtcatgcgtgataaagaatttatggaaaatctaatcaagcgtgccaaggctgcaaattgttcagcactgattttaacggcggatttacaagtcttaggtcagcgtcataaagacattaaaaatggactatcagcacccccaaaaccgacactaaaaaatatcttaaacttaatgaccaagcctgaatggtgctacaatatgcttggcacaaaacgccatactttcagaaatatcgcaggtcatgccaaaaatgtgtctgatctatccagtttatcagcttggacagcagagcaatttgaccctggtcttagctgggatgatgtggcacgcattaaagatatgtggggcggtcctttgattttaaagggcattatggaacctgaagatgccatcatggcagcacgctttggtgctgatgcgatggtaatttcaaaccatgggggtcgtcagcttgatggtgcgccaagctctattgcttctttgactgactgcgtacaggcatctcaagctgaaaattctaactgtgaagtttggctagatagtggtattcgctcgggtcaagatgtactaaaagccatcgccttgggggcaaaaggtacgatgattgggcgttcatttttgtacggcttgggtgcttatggtgaagatggtgtgcgtcgtgcgctggagattatctataaagaatgtgatgtcacgatggcattttgtggtcataccaatatcagtacggtaaattctgatattttggttaagggtacttatgagcatctcaaagccaatcagccacacattacgccaattcgctgg

SEQ ID NO: 26944 - DNA, 1092 bp, Moraxella catarrhalis
atggctttaaatactattcctgaaatcatcgaagacatcaaagcaggaaaaatggtcatcttaatggatgacgaagaccgtgaaaatgaaggcgatcttatcatggcggcaaatcatatcacgcctgaggcgatcaactttatgatcacgcacgcacgaggtttggtgtgcctaaccttaaccgaagcacgctgtcagcagcttgatttgcctttgatgagcgataaaaatggcgcaaaattcagcaccaattttaccctatccatcgaagctgccgaaggggttacgacaggtatctcggcatctgatcgtgcacgtactgtccaagctgccatcgcagctaacgccaagccaaccgacatcgtccaaccaggtcatattttccccatcatggcaaaaaaaggtggtgtgctgcaccgtgcaggtcataccgaagcaggctgtgatttggcacgcttagcaggacttgagcctgcctcggtgattgttgaaatcatcaaacctgatggcgaaatggcacgccgtgatgatttggaagtatttgccaaagaacatgggctaaaaattggtaccatcgctgatttaattcaatatcgtatggcaaccgaacaaaccgtcagcgaagttgagcattttgctatccaaactgagcatggggattttaccgcatatcgttttagtgagtttggctcagatgatacgcatttggcatttgtcaaaggtaagccaactggtggcgtcagcacagtgcgtgtacatagtttttcgcccatgaaagacttatttgggattcataccagcggtagccgctggaatatccaaaatgcactggcaaaaatcgccaccgctgagcatggtgtgctggtgtggattggtcatgatgatacacttaatcttggtgatggttttgaggcactaaaggataagcagtcggtaacctcggtgaatcgccgtgcaccttatcagaccattggcgttggtgcacagattcttaaacacttaggcgttaaggacatgcgtttattatcaagccctatcaaattcaacgccctatcaggttttgatttgaatgtggtcgaaacgatagataaa

SEQ ID NO: 26945 - DNA, 996 bp, Moraxella catarrhalis
atgtatacttttaatcgtcaatttccccatactcgcttgcgtcggctacgcatctctgatggcattcgtgagatggtgcgtgagacacagttagcaccatgtcatttgattgcacctgtctttgtcattgaaggcatgaaccaaaaacagtccattcatagcatgccaaatgtccatcgctactcgattgatttgttgattgattatgtgcgtgaattatatgccactggcgtgcgtatgattgatatttttcctgtcattgaccccaagctaaaaacgcctgacggtcaagatgcctatcacaacgatacgctggcggtgcgtgcggtgcgtgccatcaaagatgctgtgccacagatgattgtcatgacagatgttgcacttgacccttataccacgcatggtcaagatggtattattgatgagtcaggctatgttatcaatgacatcaccaccgaagcactgattaaacagaccctagcacacgcaaaggctggtgctgatatcatctccccaagcgatatgatggatggacgcatccaagcaatgagacaagcacttgaaaatggtggctatgtcaatactgccatcatggcatattctgccaaatatgcttcggcatattatgggccatttcgtgatgcggtcggttcatcaggtaatttaaaaggtcataaaaaacaataccaaatggatcctgccaaccgtgcagaagcattgcatgaggttgcactagatatccaagaaggggcggatatggtgatggtaaaacctggacagccgtacttagatatcgtgagtgaagtcaaagatacttttggtgtgccaacctttgcctatcaagtctcgggagaatatgccatgcatatggcagctatccaaaatggctggctcaccgatgcagttattttagaaagtttaatcggctttcgccgtgctggttgcgatggtattttgacatattttgcacttgatgctgcccgtatgctaaacgac

SEQ ID NO: 26946 - DNA, 1281 bp, Moraxella catarrhalis
atgagcttaaataaagttgccatcttaggcggtaatcgcattccttttgcgcgtagtaatggcgtatatgctgatgccaacaacattgatatgctcactgcagcattagatggattggttgctcgttttgatttggcggataaacaaattggtgaagttgtggcaggtactgtcttaaaacacagtcgtgacctaaacttaacccgtgaggcagtgcttaacacccaattacctgcaacgacgcctgcttatgatatctcgcaagcctgtggtactggactacaagcaacttttgctgtggcaaataaaattgcactaggccttattgataatggtattgcaggcggtacagacacaacctctgatgcaccgattgcattgggtgatggtctgcgtaagccgcttttgcgtttaggcaatgccaaaacagccaagcaaaaattgtccgcacttagcaccatcaaccccaaagatttattagccttcccccaaaatggtgaaccacgcactcgcctttcaatgggcgaacaccaagccatcaccgcacttgagtggaatatcagtcgcaccgatcaagatgaacttgcctataacagccatcaaaacttggctcaggcgtatgaatcaggattttttgatgacttaatcacaccttataaaggcttgaccaaagataataatttgcgtcctgataccacacttgaaaaattagccagtctaaaacctgcctttggcaaaaaaaatgccaatccaaccatgaccgcaggtaactcaacgccactcacagatggtgcttctgtggtgctactgtctagtgacgcatgggcaaaagagcatgggcatgagccacttgcttatatcactcaccagcagacagcagcggttgattttattggtaaagaaggtttaaccgaaggtcttttaatggcgcctgcttatgccgtgcctaagatgctaaagcgtgcaggtttgaccttgcaagattttgatttttatgaaattcatgaagcttttgcctctcaggtactttctactttggcagcttgggaagatgagactttctgtaaaactcgcttgggactagatgcaccactcggcagcatcgatcgcagtaagcttaatgtcaatggctcaagcttagcagcaggtcacccctttgcagcaacaggtggacgaattttggcgacagcagccaaactattggctcaaaaaggctcaggccgtgcattggtttctatttgtgctgctggtggtcagggtgttgtgtgtatcttagagaga

SEQ ID NO: 26947 - DNA, 1896 bp, Moraxella catarrhalis
atgccaatttatcgctcaaaaacttccaccgcaggtcgcaacatggcaggggctagggctttgtggcgtgccactggcatgaccgatgccgattttcaaaaacccatcatcgccattgccaattcctttacccaatttgttccggggcatgtgcatcttaaagacatggggcaattggtcgctcgtgagattgaaaaggcaggcggggtggcaaaagagtttaataccatcgctgttgatgatggcattgccatgggtcatagtggcatgctctatagcctaccaagccgtgacttgattgctgacagcgtagaatatatggtcaatgcccattgtgctgatgctttggtgtgtatcagtaattgcgataaaatcacccccggtatgttgatggcggcgatgcgtctgaatattccgacgatttttgtctcaggtggaccgatggaagctggcaaagtactcgccagcactttggttgatggcagtaatgtgcatgaaacagtggtcaatgaccaagggcaatccattcgcaaacttgaccttgttgatgccatgattgacgcagcagatgatttggtcagtgatagtgatgtgcaaacggtagaaaactcggcttgccccacttgtggctcttgctcaggcatgtttaccgccaattccatgaactgtttgaccgaagcgttggggttgtcattgcctggtaatggctcactgctggcaacccatgccaagcgtcaagagctgtttttaatggctgggcgaatgattgttgagattactaagcgtcattatgaacagggtgatgacagcgttttgccacgctcaattgccaccaaatccgcctttgaaaacgccatgagcttagacatcgccatgggcgggtcaaccaataccattttgcatctgctggcagcagccaatgaagcgggtgtggcgtttaagatggcagacattgaccgtctgtctcgcttggtgccttgcctatcaaaggttgcccctgccacccaaaaataccacatggaagatgtgcatcgtgctggcggtgtgatgggcatattggcagagcttgaccgtgcaggattattagataccagcctgcccaccgtacacagccccaccctaaaagacgcattggcaacttgggatgtaatgaatcctgataatacgcaagctcgtgctttatacattgccgccccaggtggtgtacgcaccacccaagcttttagccaaaacaaagagtatccaaatcttgacttaaaccgtgaaagtggctgtatccgtgatgtgaaacatgcctattcacaagatggcggtttggcggtgttatttggcaacattgctgagcgtggttgtgtggtaaaaaccgcaggtgtcgatgacagtattttgacattcacaggcaaggcgcgtgtgtttgaaagccaagatgatgccgttgaagccattttggcagaccaaatcattgcaggtgatattgtcatcattcgttatgaaggcccaaaaggcgggccgggcatgcaagagatgctctaccccaccagctacctaaagtctaaagggctgggtaaagcgtgtgcattattgaccgatgggcgtttttcaggtggcacatcaggcttatccattggacatgccagcccagaggccgctgaaggaggtgcgattggtttggtcgaagatggcgacaccattcatattgacattcccaaccgcaccatcaacttggcggttgaccccacagaacttcaaaaacgccgtgaagcgatgcaagtgcgtggtaaacatgcgtggaagcctgccaatcgcattcgccatgtgtcccaagccttgcgtgcttacgcagccatgaccaccagtgctgacacaggggcggtcagagatgtcagtcaggtggaa

SEQ ID NO: 26948 - DNA, 891 bp, Moraxella catarrhalis
atgaatttgattgctttttttggagcactggagagtggtctgatttatgctttgatggcactgggtgtgctgatttcctttcgcattttagatttccctgatctaaccgccgatggcagctttccgttgggcggtgcggttgcagggatttgcattgtcgcaggcattaatccttggctggcttgtgtttttggtatgatggcaggtatggtagcaggtatgatgacagcttggctgcatgttaagttgggtattttacacctacttgctggtattttgatgatgaccgccttgtattcgattaatctgcgaattatgaatgccccaaacctgccgctacttggacagccgacagtatttacaccattgattgatggtggtaatggattttgggtgcgtgtggcagtcattgcaggggttgtattggtggtaaagctggctttggattggttttttatcaccgaaatgggtctgtcaatgcgtgcgacaggttcaaatctgcgtatggcacaagctcagggcattaatacgccatggattatcattcttggcatggcgatttcaaacggtttgattgcactatcgggtgctttgtttgtgcagacccaaggatttgctgatgtttctatgggtattggtacgattgtgattggattggctgcggtcattattggcgaggcggttttatctgccaagcgaattttttggatgactttggcggtggtgattggtgcgattttataccgtttatttatccaaattgcactttctagtgagctattgcgtggcatcggctttaaatctcaagatttaaatttagtgacagcatttttggtgatcattgtcttgatgttgccaaaaattaaagccaagctatcaccaaaaaaacac

SEQ ID NO: 26949 - DNA, 1671 bp, Moraxella catarrhalis
atgatggaaatcaaagcccccgatttgggtgttgaatcagctgaagttgctgaaattatggtaaaagttggcgatagcgtcagcgaaaatgacaatatgattttggttgagtctgataaagcctctgttgaagtgccatcaactggtgctggtgttatcaaagaaattcatatctcggtcggtgatcacatctccgaaggagatttgttgttcactcttgacagtgatcaaagtggtgatgctcaaaaaactgactcaaaatccgacgatgaacctcaaacaaaacaatcagctaaagatgaagatgatatatctatcggtgatgatgagcaaacagacgatcagcctgacttaaatgaatcagctggtagtcaaacgcatcatttaccagaccttggcgtagatagtgccgaagttgctgatattatggtggcagttggtgatgaaattaccaaggatcaaccattgattttggttgagtctgacaaagcctcggttgaagtacctgcaccagttgatggcgtgatcgaagaaatcttaatcaaagcaggcgatagtgtctcaaatggtcaagcgtttattacgattaagagcaagggcatttcagccaaaaaatcatcaaataaagagcaaccagccgaaaaaaccaaagaagaagataccaaagctaaccaagcggcagtatctgaatcaaaaaacaagtctgtacaaagcccacaaaccaaactgccagaagctgtcgtaaacgaaaaagctcgacatgtttacgcaggcccagcggtgcgtaaacttgcgcgtgagcttggtgtggacatcagtgctgtgacaggtacagcagctcacgggcgaatcttaaaagaagacttatttggctatgtcaaatcagtcatcagcggttctaccagtcaagcaaaatctggcacgaccgaggtgcgttctggtttgccaagcttaccagatatgagcaataaagagatttggggcgagcttgaaatccaagatctcactcgtctacaaaaagtctctattccgcagctaaactacaatacctatctaccacaggtgacgcagtttgatcttgctgatatcacagataccgaaagcttgcgtaatgagcttaagggtgagtttaaggcagagggcattggtctgactattttggcatttattgttaaggcggtggcatatgcacttacccaaacgccgaaatttaatagccatttatcggatgataatacacaaattattatccgcaaatcggtaaatatgggtattgcggtagcaaccgatgatggtttgattgtacctgtgatcaagaatactcaagataaaggtatcaagcagattgccattgagattggtgaacttgccaaaaaagcgcgtgataaaaaactgaccgccaaagacctacaaggtgcaagctttaccatctcaagtcaaggcaatcttggcggcacagcctttacgccacttgtaaactggccacaggtcggtattttgggtgtatctgaagcatcgtatcagccaagatggaatggcaaagaatttgagccacggctcatgttgccactatcactgtcttatgatcaccgtgtgatcaatggtgcggatgctgcggtctttactcgccatattgcaaaattgttggcagatccgcgtcgtatcttgtta

SEQ ID NO: 26950 - DNA, 1380 bp, Moraxella catarrhalis
atgacgatatttaaaacacatctaacccatcaaagccccattgtgcctgccctacccaagcccaaggattcgctgcggctattacatacatctgattggcatttaggcaagcttttatacaatcagtcacgctatgatgaatttgctaaatttttagattggctgattgaggctttgatattacatcaggtggatattttaattattgctggcgatatctttgataccatgacgccaagcaaccgtgcagaatacctttaccatcactttcttgcctccgcctttaaaaatcacattcagcacatcatcattgtcgcaggcaatcatgactctcccaccagcctacaaaaaaccaaagaagtactcggcgtgctaaatacccatgtgattggcagtgtcagccaagacaaatctgatgagctcatcgttctaacagatgatgtaggcatcccaagtgccatcgtgatggcagtgccttatattcgtgatcgtgatgtcagaagtgggattgatgccaactcaatccaccaaaaaaatcagctcttactggagggtgtggccgaatattatcactctttaaccaatcttgccaaggataagcagcaagctgtttatcacactcaccaaaaaaccatccccatcattgccacagggcatctttatgctgctggtgctgctgtctcatccaccgatgatggcatgcgtgatattcagattggaacacttggtcagatcagtagccagatttttgatgatgccattgattatgtggcacttggtcatattcacgctgcccaaaaagttggtcaaaaaaaccacatccgctacagcggctcgccaattgcgatgggatttggggaaattggacgccataaacaagtgctgattgttgatttaccactcaataaaagtgtaccgatatcaaagttgccaaagaatgatgatttgcatggcgaaaatcaagataacaatgccatatcaatccatagcctacctgtgccaatttttcatagccttgctaaaatctgtggcgatatggcgtttattaccaacgccatcgatacactaaaaacacatgatgagcctatttggcttgagattgaatatgttggcgacaccttagtcgctaatttaaaacagcacatttccaatctgctggaaggctcaaacatcgctgcaattagtatcaaaaataaagccatccatcaaggtagcctaaaattgcacacccctaccctaaatttagaaacacttgatgaaatggatattttttatcagcggcttgataaggaaaacttaaatcaagatgaaaaaaatgatctcattggtgcttatcaagagttaatcaaagccatccaagaaactgatcataaagccgtc

SEQ ID NO: 26951 - DNA, 1896 bp, Moraxella catarrhalis
atgaatgcaatctcttatactcatctcaaaacatttgatgtcatcgtcatcggcggtggtcatgcaggcacagaagcatgccttgccgccgctcgcatgggtgctaataccctacttatcacgcataacattgagacgctcggacagatgagctgtaatcctgccattggcggtattggcaaatcgcatttggtgcgtgaggtggatgcacttggtggggctatggcattggcaaccgataaggcaggcattcagtttcgggtgctaaacagccgtaaaggggcagcagtgcgagccacacgcgcccaagctgaccgtattttgtacaaggcagccattcgccacacgcttgaaaatcagccaaacctgacaatttttcagcaatctgtggatgacatcattgttgaaaatactcgtgcggtggcggtggtaacagccacaggcattcgtctaaatactcgtgcggtggtgctgacatcagggacatttttgggcggagtgattcatgtgggcttagaccatcaaagtggtggcagagcaggcgacatgcccgccattcgtcttgctgaccgtttgcgtgaattaaaactgcctgttggacgcctaaaaacaggcacgcctgctcgcattgatgctcgtacggtggatttctccgtgatgaccgtgcagtcaggcgatacacctttgcctgtcatgagttatatgggtgatgttgccatgcacccacgccaaatcaactgttatatcacccacaccaacgaacgcacgcatgagattatccgtgccaatcttgaccgctcccccatgtttagtggtaagattgagggggttgggccacgctattgcccgagtattgaagataagattcatcgttttgctgacaaagacagccatcagatttttattgaacctgaggggctaacaacccatgaattgtatcccaatggcatctcaacaagcctgccttttgatgttcagcttgaattcatccatagcatgaaagggcttgaaaacgcccacattacccgtccaggttatgccattgaatacgactattttgacccacaaaatctaaaaccgactttagagactaaatctattgatgccttgtattttgcagggcaaatcaatggcacaacaggctatgaagaggcagcagcacaggggttattggcaggtcttaatgccgcacgcatggcacttgatgagtcatcatgggtaccacaaagacacgaggcttatctgggtgtgcttgttgatgacttgattacccatggcaccaaagagccataccgtatgttcacaagccgtgccgagcatcgcctgattttgcgtgaggataatgctgatgcacgcttgaccgccatcggacgagagcttgggttggtggacgatgaacgctgggcgagatttagtcaaaaaatggagtctattgccagcgaaaccgcccgcctaaaagacatttgggcgaccccaaacaatgccattggtcaagattttatggcaaacacaggtgagattttgaccaaagagaattcgttactggatttattaaaacgcccaaatatcacctttgacgacattgccaaagtgtcagacagtacagtgagtgctaaggtgggtgaacagattgagataagtgttaaatatcaaggttatattgagcgtcaaaatgatgagattgagcaaatgaaacgccttgaaaatacgctcttaccgcttgattttgactataaaagtgtgtctggtttatccaatgagattgtccaaaaattaagccaaatccgtccgacaacgcttgggcaggcaagtcgcatcagtggcgtcacccctgcggcggtcagtcttttggcgatgacgataaagaaacttaaaaaaacgcaagcagtgatgaca

SEQ ID NO: 26952 - DNA, 1305 bp, Moraxella catarrhalis
atgagctggtttccaaaatggcaaccttatacaggtgatattaacacacagcctgtggcaacgaatgaatatctgccagttgggcagagtattatgttgggattgcagcatgtcttggcgatgtttggggcaacggtgcttgcacctttactgatgggatttgatgccaatcttgcgattatgatgagcgggatttgtaccattttattttttgtgatgacaggcgggcgtgttccgagttatttgggttcaagttttgcttttattggtgtggtggcaacagcaacagcacatgccacaggcagcggcgctaattcaaatctatcagtggcgttaggtggtatcatcgcttgtggttttttgtatgctgtcattggttttattgtgatggcaacaggcacacaatggattgaaaaactcatgccacccgttgtgacaggtgcggtggtgatgattatcggcttaaacttagccccaattaccgtcagcggtgtgcaaggcaagccgtttgatttatggatggcattgatgactgtgttatgtatgggtatgattgcggtttttgcacatggatttttacagcgtttgttactactgataggtttggtgatggcatatgcaatttatgcgatagcgaccaatattttgggtttaggtgagccgattaattttgctttaattactgatgccgattggtttggattgccaaattttagcagcccaacttttgataccaatgccttgccaatcattgcaccagttgcatttattttggtggctgaaaatcttggtcatatcaaagcggtgggtgcgatgacgggagaaaatttaacaccgtatcttggcagagcatttgtggccgatggcgtagcaacagcattatcagcaagtgtgggcggcacaggtatgaccacttatggcgaaaatattggtgtgatggcggtaactcgtgtctattcaacactcatttttgtactggcaggcatatttgccatgattttgggattttctcccaaatttggtgcaatgattcagaccattcctagccctgttttgacaggggcgtccattgtggtatttggtttgattgccattgctggtgctaagatttggattgataataaagttaattttgccaataataaaaatcttatggttgctgccattaccatcattttgggtacgggtgattttggtttgatggttggaaattttaatcttggcggtattggtacagcgacttttgcggcaatcattctacattggtttttaagtcttcgagagttcaattcttcgagagttaaa

SEQ ID NO: 26953 - DNA, 1641 bp, Moraxella catarrhalis
gtgcaaaagatggtcaaaaaaatcggtatggtgctgtcaggcgtggtgatggttctgttaatgataataacaacgccaagccatgctactgccaagttgttgccgacctctcaagaaaatccaaccaaaactatggtagatagctttggtcgtgaaacgccacgaggggcagttcaggggctattgcgtgcaattgcagcagaagattatgaactggctgccaactatttggacggccgttatttggcaaaaacccaaacgcccaatcgtgagattgttgagcatttggtggttgcattagatgcaggtggcaagctgtatccagatttacaaatcagtcatgccagcgaaggcgatttgtcggataatttgccaagtgatattgataaagttggcgagcttcatctgatgaatgagcatattgacattttgctcaatcgccgtgtgactgatgatgacatggtattttggcaagtgtcatcacagaccttgtcatcattgcccaagatgaccacacacgcccaaacgctttcagaacggcttgggctgtctgatgataccacacacgctcaaaccaaatattggcttgagctttcagcattggtgctgcttgtgacggttttatatttggcgattaatttggcggtatggattttgtattgggtgagtaaggggctttataccacactcaccaaaaagccttttcgcattatgcccagtgtgattatgccgttgtctttggtggttttatcattaatcttaccgataattatgatcagtgttggcgtgcctttgacattgcgaagttcatttggtcggattaaggatattgtcgcttggggtgcgaccgcttggctgatgcttcgtctgcttgatggtatttttcgccgtgctgaggcaaattcattaaaacgaggtcgccctgaacaggtttctattttaaatttattaagaaaagttgccaaagccttgatgattattttggcggttattttaatttttggtaatcttgggtttgatttaaccacaggcatcgccgcactgggggtgggtggtttggcactggcttttggtgcccaaaaaacgcttgaaaatctcatcggttcggttgtggtggttgccgaccgccctgtgtatgtaggggattattgtaaatttggtacttatgaaggcacggtgattgatattggcattcgctcaactcgtatccgcaccttaaaccgcacaattgtgactgtgccaaatggcgaattttcatcgctacagattgaaaactttactgcaagggatatgttttattttttgcatgatttattcatcaagcgtaccgctgatttggcggaaattgagcgaatgataaccaatttacaagaatttttggcagcgcatcggctgaccaaccatgaatggaatcaagtttggattaagcagttgcgtcaagagtgttatgtcattgagatgcgtgcttatattgatgctgatggtgctcaagatttttatgccaaacaatcggtactgattttggagatattaaaatttttagaaagttatcatattgaacatgctttaccatcacaatccattacagtgcatcaaaatcatgaccaaacaaccccaaagcatgaaaaaacccccaagaca

SEQ ID NO: 26954 - DNA, 804 bp, Moraxella catarrhalis
atgtatacagacagtcatgcacatttgacttatctaaagcttgaccattatgataacagacctgaaaatctgctcaaagccatgtaccaagcaggcgtgaggcgtaccatggcaatcatgtgccagttgtctgaatatgacgatattcatgcttgggttgagatgtcagcagatgccatgcctgatattggtatgagtgtcggtgttcacccttgccaagatgaacatacgctggctgccatcagtcctgatgaactgctaaagcgtgatcatgaaaaagtttgggcatttggtgagacagggctggattattattgggataaggataaatcatctgcccaaaaacacagttttgctgcacacattgacgcagcaaagaccgctaaaaagcccattattgtacatactcgcagtgcttatcaggatactttagaggtgctggcagctgagcggtgcgaacatggcattattcattgctttaccgaagattatgcctttgccaagcgtgcattggatatggggctgtatatttcattttcgggcattttaagctttaataaatcacaagacctaagagaggtcgctgccaaattacctttagatagggtacttattgagaccgatagcccatatttggcacctgttcctaagcgtggccgtgataatgaaccaacctttgtgccatatgtggcggaagctttggcaaagatttatcaaaaatctgccgaagagattggccacatcaccagtcacaattttatcactttggtcaatcaatataaacctattatccaatcacgctta

SEQ ID NO: 26955 - DNA, 966 bp, Moraxella catarrhalis
atgatgacaaataaacgcatcagccttgccccaatgattgattataccaccatggattttcgggcatttgcaaggctttttaacccaaatatccatctttatactgaaatgattagcaccagtgccatcttaaaaggtgatgccaagcatcatcttcggtgtcatccgaccgagtcgcctgttgtgttgcagttgggtggctcaaatccagacgagatggctaaagcggttcgtgtaaccgaagcacttggttttggatattgtgaatataatatcaatgtcggttgcccctcagatagggtgcagcacaataaaatcggtgcatgtttaatggcagaaccgcagatcgtggctgatatggtgcgtgccatgaaaaatgaaaccgacaaaccgattaccgttaagcatcgcattggtattgatgactgtgatagctatgaatttatgcgtgattttgtgcagacggtggcagaggcaggttgcacgcattttattacccatgctcgcattgcttggcttcaaggattatcacccaaacaaaaccgagaaattccgccattacgatatgaagaggtttatcggctgaaacaagatttccccgatttgaccatcgagattaacggtggcattagccatttggatgatattaagacgcagttggcaaaggtcgatggcgtgatgattgggcgagcattttatcacaatccgtatttgatggcagagtgtcatcttttatggggcagtcagccacccagtcatcgccaaatttttgaaaatttaatcagctatctaaaaaagcgtgctgatgaaggtgtgaatcttgcggtattgacacgccattatttggggttatttcaaggcatggcaggcgcgagacgctggcgtcaagatctaagcggtaagtctgttttgacggtcgatgagatttatcagtcaggcgatcgagttttatcccaaaatggtcaa

SEQ ID NO: 26956 - DNA, 1356 bp, Moraxella catarrhalis
atgatgagttattttggcaccgatggtattcgtggacaatttggagtttttccaatcacacctgattttttattacgcttaggttttggtgcaggtcaggttttaatgcgtcaatcgctcaataaacgcccaagcgtcttgattggcaaagatacccgattgtcaggctatgtcatcgaggcggcattgcaggcaggatttaacgcagcaggcgttgatgtgcatatgcttggaccactgccgacgcctgcaattgctcatttggtgaaaagctttcatgcggatatgggcgtggtcatttcagcatcgcataatccatatcaagataacggcgtaaaattttttaatcatgagggcaaaaaaatctctgatgagatgcaaaatgccatcaatgatcaattaaccgctttggttgatgatacaaatgccagtttggctcgcctagagggcattaaagctgacgctattggtaaaaatcaccgtatcgccgatgccaatggtagatatattgagtattgcaagggaagttttccgtatcatctaaatttatccaatcttaaaattgtgattgattgtgccaatggtgcaggctatagtgttgctcccagagtacttcaagaattaggtgcacaagtcattgcaattcataacacaccaaatggcattaatatcaatgacaactgtggttcaactcatcctaatattattcaggcggcagtgcgtgagtatggtgcaggtgttggcattgccctagatggtgatggcgatcgcattattatggcagacaatcaaggaaacattattgatggtgatgggattttatacattcttgccaaacaccttaagcctgtaggcgtggtaggaacgttgatgagtaatgtcgcacttgagctggcgttggctaatcaagggattggattttaccgagctcaggttggcgatcgttatgttatgcaagcactccaagagcgaggctggagtatcggcggcgagccatcgggtcatattttatgcttggataaaagccgtactggagatgcgattgtggcaggtttgcaggtgctaagctgcatagcagaaacaggcaaatctttaagagagttggttttggattatacgccttttccccaaacgctcattaatgtacgtttaactcaaatgagcaacccttatgataacgatgagctaaatatcatctttaaaaacgcagaagaacagctgtctgaccaaggtcggttactgattcgtcaatcaggtaccgaacctgtcatccgtgtgatggttgagcatcaaaatcaggcggtatgccaagaggttgcccaaaaattagcggcagaagttcggcgtgttttggct

SEQ ID NO: 26957 - DNA, 2601 bp, Moraxella catarrhalis
atgattatgacagatacagtacaaaaagatacagcacagtcccccaaaaaagtttatctaaaagactacacgccgccagtatatgcagttaataaagtggatttggatatccgcttgtttgatgatcatgctgtcgttggtgccaaacttaaaatgacacgagcacacgcaggcgagcttcggcttcttgggcgagatttaaagcttaaaagcattcacctaaatggtcaggaattagagtcgcaggcgtatcatcttgataaggaaggcttaacaattttagatgcaccagatgtcgcagtgattgagacattggttgagatttcaccacaaaccaacacaacacttgaagggctatatcaagcaggaacaggtgatgataagatgtttgtgacacaatgcgaacctgagggttttcgcaaaatcacctttttccctgaccgccctgatgttttgacagaatacaccacacgcctagaagcaccaaagcattttaaaaccttgcttgccaatggtaatttggttgagtcaggagatgtggatgaaaatcgccattataccatttggcatgatcctaccaaaaaacccagctatctattcgccgctgtcattgccaatctagaagtgcttcaagaccactatacaaccattgaaggtcgagaagttttgcttgaggtgtatgccgatgctcaagatattgataaatgtcatgttggtatgcaagcgctaaaagatgcgatgaagtgggatgaagataattatggtcgtgcttatgatttagatcgctatatgattgtggcgacaggtcagtttaatatgggtgcgatggaaaataagggcttaaatatctttaacaccagttgtgtattatcaagccccgaaacaacaactgacgaacgcagttttttggttaaatcggtgatcgctcatgagtactttcataactggacgggcaaccgcattacttgccgtgattggttccagttatgcctaaaagaaggatttactgtatttcgtgaccaaagtttttcaggtgattttcgctcaaaagcggttcagcgtatcgaagatgttgctgtattacgggcagcacagtttgctgaagatgcaggttcgttagcacaccctgttcgccctgagagctttgttgaaattaataacttttatacaatgaccatctatgaaaaaggtgcagagattgtccgtatgattgccaatttcttgggtaaagagaaatttcgccaaggttcggatgaatattttgctcgctatgatggtcaagcggtaaccgttgaagatttcttatctgcgatgtcagtggcagatgctcgagtgatggattttttagcgtggtatcgtcagccaggcacaccagttgtatcaggtggctatcgtgttcttggcgataaagttattattaatttatcccaaaaaacccgccatgtacctaattatgatgcacccgttgcactaccaatccccgtagatacggcaatttttgatagcctaacaggtgagatgttggcaagcagaatgttgcttttgacaacagataatgcacaatttgaatttgatcacattcagctgtctgatggtgctcatcctgtggtatcagtgttgcgtaatttttcagcacctgtcaagattgactttgattatacagatgaagatttggcaagtttggtggcgtttgaaagtgagggattcaaccgttggcaagcactgcaaatactgatgaatcgatggttatccggtagcgtagaggacgccactttaatcatttcagttatccaaaaagctgttgatgaattgattgaagatgatcctatgctggcagcacgattatttgatattccaagccaaaaagagcttgcgatggcttatgatgaaaattatgaccctatcagtgttaaagctcgccgagatgaattgattggcaaaattgctgatggtttgctagaaaatgccaagctttggtatcaaaaattaccattacaagcgtatgaagacacaccgcaggcacgaggtcgccgtttattgcgtaatgttttattggatttgcgtttgacggcaggcgatgagatggctcatcaagatgcttatcatcaatacgataatgcgtcttgcatgagtgagcgactgggtgctttgatggcaatgattgagcataatttggataaaaaagacagctatcttgatgatttttatgccaaatttagccatgaagatttggtgattgatgcttggtttgtcgcacaagcaacgccagatagtaccagtgtctctcaaatagcctcactcatggagcgtaccgattatgattggaacacaccaaatcgtgtacgcacgaccttaagtgctttggctgccaaacctgtgcaactttggacagctgagggtcttgatttgtatttgtcatcggttgtacgcttagatggtagcaatccgcagttggcggcacgcttgctttctgcgttggctcgttggaatactttgacagctgataaaaaagcgatggctcaagaaaaactggctgcagttacctctcaggtttcatcaaaaaatgtgcttgaatttttgcaaaatatgcaaacggtagca

SEQ ID NO: 26958 - DNA, 1686 bp, Moraxella catarrhalis
atgactccatcaaaaccttctcaagattctgccaattatttatttttggttctgccacgctttgcactactttgggtctgtgtggcactgattcccgtttcaattttatttcacatttggtggcttttgtttattgctacctgtttgacttgtcttggcgtgtataatatcagccaaaagcgtcatgcaattttgcgtaactatcccatcagtgggcatattcgctttttgtttgaaaattttcgcccagaggtacgccagtattttatcgagggtgaccgagaagaagtaccattttcacgcatgcagcgttcaatcgtatatcagcgtgctaaggatgttgatagtactaccgcttttggtagtctaaatgacttgaccaaacctggcacagattggtttttacattctggtcgtagccatacaattaaaaatcatgattttcgggtgcgtgttggtaatgaacgctgtcgacaaccatatgatttatcggtctttaacatctcagcaatgagctttggggcattgtccgcagcagcgattgaatcattaaataaaggtgctaaagaaggtgggtttgcacatgacacaggtgaggggagtattagcccttatcatcaaaaacacggcggtgatttgatttggcaattagggacggcctattttggttgtcgtgatgacaaggggcgatttaaccccgaggcatttcgtcaaagggcggtcttgtcgcaagttaagatgattgagattaaattatcacaaggtgctaagcctggtaaaggtggcgtcttgcctgcctcaaaaattaccactgaaattgcattgactcgtgatattccgatgggtatcgattgtatttcgccgcctacccacccagagtttagtacacccactgagcttgtgcatttttggcaacgcctgcgtgagctatctggtggaaaacctgtcggctttaagctttgtatcggtatgccgtgggagtttatggcaattgttaaagccatgattaaagaagataattaccctgattttattgtcattgatggagctgaaggcggaacaggtgcagcacccatcgagtttatggattcggttgggatgcctttggtggacgcactgatttttgtccaaaatacgctggttggtgcaggtatccgtgacaaaatcaaggtaggcgtgagtggtaaggtgatttcaggatttgatattgcaagattgatgagtttgggtgctgattggtgcaattcagcgcgtgggtttatgtttgctgtaggctgtattcaatctcgttcatgccatacaaataaatgcccaacaggggttgccacccaagaccctgcacgccaaaaagccattgatattcctgataaatctcgccgtgtatctaattttcataaaaataccctaaaggcattggctgagattgttggttgtgcaggtctatctcacccaaccgaactaaaaccacatcacattgtacgccgacaaccagatggctggattaagctattatctgagcattatcaattcatcgaaacaggttcgttgttaacgggtgattgtggtcgccgtgtgttagatgatatgtggaagcttgccgatccaaacagctttcaggcgatgacgattgcagataagattgttggtgctgaaaataaacgcaaccgcacgatagaaagtctgtat

SEQ ID NO: 26959 - DNA, 741 bp, Moraxella catarrhalis
atgccaaacaaatcccccaataaagccccagcctatctacgcatcaaaactgccattttggataatatccatgcaggtatttgggcttctggcgttgcgattcctgctgaaattacgcttgctgaagattttggtgtatcacgcatgacagtcaatcgagccatcaaagagcttgaagctgagcgtgttttagagcgtcgtcaaggctcaggtacttatgtagctcagcaaaagtataataatgcccatattgaggttcgtaatatcgccaaagatatccgtgagcgatttcatcgctatcacgctcaagtcatcacacaaaagacgcttgattttatggcattaaatcagcctgacaaccattggttaaatacgctgttttttcacaatcagcctgcttacactgataaactataccaagtttgcatcgcacactatggcgatgacctgcccattcaatatgaagaacgctgggttaatgcctctgtcattgctgattttatcaatcaagattttaacatcgttaataccagcgattatttgattgaccatgtgcctcttgaatatggtgattatcaaatccatgccaaacttgcatccgacaccatttgtcagatactacaaatacccatcaatgagcccacattgttacacactcgacaaaccaaatcacaaggcaagcttgtcacttttgtgaatatgtggcaccctgccagtcggttttcttttagtgggacgcta

SEQ ID NO: 26960 - DNA, 1022 bp, Moraxella catarrhalis
cagcgtagcatctattttttggtcttggatttgcatacagataagttggatgatattaaggaggtttttaaacaatggacacagtatgccgccagattaaccaagggcgataatatcgctccttatggctcaaatccgcatgtgccaccagttgatacaggcgaggctgatagccttggagcgtatggcttgactttaacttttggtatcagcccatcgtttttacaaaaattaaatttaactgataaaaaaccgcctgaatttagcgattcgcccaaattccccagagaccaaatccgcccagaatattcaggggcgatatttgtatccaagcttgcagtgacgatccacaagtcagctttcacgctgttcgccaattggtacgccaagcccgctcaagcgttagtatgcgatggagtcagtcgggatttttaggttttgattcaggcaatcaaaccgctcgcaacttattcgcctttaaagatggtacagccaatagcaacacgcttgatcatgccgataaacatgtttggattcaacagccagactggttaaaagatggtacttatttggtcgttcggtgtatccaaatgcacctagaaacatgggatagaaccagtttaaacggacaagatgaaacctttggccgtcatcgagatagtggtgcgccgattggtcaaagtgatgaatttgcccatctggatatcaccgccaaagatgatgaaggtaattttatcattcctgagatttcacatgcaggacttgctaaacgtagcggattgcagttgcttcgccgttcttattcttatgccagtggcattgatccaaaaacaggtcaatttgatgcaggactgttgtttatttcatttcaaaaatcacccatgcaattcaccgccattcaaagttcacttgggcgggtagataaaatgaatgagtacatcactcacattggtagtgggctatttgcctgttttggtggggtaaaacaaggcgagtatttgggacaaaaattgtttgaataa

SEQ ID NO: 26961 - DNA, 210 bp, Moraxella catarrhalis
atgaaacaaattaagattaagattgaaggtatgacttgtggtggctgtgtcagtagcgtccaaaaagccttacaagcggtggttggcgttgaggcaatctctgtcagtctagaagatggcttggcggtggtggcatatgatgagtcagactgcgatgttccagcaatcgttgaagcaattgaagaggcaggctttgatacgcaattggtt

SEQ ID NO: 26962 - DNA, 879 bp, Moraxella catarrhalis
atcatggaaattgcacggtatcaagaacaaatcaaagatttgcacgctcgtgggcaagagcttcgggggtatctttgacattgagagcaaaaaagaacgcctagaagaggttaatttagaactagaaaaccccgacatttggaacaatcctgaccttgccaccaaaatcagcaaggaaaaatcagtgctagatggtatcgtgggcgtgatagatggcttatccgccaaactcgatgatgctgccgccatgttagagcttgctgtagaagatgatgatgagagcctgcttagtgatgtgcaagcggagctggatgatgccctaaacagcgtagaagagttggagtttaggcggatgtttagcggtgagatggatgccaataattgctatttggacatacaatcaggctcaggcggtacagaagcacaggactgggcccagatgctcttgcggatgtatttgcgttggtgtgaatcgcacgactttaaggcggaggtgttggaggtttccgaggggggcgtggcaggcatcaaatcagcaaccattatggttaaaggtgattatgcttttggctggcttcgtactgagattggtgtgcatcgcttggtgcgtaagtcgccttttgacagtaataacggtcgccatacctcgtttgcagcggtgtttgtctcgcctgagattgatgataatattgacattgacatcaaccctgccgatttgcgtattgatacttatcgttcaagcggggcaggcggtcagcatgtcaatacgaccgattcggcagtacgcattacccatcaaccaacaggtgtggttgttgcttgtcaaaatgaacgctctcaacatgccaacaaagatactgccatgaaaatgctcagagc

SEQ ID NO: 26963 - DNA, 507 bp, Moraxella catarrhalis
atgaaaattgttaccgacaaaacccccaaagtggacattcacgccattttaacgccccaagaaattgatggcattcatcatcacattcatcattatccacaagcccgtgccgccgtgcttgatgctttgaaacttgtgcaaaagcgtaacggctgggtcaatgatgcccaagtggtcgccattgccaacatgcttggcatcagtgtggcagatgttgagggggtggcaacattttttaatcgcatttatcgcttgcctgttgggcgacatgtgattttggtttgtgatagcattgcttgctatttgacaggttatgagacgcttttggctgagtttaaggcacagctgggcattgagtttgggcaaaccacagctgatggcaggtttaccctgttgccaatttgttgtttgggaaattgtgataaaggggcaagtgtgctgattgatgaggacacttatggccctgtgctgccgtccgaggtcggtctattattggagcaatatgta

SEQ ID NO: 26964 - DNA, 1416 bp, Moraxella catarrhalis
atgaataagccaaatgtcagcgaacagattgacgctcgtaaaaatggacttgccccaagccagcttaaccgccaaaaaacgccaatttggggcgtgggactggcggacgggcaagcaccaacgtcacttacgcaccctttgacatggcgactgtatcatcatgatgcactgctgacactggcagattatgaagccttggacggctttgttggcttaaaaaacgccttgaccaaatcacccaaagaggtcggcgagatgataaaaaccgccaatgtgcgtgggcgtggtggggcagggtttaacgcagggctaaaatggacattcatgaccccgcctgatgggggcgtgcgttatttgatttgtaatgccgatgagatggaacctggcacattcaaagaccgcttattgatggagcgtctgccttttcagctcattgagggcatgctcatcagtgcctatgccattggggcgagcgtgggttatgtctttatccgtggtgaatatgtcctagctgccaagcgcttacaaaacgccattaatgagtgtgttgccaatcacttgctgggtgatgggattttggggacagagtttaactttactttgcatattcacacaggggcggggcgatatatttgtggtgaagagacggcactcattaattgcttagagggcaggcgtgccaacccacgcaccaaaccgccatttccccaagtctcaggggcgtggggtcgcccaacggtggtgaataatgttgagacactaaacaacatgcctgccattttgttaaatggggtggattggtatttgaatttgccaaaagccaagggcaaatccaccacccctggcaccaaaatcatgggcgtgtcagggcgtgtcaaagatgcagggctttgggagttgccttttggtcataccgcaagggagttaatagagctggcagggggtatgcaagaggggcttagtttaaaggcatggctaccaggtggggcgagtaccgactttttgaccgcaagtgatgagcatttggatttggtgatggactttgaccccatcatgaaagcgggtagtcgtttgggtacttgcttgatgatggtggtggacgaaagccaagacatggtgagtttgtcaaaaaatctacaacagttttttcagcgtgaaagttgtggctggtgtaccccttgccgtgatggcttaccgtggggcgttaaaatccttgatgccatggataacggacaagcccaagcggacgacattgacaaactctccgagctgacacgagatttgtggcttggcaaaaccttttgtgctcatgccccaggggcgatggagccactcatgagtgcgttaaaatatttccgtcatgaatttgagcaaaaagtgaacaactcaaaaccacaacaaaataaggtgggggtg

SEQ ID NO: 26965 - DNA, 3099 bp, Moraxella catarrhalis
atggcagtcattcatatagatggcaaaacttatgatgtggacggctcggataatctgctctcagcctgcctgtcgcttggcattgatgtgccttatttttgttatcacccagccttaggttcggtcggttcttgtcgtcagtgtgccgtcaaacagtataataacgccgaggattatcaagcaggcaaagggcggttggtgatgagctgtatggttgcccccagtgatgacatgtacatctctgttgatgatgatgaagccaaggcatttcgcaaaagcattgtggaatacttgatgaccaatcacccccacgactgccccacttgtgaagagggtggtcattgtcatttgcaagacatgacttatatgtcaggtcatcatcgtcgccgttaccgctttaccaaacgcactcaccacaatcaagagcttgggccttttatcgctcatgagatgaaccgctgtatcgcctgctatcgctgtgtgcgattttatcaagattatgcaggtggtgatgatttgggcgtgtatgcgtctaataaccgtgtttattttggtcgcccagaagatgggcagtttgacagtgagtttagcggtaatttaaccgaagtgtgtcccacaggggtgtttacggataaaacccattctgagcgttacaatcgtaaatgggacatgcaatatgccccaagcatttgccatggctgttcggcaggctgtaacatttcagcaggtgagcgttatggcgagcttcggcgtattgaaaaccgctataatcacgatgtcaatggctactttttatgcgaccgtgggcgttttggttatggctatgttaaccgagcggatagacctacccatccccttaaaaaggtgaatggacaatttgtcaaaaccagtgcagaccttgctgtggatggtgtggcggacttgctaaaaggtaaaaatgtgattggcatagggtcagccagagccagtttggagagtaattttgccctaaaaagactggttggagcaaacaattttagcacaggcgagcgagcgattgtcaaagatgtggtggaattgggtgtggcattattacgccatgaagcggtgcatcaggcatcattggcacagattgagacggcagatggcgtgtttattttaggggaggacattacccaaacggcaagccgtgttgccttgtcagtacgccaagcggctaagaataaagcccgccaaatggcaagtgccctaaaaaccgagcattggcttgctgaacctgttaagcgtatcggacaaagtgcgtacagtccgatttatgtggcgtgtgtggcagatactaagctgtccgacattgccaaagtgtccgctgttgccacaccagatgacatcgccaaactgggctttatggtgggcgatgtcatcaaggcgtatgctgatacgctagatgagattggcaaaagtgagaacgccatttttgccaaagaaaaacagacggatttggtgattgatgatgacatggcgatgcaatttttggcacatcatatcgcttatgatttgattatggcgaaccgtccgcttgttgttacaggcacaagtttgacatcaaaagcaatcgttcaggccgcaggctacattgcccaaaccttgaccgccaagcgtgccaaaatcgctcatgtggagcgtgaatttatagaagtacaaaacgccaaaatccgtgatgaggtcgcccgtcagttcattgaccctgataaaaatgccaaaacggacggtacgcacaccacagagcgagacccaaatgactttgaaaaagagctgtcatctcgcctattaaagacaaatactctgtatgctgataaaacaggcgtgtatgttgccatgccagaggccaatagcgtgggtgtgaatttattgggtgggcaggcgatggaggaggttttggcacaagcatttgaggcggtggtcgtgttagaacatgatttgtcaaatctgaccccaaaccaatttgacaaattaacacaaaaaacactcatcgtactagaccatcagtcttatgaatggcatgataaagctgattttgtgttatcaagtgcatcatttgctgaaagtgatggcacgcttgtctctgctgaggggcgagcagggcggttttttgcaagctatgataaaaaatattatgaaccaaccagcgagctaaaagacagttggcgttggctacatgcacttgacaatgccatgacaaacaagatgggtgagcttatctggcgtcatcttgatgatgtcattgatgagctgattgtagagtatccacaccttgcccaaatcaaagatgtcgccccagagtcagattatcgcattacagggctaaaagttgcccgtgagccacgccgttattcggggcggacggtgttacgctcgcccatttctatccacgaacccatgcaacctaaggacttagacagtggtttgaccttttcaatggagggttatgtgggcgataagaccaatccaagcctcatcccttttgcgtggtcagcaggctggaactccccacaagcatggaataaataccaaaataaagtcggtgagcgattaaaaggtggcgatgtgggcattcgtctgtttgagacactgccaaagacgcaaatggtgtttgggcgtgttgatattgatcatgtgaatgttgctacaagcattttttatggtcgtgcggtggttgtgcctgtacataacctatttacaagctcacgcatgataagccgtagccctgtggtagcaagccaaatcaaacctgccatgtggatgataaaccatgatgatgcagagcgttggatggttaaggtgggcgataaattaaccctaagccagcatggggcagagattaccttgcctgtggaggtggtggattatttggcagacggctgtattggttatcctgatggtgctgtaccgcttatggtcggtataccaacgactgtcaaaaaagcagataaggacacgcctgtctatgtgcctgaccatcaaaagagcatgcagagattggcaagtatcaagcgtgagaatatctttacaccaaaggcagggtttaataacgcaccgtttgcgatgaataaagtgggggca

SEQ ID NO: 26966 - DNA, 234 bp, Moraxella catarrhalis
atgtctcgagtatgtcaagtgactggaaaacgcccacttgtgggtaataatgtatctcacgcacacaacaaaacccgtcgccgttttctgccaaatctacacaaccatcgtttttgggtagaatctgaaaaccgttttgtgcgtcttcgtgtatcttcaaaaggtatgcgtatcattgacaagcatggcattgaaaaagtgcttgccgatttgcgtgcccaaggtcaaaaaatc

SEQ ID NO: 26967 - DNA, 153 bp, Moraxella catarrhalis
atgagagataaaattaaactcgtttctaccgctggtactggttatttttataccaccactaaaaataagcgtaccatgcctggcaaaatggaaatcaaaaaatttgatccaaaaattcgccaacatgtactttttaaagaagcaaaaatcaaa

SEQ ID NO: 26968 - DNA, 654 bp, Moraxella catarrhalis
atgcgtatcattttactcggtccaccaggtgcaggcaaaggcacacaagcccagttgatatcaaaggaatttggcattcctcaaatctcaactggtgatatgttgcgtgcagcaattaaagcaggtactgagcttggtaagcaagcaaaaagtgtcatggatgcaggtcaattggtttctgatgagctgattattaatttggttaaagaacgcttaaaacagccagattgtgacaatggttgtatttttgatggattcccacgcacaatcccacaagccaaagcactggcagatgctggtattgccattgactatgtgattgaaatcagcgcccctgatgatgaaatcgtaagccgtatgtcgggtcgccgtgcacatttggcatcaggtcgtacttatcatgtgatctataatcccccaaaaactgacggtattgatgatgtcacaggcgaggcactggtgcagcgtgatgatgataaagaagaagtggtgcgtgatcgcttatcggtatatcacgcccaaaccgctacattgattagtcattatcaagaagttgccaaatcgggcgaaaatgcccctgaatatcatgactttgatggaacaaaatccatcgatacggttcgtgatgagatttttgctgttttaaaatctgaa

SEQ ID NO: 26969 - DNA, 5016 bp, Moraxella catarrhalis
atgactcatcaggataattcaaaaaactcgtcatcggcagaaaatggggtttctgctggcgttgctgcaccgactaaaactcagcccaaaccaccaaacccacccaaaccacaatggctaatctatttaattcgcttaattgtcggagcaattattgccgctttattgttgttggcggtgttatttgccatgaccaacagcgagtcaggttcaaagtttttaatcgaaaaaattgcgttagaaactggcactaagcttaagtacagcgaaggctcaattcgccatggagtttgggtgcaagatgtcaaaatcgctcaaagtgaagatattaccatcaccattaatcgtgcctatgtacagcttgggtggcgagccttgtttgctcgccaagtgcatttggtcaatcctaagattgataaagtttatgtgacaaacaccaagccatcaacaggcgaaccctttgattatgcgaccatcaacctaccagtgacgcttaagcttgaaaatgccaaagtcaatgaaattatctatgaccaagtggattctgagcctgtcgtactgcatcatatcgcatttgatcacgcatcatgggcagattcaacagttaaaattgataacgccatgctaagctatggtgatgatattaatatcagccatgccactggtggaattgatttaacaggtcattatccgctgtcgttgtcggcagatgtgcatattttggcacttgatgatgcgtattttgatactttgtcggtgaaagcaggcggtagccttaagcgtaccgttggtacactcactggcaaatataatcagcatcatgtgacaggcagctttatcgctcaagggttggataaaaactcaccttttagcgcacgccttgattttgatgaagtacgattgccttatgctgacagtcaaaatattttactaaaaaatggctctatcatcgctgatggcgtcatctcaaatatcgagctacgcattaacactgagttatccgccaaagatattcctgatgggcattatcacggtcgtggaattattcgtggcagtaccatgcaaatcccatatttgcaggctgatactgccaatggtactttggtggcaacgggtgatatgacttgggaagatggctatgagcttgatgccaccattacagcagacggctatcgtatccgtgaagagatgccaagtgattatcatgaatatagagcctatctacctaaggttttgacaggctcacttggggttaagtatacgctattagacaaagccagtcatgatactcggtttgagtttgatctgaatcaaaaagacggtgaacgcattcaagcgacgctggctcaaaatcaacagagtgatcatgagccttggcgtattgatgcgacttgggcaaatctaatccgccatgatattccacaaattggcgagattcatagccgctcaggtcaggcatcagttcgtttggagaacggacatacctatattaacgcctctgctgacattgttaaacttaatgccgtcccaagcggatcatatcatgtgcaagcaaatattgagcaaaatcagcacttgcacttgacagattttaactatcaaggtgtgatgggcgagttgacaggtactggcagggttgattttgcgactgcccaaagaccgcttgagtggcagcttgatgtcactgccaatccagtcaaacccaatgcgtattttcaaacacccaatcaaacaccgtttgagcaaatttcaggcagaataattgcttcagggcgtctgcgtgagatagatggtgtgtcaattcatgacattaaagtggatgacagtgatttaaccgctttattaaatgacggcaagcaagtacatctgatgggtcaaggcgtcagcaagattaggctacaagatggacaaattagccatcttaaggcaaattttgatggcaagcttgctcaagatatcttaccgcaggtagctgactcaagcattggattggatattgaaggtgatttgaatgatttgaccatcacacgggcagtcatgatgaatgactcaggcaaagtatcgcttgcaggtcgtcttggattaaatgacggtattcattggcaaattcaagggcgattagatgaggtggataccgccgcttttgttgatgatgacaatttagttgcgatcatcacaggcgatcttgccacatcaggcagatatcgtgatggcgtgatggatgatatcgcactcacttttgatggtcaagtgattaacaattcaatcccaaatggtcatctaagtattgatgcgacaggttctggcaatcgctttatggtcaatcatctaagacatgatggcacagcaggcacgctgaatgcgacaggctgggtagatattagccaaggtgctgcatggcagctagaggctgatatgaattcattgaatttgggtgcatttatccagtcgctagatactgacttaaacggtacaattcagcttgcaggcaactggcaagagtctcatcaagtcattgatatcagtaatttggatattacaggtagctacaataatcagccacttatcgccacaggcagcttatatgccaagctttccctacctaaagatttggctgggtatatccaaagtatcaagcaagcaagccgcccaccgacttcgtctgatgatttattggcactaaaaaatcgtattgataacaacgcacgccaaacccaaaatatcgttcataaactcaatgctgataatctacaagtccgcattggcaataatcatttggccatatcaggcgatgaaagacagttgaccgccagtgtgaatgtgattgatcttgggcagctgattgataccgcaagtggtgcgattcaaggcggtgtgattgtcgtcaatgatcatcacgctttgccaactttatatattgatgccagtgtctcatcactcagatttgccaatatcaccatccaaaacgcccaagctatcggtaaaattgtcaatctgggtaatagcgaaagccagctgttggttcagggtgatgatattatcgtgatgggacgcaccattaaatctgctcggatggattttagtggcacagaagccgatcatatcttatcaatttcaaccaaaagcggtgatatcgaagcatctatgcatattgatggggcatttaatcgcaacaatatgcgatatcatggtgttttgtctgatggttttgtcaagagtggatttggcaaaatgtcacagcgtcagccgaccgagtttagctatggattggatgataatagcttacaaattgcagcgcattgttggcaatcggcacatatccaaggcgatggcgtgggtgcgatttgtttacaagatacattaagttatacaccgcaatcagggaatgtcaatcttattatccaaaatcttgatactcaagtactattggcggctctacccagtgatattcattggaaatccatgctcaatggtcgcattaaggcaatgtggcaggcaggtcaatcacctttggttgatgctgtactgtattctgatgatggtacaattggcttaactcaagaagagacaggttatattgagatgccatatcagcgtgcgtctgtgattgccaaaagtgttgataatggcttaaaggtaagaaccgatatcttgggtacggcaggtcgtggttatgccgatgtaatcatcaaccccaagcaaacagacaagcccatttctggtgcgcttgttatgaatgatcttaatttggcggtattgcgaccatttttcccgagcattcaaacattgagcggtaaagtcagcttggcaggtggcttaggtggtacattatccaaaccattgttttatggtaatgccaatttaaagaatggtgcattagcgattgttggcgtaccaatgcccatttctgatgttgatgccacggtgaacatacgaggtactaaagcacgcttagacggtagatttatgggtggtgagggtcatggtgtgctttatggtgaaatggattgggcagaagagctgtatgctcgccttggcgtatttggtgaaaatctgaccgtcagccagccaccgcttgtgacggcacaaatcagccctgagctggaagtgattatcagacctttccaaaaatttgtagatgttcaaggcgttgttagtatcccatcagcaaccattcgtccgccagaggcaaccgcagatatcgtaaccgaatccccagatgtatcagtcattgaccgccgtatcacaggtaatattgaccagattttaagtagagcgaaaccttgggatattaatgcaaatatcggtgttgatttgggtaatgagattgaatttcgtggatttggggcggtattaccattggcaggcgcgatacatttgactcagtcaggacaaggtgcaatgcaagctcttggcgtggttcaggtttctaaacgcacaaaaatcgatgtcatcggtcaaaatttggatttaaattatgcccaaattcgttttgatggcgacatgcttaatccacgcttatctattgagggtgaaaaacaaattgaagggcaaacggtgggcgttcgcattcgtggaacggcatcaaatccaaacattaccgtatttaatgatgcaggtttggatgaataccaagcaatgaatgcactggtgacaggacgcattagcgaatcaagtgatttgggtatcacagagcagggttttcgctcacaagtaaccaatcaccttgctgctgctggcttaagcttaggtttgtcaggaaccagagatttaaccaaccaaattggtcacgcatttggttttcagagtttgaccattgatgcctcgggcagctcagatgataccaatgttaatgttacaggctatattacaccagatttgtatttgcgttatggcgtgggtgtgtttaatgctgaatcaaccttatccatgcgttatcaattgacacgccgtgtttatattgaagcaaccagtgccgctgaaaatatggttgatgtgatttatcgttggaagttt

SEQ ID NO: 26970 - DNA, 1368 bp, Moraxella catarrhalis
atgaccaaacattatgactatcttgccattggtggcggttcaggtggtattgcatcgattaatcgtgctgcccaatatggcaaaaaatgtgccattattgaagccaatttgattggtggtacttgtgttaatgttggatgtgtacccaaaaaagtcatgtggtatgctgcccaaatcgccgatgccattcataaatatgcaccagactatggatttaaaggcaatattgatgagtttaattttggtcaattaattcaatcacgccaagcgtatattgagcgtattcaccgatcttatcgtatggtatttgaaagaaatggcgttgaattgattcaaggatttgcccgttttattgataaaaataccgttgaggtggcttatgatgatggcacaaccgagcaaatcagtgctgaccacatcgtcatcgcaacgggtggtcagacagtcagacctgatattatcggtcaggagttgggtattgactcagacggattttttgcactcgatgagatgccaaagcgtgtggctatcattggtgcaggttatgtcgcagttgaggtggcaggtgtcatgaacagtttgggtgctcaaacgcatctgatgattcgtggcaatcagccactgcgttcatttgatgatgatatcgttgaggtgttggttaatgtcatgcaaaatgatggcattcaaatacacacaggcgtcaatacacaacaaattatccaaaatgaggataaaacgctgacggttgaatttaatgatggacaaaacctcaccgttgactgtgtgatttgggcggtaggtcgcaagcctgcaacagatcagcttaatcttgatgtcgttggtattaaaaccaataccaaaggccaaatcatcactgataaatttcaaaataccaatattgaaggcatttatgctgttggggatatcgttgcaaatggtgttgagctgacgcctgtagcggtggcatcaggacgacgattatctgaaagactgtttaacaacaagccagacgagcatttggagttaaacttggtgccgacggtaattttcagccatccaccgattgggactgtgggcttaagtgaagcgtcagcaattgcacaatatggtgctgataatatcaaagtttatacctcgaactttacgccgatgtacagtgcggtaacatcacatcgtgagccatgtcgaatgaagcttgtctgcttaggagaggagcaaaaaatcattggactacacggtattggttttggcatggatgagatgattcaagggtttgtggttgcgatgaaaatgggtgcaactaagcaagattttgatgataccattgccattcatccaacggctgccgaagaatttgtcacgatgcgt

SEQ ID NO: 26971 - DNA, 1053 bp, Moraxella catarrhalis
atggcagatattgcaggtcaatcattagatggcagcgatattgaattattatccaatccagaaatcggtggcattattttatttgcacgcaatgtcaaatcacccgctcaagtgcgaacactgaccgattcaatacgccaaatcaacccccaactactgatcggtgttgaccaagaaggcggaagggttgctcgctttaaagaaggattttcatcgttgcctgccatgggtaaactgggtcaattatacgataaatcgcccaaagatgcgttatctttagcttatgattgtggctatctgatggcctgcgaggttttggcggtcggtgttgattttagctttgcaccagtgcttgatattgatggcaaaagccttgtcattggcgatcgtgcttttcatgcaaatccagatgccatcataacattatcaaggcaattcatggacggtatgaaaaatgctggtatggcaaccacaggcaagcatttcccaggtcatggctctattgcccctgactcgcacattgctgatgccattgatgaacgctcatttgatgagataatggattatgatacccaaacctttatcaaaactttagataaacttgatgcactcatgcctgcccatgtggtttttagccaagttgatgacaaacctgcaggattttctaaaatctggattcaagatattgtccgcaatcagcttggatttgatggcgtgattttttcagatgatttatgcatgcaagcggcacacattgtaggcggtatagatgcgcgtgtggttgctgccattgaagctggctgtgatatggcactggtttgcaatcatcgtcaaaatgcattacttgccattgaaactgccaaaaagctgaaagatacgccccagcatcgcttgataaagatggcgggcaacattccaacatggcaaggtagcctagaagcaacctgtcatcaatttcctttatggcaggcggctaaacatcgtatacaagccgcattttttcaagaaaatcatgaaaccttagccaaagacccaacagtttatagcgtatgt

SEQ ID NO: 26972 - DNA, 1044 bp, Moraxella catarrhalis
atgaaagtattgggattggagacatcttgtgatgaaacagggcttgccatctatgatagtacgatgaatggcggtcgtggcggcgtgctgtctcaggttttgtatagccaaattaatctacatgccacctatggcggtgtcgtgcctgagcttgccagtcgagaccacattcgtaagcttgtgccgttatttaatgagctgttggatcaggcaaatatcaccaaatccgacattgatgcggtggcgtataccaaagggccagggctgattggggcgttgatgacaggggcattatttgggcggacgctggcgtatgggctgggcgtgccagcggttggggtgcatcatatggagggacatctgttagcaccgctattggccagtgatgaccccccaagctttccgtttgtgtgcctgctggtgtcgggcggtcataccatgctggtgcgtgccgatggtgtgggcgtgtatcagatattgggcgagtctatcgatgatgcggtgggtgaatgctttgataaaacggcaaaaatgctcaaactgccctatcctggtggcccaaatatcgaaaaattagccaaaaacggcaacccacacgcctatgagctgccaagacccatgcagcataaagggctggatttttcgttcagtggcatgaaaaccgccattcataatctcatcaaagacacaccaaacgcccaaagcgaccccgccacacgagcagacatcgccgcaagctttgagtatgcggtggtggatactttggtcaaaaaatgcaccaaagcactacagatgacaggcattcgccagctggtggtcgcagggggcgtctctgccaatcagatgctacgccgcaccctgaccgagacgctccgccaaatcgatgcgtcggtgtactatgccccgaccgagctatgcacggataatggtgcgatgatcgcctatgctggcttttgtcggctcagctgtggacagtcggatgacttggcggttcgctgtattccccgatgggatatgacgacgcttggcgtatcggctcataga

SEQ ID NO: 26973 - DNA, 813 bp, Moraxella catarrhalis
atgtcagataaaaacccaactcaaatctcaatgcgtgacttgttagaagcaggtgctcacttcggtcaccaaactcgtttttggaatccaaaaatgagtcagtacatctttggtgctcgtaatcgcattcatattattaaccttgagcataccgttaagcaatttaacgaagcactaactttcgtgaataaacaagcagcggctcgcaacaagattttatttgttggtactaagcgtgcagcgggtgcggtaatccgtgaacaagcacagcgtgcaggcatgccttatgttgaccatcgttggttgggcggtatgctaacaaactggaaaacacttcgccagtcaatcactcgtctaaaagagctagaaaagcaagctgaagatggtacatttgcaaaattgactaagcgtgaagcacttgagcgtacccgccaaatggaaaagctagagcgtgctttgggtggtatcaaagagatgggcggtttgcctgatgcgttgtttgttgttgatgttgaccacgaagccatcgccatcaaagaagccaaaaaccttggtattcctgtgattggtattgtagataccaactcaaacccagacaatgttgactatgtcattgccgccaatgacgatgcaattcgtgccattagcttatatgtaacagcgatggctgatgcgatcattgcaggtaaagagtacgctaaaacccaaggtcatgctgatgcagctgatgctgataagcaagccaaccgtgaaaatgcaaccgcacctgttgaagataaagttgaccaagctggtcaagtggttaacaactac

SEQ ID NO: 26974 - DNA, 876 bp, Moraxella catarrhalis
atgactcaagtttctgcaaagctagtaaaagagctgcgtgaccgtactggtcttggcatgatggagtgcaaaaaagcacttgaagaagcaggcggtgatatcgaacttgcgattgataatctgcgtaaatcaggtcaagcaaaagctgccaaaaaagcaggtaatatcgctgctgatggtgcgattatcattgcccaaggtgaaggtaaagcgttgctactagaagtaaactgccaaactgatttcgttgctaaagatgaaaacttcactgcatttgccaataaagttgccaagcttgcacttgaaaacaacaccacagatgtggcagcgattgcccagctaccatacggtgatggctcaacagttgaagaagcgcgtgtggcattggttcaaaaaatcggtgagaatattcaagttcgccgtgctgaagtgattgaaggtgctaaccttgctgcttatcgccacggtctgcgtattggtgttgttgtctcaattgaaggcggttctgaagaagtgggtaaagcggttgccatgcaagtggcagcattcaatccgttggctgtgaatgaagctgatgtaccagtagatatcctagcccgtgaaaaagacattatcgaagctaaagccaaagaatctggcaagccagaggcagtgattgagaagatgatcactggtggtctacaaaagtatctcaatgaagtgactttggttaaccaaccttatgtcatggataacgataaaaaagttggtgatgttctaaaatcagaaaatgccactgtggttagcttcaagcgcctagaagttggtgaaggcattgagaaaaagcaagaggacttcgctgctgaggttgctgctgctcaagccgctgccaaagct

SEQ ID NO: 26975 - DNA, 582 bp, Moraxella catarrhalis
atgtcatttcatcctgagcggtttattgaggttgccttaaaaaaccatgtgttgtgttttggtgagtttaccctaaagtcagggcgtaaaagtccttatttctttaatgcaggtttactatcaacaggtgaattattgagcgtgcttgcagaaggttatgcagatacacttgccaaacacgccaatcaagatgatctggtcatctttggtgccgcttataagggcattccttttgtggcagcgaccgctcaagtgttgtggcgtgagcatcagattaatgctgagtggggttataatcgcaaagaagctaaaaatcatggtgaaggcggtatgctggttggtgctgatttaaacggtaaatctgtttgggtggtcgacgatgtcatgaccgcaggtaccgccatgcgtgaagttattactttgctgggtaaagctggggcaagcgttgcaggtattattgttgctcttgatcgtaaagaaaaaggtcaaagtgatcgatcagccattcaagagcttgctgagagcctgcaagtgccagtgcttgctttggtgacgatggatgatattattgattatgttgcc

SEQ ID NO: 26976 - DNA, 2925 bp, Moraxella catarrhalis
atgagcatagacaatttatcaaccaattataatccagcaaatattgaacaaaaatggtacaagatttgggaacaacaaggctattttaaaccccaaccaaaccccgccatgagcgacaaacaaaacgctttctctattgccttgccgccgcccaatgtcacaggttcgctccatatggggcatggctttaacaacaccatcatggacacattaacccgctatcatcgcatgatgggtcataacacgctttggcagcccggtaccgaccacgcaggcatcgccacacagatggtggtggagcgtcagcttgggttacaaggcatcagccgtcatgatttggggcgggagaagttcattgacaagatttgggcgtggaaagagcagtcaggtaacaccatcactcgccaaattcgccgtttggggtcgtccgtggactggtctcgtgaacgctttaccatggacgacggtctgtcgcaggcggtcaaagaggtgtttgtgcggctttatgatgagggcttgatttatcgtggcaaacgcttggtaaactgggacccaaaactacacaccgccctttctgacttagaagtagaaagcgtagaagagcaaggcagtttgtggcattttagatatcattttgccgaccaaagtttgacaacccaagacggtaaaaattatctggtggtggcaaccacacgccctgaaaccctgcttggcgacagtgcggtggcggtacaccctgatgatgagcgttatgcccatttgattggtaaaaccatcgtcctgcccattagcgggcgtgaagtgcctatcgtggcggacgattatgtagaaaaagattttggtacagggtgcgtcaaaatcacgccagcccatgactttaacgaccatgagcttggtaaacgccacgaattaccgctcattaatatttttgatgaagatgcgtgcataaaagctgaatttgacttgattgccaaagtgggagagccgatttctaaccacatcaccgcccctgccgactatgcagggcttgagcgttttgccgctcgtaaaaagctcatagaacaagcccaaaacgaaaactggcttgaaaaaattgaaccttataccctaaaagccccccgtggcgaccgctccggtacagtcattgaaccacttttgaccgaccaatggtatgtggcgattgaaacccttgccaaaccagcgattgaagcggtgcaaaatggcgacattcaattcgtgccacaacaatacaccaacatgtacatggcatggatgcgtgatatccaagactggtgcatcagccgtcagctgtggtgggggcatcgtatccctgcatggtatgatgacaatggcaatgtgtatgtggggcgtgatgaaagcgaagtgcgtgccaaatatcacctaggcgatatcccccttcgccaagatgatgatgtgctagatacttggtttagctcggctctgtggacatttagcacgcttgactggacaggtcagaccagctttgatgattatggcgatgccctacaaacctttcacccaacaagcgtactggtaacaggatttgacatcattttcttttgggttgctcgcatgattatgatgaccatgcactttatcaaagacaaagatagcaagccccaagtcccctttaagaccgtttatgtgcatggtctggtcagagacagccaagggcaaaaaatgagcaaatccaaaggcaatgtgcttgaccccattgacttaattgatggcattgatttggaaaatctggtcaacaaacgcacccaagggttgatgaacccaaaagaggcggacaacatcgccaaacaaacccgccaagaattccctgacggtatcccagcctttggcacagatgccctgcgatttacctacgcatcacttgccagcacagggcgagacattaactttgacttaaaacgcattgaaggatatcgtaatttttgtaataaaatttggaatgccactcgctttgtactcatgaactgcattgacaaagatggccgtccccaaaacattgataaatccgccaaccctaagctttggcagttgcctgaacactggatcatcagccgcctaaacgccaccatcaatgacattcacgagcatataagccagtaccgttttgacttgatgagccaagccatttatgaatttatttggaatgaatactgcgattggtatgtggagtttgccaaatccagcttaaacgcatcaggacaagacagcacagtcagcgatgagcgaaaagctcaaatccgttatgtgctactctttgtgcttgaaatggcaatgaaaatgacccaccccatcatgccctatctcaccgaagagatttggcaaaccatcacaccactgctgggcaaaacaggtaaaagcatcatgctaagcacctaccctaaatatgatgacagcaaaatcaacgaacaagccgaaagcgacatggcatggctacaaagccttatcggtgcggtgcgaaacattcgtggcgagatgaaactgggcaatgccgtgcgtctgcctgtgctaattcaaggggtaagcgatgaacaaaaagcaagccttgtacgcattgacaatcaatttaaaacccttgccaaagtagacagcctaacgattgtcaaaactggcgaagaggtgccattatcatcatctggcatggttggacaaatgaaagtgcttgtccccatgaaaggcttgattgacccgaccgctgaactaaaccgcctaaataaagtgcgtgataaactgcaaacccaagcagatgccattaacaaaaagctgtccaatgacaactttatcgccaaagcccccgctcaggtggtagaagcagaacgagccaaactctctgagttacaagggcagttagcagaagtggagaagcaggtgggggcgttggggaatttg

SEQ ID NO: 26977 - DNA, 1074 bp, Moraxella catarrhalis
atgcgacattttttatttgatatcatttttacttttgtctgcttggtgattgcagcatggtgggggtatagccatggtggcatctctgagatgtttttggcactgggcattacagcaattttggcaatcatggagatttcattatcatttgataatgccgtggtgaatgcctctattttaaagggttggaatgatttttggaaaaagatttttttgaccgtaggtattttgatcgcagtttttgggatgcgattgatatttccaatcgccattgtcgcagtaactgccaatttgggtatgggtgaggtgattcatctggcactgaataatccagtccagtatgccgagcatcttaatgcacatcatgccgaaatctcagcatttggaggaatgtttttattgctggtgttcttaaattttatgtttggcgataaggatgtgcattggtttaagtggctagagtctcgcttggtcaagtttagtaaagtagacgccatgagtgtgtttgttgcgttggttgttttgatgatctctatgagctgggtagaagaagcaaagcaaggcgtcgtcatggtcgcaggcatttgggggattttggtctatttgggggtgagtgtactatcggcactcctagagggtgatggtgacgataaggcggcggtatatgatgcaaaaggccgtgagatcacaaataccgctggcgtatcatccacaatcctaaagggtggtattgcaggctttttatatcttgaggtgcttgatgcgtcttttagttttgatggtgtcattggtgcctttgctatcactaatgatgtgatcgtcattatgattggcttggctatcggtgcgatgtttgttcgttctatgacgatttatttggtaaacaaagggactttaagcgattttatttatttggaacatggtgcacattatgccatcggggcgcttgccatcattatgttgctatcgacacggtttcatgtgcctgagattatcactggattgattggcgttgcatttattgtgttgtcagtatttaattcgattcaatacaataaaagacatgccaacagt

SEQ ID NO: 26978 - DNA, 1239 bp, Moraxella catarrhalis
gtgaaattcatgacagctcaaatagcaaaaaaagccattttagccctcgctgacggtacaatttttcacggcatcagcattggtgcaatgggcagtagcgttggcgaagtggtatttaacaccgccatgacaggctatcaagaaatcctaaccgacccaagttacgccaaacagctggttaccttaacctacccacacattggcaacacaggcaccaacagcgaagatggcgagtctggcagtgaacatcgcatttgggcatcagggctgattatccgtgatgccaccatcatcagttcaagttttcgcaacgatgaatcactcaccgactttttacaacgccatgacaccgttgccatcgccgaaattgacacccgaaagctgacccgaattttgcgtgataaaggggctcagcacggttgtatttatgccataaacagcgacacggacatcacagctgatgatgaaaacaaagcggtgcaacttgccaaagagtttgcaggcttgacggggcttgatttggcaaaagagtgctgccacccacaaggatttgaatggacacaaggcacttgggaacttgctgacaaccctgccaccaccgccaaatatggcaaaacagacagcccaacaggcgggtattttaaacagcttggcaaacacattagtaaaaaatttcatgtggttgcctatgattttggcacaaaaaccaacattctacgcatgctggtggataggggttgtcatgtgacggttgtccctgcccaaacaccaattagcgaggttttggcaaaaaaccctgatggtatttttctctccaacggccctgctgaccctgccgcctgcacctatgccattgacaatatcaagcacatcattaagcaaacggagattccaacttttggtatctgcttggggcatcaattattgggcctggccagtggggcaaaaaccatcaaaatgaaatcggggcatcatggggcaaaccaccctgtgcaaaatttggcagatggtacggtgatgatcacatcacaaaaccatggctttgccattgatgaagcgaccttacctgccaatgttaaagccacgcatcgctcactgtttgatggcacaaatcaaggcattgagttgaccgataaacctgcatttggctttcaaggacacccagaagccagccccggtccacatgattgttcggtgttgtttgatagattcattatggaaatgcaaaaggcgaaagtg

SEQ ID NO: 26979 - DNA, 3234 bp, Moraxella catarrhalis
atgccaaagcgtaccgacattaaatccattcttatcattggggcaggtcccattgtcatcgggcaagcctgtgaatttgactattcaggcgcccaagcctgcaaagccttaaaagaagagggctatcgggtgattttggtaaactcaaatcctgccaccatcatgactgacccgtccatggctgatgccacttatattgaaccgattacctggcagacggtagagcaaatcattgccaaagagcgtcctgatgccattttgccaaccatgggtggacaaacggcacttaactgtgcgcttgaccttgacaaacatggcgtgcttgccaaatatggctgtgagctgattggggcgaccaaagaagccattgaaaaagccgaagaccgtgaactgtttgataaagccatgaaaaaaatcggtctggaatgccccaaagcagaaattgcacagagcatggatgatgcttttgccattcaagctaaggttggttttccgtgcattatccgcccatcattcaccatggggggttctgggggtggcattgcttataaccgtgaggagtttattgagatttgtgagcgtgggtttgacttatcacccacccaccagctgctcattgatgagagtttaatcggttggaaagagtatgaaatggaggtggtgcgtgataaaaaagacaactgcatcatcgtctgttccattgaaaactttgaccccatgggtgtacatacaggcgattccatcaccgtcgcccctgcccaaaccttaaccgacaaagaataccaaatcatgcgtaatgcgtccatcgctgtgttgcgtgagattggtgtggagacaggtggttcaaatgtccaattcggcatcaatccaaaaacagggcgtatggtggtgattgagatgaacccacgagtcagccgttcatcagcattggcatctaaggcgacaggctttcccattgccaaaatcgctgccaaacttgccgtcggctataccctagatgagctaaaaaatgacatcacagggggcaaaactccagcgagttttgagcctgccattgactatgtggttaccaaaatgccacgctttaactttgaaaaattcccccaagctgagagcgtgctaaccactcaaatgaaatcggttggcgaggtgatggcaatcgggcgtaattttcaagaatccatgcaaaaggcactgcgtggtctggaaataggggtgacaggatttgatgagcaattagactttgaacaaaatgatgacagcatcatcagcaccttaaaactcaaactcaaaacccccaccccagaacgcattttttatatcgctgatgcgttgcgttttggcttatcggttgatgatgtttttgctgacaccaacattgacccatggtttttggtgcaaattgaggacattgttcatacagaaaatcagctaaaaacccttggcatgggcgacttaacccccaatttgctacgccgtcttaaacgaaaaggactctctgatgcacgcattgccaaattgatgggcgtgtctgaaaaacaatttcgcaaaacccgttggaacatgggcatttatcctgtgtataaacgggtggatacttgtgccgctgaatttgaaacatcaaccgcttatatgtactcaacatatgatgaagagtgcgaggccaacccatcaaataaagacaaaatcatggtcatcggtggcggcccgaaccgtatcggacaaggcattgagtttgattactgctgcgtccacgccgcccttgccatgcgtgaagatggctatgaaaccatcatggtgaactgtaaccctgagaccgtttcaaccgactatgacacatcagaccgtttgtattttgagccaatcaccctagaagatgtgcttgaaatcgtacgcaccgaacagcccaagggtgtgattgtgcaatatggcggacaaacgccactaaaacttgcccgtagcctagaacaagcaggcgttcccatcattggcacaagtcctgatgccattgaccgagccgaagaccgtgaacgctttttgcagatgattaacaagctaaacctaagacagcccaataacagcattgtcaaatcatcagaagaaggcattcgtgaggcggcgaaagtgggctaccccttagttgtacgcccatcatatgttttgggtggtcgtgccatggaaattgtctataacgaagatgaacttaaacgctacttgcgtgatgcggtgcaagcgtctcatgaagcgcctgtcctgcttgaccatttcttagatgatgccattgaggtggatgtggattgcgtatcggacggcaaagaggtggtgattggtggcatcatgcagcacattgaacaagcaggcgtgcactcgggcgattctgcttgctccattccgccttactcattaagtgatgacattcaagatgacatgcgtcgccaaaccgtcgccatggcaaaagagcttggtgtggtcggcttgatgaatgtacaatttgccatcaaaggcgaaacagtctatgtcttagaagtcaatccaagagcgtctcgtaccgtgccatttgtctccaaatgtatcggcgtgtctttggcaaaagtcgccgctcgctgtatggcaggacagactttggcagagcaaaacttcacccaagagattgtaccaagtcattattcagtcaaagaagcggtatttccttttgccaaatttccaggcgttgaccccattcttggccctgagatgaaatctacaggtgaggtgatgggtgtggggcagacctttggtgaggcgtattataaggcaacactgggcagtggtgatagattgacagggctgccacaagagggggagaccaaaacggtctttatctcggtgcgtgatagcgacaaagcgggcgtggtagatgtggcaaaacgcttggcaggctttggttttaacatcgttgccacaggcggtacacatgatatgctggtaggtgctggcgtagcgtgtaagcgtgttaataaagtcagtgaaggtcgccctcacatcgtggatatgatgaaaaatggccaaattcaccttgccattaataccacagagggcaagcaggcattaaaagactcgttcccaattcgccgtgaagccttgcaaaataaaatactggttgcaaatacactcaacgcagggcgtgcggtgtgtgaagcctatgagacgactttgccgtttgatgtttataagctgcaagatttgtatgcttca

SEQ ID NO: 26980 - DNA, 2877 bp, Moraxella catarrhalis
atgactgccatgacgaataccgcttacccaaatattaacagtatcccaagtcttgccaaactatccacagaccaagttgataccactcgtccgcctgtgattttggtagacggttcttattatttatttcgctgctttcatggtctaccaccgctatcaaattctcaaggattgccaaccaatgccatccgtggcgtactaaatgcactcaacaagctgattaaaaaatatcatcccacccatatggcagttgcatttgataccaaagcgcctacttttcgccacaatttgtccgaagcctataaagcacatcgtcctccgatggacgaagcattacgcatccaaattccttatattcatgagatgattgaaaaactgggcattgcactcattaagattgatggttttgaagcggatgatatcatcggcacattggcctatcaagcctgccaacaaggccatcgggtcatcatctccacaggcgataaagacatggctcagctggtgaatgattgtgtcatgcttgaagacagttttactggcaagttgaccgataacgcaggtgtgatagaaaaatttggtgtgaccagtgaacaaattgccgattatctggccttgatgggtgatgcgtctgatggtatttctggtattcctaaagttggtcaaaaaacagcggccaaattactcaatgaataccaaaatatcgatggcatcttagccaatcttgccaatatcaaaggggcagttggtaaaagcattgccgacaatcaagacagtattccactcaatcgcattttagcgaccatcgttaccaacctaaaacttgccataagctttgatgatattacgcttgaccacagccaagaaacaacaatcaagcgtgcacctgccttgtatgcactctttgaagaattagaatttaaaaaagaaatggctcaaaccgccgagctgcttaatttgccccatcagccaaccgataaagccgtatctattgatatccatgacaacaccctttcaagccaaaccccaatactacccatcaaagatatctcttatcacaccattacaacccaacaggattttaccaaactgttggataaattaaatcatacgccctactttgccattgacaccgaaaccactgatatcaattggcaacacgccaaactggttggcatttcagtgagcaccgctgattatgaaggctactacattcctgtcggccatacagcagattttgatgttttacttgataatcagttgccgattgataccgtattatcagcatttaaacccattttagaaaatccaaatatcggtaaaatcgggcaacacttaaagtatgatgcccatatttttaaaaagtatggcatcaacatatctccttggcaaatggataccatgcttgctagctatgtcatcaatgctgctgcaactcgtcatggtatggatgcactggctaagcattatttgggcgtacagaccacaacttttgaagatgttgcaggcaaaggtgccaaacagcttagttttgataaggtcgccatggatgcagcaagccagtatgcatgcgaagatgcagatattacttttcggctatttaatagatttaatcaacacatcaatcaagataaaacggctgcccaactgttataccatctagaaatgcccaccgcccaaattctaacccaaatggagcatgatggtattttaattgacactgattttttggggcaattatcagatgaatttgataaaaaaattatggcactacaaattgaggctgaacgcattgcagatgagccgtttaatttggcaagcccaaaacagcttggtgagattttatttgacaaactgggcattgcaggcggcaaaaaaaccaaaacagggcaatacgccacttcagaagctgtattatcaaaaattgaacatccgctgattgatgtggtacttgaacatcgcagcttatcaaaactcaaaagcacctataccgatacgctggcaaacgccgctgatgagcaagggcgagtccacaccagttaccatcaagcgcttaccagcacaggtcgcctgtcatcatccgatccaaatctacaaaatatccccattcgcacagatacggggcgactgattcgtgaggcatttatcgcaccaaaaggtcgtatgattttggcagcagattattcacaaattgagcttaggctgatggctcattttagcggtgatgaaagcttgatccgtgcttttaatcataatttagatattcatacggcaaccgccgctgagattatgggcaaagatatcagcgaagttacaccaagtgagcgacgcgctgctaaggcggttaattttgggctattatatggcatgagtgcttttgggcttgccaaacagattgaggttgatcgagccgttgcccaagattatatcaagcggtattttgcacgatatcccgccattttagagtatatggagcgtaccaagacgatggcaaaacagttaggctatgtgcagaccattttaggtcgtaaactctactcacctgatatccaaagtagcaatcgtatgattaaagatgctgccgagcgtgcagccattaatgcaccattacaaggctcagctgctgagattatcaaacttgccatgattgcggtggatgaagtattacccaaagatgatgccaagttgttactacaagtgcatgatgagctggtttttgaggttgatactgacaaggcacatgatatcggcaacctgatcaaaacagcgatgcaaaatgccctaaccgatacagcgaaaaagctgggctgggcggttgattttgctgtcccactcgtggttgaaataggtatcggtgaaaactgggagcaggcacac

SEQ ID NO: 26981 - DNA, 1212 bp, Moraxella catarrhalis
atgcgttttattgatgaagctgtaatcagcgtcaaagcaggtgatggcggtaacgggattgttagctttcgccgtgaaaaatttgttcccaaaggcggaccagatggtggcgatggtggcaaaggcggtgatgtttatgccattgctgatgacaataccaacaccttagtggactatcgctatactcgtaagtttgaagcacaccgtggtgaaaatggtggcagcaaaaaccgttcaggtaagggtgctgatgatatctatttggcagtaccgatagggacaacgattattgatactgatttggatgtggtgattggagatttaaccgaaaaaggtcaaaaaatcttgattgccaaaggtggtgatggtggttttggtaatacacgctttaaatcttctaccaatcaagcacctcgtaaagcaacacctggatttgctggtgagacaagaaatatcaagcttgagcttaaagttgtggccgatgttggtttgattggtttgccaaatgcaggtaaatcgacctttattcgtcaggtctcagctgccagacctaaagtggctgattatccgtttacaacacttgtaccaaacttaggtgtggtagatgttggctcgcatcaatcttttgttatggcggatatcccaggtttgattgagggtgcatctgatggtgcagggcttggcattcgatttttaaagcatgtggcacgcacgcgtcgtttgttacatattgttgatgttcaaccaattgatgaatcagatcctgttgctaatgcacagattatcttaaatgaattgaataagttttctcaagagttatcacagctgccacaaattttggtattaaataaaattgaccaaattcccaacgagcagcgtgatgccgtttgtcaagatatcatcacacgattgggctggacaggcgaagtattttacacctcaacgctgactggcgaaggggttgaagcggtcaaacatcatttgatgcaggtcattgaagatgagcgtgagcgtgagcttgaagatccaatgtttgctgaagcacaggcggctcgctttgcacgccttgaagaagaagtgcgtcataataccgaaatccaaaaagaagcttatcgtgcgatgcgtaaagcacagcgtgagggcggtgatggtgatgacgatgataattggaatgatgatgattatgatgttgcagttgaatatgcaccttat

SEQ ID NO: 26982 - DNA, 2322 bp, Moraxella catarrhalis
ttgattgtcttgtttgttatgatggcggcatttgtgctgtacgccatgcatctaaataccgccgttgtcggtaaatttgaaaatcgcaaatgggatattcctgccaccttatactcacgccctttggtactgcatcaaggtgccgctttatccgccaaagaccttgaatcatggctaaaactgctcagatatagccatgatgacaccagtcaaacgggtcgctaccaaaaaaatggccaagtctacaccatttatacacgaggttttcattatggtgatgccgacaaagacccaaagcagctcatcgaagttcattttgatcgcaataccatcaaaagcctaaaaagctccgccccaaataacagcggtatactacgcctagaacccatcaaaatcggtagcatctatcctgataatctagaagaccgcctactcatcacacaagaacaaatcccaaaaccgctcgttgatgccttgattgccaccgaagaccgcaatttttatcagcatcatggcatatcaatgcgtggggttgctcgtgcgttattcaccaatctgacaggcggacaggtgcaacaaggcggttcaaccatcacccaacaattgattaaaaacttttatctggattctgaacgcaccttaaaacgcaaaatcaatgaagctttgatggcggttttattagaaacccattatagcaaagatgaaattttattggcttatatgaatgagattaatttgggtcaaaatggcaagcagtcggtgaatggctttgggattgctgcccagttttattttgataagccacttggtgagctgtctttggagcagtatgcgttattggtgggtttggcaaaagggcctagccactacaatcctcgcaaaaaccccgagcgagcattacaacgccgaaataccgtattaaatagcatgctggcaacaggtaaaattgatacggccacgcaccaagatgccatcaatcgcccactgggtgtggtaaaaacgcctgccatcgctcgcttgcagttccctgatttttttgatgccgtgcaacgagagctaaaaacccactaccgctcagaagacctgaaaaatcgtggtctgcgtatcatctcaacactagacccactcgcccagcaagccgccgataccgccatgacaaatcagcttggcaaactaagaaaaaaaggcggtcgcactcaaaagctacaaggtgcgttggtcagtgctcaccctgccacaggggagctggttgctttggtggggtcaggtagcgattttactgggtttaatcgtgccatcgatgccaaacggcaggttggttctttattaaagcctgtgatttatctgactgcctttcaatcaggtcaatacaatctcaccacacccgtcaatgacacccaaaccagctataccgtcaatggtcgctcatggacacccaaaaattatggcggtcaatctcatggcagcgtaccactactgaccgcacttgccaagtcatacaaccaagcagcggttaatgtcggtatgcagcttggtttggatgcgtttaaggcacagctgggcaatttatccatcaccaccgatgttccgccctatccatctgccatgctgggtgcgattgatttatcgcccatgcagatgctgggcatgtatcagatttttgccaatggcggtgcttatacgcccattcataccatccgtaccgtgatcgatgataacgggcgtgtactacaacgatcccaaccacgccatcagtttcgtgcaccaccgcaagcggtttatctgctgaaccgtggacttcaagaggtcatcaaatcaggcactgccaaagctgccgatagtatcaataaccatctgggattggcaggtaaaacaggcacaaccaacgataatcgtgatgcgtggtttgcagggtatagcggtaactatgtcagcgtggtttgggtgggccgtgatgataatcagcccatcggcttaacagggggttctggtgcattgcccatttggatggattatatgaaacgcctgaatttaacggcggtcaatctgcccctacctactggcgtgacttggcagtggatggatggcagattgggattgccgaccatggagagctgccctgatgccagatggctgcctgtgattgatttataccgcccaagccaaatgagtccttgtgccagtgccattttataccaagagcagatctatcggcagatgcttgaatatggctcacaaggcatcgcagacacagaagatgtgtatatcgaagatgcacccatttatgatgagcctgccgaagatggcgataatccttggtgg

SEQ ID NO: 26983 - DNA, 1419 bp, Moraxella catarrhalis
atgaaattacacacatccgccctagtgctggctatgtctggtatcatgctatcacaaacggcattttccaatgattctgccaatcttagcaacagtgaatttcagcagtgtcttagcactttaaaaaacagtagtacctttcggagtgtctctggggtgacatttgaaaaatatcgcccatcgcagcctgatcccagcgtcattcgctcgctcaattatcagcctgaatttaaaaaagatgtttgggattatttggcgtctttggtagacagtgagcgtgtccaagacggtatccgtgccaagcatgagcaagctgatgtgctacgccgcattgagagccgctatggcgtcaagcctgagcatgtactgggcgtctggggcgttgagagtaattttggtcagacgctgggtaaaaaaaatttatttgatagcctagcgactttgtcttgttttgatcgtcgccaaagttattttcgtggtgagtatgccaatgcactaaaaatcgtccaaaatggtgatattcgccctgaggatatgacgggttcttgggcgggagcatttggtcagacacagtttatgccgagtacctttttagagcttgcggtggattttgatggtgatgggcgtaaagatttggtcaactcaaaagccgatgcattggcaagcactgccaatttcttggtgaagcgaggctatcgcctaggcgaaccttggggctatgaagtgcgtcttaatggctataatggctcaagtggtcgccgcaataagcaatcaatcaatcactggcgtgctcaaggcatcaccttgccaaatggacaacctatcccaaataatatggcatcagcaggtttactactgcctgctggtaggcagggtcctgcattcttagttggtaagaattttgatactttttattcttataatgcctcagaaagctatgcgttagccatcgctcagctgtctgaccttgtgcgtgatgaaaataccaataccaactttgccacaccttggccgacagatgaccctggtatcggtcgccgtgaatccaaagaaatccagcaagcactcatcaatgctggctatgacatcggtgcggtcgatggcatcatcggtgataatacacgccaagcaattatggattatcagcgaaaagttggtgttatgcccgatggtcgagcaggtcaaaagtttcaccgattaattactggtcgcactgcttccatccaatctgcccaaacaccagcccagtccataaatacgcccacaacccagtatcactcagtacagccaactgtcagcacgcaagccaatgcaacaagggcggtaattgtcaagccagcaaatactccgcctaccacaggaacgacctatcggcgtgtcatcaatgccgatggcagctcatcttggatattagttaaa

SEQ ID NO: 26984 - DNA, 852 bp, Moraxella catarrhalis
atggctttgtgtatgccagaaaaaaatttattaaaaagttcaatcaatcacaacttaataaaaaataagatctatatcattatcgaagggacggacacgcctgccggtaagttatttgatgtgctaatcttagtggcaattattaccagtgttttggtggttatgctcgatagcgtattatttttacgcttgcaatatgggcgtttatttttcgttgctgaatggttttttacgattttatttaccatagaatatgcattgcgtctttattctgcaccaaatcttcgtcgatatgtgaccagtttttatggggcagttgatttattggcactattgccaacatatttgagcttattttttgcaggtacgcattatttgctggttgttcgaattcttagaattcttagaatctttcgtgtctttcgactcaaatcttatatgcagcaagctggatttttggcggctgcttttaaaaccagccagcataaaattacggtattttttctatcgctacttctgcttgtaaccatttttggctcagttttgtatgttgttgaaggtcctgaaaatggctttacaagtattcctttatcaatctactgggcggttgtgacattgacaacggtaggttatggcgatatttccccaaaaacaccactagggcaggcgatcgcaagtatggtgatgattacaggttatgccatcatcgccgtaccgacagggatttttactgctgagctaactcggactatgcggccgcaacttcagccaatttcttgcccaaattgtggtaaatttgggcatgcaactaatgctaaattttgtgaccgctgtggtcatgacttacatgta

SEQ ID NO: 26985 - DNA, 477 bp, Moraxella catarrhalis
atgcaagttattctattacagcgtgtcgttaatcttggtaagcttggcgagactgttgatgtaaaagcaggttacggtcgtaactatctcatcccacaaggcaaagcactgcctgcaactgaagccaatttggctaagtttgaagctcgccgtgctgaacttgaagctttggaagccgaagagttattagctgctaatgcacgtgccgaagccttagctgatgtgaatgtcatcatgcgtgccaagtctggtgatgaaggtaaactatttggctctatcggtgctcgtgatatcgctgatgcattaactaaatctggcttagaagttgaccgttctgaggttaaaatgccagaaggcgctttccgtcaaattggtgaatataaagttacgatccagctgcaccatgatattagcaccgatattttagtgaccattttgtcggaagatgcaccaactgccgatgaagatgatagcgaa

SEQ ID NO: 26986 - DNA, 225 bp, Moraxella catarrhalis
atggctcgtttctatcgtcgtcgtaaattctgccgtttcaccgcagaaggcattacccacattgattataaagatgttgaacttttaaaacaatacatcagcgaaaatggtaaaatcactccaagccgtatcacgggtacttctactaagtatcaacgccagcttgcagttgccattaaacaagctcgttatttggctctattgccatataccgacaaccacaag

SEQ ID NO: 26987 - DNA, 399 bp, Moraxella catarrhalis
atgagacattatgaagtggtgctactggtacatccagaccaaagcaaccaggttgccgacatggtaactaagtaccgttctatcgtagaagataatggcggtaataaccatcgcctagaagattggggtcgccgtcaattggcttatccaatcaataaaatccacaaagcacactatgttttgctaaacattgagtgtaacgatgagacattggcacagttagaagagctgttcaaatacaacgatgccatcattcgcagtcttatcattcgccgtgatgaagccattaccgaacaatctcctttggcaaaagaagccgaagacaaacgcactcgtaaagccaaccgccgtaacgatgttcgcactcaggaagctgagagtgataacaccgcaagcgaa

SEQ ID NO: 26988 - DNA, 3942 bp, Moraxella catarrhalis
atgatgagcaccatcgcaggcttggagtttttgacagattttcaagcacaaaaattagccgaccaactcaaacaaaaagctgggctaaatatttataccttgagcagtcagcaagtttatgtgtttgatacaccgctgtcagaatctgaccatcaaaaggcgattgatttattaaaccaaggtcaaacgcccagcctaaagaccgctgatgatacacaaattcaagtggtggttgcacctcgttttgggacaatcagcccttgggcatctaaagcaacagatatttttaataactgtggtgtcactattgggcgagttgagcgtgtcattgtgtatacacttacaggcgagaatttgcccaagcgtttgcctgccatcgctgaatcaattttacatgaccgtatgacccaaagccttgtctatgagctatcggatgtgtcggttttgtttgttgatggcgaacctgcccacttgagcgtggttgatattttgggcatgggtaaagatgctttagtacaagcaaatgctgaatatggttttgcattatccgaccaagatatgacatatttggtggaaaatttcaccaagttgggtcgtaacccaacagatgttgagttgatgatgtttgctcaagccaattcagaacattgccgtcataaaatctttaatgctgaatggacggtagatggcgaggtgcagcctaagtctttatttaagatgattcgtaacacgcatgaacaaaatccagagggtatcttatcggcttataaagataatgccgctgtcatggagggttttgtggcagagcgtttttatcccaccaaaacgaccgaaggcaatgcccaatatgggtttcatcaagagcaaattgacatcttgatgaaggttgaaacccataatcacccaaccgccattgccccatttgcaggtgcagcaacgggtgcaggtggtgagattcgtgatgagggtgcaacaggtcgtggcggtaagcctaaagcaggtttgacaggatttagtgtttcgcatttacatctaccgacgatgcctgaaaaatgggaaacaacagggcaggtatcggccgtcagttatggcaagccttctcgtatggcatcggcactggatattatgattgaagggccgttgggtggtgcagcatttgccaatgagttcggtcgccctaatttaaatggttattttcgtacctttcagctagatatctctgatcatcaagatggtagccaaatgcgtggttatcacaagcctattatgattgcaggtggctatggtaacatcaagcgtgacttggttcaaaaaaatgccatccaagagggggatttgttgattgtattgggtggacctgccatgcagattggtttgggtggcggtgctgccagttcggttgatagtggtaaacttgatgagggcttagattttgcttctgtacagcgtgataatgctgagatggaacgccgttgtcaagaggtgattgatacctgctgggcgatgaccaaagatggtatggatgccaacccaatcatctcaatccatgatgtcggtgctggcggattgtccaacgccatgccagagctggtcgatgatcatgaacttggggcacatctgaatttacgcaaagtcccttcgcttgaggcaggtatgtcacccatggcaatttggtcaaatgaagcacaagagcgttatgtgcttgccattcgccctgaaagtgaggcactgtttgacagcatttgtagccgtgagcgttgcccttatgccattttaggcacagcaaccacagtgcgtcaactgatcgttgatgatagcttgcttccagagcgtcctgtggatatgccgatgcaggttttattgggcggcacccccaaaatgaagcgaagctttaatcgtaccgaattcgcccttaagcccttagatacagcttcggtgaatatcaaagacagcattaaagatgtgttgcgtcatcccacagttgccagcaagtcttttttaatctctatcggcgaccgctcgattacaggtatggttacccaagatcaatatgttggtcgttatcaggtgcctgtcgcagattgtgcggttactagtaccgccttaaatgctatcacaggtgaggccatggcaatgggtgagcgtgcacctgttgcactcatcaacccagcagcttctgcacgcttagcagtcgctgaagcggtgacgaatattgcctcagcccgcattgataaaatcagcgacattactttgtctgccaactggatggccgcttgtggcgatgaaaaagaagatgcggcattatttgatgcggttcatgctgtgggcgaagagctatgcccagcacttggtattgccattccagtgggcaaagacagcttatcgatgaaagcagtttggagcgaagatggtgttgaaaaatcagttacctcaccgatgagtctgattattacagcctttgcccctgttcaagatgtgtcaggtacactcaccgctgccttaaataataccgattcggcattgtatcgcattgacttgtcatcaggtaaatttcgtttgggtggctcaattttggcgcaaacattaaatcagctgggctgtgattgtccagatttggagcgaccagaggatttggccaatttctttgcttttattcaggcggcagcaaaagcaggcgtcattcaagcttatcatgacattggtgatggtggtttaattgcttcggtggcagagatgcagtttgccagtcgtatggcgattacccttgcacttagtgatgaaaatttgctcggtcagttatttgctgaggagttaggtgctgtggttcaagtattgcctgatgatgtgccagcatttgttgatttggccaaaacgcatggcgttagtgagtttgtcagcttaattggtcaagccaaaacaaccccagcaggcggtgctggtcttgatgtgttaagcattaccacaccaagtcagacattgtcttttactcgtagcgagcttcaaaaacagtggacaaaagttagccatgccatccaaagtttgcgtgataatccaatctgtgccgatcaagagtttgctttaattgatgatatgaatcatcatggcttgattgccgatgccaattatgatttggatttggcggtagaagctccctatgtcaatagccgtactacccaaccaaaagttgccatcttgcgtgagcagggcgttaatggacatctagagatgggtgcaggttttgtgcgtgcaggttttgatgccattgatgtgcatatgagcgatctgatgagtggacgaattaacctgcgtgattttgagggtttggtggcatgtggcggttttagttacggtgatgtgctgggtgcaggttctggctgggcaaactcaatattatttcatgatgagatgcggatgcagtttgccagattcttccatcgccccgaaacttttgccctaggcgtctgtaatggctgccagatgatgagccagctaaaagacttgatggttggtgctgagagtttccctcgttttattgccaataaatctgctcgttttgaggcgcgcacagtgaatgtacggattgagcgtaccaaatctgtattgctcaaagggatgcaagatagcattctgcctgtcgctattgcccacggtgagggttatgccaatttagatgataaatcgatggcagacctaacttatcatggtcaaatcgcacttcgttatgttgatagccaaggcaatccaactgagcattatccactaaaccccaatggctcaccgcagggcatcacgggcatttgtagtaatgatggccgtgttactttaatgatgccacatcctgagcgtaccctacgcgccgtaaatcactcttggaagcctgatgaatggaccaatgatggtgcatggatgcgattattccgtaatgcacgcgcatttttgcgt

SEQ ID NO: 26989 - DNA, 1221 bp, Moraxella catarrhalis
atgaccataacaaacaatcaagagacaaaatttcccgtgctttgggtgatgatgctgggcgtgatgattgccatcggacctttatcgattgatatgtatttgcctgcgtttccgagtatggcagaagattttggcgtcaatgtcagtacaattgccaaatctgtgccagcgtattttttgggattggtgtttgggcagctgttttatggaccatttagcgaccgtattgggcgagtacgcccgttatacttgggcatgagcatttttatcatcgcatcaatcatctgtgcaacaaccaataacgcatatgtgctatttattgcaagaaccttacaagcacttggtgcctgtgtgacgacagtagtcacacgagccgccattcgtgatacgctcaatccagtgcagtcagcccgtgcttttagtttgatggtgcttgtgatgggtgttgcaccgattttggcaccaagtttgggtgcattaatcttaaaagtggcagattggcatggcatattttggtttttggcaagttttggggtgctaaatttattattaaccaaatgcttcttaaaagaaaccctaaagcctgaaaaccgcaatactcgcccgatgtctgaaagctttgggcaatattttggtttgatgaaagaccatacttttatgttgcctgcagttgcatcagggctgcttcaaggtgcgttttttatttatttgtcaatttcaagtgagctgtttatggtgaattatcggctgacagagcatcaatttgccatcgcttttggggtgaatgcgtttgggtttattgcattgacgcaggtgaaccaatttttaaccaagcgttttcatttggtgaatctactacgcacaggggcagtcattcagttggcggcagctggtgtcttattgatattggggcttatttttggcggtaaagcaagtttttattgggtatttgtcagtctgtttatttgtattgcaggacttggtttgacacagccaaatgcaactgccattactttggcgtttcaaaaaaagcgtgcaggcttggcaagtgcattacaaggcgcattgcagttttcggtaggtatttttggcggtctgctgattggtttatttgagttagatcctgttacccgccttggtatcacgaccagcattttggtagcggtgggtacttttttggtattttatatcaatccaaagcttgatttatctcgcctagac

SEQ ID NO: 26990 - DNA, 1155 bp, Moraxella catarrhalis
atgaaattatctatcaatcgtgacttattactcaaagccatcaatttggtggtaaaggcagcagataaacgccatcgttttgccattttagcgaatattaaattggtgcttgaagaaggttttttgacattgacagcatcggatttggagcttgagctgacgacacgatttgctttacccaaagatggctgtattcaggcaggtagcacaaccttgccagctgagatgttttttagtgtgtgtaaatcactgccagaagaggtggtggtgattgacgcccccgaagataccacgcactgcattattaccagtggtacaggcaggtatacattaagctgtttgcctgcagatgattttccaactatcggcacagcgacacctttgagtgtgataaaaatcagtcaaggcaacctaagtagcttgattcatcatacccgatttgcgatggcgacccaggatgtgcgttattatttgacgggcatgctgttcgatattggtgaaaatacactaactgcagttgcaacagatggacatcgcttggcggtggcacatcgattgctgaatgaaacttatgcgcccaatcaagtcatcattcctggtaaagcagtggctgaattagaacgcttgttgattgagcttgccaaaacggttgatgattctaatattgttgagcttggttttgatgcagagtttttacaagtgggcttggtgcttaaagatgaagacactgacaatgagattacagtgaaactgtctgcacgcttaattgagggtaaatttcccgactatcgccgtgtgattcctgccaataatgataaaattgttttatttaataaagatgaggcggtggatgtgttacgccgaatctcggtactaaataccaaagaagaaccgggcgtgctgatgaattttgataccacggatttttgtaaagtgggtgttaccaacagaaaccttggtgaggctgaagaaatgcttggggtgaattatagcggtgatgccattgagctgacctttaatgaggcgtatctgcgtgcagtacttaatgttttagaaggagaggtttgtcttgagctaaatcagccaagttcgcctgcactgatttatcaagtgggcgatgatttgcatcgctatgtcatcatgccaatgcgtcgg

SEQ ID NO: 26991 - DNA, 2457 bp, Moraxella catarrhalis
atgaccgataataccaacaatcatccacaggtcgatgcacaagaaattgaatacaccgctaaaaatgtccgagttctgcgtgggcttgaggcggtgcgtgtccgcccaggtatgtatatcggtgataccgatgatggtacaggcttgcaccatatggtgtttgaggtggtggataatgccattgatgaggcattggcaggtcactgtgatgagattaatattatcgtccatgacgatgaatctgtttcggtgatggacaatgggcgtggtattcctgtggatacccaccctgaagaaggtgtatcagctgccgaggttattatgacggtgcttcatgcaggcggtaaatttgatgataattcatacaaagtatctggtggcctacatggtgttggcgtctcggtggtcaatgcactgtccaaaaagctgatcttaacgatttggcgtgatggttatgctcatacccaaaactatactgacggcgtgccagatgcgccactggctaagcttgagccgtctactcagacaggtactcaggtgcgtttttatccaagctttgagatttttaagggcgtgcaacactttgattacgatattcttgccaagcgtttgcgtgagttatcatttttaaattcaggggttcggattgttttaacggatgagcgtacaagtactactcaggtgtttgagcataaaggcggtttgtctgagtttgtcagttatattaatggcggcaaacacaccttaaacgatatttttcattttactgcagatggtgcagatggcatcggtgttgaggttgcgctgcaatggtcggacagctacaatgagaaggtactttgttttaccaataatattcctcaaaaagatggtgggacacacttatctgggtttcgttcagcgttgacacgttgtctaaatcattatttagactctgaaaatatcaccaaaaaagaaaaggttcaaatcacaggtgatgatgcgcgtgagggcttaaccgccatcatttctgttaaagtgcctgatcctaaatttagctcacaaaccaaagacaagctggtttcaagtgaagttaaatccgtggttgagaccgccatgcatgaacgattatctgagtatttacttgaaaatccgactgccgctaagatgattgcaagcaaaatcattgatgcagcacgggcgcgtgatgcagctcgcaaagcccgagaaatgacacgccgcaaaagtactttagacattgcaggtttgccgggcaaattggctgattgccaagaaaaagaccccgctttatctgaattgtttatcgttgagggcgactctgcgggtggttctgccaaacagggtcgtaatcgtaaaatgcaggcaattttacctttgaaaggtaaaattttaaatgttgagcgtgcacgatttgataaaatgctctcaagtgctgaggtggggacgctgattaccgctttgggtacaggtattggacctgacgaatacaatcctgacaaaattcgctaccataaaattgtcatcatgaccgatgcggatgtggatggtagccatattcgcactttgctcctgactttctttttccgtcaaatgccagagctgattgagcgtggtcatatttatattgctcagccaccgttatataaggtcaaacgcggcaagcaagaggtttatctaaaagataccgaagccttggatgcatatttgttatcatcaaccattgatgaccatcagctatttttgagtaaagatacgccgcctgtgactggcgtggcacttgaaaaactcttaaaagattacagtcaaagccaagtaattaaagcacatttgcaatcaaaatatccatcgcatctactagatgcacttactttgataccaaggcttgatgtctctgccattggcgataaacaggcagttgatgagtgggctttggcacttgaaaatcagcttaacgacctagagccaaagcttgatgccaaagttgaagcggtacaagtattgggcggggatgatggcaatggacattggctacctcgtgttacgcttcatattcatcgcctgccacatcagtatttattggatacgaattttttgggttctgctgactatatgcgtttattaaaactcagtgccaattggaataccgttttatctaacagtgcttttttgcgtcgtggtgacaaggatttcatcattaaagattttgagtatttatggcaacagttgatgcttgctgctcgccgtggtgtggatgtgcagcgttataaaggtctaggtgagatgaataaagagcagctttgggaaacgaccatggatcctgaaaatcgtcgtatgcttaaaatcaccattgaagatgcgatcaaggctgatcatttatttagttgcttaatgggtgatgaggttgaaccgcgtcgtatctttattgaagaaaatgcactaaatgccgatattgatacc

SEQ ID NO: 26992 - DNA, 1557 bp, Moraxella catarrhalis
atgaccaacattacccaagaccgcatccttattcttgattttggctcacaatatagccagcttattgctcgccgtgtgcgtgaggctggtgtgtattctgagattcatgcgtttgatatgtctgatgaagatattcgtgcatttaatcctaggggcattattttatctggcggccctgaaagtgttcatcaagaaggttcgcctcgagcaccaaaggctgtctttgagctcggggtgcctgttttgggtatctgttatggttttcagaccatgtccgaacaattaggtggcaaggtagaagctggattggtgcatgaatttggctatgccaagattgatatcacgcatcaagataaactgcttagcaaaatcaatgatgaaaaaaatcaatctcaagtttggatgagccatggcgataaggtggcaagcctaccaacaggtttcactgtaacatcttctacaccaaattgcccttatgcgtctgcttctgatgaagatcgtcagttgtacggtgtgcaatttcatcctgaggtgacacataccgaaaaaggagaacagctgatttctaattttgtgcatatcatttgtggttgtggtaatgcgtggaattctgaaaatatcattgagatgcgtattgagcaactcaaaaaccaaattggcaatcaaaaagtattacttggtctatcaggtggcgttgatagttctgtggttgcagcactgcttcatcgtgccatcggtgatcagctgacttgtgtgtttgtggataatggattattacgattaaatgaaggcgatcaggtgatgcaaatgtttgctgaaaacatgggcattcgtgtgattcgtgctgatagtgaggcgcgttttttaaatgcacttgcaggtgtgagtgatcctgaagcgaagcgtaaaatcattggccgtgagtttatcgaagtgttctcggaagaggcgcgtaagcttgatggcgttaagttcttggctcagggcacaatttatcctgatgtcatcgagtcagcagccagcaagcaaggcaaagcacatgtcatcaaatcacatcacaatgtgggtggtttgcctgatgatttggcatttgaattggttgagcctttgcgtgacttatttaaagatgaggtgcgtaagcttggcgttgcacttggcatcccgcatcatatgatttatcgccatccttttccaggtcctggattgggcgtgcgtattttgggtgaagttaaaaaagaatatgccgatatcttgcgtcttgcagatgatatttttatgcaagagcttagagcgtctggctggtatgataaaactgcccaagcttttgcagtatttgagcctgtcaaatcagtgggcgttgttggtgatggcaggcgctatgcatgggtgattgcactgcgtgccgttgagacggtagattttatgacggctcgttttgcacatttgccttatgagctgattgataaaatttcaacacgcatcatgaatgaaatcaaagaggtttctcgtgtggtgtatgatgtctcaagcaagccacctgcaacgattgaatgggaa

SEQ ID NO: 26993 - DNA, 1280 bp, Moraxella catarrhalis
atgtaattttcaaaatttggcgaaaaatttattcaaaatagccctatcttgcaactgatggatgatttgggtaatgctttaaatggcgatacaccgatcaatatgcttggcggtggcaatcctgcgaatattccagaagtatcagcagcatatcatgcagcgtatcaacaaatcgctaccaacggtacggcaatagaaagtatgagtaattacgcttcgccgcaaggtgatagtaaatttatcaaggtgcttgttgaattttttaatcgtcactatggttggggattgaccgctgatcatattgtgctgacgaatggctctcaaaacgcattcttttatttatttaatttgtttgcaggcaattttgtgatggcagtcataaatccattttactgcctttgtcgcctgaatatgtcggctatgctgatgtacaagttgagggttcttattttgtgtcgctgcccccaatcatcgaaaaaaccacacatgaaggtcgtgaaggattttttaaatataaagtggattttgatgctcttgaaaatttagaagaattaaataataataaaattggtgcaatttgctgttcacgcccaaccaatccaacgggcaatgtactgacagacggtgagatggcacacctaaaacagcttgccaaaatgcacggcatacctttaattattgataatgcctacggtgcgccgtttccaaatattatccacaccagcacaacccttgagtgggatgatgaggccatcttatgctttggcctatcaaagatcggtctgctaggcgtgcgcacgggtatcatcattgcgcatccaaaggttactaaggctgtcagtaacatgaacgccattgtgaatctatcgccggtacgctttggggcggcgattgccacaccattatttgaaaatgatgagattatttgcctgtctgatgagctcatctccccattttataaaaaacagtcaatatttgctatccgtcgcctccaagaagaatttgcagattatcctgtttatatccatcagcctgaaggcgcgatttttctgtgggtgtggtttgagggcttaccgatttctacgaccaagctgtatcagattttaaagcaacaaggcacgctgattatcccaagtgagcatttttttgtgggaatgcagacggcggattatccacacgccaaagagtgtatccgcttgtcgattgcccaagacgatcacacacttgaccaaggcatcaaaacgattggtgaagtggttaggcggttgtatcacaattaa

SEQ ID NO: 26994 - DNA, 963 bp, Moraxella catarrhalis
atgaccatacgcaccctaaccattgccacacgccaaagcccattggcactgtggcaggcgaattttatcaaagcaaaacttgaacagctttacccatctttgtcagttgagctgcttgagatggtgacaaaaggtgataagattttggatacaccacttgccaaaattggtggtaaggggctgtttgtcaaggagcttgaacaggctttgtatgataagcgtgctgatattgcagtgcattcactcaaagatgtaccgatgatactacctgaggggctgatgcttggggcttattgtgagcgtcatgcaccgacagatgcttttgtgtctaatcattttgagcatttggatgatttgccgacaggggcaattcttggcacatccagtctacgccgtgagtgtcagctgcgtcaggcacgacctgatttggacatcaaaagtttgcgtggcaatgtcggcactcggttgggtaagcttgatgcaggagaatatgacgccattatcttggcgacaagtggtcttgagcggttgggtttgcatgagcggattcgtcatgagcttgatgatgaactgtctttgcctgcggtggggcagggggcgcttgccattgagtgccgtagcgatgatgaagcaattaagctgttgttatctccgcttaatcaccccaagacacgcctgtgtgtgttggctgagcgtgctatgaatcgtgcccttgaaggcggttgccaagtaccgattgcaggctttgctgtgattgaagatggtatgttgactctgcgtggacgagtcggctcagtggacggtaagaccttattaaaagcacaacagtcacacaagcttatgggtgaaatccaactggatgaacaagcagccgaacaacttgggatagatgtcgcacatgagttactcatgcaaggtgcggatgatattttaaaacaagtttatcaaaatgcccttaattca

SEQ ID NO: 26995 - DNA, 930 bp, Moraxella catarrhalis
atgacaactcaaactcaacacacgcctaagcgtgattatcgtcagcgtttttttattgatggctcggtggtgcgtggcgatgtggtcaagctaaccgatgcttatcaaaccgtcatcacccaaaaagactatcccgttgcccttaaagcattgctcggcgagatgcttgtttcggcaagtttgttgattagcacactaaaaatagacggcaaattatccattcagctacaaagctccgattctgatgctcgcctaaattgggcaatggcagagtgtgatcacacaggttcggtgcgtgctttggcagggtttgatgatactaatcagaatcaaacagtatggcaacacctaaaatctgccgatgaagcctttggtgagcttggcaaaggggttttgttcatcagtatccaccctgataatggcgaggcttaccaagggattgttgagcgtgtcagcgacagcttgggtgagtgtttggcacattatcaaagacaatctgcccagattccaaccatcattaagcttgccaccaatgagacgacagcaggcggcatattggtgcaactattgccccaaagtgatgctgataaagaggctgaccctgatttatgggaccgtttgacagcactcaccgatacactaaagacagacgaactcaccgatttggacgccaatgagattttgtatcggctatatcatgaagaagatgtggttttgccaagtttgacaccgctacaatttgcctgtacttgctcaagccaaaaaagtgaaggtgctatcttacagcttggctatgacgaagccaaacaagctgcagcggcacaaggcggtgtattgacgcttgattgtggtttttgtggcagagaatatcggtttgatgatcaagcgttagcccagctgtttgctgatggcttatcaaatcatcataag

SEQ ID NO: 26996 - DNA, 1515 bp, Moraxella catarrhalis
atgcgttatgccaatccaaataccaaagacagtaaagtttcattcaaagaaaaatacgaaatttattgggggcaagtgggttgcacctgtagatggcgagtattttgaggatatttcacctgttgatggtaaaggctttgcaaaagtcgctaagtccaacaaaaagatgttgagctggcattggatgcagcagataaagccaaacaaacatggaataaatccacgccgagcgaacgatccaacttgcttttaaaaattgccaatcacttggaggaaaatttagaattattagcagtggcagaaacttgggaaaatggtaagccaattcgtgagacattggcggcagatattccattagcgattgatcattttagatattttgcaggatgtatccgtgcccaagagggcggtatttcacagattgatgaagataccgtcgcttatcattatcatgaaccaattggtgtggttgggcaaatcattccatggaattttccaattttaatggcggcatggaaaattgcacctgctttagcagctggtaattgcattgtattaaaacccgccgaacaaacaccagtgagtattttggtcttgattgaattgattgaagacttgttacctgcaggtattttaaatgtggtgaatggctatggacctgatgtgggagaactgctggcaaccaatccacgcattggtaaagttgcctttacagggtctaccgaagtgggtcaaaaaattatggaatacgccaccgaaaatatcattcctgcaacacttgagcttggtggtaaatcacctaatgtcttttttgctgatgtcatggataaagatgatgaattcttggataaagcactagaagggtttaccatgtttgctttaaatcaaggtgaggtatgtacttgcccatcacgcgctttggttcatgaaagtatcgctgaagaatttttgaaaaaagcggtcgagcgtgttaagaaaatcaaaacaggacatccactttataccgagacgatggttggggcacaggcttcccaagagcaacaagataagattttgggctatattgataagggtaagtctgaaggtgctaaaatgctgacaggcggtgaggtacgatatgatgtcgatggtggctattatattgaaccaactgtctttaagggcgaaaacagcatggaaattttccgagatgaaatttttggccctgtgttggcagtgacgacctttaaagattttgatgaagcgataaaaattgctaatgataccatgtatggtctgggtgctggtgtgtggacacgagatggctcaacggcttatcgagcgggtcgagcgattcaagcgggtcgagtatggacaaattgctatcatatttatccagcacacgcagctttcggtggctataaaaaatcaggcattgggcgtgaaaaccataagatgatgcttgagcattatcagcttaccaaaaatctattggtaagctgttcacccaaggcgatgggtctgttttaatgagtt

SEQ ID NO: 26997 - DNA, 309 bp, Moraxella catarrhalis
atgtacgcagtcattaaaagtggcggtaaacagcaccgtgttagcgttggcgaaacgctaaaagtagagctattaaaagccgaaaaaggcgaaacgctaaagattgaagaagtgttgatggttgttgatggtgctgagattaaaattggctcgcctgtagttactggtgcaagtgtagaagctgaagtggttgagcatggtcgtggtaaaaaagtacgcatcgttaagcatcgtcgccgtaagcactatcacaaagagcaaggccatcgtcaatggtttaccgagctaaaaattaaagccattaacgct

SEQ ID NO: 26998 - DNA, 1635 bp, Moraxella catarrhalis
atgccaaacgctcaagccatcaaccaagactttttaaataaacttgaccaagacctatggaaagccgccgacaccctacgcaaaaacctagacgcggccaattataaacacatcgttctgggttttatctttttaaaatacatctccgatacgttcaccgattttcaaggcaaattaaaagccaatatcgccaaccccgagagtgatatttatcttgacccatcactgtttgagccaagcgaatttgaacaaatcctgtctgccgaactagaagaacgggattattacaccgccgaaaacatcttttgggtgcctacccaagcacgctgggaaaacatcaaagacaacagcaaactaaacgcaggcgatgaattgccttggggtggcaaattcaaaaatgtcagcattttgcttgatgatgcctttgaagccatcgaacaagaaaaccccaaactaaaaggcgtgctccaacgcattgcaggctttggcgtgcctgatgaaatgcttcgtggcttgactgaccttttctctcgcaccgactttacccgcccaatgtacaatggcgaacctgtgcatctgcaagccaaagacattttgggtcatgtttatgaatatttcttaggacaatttgccctagccgaaggcaaaaaaggtggtcaatatttcacgccaaaatccattgttaccctgattgtggaaatgctcgaaccctattcagggcgagtgtatgaccctgcgatgggcagtggcggattttttgtgcaaaccgaccgatttatccaagcccaccaaggtaaccgcaacgccatttcggtctatgggcaagaatccaaccccaccacccgcaaactggcggtgatgaatatggcgattcgtggcattccctttgactttggcgacaagcctgaagatactctgctcaatccgttacatattgataaaaaaatggattttgtgatggcaaatcccccttttaatatgaaagaatggtggagcgaaagtttggcaggcgacccacgctgggcatacggcacaccgccgcaaggcaacgccaactttgcgtggttgcagcatatgatttaccacctttcgccaaaaggcaaaatggcactcctacttgccaacggctcaatgagtagccaaacctcaggcgaaggcgaaatccgcaaaaacatcataacagccgacctagtcgaagcgatgattgccctgcccaatcagctatttaccaacacgcaaatccctgcctgcatttggattatcaataaagccaaagctcgtaaaggcgaagtgttgtttatcaatgccacccaaatcggctatatgaaagaccgtgtcttgcgtgattttaccgttgatgacatcgccaaaatcagcgacacctaccacaactggcaaaaacaggacggctacgaaaatatccctgcgttttgttactcggcaacactggacgaaatcgccaaaaatgactttgtgctgacggctgggcgatatgtgggagcagtaaccgaagaagatgacggcgtaccgtttagcgacaaaatgcaggaattgaccgcttgtttaaatgaacaatttaaacaggagcgggaattggaacagcaaattacagagaatttgaaggggttggggttt

SEQ ID NO: 26999 - DNA, 3148 bp, Moraxella catarrhalis
atcaacgaaaacaccatcgaacaatccgccattgccacaatgcaatctttgggctgggattatgcctacggcaaaaccattcttttgggctgccaaaatgaatggcgagaacggacaggcgaagtgattttaaagcccttgttggcggccgccattgcaaaattaaaccccaatttgcctgctgccgaggtggaaaatgtggtggcgatggtttgccgtgccgacactggcgaccttgccgagcgtaaccgcggggcctatgaatggctaagaaatggcgtgccgtatcgttatcaggcacagggtgagcaaaagtttgaagtggtgcgtttggtggattttggggtgcctgcccacaatgattttcgcattgtcaatcagctggatattggcggtaaaaaaggcaaacgcattccggatttgattggctttgttaatggcttgccactggtggtgtttgagctcaaaaatccactcaaagaaaatgccgatattggcaaagcgtttgcccaactgcaaacctataaagatgaaatttccgatttgtttgtgtttaatcaggcgttggtgatttcagacggtattgtcgcccgtatcggttcgctgacggctgattttgagcgtttcaccccttggcgtgtggttgatgagaaaaacaaaagccaacggattgtgtttgaaaatgagctagaaggcttgttacaaggcttgatgacgccaaaaaatctcttggattatgtacaaaattttgtggtgtttgaacgagacaacaaaaaccgcaccattaagaaaatcggggcgtatcatcaattttatggcgtgaatgaagcggtggaatgcaccctacttgccagcagtcatacaggcaaccgcaaagtaggcgtgttttggcatacgcaaggttcgggcaaatcgctttcaatgctgttttatgcaggcaaggtattaagtcaaggcagcctgaaaaatccgactttggttttggtcaccgaccgcaacgatttagacggtcagctttatgctaccttttgcggtggtgaggcattgctcaaacaaactccagtccaagtcgatgggcgagatgaacttcgctctgctcttgccagtcgttcggctgggggcgtgatttttaccaccattcaaaaatttggtttgatggaagatgagctaagccacccaattttgaacgagcggcaaaacatcattgtcattaccgatgaagcccaccgttcgcaatatggttttagccaaaaaatcaacgacaaaggacaataccgagagggttacgccaagcatttacgcagtgccctgcccaatgcgtcctttattggttttacaggcacgccaatcgcccttgatgacaaagacacccaagaagtgtttggtaaatatgtgtctatttacgattttgaagatgcggtgaaagatggagcaaccgtgccgattatctatgagccacgccaaatcagcttgggcgaaagtcatgattttgacaaggtggtcaaagaagctcaaaccctgcttgatgatgatgaacaaaatccgacttttcgtttgcgtgaaaaattgcacggtgttgaaagccgtttgcaaaaaatggcggaagacatcattgcccattatgatgagcgtaccaaacagcaagacggcaaggcgatggtcgtggtgatgagccgtgccatttgtgtgaaattgtacgaaaaaatcattgcaattcgccccgattggcattctgacgatgtgttgcaaggagtgataaaaatcgtgatgacaagcaatgccagcgaccctgccgaatggcaaaaatacaatcaggacaaaaaacgctggaaaaacgctttaaagacccagacgaccccctaaaaatcgtcatcgtgcgagatatgtggctcacagggtttgatgccccttgttgtaacacgatgtacattgacaagccgatgagtggacataacctgatgcaggcgattgctcgggtcaatcgggtgttccgtaacaaaagcatggacaatggcggtttgattgtcgattatgtgggcttgaccgatgagcttgaaaaagcgatgaagcaatataccaacgcttgtggcaaagaaaaacctgtacgcaatattgagacggttttggaaaaaatgctcgaatatgtcagcattattcgggggcaatttgccacacctgtggatggacaaacggttgatattggcaaaattttgcaaattagcgaacctgccaaattgctgaatgcgattttgacctctgccaaccatattttagccctagaccgaatcaatcctgatgacagcaaagacaaaaagggcaaaaccccacgcaaaaatgcttttttgcaagcggtacggtttgccaaaaaaggttatgccctttgcggtgcgttaaaagcggttgaaccttacaaacaggaactggctttttatgatgcggtgcgtgccaccatcatcaaaacagcactgcctctcgcaatccttcgggcaaagaccgcttgttacagctaaccgtcttgatgaaccgtgcggtgcagtcggacggtgtggtggatttatttgatttattaaaaaaagaacgcccaaacatcaatctactttctgatgaatttttggaaacggtaaaaaacagcccaaccaaagatttatggattggtgcgatggagcgttatctggcgtccgagttgcgcacacaaagcggggcaaatcttgccaccaaaaaagagtttgagcaacgactcaaagaagcaatgaaccaataccataaccacaatttatccgtgttggaaattttggaagaactcatcacgcttgccaaagagtttgacgctcgccaaaaacgaggggaagagctgggattaagtcctgctgaaatggcgttttatgatgcattggctcgcaacgaaagtgcggtgcgagaaatgggtgatgcggttcttttgaaattggcacgagaaatcaccgaaaaactgcgtaaatcggtaacgattgattggcaatataaagacttggtgcgtgccaaaatgcgaacgctgattcgtattaccctacgcacctataaatatccgcctgatttacagaatgaagcgattgaatttgtattgaaacaggcggaggagattgcggaggatttggtaccgaaagaaacg

SEQ ID NO: 27000 - DNA, 255 bp, Moraxella catarrhalis
atggcacataaaaaagccgcaggttctactcgtaacggtcgtgattctaacccaaaaatgcttggcgtaaaagtttttggtggtcaagatgttgttgctggtaacatcatcgttcgccagcgtggtaccgaattccacgcaggtgaaggtgttggtatgggtcgtgaccatacattatttgcattaactgaaggtgtggttaaatttgagaccaaaggtcaatttaaccgtcgctatgtttctgttttagcaaaa

SEQ ID NO: 27001 - DNA, 270 bp, Moraxella catarrhalis
atgaataagtctgaattggtagatagtattgcacaaagtgctggcctaaccaaagagcaagctgccaaagcggttaatgcatttactgaaagtgttcaaggtgcattacagcgtggcgatgatgtcgtattggttggttttggtactttcagcgtcaaagagcgtgctgctcgtatgggccgtaatccaaaaactggcgaagcaatccaaattgcagccagcaaagtacctagctttaaagcaggtaaagtcctaaaagaatcagtcaac

SEQ ID NO: 27002 - DNA, 213 bp, Moraxella catarrhalis
atgccttcaagtaaggtaaaagagaacgaaccagttgatattgcgatccgtcgcttcaagcgtgcttgtgaaaaagctggcgtgctagctgatgttcgtaaaaaagaattctttgaaaaacctacgcaagagcgtaagcgtcaaaaagcggctgccgttaaacgctataagaaaaaagtctatcgtgagcaagtgcgtcatcagcgtaagtac

SEQ ID NO: 27003 - DNA, 2073 bp, Moraxella catarrhalis
atgaatacccaaacttctttttttaatgatacctctaaaaataatcctagtaaagccaatgatcaaattatcgctcaaatgcgtgccttaattaagctgctaaagcgtcacaatcatgcgtattatgtgatggatgcaccaacgatttcagatgatgaatatgatggtctgcgtcgcacattaatgatgcttgagcagcagcatcccaatttgatacaacctgatagcccgattaatacggtcggtggtgagccgctgcctttttttacacaagtggctcatgaagtgccgatgctatcactgggcaatgtatttaatgctgatgatttgtcagggtttttgcgtcgtgccaatgagcgattgggtatcgccattgatgagtatgaaatggaactaaaacttgatggcttggcggtatcattaaagtatcaaaatggtcaattcgcccaagctgtcactcgaggcgatgggcaggtgggcgaggatatcacgcataatgtcagaaccattcgtaatttaccactgactttgacaggatgtgagcaaatcaaacagcttgagattcgaggtgaggtgttgatgcccaaagcaggttttgaaaaattaaatcgtgaaagcatcgcacaagggatcaagacttttgccaatcctcgcaatgctgctgcaggttcgctaaggcagttaaatgctgccatcgccgccgcgcgtccgttggcattttttggatactcagtgaatgatggattgcctgatggtatcaccacgcagtcaggtgcaatgcagtggcttggtcagcttgggtttgagatagcatcttttaaggttgccaagagtcttgatgagattcaagcattttatgcccatgtcatcaaaactcgtagccagctaccgtttgaaatcgatggtttggtgattaaggtgaatgatctaaatttacaggcacggttagggttcttaagccgtgaaccacgctgggcaacagcttacaaatttcccgccgaaactgtgcccacacgactcatagatgtagagtggcaagtagggcgtacagggactttgacacctgtgggcagacttgagccgataactgtgggcggtgttacggtcagtaatgtgactttgcataattttggtgagattgagcgtcttggggtgatggttggagatgtggtcaatgtgcatcgagcaggtgatgtcattcctaaggtatctggcgttattggtgagctacgccctaccgatgccaaacctatcctcctgccaacggtttgcccagtttgtcaatcaccgattagcttaccagaaggtgaggcgttggcaagatgtactggtgggctatactgtgccgcacagcagcaagaagcattgattcattttgtctctcgccgtgccatggatattgatggtttgggcagtcagtggctgattaagttttttgaaatggggcttgttcagacggtggcagatatttacaaactccacaagcaggctgagtatttaataacgctagagggtatgggtgataaatcagtcaccaaaatgctatcggctattgaaaaatcaaaacagaccaccttacctcgttttatttttgctttggggattcgtggtgttggcgaaagtacagcattgtcattggcgcagcagtttggggaattacagtcgatcattgaggcagatttacaagcactacaagctgtacctgatattggtgagataactgcccaatcaatttatgatttttttcgggcatcgcataatattgaggttgtgcaggcactgattgaggctggtgtttcttggcaagcaatggatacgcctgataaatcatcattgccattgactggagagacttgggtggtgactggtactttaggcagtatggggcgtgatgaagccaaagataagctcattgccttgggtgcaaaagttgctggtagtgtttcagcaaagaccacacggctacttgctggtgaaaaagcaggtagtaagcttgaaaaagcccaaaaacttggcgttacagtcgttttagaagatgaatttttggcactgattgctttatataatcaggta

SEQ ID NO: 27004 - DNA, 939 bp, Moraxella catarrhalis
atgagcgaaaacgaaaaaggtggctggttttcccgcatgaaagctggactatcaaagtcaagtaaaaacctatcagaagggctggttaatgtcttggttggtggcaaacagattgatgatgagctgcttgaggaagttgaagatcagctactggttgctgatattggtgtcaatgccaccaatcgcattatcaaaaatctcaccgagcagaccgcgcgtggcgatttgatttactcgcatgctttgtataaagcactcaaaaccgagttgaccgacattttgacgccaaaagttgcacctttgattattgataccaccaaaaagccctatgtcattttgatggtgggtgtcaatggtgttggtaagaccaccacaatcggtaagcttgccaagcgtttacaaaatgagggtaagtcggtcatgcttgccgctggcgacacttttcgagccgccgccaccgagcagctacaaatttggggtgagcgaaatggcattgctgtcatcgctcaaggtcatggctcagacagtgcttcggtgatttttgatgccatgcagtctgccaaggcaaagggcattgatgtgcttatcgctgatacagcaggacgcctacaaaataaaacgcatctgatgaatgaacttgaaaaggttgtgcgtgtgatgaaaaagggcgacgaaactgctccgcatgagacgatgatcgtgctagatgcaggcacaggtcaaaacgccatcaatcaagtgcaagtattttcagaagcagtgaatttaactggcatcagtgttacaaagctagatgggacagccaaaggtggtgtggtatttaatatcgcccaaaatacggatattcccatccgttttatcggcgttggagagggtattgacgacctacagccatttaagccaaaagattttgttgatgcacttttggaaaaagaagaa

SEQ ID NO: 27005 - DNA, 591 bp, Moraxella catarrhalis
atgatggcaaaagcagttagcactaactatcatccaccaagttttttacctgatttgccaaccatgcacctaactgccagtcacggtaagctgattttacttgattggcaagatatcaaaacccaaaaactgctcaatcaagccaatcagcatgcggtatttataaaaccatcccaattagatatcaatcagcccgatcaggcgattcttttacagaccaccgagcagcttaatgagtactttgatggtactcgcaggaactttagcataccgcttgatttttcttatggcactcaatttcagcaacaggtttgggcggcactgttgacgattgattatggtcagaccatcagctatgccaagcttgccacactcattgataaacccaaagcgtttcgcgcctgtgccaatgccaatggcaaaaatcctttaagcctaatcgttccttgtcaccgagtggttgcatctgatgggggtttgggtggttatacaggtggtgttgccattaaaaaagcattattagattttgagatggcgtgtcacttaagcaaaaataaaacaccgactgattttgattatttatgctataat

SEQ ID NO: 27006 - DNA, 1261 bp, Moraxella catarrhalis
cgcattgtcattacaggcatgggagctttaacgcccatcggaaatagtttagatacaatttggcaaaatcttacccaaggtgtaagtggtatcagtcgccttgatggatttgaggataaatcggtagcgattgatggatttcgtgcccagatcgctggattggttaagaattttgatgccaaagattatttaaatcctaaagaagcccgccgttttgatacatttgtacattatgcccaagttgccgctgccatggctttgtatcatgcagggctgattgatgatatcaaaggtgatagcttgcccatcaatgtcgatggcgagcgttttggcgtggtcatgggttcgggcattggcggtattcaaaccattgaaacaagtcgtgataccctaaagtcctatggtgcaaaaaaagtatcgccattcatcattccaggtgccatcatcaatatgccagctgggctgattgccatccgtcatcatctcaaaggtgcaaatcttgcaacgacaaccgcttgcaccacctcgacgcacgccattggcttgggggcaagactgattgcttatggtgactgtgatgcggtattggttggtggcagcgaaaaagcctcaacgccacttgggttatcaggctttggggcgatgcatgcactctcaacacgaaatgatgagccaacacgcgccagcctgaccttttgacaaagaccgtgatggttttgttttgggtgatggtgcaggtgcattagtgcttgaaagcttagcacatgccaaagctcgtggtgcgaccattttggcagaattggtcggatttgggatgagtgatgatgccaatcatatcaccagcccatcggtcggtggagaaggtgcggctcgtgccatggcagcggccttggcagatgcaggcattgatgcttgtgaagtgggttatatcaacgctcatggtaccagcacaccccaaggtgatgtcgctgaaagtcaagccattgagcgattgtttggtcaagatattttggtcagctcaaccaaatctatgacaggacatctgcttggagcggcaggtgcgattgaagcaatttttaccatacttgcactccaaaatcagcttctaccacccaccatcaatttagacaatcaagacgaagcatgtcggctagattatattgctcataccgctcgccgtgttgatggggtagaatttgccttgtcaaacagctttggatttggtggcccgaatggttcatcactatttcgccgatggcag

SEQ ID NO: 27007 - DNA, 2055 bp, Moraxella catarrhalis
atggcaggggatattattagccgatatgtgaccgatcgcattcaagacaatcatcaatggtatgccaaaaaacaggttttggctgctgaatgtacactaagattaccagactttgagctatatcatatcgtgcaggatgcgttattatttcagctcaatcaagggcataccatactgcatatcaatgatcatgatgatttgaataatcgccatggattaaatggcatgatacccatttggcaacaaaaaatcatggattcatgcctgacagtgataacgcacgcattggcaaatgagggcatggactgggcagcattttttgatgcttatcatcgctgtgcagatgatactatcaagataaaacaatttgttaatcatgccttaaatcattttcgtcagcaagtatctttgcttgatcacacagtgatggaaattgagcaattatctgcgttatttttgtccatgctgcgtatttactatgtcttatacaaaaatgccaatactttgaatcagtttgtgagtcttttgcataacaatactttttttggagatattttggcatcaaacattcaaagcataccaacaaatacgccaccgatttattttagtgatcaagcaggtggactgtatttatggacaagtcgtgcctaccttgctgaatcacaactgatgacgcatatcttgcgtatcagtcaggctgatgtgccgatatttgctcttgatcagctaccaaatagcctaaataccgagcagcgtgacgcaatcaagctggtctcaaaacaagcgttttgcctaattacgggaggtcctgggacaggcaagacctttacagttgcccaaattgtcatcgcactcaatcagcgtgatgagtataaaaagatgcgtttggggcttgctgcaccgacaggtaaggcagctcagcgtatgagtgaatctttgcttaaatccctagataaggcgaacgatatacagctgcccaagcctaagaccattcaccgcctgcttggtattggggcaaatggcagcccacgctatgatgccaaaaatcagctgccgcttgatatgcttattatcgatgaagcttctatgcttggcacggagctggcaagtcagctatttgctgccatcgccacgggttgccgtgtgattttacttggggatacgcatcagctggctgcggttgatgctggtgcggtgttggctgacttatgccgaattgaacgcctaaggcatttgcgtgtcaatttgacagcatcaaaacgctttacggacacatcaggtgttggtcaattggcaaagctgattaatgatgatcgtcaaaatatacactttgatgaaatacaacaattaatcaattgccataccaagattgattttcatcccatcacccatgccctaatgcacaatgatacctaccaaaagcttagccaagactatcaggactattttttagcaagtaaacggcttcgctttagttttgcaaaattatctagccaagatgcaattgatagcgtcaaaaaactatttaagatattagatacttaccgtattctttgcgcttcacatcttggtacatttggcgatgatcagatcaatgattatttaagcttagctcatcgagcagttcaaaaaatcccaccatcagtatcgccttggtttcatggtcgtgtggtgatgattaccaaaaatttatatgatttgggcttatttaatggagatatcggcatttgcttatggggttcatcaggtcttagcgtgtactttgaaggcgagactttgcgtatggtggcggttgatatgttaagtgataccgttgtgagtacggcttatgccatcacagtgcataaatcccaaggttcagagtggcaaaaagtcgccattatctttgatggcaatagcgaacgcctgctgtcaaaggagcttatttataccgctgttactcgagcaaagtcagcggtacatatctacagcacgcatgacgcactcatcaatgccatcaatacgccgacagttcgacaaactgggctggataaagtgagtgatggtcagcaatca

SEQ ID NO: 27008 - DNA, 1023 bp, Moraxella catarrhalis
atgatgacagataataagctacaaaaatcccttaaaaatcaacatattttatcacagcccctatctattgggggtttaaaaattgagaatagaatttgggtagcaccgatggcaggggtgacggataacccttttcgaaggctctgtaaatcctttggtgcaggtcatgccgtcagtgagatgattattgctgatacagcattatatgcacgcaaaaaatcgttatatcgagccaattttgatggcgaaattgcacccatttctgcacaaattgcaggggctgagcctgataaattggcacaagccgcccaatttcaagttgccaatggtgctcagattgtcgatattaatatgggctgtcctgccaaaaaagtctgccgtaagctcgcaggctcggcattgcttcaggatgaagatttggttaggcggctgcttgacagtgcggttttggccgttgatgtgccagtcactttaaaaactcgtttgggatttgccaatgggcaagaaaatattttaaaaattgcacaaattgctgaacaagcaggcgtggctgccattaccattcatgggcgtacacgagaggatttttatacaggtcaggcacgctatgagctgattacccaagtaaaaaaggctgccaaaatccctatcattgtcaatggcgatatcgatagcccacaaaaagctttggatatccaagccaaaacaggggcagatgctgttatgattggtcgagctgctcaaggtaaaccttggctgtttcagcaaattgcccattttgccaatactggcgaactcttagcgtcgcctacggtcggtgagattcatgaagtggtcttgaggcatctagatgagctgtatcgcttttatggagaatattcaggatgtcgcattgcccgtaagcacatcgcatggtatacaggcggtctgcccaactctaacgcttttcgtgacgccatgtatgcgtgcgagactaccaaagagcagtttgaggtcgtggataaattttttaagacaatttct

SEQ ID NO: 27009 - DNA, 1635 bp, Moraxella catarrhalis
atggcaaaagatgtaagttttggctcaaatgcccgcgaaaaaatgattgatggtgttaacattttggcggatgctgtcaaggttaccctaggtccaaaaggccgcaatgtggtgattgataaatcatttggtgcgccgaccatcaccaaagatggcgtgtcagttgccaaagagattgaacttgaagataaatttgaaaacatgggtgcacaattggtgcgtgaagttgcttctaagaccaatgatgtggcaggcgatggaacaacaaccgcaacagtacttgctcaagccatcttggttgagggcatgaaaacggttgctgcaggcatgaatccaatggatctaaagcgtggtattgataaagccgtacgcgccgctgttgaagaaatccgtgctatctcgacacctgctaatgaccataaagcgattgctcaagttggctcaatttcagcaaactcagatgctaccattggtgagcttatctccaaggcaatggaaacagttggcaaacaaggcgttatcacagttgaagagggttcaggttttgaagatgcgcttgaagtagttgagggcatgcagtttgaccgtggctatatcagcccttactttgccaataaacaagacagcttgacttgtgaatttgacaatccatttattcttttggtcgataaaaaaatctcaaatattcgtgagattgtgccactacttgaaaaagtgatgcaaaccagccgtccgctattaatcattgctgaagatgttgaaaatgaagcattggcaacattggttgtcaatactttgcgtggcggattaaaaacttgtgcggttaaagcgccaggttttggtgatcgccgtaaagccatgcttcaagacattgcaattttaacaggtggcgtggttatctcagaagaagtgggcttaagccttgagactgctgagattgagcatttgggtactgccaaaaaagtaaccattggtaaagaaaacaccgtcattgttgatggtgcaggtgataaagccagcattgaggcgcgtgtagagtcaattcgtcgtcaggttgaagaatcaacttctgactacgacaaagaaaaacttcaagagcgtgtggcaaaactatcaggcggtgttgcagtcatcaaggtgggtgcggcaactgaaactgagatgaaagagaaaaaagaccgtgtagacgatgcacttcacgctacccgtgctgctgttgaagagggtgttgtgcctggtggtggtgttgcacttgtgcgtgctttatctgcattaagcgacctaaaaggtgataatgaagaccaaaatgcaggcatcaatatcctacgccgtgcgatggaagcaccacttcgccaaatcgtcagtaacgcaggtgatgaggcttctgtaattgttaatgaagttaaaaatggctctggtaactacggttataatgctgcatcaggtgagtatggcgatatgcttgaaatgggtattttagatcctgccaaagtaacccgttcagcattagaacatgctgcttctgtcgcaggtttgatgttgaccactgaggtgatgattaccgataaaccagcaccagaagcaccaatgccagcaggtggtatgggtggtatgggtggtatgggcggtatgatg

SEQ ID NO: 27010 - DNA, 840 bp, Moraxella catarrhalis
atgaagcaatatcttgaattattacaacatattttaaaccatggcactgataaacaagaccgcacaggtacaggcacgcgttcggtgtttggttaccagatgcgttttaatttggcagaaggttttccattactgacgaccaaaaaagtacatatgaagtccatcattcatgagcttttatggtttttaaagggtgaaaccaatacaagctatttgaccgataatcaggtgacaatttggaatgagtgggcaacagcagaacaaacagctcgttttggcagagctgagggcgagcttggtcctatttatggtcatcaatggcgtaattttggtgcaagcaaaaaaagtgatggcagttatcatgatgatggttttgaccagatcgcttggttgatcaatgagattaataccaatccaaactcacgccgactgatcgtctcaggctggaatcctacagaggctgccgaggttgcattgccaccgtgccatacattatttcaattttttgtcagtcaaggcaaattatcttgccagttatatcaacgcagtgccgatgtttttttgggcgtgccttttaatattgccagttatgctttgttaacccatgtggtggctcaggtatgtcatttggatgttggggaatttatatggacaggtggcgatacgcatctttatcaaaaccattttgagcaagtgaaattacagcttagccgtgagccattgccactttgttcattgcgattaaatcccaaagttcggagtatttttgagtttggttttgatgatattcaaatcgcagattatcaggctcatccagcgattaaagcaccagtggctgta

SEQ ID NO: 27011 - DNA, 513 bp, Moraxella catarrhalis
atgatggagaatattcaacttgtgcatgtggttgccatgagccaaaatcgtgcgattggaaaagataaccagctactttggcatattcctgatgatttgcagcattttaagcgtatcactcatggtggtgtgattgtcatgggacgcaagacttttgaatctttgccgaatttattgcccaatcgtacgcacattgttattacaagacaacccattggctatgaaggtgcggtgacggctcattcactacaagatgccattttacttgccaaagcttatgcacatgcaaaacagcagaataaaatctttatcatcggcggtggcgaaatttatcatcaaagcctagagatggcggatgtgcttgagattactgaagttgatacggtcattgaaggggatacgttttatcctgatattgatgaaaagttcataaaaacagatgaaactaagactttttattgtgataaaagcggatttcaatttcgcttttgtacttggcaaaaagttttaaca

SEQ ID NO: 27012 - DNA, 543 bp, Moraxella catarrhalis
atgtcacagttttcagatgcactcattcatatcgtgctattttccccaaaaattcccaataatactggcagcatcatccgcttatgtgccaatacaggtgctcagctacatttggtcaaaccgcttggatttgagttggatgatactcgcttaaaacgggcagggcttgattatcatgaatacgcaactttaagcgttcacgataattggcaagagacaaaatcggcactaaaatcgttgggcgtggagcgtattgttgccatgacgaccaagtttagccgtccgttttatgaatatcaatttaagctggataatgatcagcataaagtcgccttggtatttggttcggagaccgatggattacctgaagaggtgcgtgctgatattggtgctaatcattggctacggctgcctatgttgccagattcacgcagtttgaatttagccaatagcgttggtatttgcctttatgaagtatggcgtcaacttgggtttgtgggcgatattgggcaaagtgtgggctatcacaaacccacatcaaga

SEQ ID NO: 27013 - DNA, 1467 bp, Moraxella catarrhalis
atgaaagcactgttattgattccgacatttgacgctccaaatttttcatccatcgtagaaaattttgccaaaagcattggtgcagcttacattgcaccatttgatggtgaaggcgatagcaagcttagagtagcagtcactgaaggtcggcttgatgagatgcttgaaaaagtagttgctgcccaaagtgcaaagctgacggttgttaaaggtttggcgactttaccaaatacgccttatgccagtttggtcaatcgtgatttggcaaatggtctggatgccgatgtattatttgtcagccaaaatgctgaagagttggctgtatttgctgctgcgtttggcggtcttaagtctgagcgtgtgctgggtgttattgcagcaggcgtagatgaatttggggtaactgtatgggcaacgattgatggtgagcagttgacagttgatgaagaagttatcaaaaactatcaagcagcaacaagagtcaaaaaactctcaccatatgcgtttcgcaatcaagttgtccaaaaagcacaagccgccaaaaaacgcattgtactgccagaaggtgatgagccaagaaccattgaagctgctgtaatttgccagagtcgtggcattgctcagtgtgtcttattgggtgaacgcaccaagattgaagcggtagcagcagagcgtggcgtggtattaccaaatgatattgaaatcattgaccctgccagcatcgctgaaaaatatgttgcccccatggtagaacgccgtaagggtaaaattgatgaagctggggcaaagcaagcattacaagatacggtagttttgggtacgatgatgctacatatgggcgatgttgatggtttggtatcaggagcggttcatacgactgccgacaccattcgcccagcgtttcaattgattaagacagcaccacagtacagcttagtttctagtgtcttttttatgctcttgcctgaacaagtcatggtttatggcgactgtgcggtcaatccaaatccaaccgcagaacagctggcagagattgctattcagtctgccaaatcagccaaagcctttggcattgacccaaaagttgccatgatcagttactctaccatcgattcaggttcaggtgttgatgttgatactgttaaacaagctgtacaaatcattcgtgaaaagtcgccagagttaaaagttgatggtccattacaatttgatgccgcaactgtcaaaaatgtcggtaaacaaaaagcaccaaattcagcggtagcaggtgaggcaaatgtcttaattttccctgatctaaatacaggtaacacgacctataaagctgttcaacgcacagctgatgtgatcagtgttggtccgatgctccaaggcttgaataagcctgtcaatgatttatctcgtggggctttggtagatgatattgtttatacaattgctctgactgcaatacaggccattgatgaa

SEQ ID NO: 27014 - DNA, 804 bp, Moraxella catarrhalis
atgctaaaaaaactgttgaaattaaaaaacaccatcacagatgatgtgaaagctgtgcttgcacgagaccctgctgcacgcagccaaatggaagtactgttaacctatcctggcattcatgcgcgtatcatgcaccgaggggcacactacttgtggaatttggaccataagtttatggccagagcgctttctcattttagtcgctgcacaacaggcattgaaattcaccctgccgctaagatcggtaagcgtttttttattgatcacggcatgggcgtcgttattggcgagactgccgaaattggtgatgatgttactttgtatcatggtgtcactttaggtggtgtctcttgggaaaaaggtgccaaacgccatccgacccttggcaacaatgtggttgttggtgcaggtgctaagattttgggtggctttcgtgttggtgatgatgccaagattggctcaaatgctgttgtcgtaaaggcagtgccagctggtgccacgatggtcggtagtgccgcccgcatggtcgtcaagcacaaacaagaacaaatatccaccaaacatcacgcacaatctaaggagctgtttaacgcttatggcttaaaacctgattccaaagaccctgttgcatcaagtattgcagctttattggcacatatccaagagcgtgataagcaaatctgtgaactcaccgccgcagtcaaaaaactagatccaaattttaatccccaaagcataaaatcactgtgcaaagatgatttggatgtttttgatggcgaaggcttagagcttgattatcacatt

SEQ ID NO: 27015 - DNA, 1113 bp, Moraxella catarrhalis
atgtcaatacacaatccgattaaacgccgccctaccaaaaaaatctatgttggcaatgtcgccatcggcggcgatgcacccatcagcgtgcaaagtatgacaaatacaaacacctgtgatattgatgcaacagttgcacaaattcagcgatgcgtggacgcaggtgcggacttgatgcgtgtatcgacaccaacgatggagagcgtcgctgcctttgctgagataaaaaaacgcgtatccattccactcattgccgatattcattttgatcacaaaatcgccattgcagtggcggatgtgggtgcagactgcctgcgtatcaatccaggtaatattggcaatgatcaaaaagtcaaagaagtggttgcagcggcacgccatcataatgtgccgattcgtatcggtgtgaatgcaggctcacttgaaaaggatttacaaaaaaaatatcgagaaccgacaggtgaggcgatgctagaatcggcgttacgccacattgatattttagaaaatcttaattttcagaattataaaatctcagtcaaagcctccaatgtatttttaacccttgatgcgtatcgattgatttcagcacaaattgataatccattgcatcttggcgttaccgaagcgggcgtatatcgcactggcacggtcaaatctgccattgctttgggcggtttgctacttgatggcattggcgataccatgcgtatctctttggcggcagcaccagaagaagagattaaaattggctttgacattctaaaatcactgggtattcgtagtaatggcgtcaattttattgcttgtccaagttgtagccgtcaagagtttgatgtgatcaaagtgatgaatgagcttgaagctcgcttagaggatattcgtgagccactagatctgtcagttattggctgtaaagtcaatgggccaggtgaagccaaagaagcgacgatcggtgtcgtgggagccagccccaatagtttggtttataaacatggtgcaaaaagccatctgattgataccaaaaaattggtagatgagattgaggcgatggtgcgtgctcaagtcaaagacattcaagataaacgggcaaatgagattatccgtataggc

SEQ ID NO: 27016 - DNA, 1266 bp, Moraxella catarrhalis
atgaataaaattaccgctatccgtggctttaatgatgtgttgcccgagcaaacaccagcatggcgtgcaatggaacgaacattaattgaggtgatggatagctatggctatagccaaatccgtttgcctttggttgaagaaactcagctatttgcacgaggtgtcggtgaagcgacagatattgttgaaaaagaaatgtttggcgttgtacatggcggaaataagggcgatgaaggatcttcttttactttacgccccgaaggtactgcaggatgtgtacgggcaattgttgagcataacttaactcgtggtgatacaccaaaattatggtacttaggcccgatgtttcgttatgaacgcccccaaaaaggtcgctatcgccaatttcatcaattgggcgtagagtattttggcgctgagttgcccgatgctgatgctgagttgatcgctatgacttatcatatgtggcaaaaactgggtatcggtgagcatgtgacactccagctaaatactttgggcgagaccgatgagcgtgttgcatataagtcagcactggttgaatatttgacaacacaccaagaggctttggatgatgattcaaaacgccgtttaaataccaatccactgcgtattttggattccaaagatgaaaacactcaacaaatcctaaaaaatgcacctaagcttggtgagtttttgggtgaggcatcgttggctcattttgaaaaagtacaaaactatttgtccgcattgggtatttcgtttgagataaacgataaattggtgcgtggcttggattattataacaaaaccgtttttgaatgggtaactgacaaattaggttcacaagcgaccgtctgtggcggcggtcgttatgatggcttggtgggtattatcaaaggtaacgctgagcagtcagagcctgcggttgggttcgctatgggtcttgaacgcttaatgctattgattgatgccgttaatccttatcaggtcgcatcttggtgtgatgtttttgtgattgctcaccctgattattatattgatggcttaaagtacgccgaatcacttcgcttgcgtcaggataatttacgcgtcaaaatggcaagtgcaacaggcttaaaatcacaaatgaaaaaagccgataaatcaggtgcagcttatacggtcatcatcgcagaagatgaggtaaatgccaaccaaatcaccattaagacaatggcaactggtgaacaacgccgtgcacccattgattatcaatttatacga

SEQ ID NO: 27017 - DNA, 1176 bp, Moraxella catarrhalis
atgtatcagcgctttatcaataccgcattggttgcagctttggcggtaactatggcaggttgtggcaccaaagccatcaagccaaccgaacgcaagcctgccaaattggttaatattcagacgccagtcgctgtattaacacaggtatcaagtatccgcttggatcaaggtcgatctggctttagtcgtcgtaataccaacctaagaaaggatgttattgatttacaaattgcaccgttggcagatggtatgattgcagcaagtcgcagtggtatcgtcagtggttacatgggtgaatcgattgcttggcaatataatgctgaagatgtgatcactggcggtgtcggtattgatgatcaaggtagtgtggcggtcattggtacgcgttcagggaaattaattgcattagatgctcgcacaggtgcagcacgctgggtagtagaattggcttcttctagtttggcaccagcattgattagtggtgataaagtgattgtcatcactaacagtggtacgatttttggattggatattaatagtggtgcgacagtttggcagtatgccactcaggtaccaaataccagtgtgcgtggtatggcaaagcctttggcgcttgatgctcgcacggtattgattggtggtgctgatgggcgtattcatgcactagataccatgacaggtgcaccagtgtggactcgccgtgtgggactggcgatgggttctggagaaattgatcagctgcgtgatattgatgggacaccgaccgtcgtagatcattatctatacgctgccagctacagcggacaattagctgggtttgatatgacaacagggcgtaccatgtttgtcagcgagctatctagcaccaaaaagctgaccactttggctgatgctgtcatcggtagtagcactgatggtgatgtggttgcctttaaccgaatgactggcgagaagctttgggaaaatcatgatctaaaatatcgtggattgaccaatcctgtaaccatcggcacttatattgctgttggggatgcagatggtgtggtacatattttaaatcatcaaggtcaaattatcagccgagccaataccaaaggtgctttgaccaacttaactgtgatcaataatcgcttatatgcccaatcagcagatggcgttgtgactgtttggcaattt

SEQ ID NO: 27018 - DNA, 1416 bp, Moraxella catarrhalis
atgagtataaaacctgtggtcgccttgattggtcgccctaatgtcggtaaatcgactttatttaatcagttaacaaagagtcgtcaagcattggtggcggatttggcgggtctaacccgtgatcgtcagtatggtgatgcacattttgaaaacaagtcattcattgtcgttgacactggcggtatcggtgagatggatgatggttcgggcaatattgatgattatatggcgactcagtcatatacggcgattcatgaagcggatattgttgtttttgtcgtagatgctcgtgcaggattgattggtgcagatagtgagattgcacattttttacacaccttgggtaagcctgtatttttggtagcaaacaagatggatggcgttcatgaagcggcatatgcagagttttttgctttaggttttggtgaaccgtatgctaccgcagccagtcatggtagaggcgttaccaatttgcttgagtctttgacggcggatatgcctgaagatatgcccaaagatgagcttgatagcaaaaccttaaagcttgccatcattggtcgccccaatgtcggcaaatcaaccttagtcaatcgcttgctgggcgaagatcgtgtggtggtctttgatatgccaggcacaacgcgtgacagtatttatattccttttgagcgagaagggcgtagctatgtcctcatcgatacagcgggcgtgcgtcgccgtggtcgcattgatgagaaagtggaaaaattttctgtcgtcaagacgctacaagccattaaagatgccaatgtcgtggtgctggtcattgatgccaaagaaggtattgttgatcaagatttgcatatgcttggatatgcactagacgcagggcgtgccattgtcgtggcaatcaataaatgggatggcttaagccaagaccaaaaagactttgtcaaaattgaaattgaccgccgttttaattttgtgccttgggtaaaaattcatttaatttctgctttatatggtaatggtgtgggtaaactttatccttctattcataaagcctatgaagcatcaatgtttaaggtttcaaccaatcagctgacacgaattttagaagatgctgttgccagccatccaccaccaatggtgggtggtcgtagaattaagctaagatatgcacatttgggtgggcataatcctcctgtcatcgtcattcatggcaatcaaacgagcagtctgccaaaaagctatcagcgttatcttgaaaatgtttttcgcaatgtctataaactcgaagggacaccactgcaggtagaatttaagcaaaatgccaacccatatgaaggcaagaaaaatcctgtcgttaaaaacaaagccaagttgatgcgtgagaaaaaacgcattcagcggtttaagcgtgccgagaaaaaacga

SEQ ID NO: 27019 - DNA, 717 bp, Moraxella catarrhalis
atgaatgattgtaccatcttcactaaacccaatgcggttttatcaagtcatgccccaatcgtcggtatcgatgaggttggacggggcgctttatttggcaatatgactgtcggtgcggttatcttgcccaatgaactcagcggccgctttgatgagatagatttaacaaatactaaaatttctttattaaatgacagtaaaaagctgagtgaaaaacggcgagaacaactgtttgacatcatcacagatttggcacttgattatgcgattgttgatgtaccaagcactattattgatcagattaatatttatcaagcaacgatgcttgggatgaaaattgccattgagacaattattattaagaataatttaaatgaaaaaaacacaactattttgatagatggcaatcagctaccttcaatggatggcagtttgggcgaacactttcatcagatttatgccatgatcaaaggagatgctactcatagcagtattgcttgtgccagcatattggctaaagtgcatcgtgatcgtttgatgattcagcatgccaaatcttatcctgaatatctgcttgataaacataaaggctatctgaccgccaagcataaagctgccatcttagaatatggtattttacctgagcatcggcgtagcttctcaccgattcgtgaattatacaatcaaggatttattaattctaactattggcattca

SEQ ID NO: 27020 - DNA, 1278 bp, Moraxella catarrhalis
atgacaaatacatcgtcacttacgatcggcatcgtggcaggtgaagtctcaggagatgcacttggcggtgattttatgcagaaaatgaacgccctacacccaaatattcgatgggtcggcgtcggtgggcggtcaatggcagcacaggggctaagctcagtgattgatatgggacgcttatcggtgatgggtttggcagaggtgatgatgcatttacctgatttgttaaaagccaaaaagcaaatcatcacagcgtttaaaacgcatcagattgatctgtttattggtattgatgcacccgattttaaccttcgaatcggtaaaatattaaagccccaaggtgttttttgtgtccaatatgtcagcccctcgatttgggcatggcgagaaggtcgcattcatcacatcaaagcagcgacagacttggtattgtgcttgtttccgtttgaactgggtgtttatcaaaaatatgcccatcctgctgtttgcgttggacatccacttttaaataaacttcacgcccatcaggatagcccaaaggtgcgtttggaaaattttattcaccaatatcataatcaccatcatagtgtaacatcactcacaaaagcaagtcatattatttgtctgatggcaggttcacgcacctctgaaatccgagccatgttaccgctattattaacaagtgcacaaaacattcatcagcaaataccaaccgtgcagtttgtgctgccagtcgtgagtgctgagcatgcacgattagtgcatgaaattttgcacactcatcatgccaatttggtcaactgtgtccatattttggatgatcacaatcggtctcaaaaacaaaaccaacctgcgatcagtcatgcgtgtatgaccatcagtgatgtggtacttttggcatcaggtacagcaacgctagaatgcttactacttgagcgtcctatggttgtcgtctatcaagtcaatccgcttacttttatgattgccaagcgtttggttaaaattccttatgtgtcattgcccaatatcttggccaagcagtatcttggtcatccaatcgtacctgaactactacaatctgacgccaccgccgaaaaagtcagcaccaaagcattagggattattcaccacccaaacaaacaaaccaaacagcttagcaatatttcagcgtggctacgcagccaaagtcaccaaaactccgccaaagccgtgctggatcattattttatgagtactaaaaaatcatatgacacacaccatatcaccaaagcttatgaa

SEQ ID NO: 27021 - DNA, 1070 bp, Moraxella catarrhalis
tttcaaccagaaaccaatggtcaagcacgaatcattgtctttggtgttggcggcggtggcggtaatgctgttgagcatatggttcgccaaaatgttttgggcattacttttgtttgtgccaatactgacttacaagcactaaataaattatcagcaccaaataaaatccaaatcggtgcggacgcaactcgcggcttgggtgctggcgctaaccctgaagttggtcgtaatgccgctgagagcaatgaagatgaaatccgtgccatgctcgagggttataatatggcattcatcaccgcagtatgggcggtggtacaggtacaggtgcagcccctgtggttgctcgcattgcaaaagaaatgggcattttgacggttgcagttgtcacaacaccgtttagttttgagggcaaacgccgagctgctgctgctcgtaacggcattgatgctttgacccaacatgtagactcaatcattaccattcctaatgataagctgactcaagcatatcgcaatttgacgatggtagatgcttttaaaaaggcggatgatgttttattacatgcggtaaatggtttgactgaaaccatcgtaaacccaggtatgattaacatcgactttgaggatgtgcgtactgcaatgagtgccaaaggtcatgcgatgatgggtatcggccgtgctagcggtactaatcgtgcctctgaagcgatggaaaaagccattcgctctcctttacttgatgatctcaatctaagaaatgcccaaggcttgattattaatatcatcggttctggtgtgagtatggatgaggtgatgtctatcgttgccattggtgagggcatgatggatgaagatgcacatgtattttatggtttggtagaagatcctgatatggaagatgagattcatgtgacggtcgttgcgacaggtctgacggttaatgagcgggcagtaccagtcaaattatcaggaaataagcaagaaacattaagaacgcatacaagtgcattggcagaagaaaatcagcaagcctccattccacgccaaggtgtaccaaagccgatcagtgtt

SEQ ID NO: 27022 - DNA, 984 bp, Moraxella catarrhalis
atgatagaaccaaagtcctgcccatatggcggggcttttttaatgttaatgatgccagttgatgatgaattgggaatttggattatgaaaaaaatagacctgcacatgcacagtacttgctctgatggtactaatacaccaacagaattgattaaaaaagtcgctttggcaggcattcagatggcggcattaaccgatcatgatacaatcaaaggattggatgaagccaaacagactgctaaaatggtcggcgtggagctgattcgaggggtagaagtcagttgcacccataccttatctgggggctatggtaagcatcaagaaattgataaaattatccatgttgttgcactgaatttttcggatacactcaagatgaatgaagcactgcaatcactacaagacagccgacatctgcgtggacgacaaatgacccaaaaacttgccagtttattgatgaatcatcctgatgaagagcctgtactttttgagcatttgtggcaaaaggtgctaatcaaagcagatggtaatgctcgtgctgttgggcgtgcacacattggtcaagttttgtatgaattgggctatgtgtctagtgtgcaggctgcctttgataaatatttagcagacaataaaccagcttatgtacccatacagaccatcagcatggcagatgcgattgcacttattcatgagtgtggcggcttggctgtgcttgctcatccaacacggtataaactatctgcaacacgcacgcaaaggctcatcagtgattttgctcaatatggtggcgatggctgtgaattgccaaatcatgagccattaagttgtattgagatggttggccgtacaattgctaaacatggtttggcaatatcacttggtagcgattttcatggcgacacgatgccatggcgaaagcttggctcaacggcagtgaagagcgataaccaaataggcatctgggagcggtttggtgaaatatac

SEQ ID NO: 27023 - DNA, 1011 bp, Moraxella catarrhalis
atgtatgatgtcgttgctattggtaatgccttggttgacaccgaattcaccctatccgatgccgctttagatgccacaggtttggctcgtggcaatatgaccttagtagataccaatggtcaaaatatgctgtttgccgccctaaatgaacaaaacctaaaacctgccaaacaagcaggtggcggctcagcagccaatagcatggtggcgtttgccgcactgggcggtcgtgcttattatcattgccgtgttggtggtgatgatatgggtgatttttatttgggtgatttagccaatttgggcgttgcaaccgatgccacctacgctgtgcaagcagatgggacaacaggctcttgtgtggtattggtcacaccagatgcagaacgcaccatgcaaacgcatttgggtacaagcagtgaaattaatactgacaatattaattttcagacactcaaagacgcaaaatggctgtatttagaagggtatcttgccatgtcaccttcagccactgatgcactaagccagctgtacgagcatgcacgcaaaactggtgctaaagttgcggtgagctttgctgatcctgctgtggtaaaatttgccaaagaagggttaagtgccatcttaaaccgtggtgtagatgcgatattttgtaatgctgaggaagcggcattgtttgccgatgcagatgccgatcctgtcaatacactattaaaatacagtgacttggtggtcattaccaattcagataaaccaaccaccattgcctgtcgcatcgatgatcgcattatcgagcatcacattgatagctgtgttgtcagtcaagtcatcgataccaatggtgcaggtgataattacgcaggtgcgatgttatatggtttatcgcaaaatcttgatttgccaaattgtggacgcttggcggcagctgtggcggcagctgtggtgggtcagtttggaccacgattaagcatcgcagagtatcaaaccatcaaaaaacgcaccgtatcattgaca

SEQ ID NO: 27024 - DNA, 1218 bp, Moraxella catarrhalis
gtgagcatcagtgtagacactcttattatcggcgcaggggcatcggggctgttttgtgcttttaatacggcggcatatggcaaatcggtactcattattgatcacgccaataaagcgggcaaaaaaattcttatgtcaggtggcggtcgttgtaatttcgttaataaacaagttgaaccatgccattttatcagtcaaaatccgcattttgtcaaatctgccctatcaaaatatcagccagaagattttattgatttggtcaaccgccatcacattgcccatcaagagcgtgaacatggtcagctattttgtaaaaacagtgccaaagacattttatcaatgctactaaacgaatgccacatggcaggggttgatattcatctaaaaacaaccgtccaagatattcaagtaactgatactcattttttggtcactgtcaaatctcaacctgataatcgcatcaaagtcattcaagcacacgctttagtcatagcaacaggcgggctatcaattccaacactgggtgcaagtggttttggctatcaagttgccacgcagtttggacatcaaattattccaactcgtgcaggactagtcccttttactttcaccgataaagtcggtgagatgataaaatcattagcagggttaagtcttgatgtgattgcttataatgacaaagcatcgtttgatttaccgatattatttacacatcgtggtttatcaggccctgccatattacaattatcaaatcactggcaagcaggcgagcaaattaccatcaacctagtccccacccaagatgtgtatcagtatctattagatgcaaagcgaatacaccccaagcaattactgcgaactgccctagcagccttattgcccaaaaaactcatcagtggatttgaaccattgttctggcaagcttatcaaaatattgaacttgccaatttaaaagatgaaaccatgcatcacattggtcagcagttaaatgcttggcaccttaaacccagtggcaccgaaggctatcgtgtcgcagaggtgactttgggcggtgttgatacgcatgatatctcaggaaaaaccatggaatcacgccgacagccaaatctgtattttatcggcgaggtgcttgatgtggcaggacagcttggcggctacaactttacttgggcgtgggcaagtggttatgcctgtgctcagagcattggggtgcggtgg

SEQ ID NO: 27025 - DNA, 657 bp, Moraxella catarrhalis
atgagtttaaatccacaatctcggtcaattaaaaccccctcggtatttaatttacctaataatctaaccatcgcacgcattgtgatgattcctctatttgttgcgattgcctattggccgcctgcacttggcattggcgtgcctgcgattcctgataatgccatcgcacgcttgggcatgatgggctatagcgacagtatgctgcgacatctgatcttgacattgctgtttattttggcggcagtcacagactggctggatggttatttggctcggcgtatgaatatcacatcagcgtttgggcgatttttggatcctgtggcagataaactgatggtggcagctgcgttaattgtccttgtgcagtggcatccaaatattgtgatggcaacgagtgccattgtgattatttcacgcgagattgcggtatcggcattgcgggaatggatggcggagcttggtgcacgcacgagcgtggcggtgtcttatgtggggaaattaaagaccacttttcagatgattgccattacggtatttttgcttaattggcaatcgcttgagatgatcggctatgtgctgatggtcattgcggtcattttgacgctttggtcgatgatgatttatctaaaagctgcttggccatatcttaagcagcca

SEQ ID NO: 27026 - DNA, 2076 bp, Moraxella catarrhalis
atgaccacgattttatttgaacttggcaccgaagagttgccaccaaaaaacctaaaaacactgcgtgatgcccttaaaaatagcgttggcactttactaaatgatcaaaatatcagctttgatgatattcatgcctttgccgcaccacgccgtttggcacttactattacaggtgtgggcgagtttcagcctgaccgtatcgaaactaaaaaaggtccaagtgttaaggcagcgtttgatgacgcaggtaatttaacgcgtgcagggcaaggatttttgcaaggtttaaatgccactgggcgaaatcttagcgtcaaagatttggggcgtattgctgataaaaaaggcgagtacatcgcttatgatttgaccattaaaggcgaaaaaatcaccgatttaatgccaaatatcttacaaaaagcgcttgatgatttgccaattgctaagcgtatgcgttctggcattgatcgccatgagttcatacggcctgttcattgggtggttttgatgtcagatgatgttgtaattgaggcgaccattcaaggccataaaactggcaaccaaagccgtggtcatcgctatcattcacctgatttttttgccattgatcatgccgatcattatgaaaatttacttaaaaaccatcatgtcattgctgattttgatcagcgtcaagccgatattttagcacaagtcaaaacattggctgatgatgtgaatggcacggcaatcatgcctcaagaattgcttgatgaggtcacagctttggtggatttgcccgttgcgttaagagcaagctttcctgagcgatttttagccgttcctcaagaagcccttatcagcaccatgcaggctgatcaaaagtatttttgcttgaccgatcaagcaggcaagctgatgccgcattttatttttatcagtaatatcaactctaaagattctgctcagattattacgggtaatgaaaaagttgttcgtcctcgtctgtcagatgcagagttttttttcttacaagatcaaaaacagccactgtttgagctgaaccatcatctaaaaactcagatttttcaagataagcttggtacattgtgggaaaaatctgagcgtattgcaaatttggccgcccatattgcagatcagataggtgctaataccgatgcagcgtatcgagctggattgttatccaaatgcgatttggcgagtagattggtgggtgaattccccgaattgcaaggcattgcgggtacttactatgcacgcctaaatcatgagcctgatgtggtggcagatgccatcgaagaacaatatttaccaaaatttagtggtgataagctgcctgccactcatgtgggtgttgcacttgcattggcagatcgtttggatacgctggtgggcatttttgggattggtgaaatacccagtggctctaaagacccatttagcttacgccgtgcgtctattgggattttgcgtattttaattgaaaaacgcctgcgtgtgagcctatctcatctggttaaacaagccttaatgggctatggcgatatacttgaaaatatcgatcagaccctaacagaagtcatggaatttatcaatgcgcgctatcgggcgatgtacagtgagcagggcgtcttggtggatacgattcaggcggtgcaggcggtgcagacagatgtgccgatggattttgatgagcgtatccaagcggtaacagcatttcgattgttgccacaagcggctattttggccgaaaataataagcgtgtggcaaatattttggcaaaagctggtactgtgcaaggtgatgtaacgccccaaaatctgattgaacctgctgagcaggcactgtatcaggcgatcgaatctgccaaagtcagcgttcagcccttgcataatcatggcgattaccaaggcattttgacgacccttgtgagcttatcggagcctttgacgcagttttttgatcatgtcatggtgaatgctgatgatgaaactttaaaacagaatcgtttggcactgcttagccaagtgcgtaagctttttttgagtgtggcggatattgggctgcttcaatcg

SEQ ID NO: 27027 - DNA, 1260 bp, Moraxella catarrhalis
atgtttaaagaaatttcgctacatcaatacgacccagaattggcaacacaaattgatgccgaaaccaaacgccaagaagatcatattgagcttatcgcatcagaaaattactgctcacctgctgtcatgcaagcccaaggctcaaccttaaccaataaatacgccgaaggttatccaaaaaaacgctactatggtggttgtgagcatgttgatgccatcgagcaaattgccattgaccgtgccaaagaactgtttggtgctgattatgtcaatgtacaaccacattcaggttcaagtgccaacagtgcggtatttctggcattacttgagccaaatgacactgtacttggtatgagcttagcacatggtggtcacctaacccatggggcatctgtcaatttttcaggacgcaattatcatgcggttcaatatggattggacaccgaaactggcttgattgattatgaagaagtcgcccgcctagcccgtgagcataagcccaaaatgatcattgcaggtttttcagcatacagccaaatcattgactggcaaaagttccgtgacattgccgatgaggtaggcgcatatttgatggcggatatggcacatgttgcaggtcttgtggcaactggcatttacccaagccctgtacaaattgccgatgtcaccaccacaaccactcataagacactgcgtggtccacgctctggtttaattttagccaaagccaatgaagagattgagaaaaaattggcatctgctgtttttccaggtagtcaaggcggtccgctgatgcatgctatcgccgctaaagctgtttgctttaaagaggcaatgagtgatgattttcagagctatcaaaagcaagtcattatcaatgccaaagcgatggcagaggttatccaaagtcgtggctatgaaattgtctctggtggcaccaaaaaccatctgatgcttatcagcttaatcaaacaaggcatcactggtaaagaggcggacaaatggcttggcgatgctcacattactgtgaacaaaaattctgtgccaaatgacccaaaatcaccatttgtaacaagtggtatccgcattggtacgcctgccgttaccacgcgtggctttggtgaagctgaggttcgtgaattggctggctggatttgtgatgttttagacgcacgaggtgatgaagcagtcttagcagcaacgcgtgaaaagattgcccaaatttgtaacaaattgcctgtttatgagcgtaatgtggca

SEQ ID NO: 27028 - DNA, 1596 bp, Moraxella catarrhalis
atgacctaccaatcagccctagaacatgttcgctctgttaaagccaaattaggtaatcattggaacgccatccgcccagaagatgccgctcgtatggttgtccaaaaccgttttaaaacaggtcttgatatcgccaaatacaccgcaagcatcatgcgtcgtgatatggcagagtatgatgctgataactcaaaatacacccaatcccttggctgttggcatggatttatcgcccagcaaaagatgattgccaacaaaaaatactttggcactaccagcaaacgctacatctatctatcaggttggatggttgctgcattgcgttctgaatttggtccattgcctgaccaatccatgcacgaaaaaaccgccgtaccaaaactcattgaagagatttatacttttcttcgtcaagcagatgccaaagagctaaatgatttattccgtgccttgcaacaagcagagcaagcaggcgatgaggcaaaggtcaaagaaattgaagcgaaaattgacaactttgaaacccatgttgtgccaatcatcgctgacattgatgcaggttttggtaacgaagaagcaacctatttattaaccaaacaaatgattgaagcgggtgcttgtgccattcaaattgaaaatcaggtgtcagatgctaagcaatgtgggcatcaagcgggtaaagtgactgtaccacacgaagactttttggcaaaaattaacgccgtgcgttatgcgttcttagagcttggcgtggatgagggcgtgattgtggcccgtaccgactcagagggtgctgatttgacccaaaaaatcccagtcagccgtgaagcgggcgatttggcgagtaaatacatcagctatttacagaccaccgagattgacatcagtgaagccaaagaagatgaaattcttatcaagcgtaacggcaagctacaccgcccaactcgtctgccatcgggtctatatcaattccgtgaaggcacgcagcatgagcgtgtggtgctagattgtatcacatcgctacaaaacggtgcggacatgatttggattgagaccccaaccccagatgtggcgggcattgcaagatttgtcaatgacatcaaaaaacaagtaccagatgccaaattggtgtacaacaattcaccatcgtttaactggacaatcaacttccgccaacaagcctatgaccgctgggcggatgaaggtcgtgatttatcaggctatgaccgtgataagctcatggatgcccaatatgatgacagtgagcttgcttatgatgctgatgaaaaaatccgtactttccaagcagatgctgcccgtgaagctggcgtatttcaccatctcatcacattacccacttatcacactgccgctttatctacccatgagcttgccaaaggctactttggcgatgagggcatgcttgcctatgtcgctggtgtgcagcgtaaagagattcgtgatggtgtcgcttgcgtgaaacaccaagccatggcaggctctgacattggcgatgaccacaaagagattttctcaggtgaaaacgccctaaaagcgggcgatgcaagtaagaacaccatgaaccaatttggcggt

SEQ ID NO: 27029 - DNA, 1767 bp, Moraxella catarrhalis
atggtgcgtcaagattcccaaaaaacactcacacttagcccaagattgaccgagccactcaatcaggcactgcgtgatcagctggactcatcaacacttgcacgagttttacaggctaggggtgtacacgatatcagccaaatagatacgcacatctgccagctgcttgcggcagcagatttgatgggtattgatacagcggttacgctcattgataccgccattgaccaaggtgagcgtattttaattgtcggtgattttgattgtgatggggcaaccagtacggcattgatggtgcgtgtcctgcgacaaatgggcgctttggtggattttttggtgcctgaccgatttaagttcggctatggactgacaccgcaaattgttgagcatggtgctgcattgtatcgcccaaacttaatcatcacggtggataatggcatctcaagccatgatggtgtggccactgcccatcagatggggatcaaggtggtgattaccgaccatcatttgaccaccaaaccatcaccgcctgccgatgctgtggtcaatcccaatcagttgggttgtcattttggtagtcgctatcttgttggtgtgggtgtggcgttttatgtgatgggcaggcttgccaagcatcgccgccaactgggcaaatccagtgccagcgtggctaagtatttagatttggttgctctaggcacagtcgcagaccttggtgtgctggataaaaataaccgcattttggtcacgcatgggctgcagctgatccgtcaaggtcgatgcgtcgtgggcattttagccatcttagagcaggcaggtaggcaacatcagaccatcaccagtgacgattttggatttgccatcgcacctaggattaatgccgctggacggatggataacatgcgtattggtgtggagtgtctacttactgatgattggggagaggcacaccgattggcaagtaagctaaaccagcttaatcaagcacgccgccatgttgagatgagcatgaaagatgatgccattgccattgtccaaagtttatctgagtttgatgagacaccgcctaaaggcattgtgctttatcaagatgactggcatcaaggggttatcggtattgttgcaggtcgcctaaaagaaaaattgtaccgtccaagcatcgtttttgcaccagcagataccgcattggtcggcaagtcagatgatatcaaaggctcagctcgttctattgcaggcatacatattcgtgatgtcattgaaagcgtggcattggctcatcctgatttgatcaagcattttggcggtcatgcaatggcagcaggcttgaccattcaaaaggctgattttgaacgatttaatcaagcactccaagcggtactgttggattttgatgatgatgtattttatgaacaaaaattcaccgatggagcgttattgcctgacgagtttagcctaagttttgtggatagattaaaaaacatcagcgtttggggcaatggttttgtaccgcctgtttttgatggcaagtttgaggtgattaaccatcgtatcttaaaagataaacatctaaaacttagcctaaaaatggcaggggtgcaatatccgattgatgcgatttggtttaattatcaagcggacagttgggattatcgagcgtttggcgtgcatattttgtatactttggatattaatgagtggcaaggcagccaaagtctgcagctggtgattaaggacttggcggtgatgagtgtggcggcattgtctgtt

SEQ ID NO: 27030 - DNA, 417 bp, Moraxella catarrhalis
atgatgaacgcagccacctttaccccttatcaacctactgaaggcgaagactatatgtctgatgcacagttagcacattttcgcaccatcttaaaaaactggcgtgaagaattaattacagaagctgaacgcacaaagacttatattcacgaagaaaccaacaccatgccagatattaacgaccgagcgactcaagaagaggagtttgcattggcactgcgtacccgtgaccgtgagcgtaagcttatccgcaaaattgacaaatctttggctgacattgagaccttagattatggctattgtgagacatgtggtacagaaattggtctgcgtcgcctagaagcacgcccaacggcgacacaatgcatcgactgtaagacactgtctgaaattaaagaaagacaaaatcacggtcaa

SEQ ID NO: 27031 - DNA, 1128 bp, Moraxella catarrhalis
atgagttactctattttttgccaaactaaaaataatgtcttgttagagccgatgttttttggtcaacccgtgaatgtctctcgttatgatcaacaaaagcatccgatttttgagcaactcatcgaaaaacaactgtcatttttttggcgtcccgaagaaatcgatgtctcaaaggatcgtattgattttgccgaactttctacgcatgagcaacatatttttttaagtaatcttaaatatcagactctgttagacagtatccaaggtcgtagcccaaatgtggttttattgcccttagtttctattccagaacttgagacttggattgagacttggtcatttagtgagacgattcattcacgcagttacacacatattattcgcaatgtggtcaatgaccctagtaaaatttttgaagatattgtggataatgaatatattcttgagcgtgcaagtgatatcgccaaatattacgatgacttgcatttatgtgccaaattgtatgatttgcatggtgagggcgtttatcagattgatgggcagtctgttgaggttacgctaccaaaactaaaaaaacagctgtatttgtgtattgtcgctgtcaatgtgcttgaagccattcgcttttatgtatcatttgcctgttcgtttgcatttgctgagcgtaaagtgatggagggtaatgcgaaaattattaaaatgattgcgcgtgatgaagcattgcatttaaatggcactcagcatatgatcaatctgatgcgtcaaggcagagatgatcctgacatggttgccattgccgaagcgtgtcaagaagaagcgattgagatttttaaaagtgctgccgaacaagaaaaagcttgggcaaactatttattcaaagatggttcaatgattggtctaaatcgagatattttatgccagtatattgagtttattacaaatactcgtatgtcggctattggattgccagctatttttgaaaccaaaaccaatcccattccttggattaatgcttggctgtcttcagacaatgttcaggttgcccctcaagaaaccgaaattaccacttatttggttggtcagattgattctgatttagatgatgtggatttggacgattttgagcta

SEQ ID NO: 27032 - DNA, 594 bp, Moraxella catarrhalis
atgcgaattcgcaaactgtttaaatttgaaaatgcacacattgtgcgtaattgttcatccgatcgctgtaagcgatccatacatgggcatagttatgaagttgaactgattttggaggcacatcgccttgatcacggtcaaatggtttatgattttgggctattaaagcaccatatcaaagatatcatagacagttttgaccacgccatcactttttgggatcaggacgatacacgctatatccaagcttgcaaggactttagtgcgcgttggataagtttgcctgtatcaccttcagccgaacagtttagtcgagtgattttcttttgggcagatgccattttgaatcaaactgtcatgcaaaacggtgaacaagatatcagcgtttattctgtcattgtccatgagacagcgacaggctatgctcagtgctttaagcaagatgttgaaaatgaacaaatgggcgtacttagcttagctgattttgagtttagtgagcaagttaaatcagagtggagcgaccctcagatgtatgataagctgctaaaaggtgacgcatttgtcaatccaaaagtggatttgcaggttcaagta

SEQ ID NO: 27033 - DNA, 993 bp, Moraxella catarrhalis
atgtctgataataccaagacccatagcaatgaagataccatttcggcgttttttgagaatcgatcaacaccaaaaaatgagtcttttagggcagggtttgttgcaattgttgggcgtcccaatgttggcaaatcaacgcttatgaatcacatgcttggacaaaagctgtcgattacttcaagaaagccacagacaacccgccatcgtattcatggtatcttgacagatgaagataggcaaattgtgtttgttgatacacccggaattcacagtaaagaggtgcgtgctatcaatgagcgaatgaataaagctgccatttctgcgttagctgatgtggatgtggtgctgtttgtggttgatggcattcaatggcgagaagatgatttattaacgcttgagaagttatcagcgaccaatttacccgttatcttagtcattaataaagcagataccgttaaagacaaatcaaaacttttgcctgtcatcgaaagctttagcgaaagttttgattttgcagatatcatccctgtttctgcacttcgtcgccataatcttgatcgattacagtctgtcattggtgagtatttgccaatcagaccagccatttttgatgctgaacaaattaccgaccgctcagagcgttttttagcatcagagattattcgagaaaaaatcatgcgtatctctggtgatgaagtgccttatgatttgacggtacaaattgatacctttaaagatgagcctgcacataaagacccagagacaggaaaatggcgtaaagcggtgacattcattgatgcgacaatttttgtagagcgtgcaggtcaaaaatcaattatcattggcgataaaggggcaaaaatcaaacaagttggtattgatgcccgtaaagatatggaagtgttatttgaccgaaaaattatgctgactttatgggtaaaagttaagcgtggttggagtgatgatgagcgcgccctcaatagtttgggttat

SEQ ID NO: 27034 - DNA, 1386 bp, Moraxella catarrhalis
atgagcgatacactttcaaattcagccaaaccaaacatggactcaaacggtaaccctaccgatggtcgtggtgcttggaagcaatttttatgtcgtgcatgcggctggatttatgatgaaaaattgggcgatcctgatggcggattgcctgctggcacgcgttttgaggacattcctgaagattgggagtgtcctttgtgcggtgttaccaagcgagattttgagccatttgtcagccgagatgaagtggtcacccccttaattggtcaccatagtaagactggcgtcatcgtcatcggtggcggcacggcaggatggacagccatcgaagcgttaagaaagctaaatgaaaacttacccatcaccttaatcacaagcgatttgggcgatcgttatatgaagccgcagctctccatcgccatcagccaaaataaaacacccgaaacactcatcaccaaaaaagctgtcgacttagcacaagctttaaatgtgactttggttgcccaaacatttgtactaagtattgatactaatgagcgtatcgtgcgtaccacgcgtggtaattttagctatcaaaaattaattctagcgacaggggcgaccccaatgctgccgccgagcctgcctgctgaatatgtatggcgtgtcaatcacattgatatgtttgccaagctccaagcaaaactcatcgccaaacccaatcaacatatcaccatcatcggtgcaggcatgatcggtacagagattgccgaagatatcgccaaagcaggtcatcaagtcacactgatcaaccgtgacaacctaccgatggcggagattttacctaccattggtggtgaacgcctgcgtgatgctctgacaggaattggtattgattatattggcaatgctcatatcacagacatcaaaccccaagatggcggctatgtgattatttataatgataaaacactctatgccgatgagattatcgcaagtacaggtcttatattagataatcgacttgccaaaggggcgggcattgattacattcgctgcggtatcgtggtcaacccaaagacgctacaaacttctcaccctgccatctatgccatcggcgactgtatcgccattgatgataagccgtgccgatttgtcgcacccttgcgtgaacaagctgccgccatcgcacatcacatcagcgatatggcacacgcaggctatcaacacaaatcgcctttaatacgcctaaaaaccaaatccatcatcatttcggcgactggtgaaatcgaacaagccaaagactggcaagtacaagaaaataccgatgacaagctgatactcacccaaagtagcgacggcgtcatcaccgccaaaattgaaatgaaaacatcgccccaagccaat

SEQ ID NO: 27035 - DNA, 273 bp, Moraxella catarrhalis
atgcaaaaagtaaccatctataccacaccgacctgcccttattgcttggctgccaagcagcttttgaataataaatctgttgcttatgatgagattagcatgtatgatatcaatgctgaggatcgtgaagcactctcagccaaaaccaatggctatcgtactgtcccacaaatctttattggtgataatttcattggcggttttgatcagcttaataaattaaatgccgatggcaaacttgatgagcttttggcgcaatcatttagccatttt

SEQ ID NO: 27036 - DNA, 483 bp, Moraxella catarrhalis
atgataaaaatcggtcaaggcatagatgtgcattcattcacacagggtgattttgtgatgcttggcggtgtacgcattccccacagccatggcataaaggctcattcagatggcgatgtactgctacatgctttatcagatgcccttttgggagcgttggcattgggtgatattgggcagcattttcctgatgcagatgatgcttatcaaggtgctgatagcaaagttttgctaaaacatgtttatgcgttggtgcaagcaaaaagctatacgcttggcaacgctgacatgacggtcatttgtgaattaccgaagctatcaccgcacaaccttgccatgcgtgagtgcattgcaggcgtgttgggtgtcagtgtagactgtgtaagtatcaaggcaaccaccaacgaaaaaatgggctggatagggcgtggtgagggcatttgggcaagtgcaacggtgctgcttattaaaaaccatgcttat

SEQ ID NO: 27037 - DNA, 1869 bp, Moraxella catarrhalis
atgcaatcattaggaattaacatggcaacaaaccaagataacacaattaataatatcccaacgctaaactttgatgccgtcatcgttggcggtggcggttcaggcatgcgtgcgtcattgcaattagtcaatggtggtatgaaagtcgctgtcattaccaaagttttccccactcgctcacataccgttgcagcccaaggtggtatcggtgcatctttgggtaatatgagtcctgataactggcattttcatttttatgataccgtcaaaggctctgactggttaggtgaccaagatgccattgaatatatgtgccgtgaagcacctaaggtcgtttatgagctagaacacatgggcatgccctttgaccgtaacgcagatggtacgatttaccagcgtccatttggtggtcacagctcaaattatggcgaaaaacctgtgcctcgtgcgtgtgctgccgccgaccgtacaggtcatgcgcttttgcataccttataccaaaaaaatcttgaaaaaggcacacagttttttgtggagtggattgcgctcgacttgattaaagatgatgaaggtaatattaatggcgtgatcgccctagaccaagaaacaggtaatatttcggttttccaagccaataccacagtattagcaacaggtggtgcaggtcgtatctttaaagcatcaaccaatgcttatattaatacaggagatggcttgggcatggcggtgcgtgctggcattcctttgcaggacatggaattttggcaatttcacccaacaggtgtggcaggagctggcgtcctattgaccgaaggttgtcgtggtgagggtgcaattttacgcaataagcatggcgaagcattcatggagcgttatgccccaactctaaaagatttggcccctcgtgatttcgtctctcgctctatggaccaagagattaaagagggtcgtggttgtggtcccaatggtgattacattgtcatggacatgacgcacttaggtgctgctacgctgatgaagcgcttgccgtcagtgtttgagattagcaaaaactttggtaatgtggatattaccaaagaacctgtgcctgttgtgccgactatccattatatgatgggtggtattccaaccaacattcacggtcaggttactgtaccaaacctagaaggtcctgttgatgagcagggtctatataccgaaggccgtattgttaaaggtctttatgccattggtgagtgtgcgtgcgtatctgttcatggtgccaaccgcttgggtactaactcactgcttgatttggtggtgtttggtcgtgcagcaggtcagcacatcattgatgaatttaaccaaacggggcgtaattataagccgcttaatccacgggtgctagattttacccagtctcgtcttgataagctacaaaactctaccgaaggctacaatgcccaagaggttgctgatgagattcgtaataccatgcagtctcatgctggcgtgtttcgtactcaggcactgatggatgaaggtgtacaaaaaatcatggcacttgccccaaaagttgagcaaatccatttggcagataaatcagctgtctttaataccgcccgtattgaggcacttgaggtagcaaacttatatgaagttgcaaaagcaacgatgatttctgcgtctctgcgtcacgaatgtcgtggtgcacatatggtggttgattatgagcatccagcagattatgagccagcaccacttggccgtaatgatagcgaatggatgaagcacacactttggtattcagagggtaataaagttgtgtataagccagttcgtaagcagccattgacggttgattattgtgtgccgcgtgttcggactttc

SEQ ID NO: 27038 - DNA, 708 bp, Moraxella catarrhalis
atgagtcgaggcacccgtatcgtagagatttatcgctatgacccagacaaagataatgccccttatatgcagtcatataccgttgaattactagattcagaccgtatgttgcttgatgttttacttcgcctaaagcgtgaagatgaaaccttaactttccgccgctcgtgccgtgagggtatttgtggctctgatggtatgaatatcaatggcaaaaatggtttggcatgcttgattaatatgaatactttgccaaacaaaatcaccatccgacctttaccagggttgcctgtgattaaagatttggttgtggatatgaaccaattttatgaacagtatgaaaaagttcatccatatttaattaataaccagcctgcaccgcctaaagagcgattgcaatcaccagaagagcgtgaaaaaatgaacggtctttacgagtgtatcttgtgtgcgtgctgttcaacggcttgcccatcattttggtggaatcctgataaattcttaggcccatctgcattattaaatggctatcgttttattattgatagtcgtgataccgacacccaagctcgtttggctcgcttagatgacccatttagcttattccgttgccgtggtattatgaactgtgtcagcgtttgccccaaggggttaaacccaaccaaagccatcggtcatattcgtaatatgcttttagatcaagcagga

SEQ ID NO: 27039 - DNA, 2853 bp, Moraxella catarrhalis
atgacaaacagtagtaaagatacggtggcctttgcaaacaccgaattggcagcagacagtgcagcctatgtcgaagcactgtatgaacaatatatggcagacagccaaagtgtgagcaaagagtggcaagattattttgctacttatcgtcaagatgatgatgcaccacacaatgcaatcaaagagcagtttttattgttggcacgcaaccaatcaggattgaccgcaaaatcaagcgactcatctgtcgagcatcatcctaaacaaatggcggtgcaggcattaatttctgcctatcgtcgccgtggtcatcgcaaggcaaatcttgatccattggggctacatccgcgtccagaggttgaggatttgactttggcatttcatgggttggcggagtcagatttggacaccacatttccaaccaatgatttggcgattgggaaatcagaagctaaattgcgtgaaattatcgaaatcttagagcgtgtgtattgccaaagcattggttatgaatatatgcatgtttttcaagcggctgaaaagcgttggattgaaaattatatcgagtcaaatcacggtcatatcaaatttgacaaagataaaaaattagaaattctagagcgtctaacagcggctgaaggtttggagaaatacttagctcgtaaatatacaggtgtcaagcgttttggcctagaaggtggcgaaagcttcattcctgcagtgcatgagatggtacaacgcacaggtgctcatggctcaaaagaggttgtcattggtatggcacaccgtggccgtttgaatcttttggtcaatattttgggcaaaaaaccaagcgatttgtttgatgaatttgatggtaaagtgcagcctgttaatggttcaggggatgtaaaatatcacaatggtttttcatctaatgtcatgacaccaggcggtgagatgcacttggcattggcatttaacccatcacaccttgagattgtctctcccgtgcttcaaggttcggtaagagcacgccaagcacgccgttctgaaaaatatggcttacaaattgataacagtacggttttgcctttggtggtgcatggagatgccgcactggcaggtcagggtgttaaccaagagactttccaaatgtctcaaacacgcgcctataagactggcggtacggttcatattgtcatcaataaccaagttggctttaccacttctcgtattgaagacgctcgctcgacagagtattgtactgatgttgccaaaatggttcatgcaccgattttgcatgtcaatggcgatgaccctgaagcggtcgtatttgcctctcaattggctgtggattaccgccgtgaatttggcaaagatgttatgctagatattttctgttatcgccgtaatggtcataacgaatctgacgagccatctgcgacacagcctttgatgtatgcagtcatcaaaaaactaccgaccacgcgtgcccaatatgttgagcaattggttcaagagggcatcatcactcatgagcagggtgccaagcttgaagatgactatcgtgaactattggatcgtggtgagtttgttgcaggcggtttggtcagcgagccaaatactgaactgttcgttgattggaagccttatttaggtcacgatttgcaagacgactgggaaacgggcgtcgatatcgaaaagctcaaatcctatggtcgtgcgatggcaaaaatccctgaagggtttaccctgcagcgtcaagtggcgaaagtcgttgagcagcgtttggcgatgcaaactggtgaagaacctcttaactggggcgctgctgagactttggcatatgctagccttgctgctgaaggttcattggtgcgtattacaggcgaggatgtcggtcgtggcacattctcacatcgtcattcagaactgtataatatgaatgatggcagtatgtatattcctctgcaacatatcaccaaagaccaagcacgctttgccacttataattcactgctatcagaagaggcggtattggcttttgaatatggctatgccaccacagtgccgaatgcattgattatttgggaagcacagtttggcgactttgtgaacggtgcacaggtggtgatcgatcagtttatttcatctggcgaaaccaaatggcagcgtgtttgtggtttgacgatgcttttacctcatggttttgagggtcaaggtcctgagcattcatcagcgcgtctggagcgtttcttgcagctgtgtgctgaggataatatgcaggtcattacgccaacaacgccagcacagattttccatgccttacgccgtcaggtagtacgcccaatccgcaaaccattgattgtgatgtcgcctaagagcttgcttagacatccacttgcaacctctaatttagaagaattggcatcgggcaaatttgaaactgtcttgcctgaaattgattcaatcaatcatgagcaggtgacacgcttggtactttgtggcggtaaagtgtattatgatttgctcgatcagcgtcgcaaactgggtcaagagcatatcgccattgttcgtattgagcagctgtatccgttgcctgaagaacgcatcttggctgaaattgacaagtatccaaacttagaagaaatcatgtgggcacaagaagagccgctgaatcaaggtgcttggtattacttagcacctgagctattccgtatggtagtacctgcaccaacgaaggcaaaaatcattacaccttcggcgcgtcctgccgctgctgcacctgcgacaggctcaccaaaactgcacaccgaacaacaaaaagctttgattgctggggccttgggtgtgacagtggaagccttgaag

SEQ ID NO: 27040 - DNA, 1446 bp, Moraxella catarrhalis
atgaaaaattcttatgatttagttgtaattggtggcggtcctggtggctatgaagcagcgattcgtggggcacagctgggctttagtgttgcttgtatcgaaaagcgtgtacataaaggcgaacctgctcttggtggtacttgcctaaatgtgggctgtatcccatcaaaagccttacttgacagttcgcatcgctttgaggcgaccaagcatgaattgactgaccacggtatcacaacaggtgatgttaatattgacattgccaagatgcttgagcgtaaagacagcattgtcaaggggctaacccaaggcgtggcaggtcttttgaagggtaatggcgttgactggttacaaggctggggtacattggtcgatggtaaaggtgctgaaaaacaagtaaaatttacaccacttgagggcgatgaaagtatcattactgccaaatatgtgattctagcggcaggctctgtcccaattgagattcctgttgccaaaactgatggcgagtatatcgttgactcaacaggtgcgttggaatttgctgaggttccgaagcgtttgggtgtgattggtgctggtgtgattgggcttgagcttggctcggtttggcgtcgtttgggtgcagaggttgtgatttatgaagccatgccagaatttttggcagtcgctgacaaagacatctcaaaagaagcagcgaagctacttaaaaaacaaggccttgatatccgtgttgataccaaagtgacaggtgctgaggtaaaagatggtcaagtgatcgtaaccactgatgttaaaggtgaaactcaaacagatacctttgataagctcattgtgtgcgtaggtcgtcgtgcttatagtgaaaagctgttggcagaaaattgtggcattgagcttaccgagcgtggtttggtagcggttgatgaccaatgtaaaaccaacctagatggcgtttatgctatcggtgatttggttcgtggtccgatgcttgcccacaaagcgatggaagagggcatgatggctgttgaacgcattcatggcgaaaaagcccaagtcaactatgacaccatcatcagtgtgatttatacccatcctgagattgcgtgggtaggtctgtctgagcaagctgccaccgaacaaggttatgaagtgaaaacaggctcatttagcttatctgccaatggtcgtgcattagcacaaggtgagggcgttggcttgattaaagtggtggctgatgccaaaactgaccgtttattgggtatgcatgctgtatcagttggcgcaggtgatattgtccaccaaggcatgattgccatggaatttgtttctagtatcgaagatctgcagctgatgacttttgctcatccgacggtttctgaggcggtacatgaagctgcgttatcggcagatggcagagccattcatgccattcaacgcaaaaagcgtaag

SEQ ID NO: 27041 - DNA, 609 bp, Moraxella catarrhalis
atgcaaaagtgggtattagccagcaacaatcaaggtaagttggcagaatttcaggcgttatttgatgacgctgatttgggcgttcatatcatcactcaaggcagcttggggattggcgatgtcagcgaagatgggaagagttttattgaaaatgccatcatcaaagcacgccatgccgccaaagtcagtgggctgcctgcggtggcagatgattcagggctatgtgtccccattcttggcaacgcccctgggattttttcggcacgctatgctggacgacatggcgatgatgctgccaataatgccaaactgcttgagcaattaaaaccctatcgcagccgtgcccccattgatgccttttttgtctgtgtactggcgtatgtgcgtcatggcgacgatccgatgccacttatcgcaattggcaaatggcatggcgagatacttaatgaacctgtgggcgagcatggatttggctacgatccgctgttttatatccccaagcttaaaaaatcatccgcccagctggatcgtgccgccaaaaatgccatcagccaccgagcgtctgcactgcaagatttgcttcgccaattaaaagaaacttggctggtg

SEQ ID NO: 27042 - DNA, 1314 bp, Moraxella catarrhalis
atgacaaccaaagagataccaagttgctcattttgtggcaagaaaaaaaccgaagttcaaaagctcatcgcaggcaatgatgctaatatttgtaatgaatgcattgctgtttgcggggatttattgggagattggtcaaaaccaaccaaatcttctggtaagtcgtctgatcgatcagctgataccagccaccaatcagatgtccagctgagcattgaaacagatagcgataaagatgaatggcttaataaagttctgccaaaaccaaaagagctgcgagcacacttagatgattatgttattggtcaagatgttgctaaaaaggcactggctgtggcggtttataatcactataaacgcctgaaggttgctaatgataaaaaagatacggatggtgttgagttatccaaatcaaacatcttgcttatcggaccgacaggttcgggtaagacgctactggcacagacacttgccaagatgttggatgtcccatttgccatggcagatgcaacgacactgaccgaggcaggttatgtgggtgaagatgttgaaaatattgttcaaaaactgctgcaagcggcagactatgatgtccaaaaagccgaaaaaggtatcatttatattgatgagattgataaaatttctcgtaaaagcgaaaacccatcaatcacgcgtgatgtttcaggcgagggcgtgcagcaagcactgcttaagctcattgaggggacggtggcaaatattccaccccaaggcggtcgcaagcacccacgccaagagatgattcaggtagataccagcaatattttgatgattgtgggcggggcatttgctggactggataaagtgattcgccagcgtaccgaaaaaacaggtatcggttttcatgctgatgttaaagcccaagatgaatcaagcatcaccgaactatttcgtgaagtagaagctgaagatttgattaaatttggtctgattccagaattgatcggccgcctgccagtgattgcaagcttagaggaacttgacgaagctgccttggtgcaaattctcaccgaacctaaaaatgcactggtcaagcaatatcagtatctttttgatatggaaggtgttcaattaacctttgagcctgaagcactgaccgccatcgccaagcgtgcccaagagcgaaaaacgggtgctcgtggcttgcgttctatcattgaaaatgcactgatggatacgatgtatgagctacctagcatgaccgatatcgcagaagtgattgtcaccaaaggcgtcattgagtctggcaagccgccagtgactaagcctaaatcg

SEQ ID NO: 27043 - DNA, 666 bp, Moraxella catarrhalis
atgtttacaggaattattgaaaccacaggcagactcaaatccatcaatcagattggcggcgatgttcagttggtaatccatgcgccagacatggattttaatgatgtgcatcttggtgattcgattgcatcaaatggcatttgtctgaccgtggtggatattggtgataaaacttatgcggtggatgtatcacgtgaaacactgagcaagacggctttaaagaattggcgtactggcgatacagtcaatcttgaaaaagccatgcgaccaactatgcgttttggggggcatattgtcgcaggacatgtggatggtgtgggcgtgattcgtcatatctcaaaagacgcccgttcgatttatattgaaattgaaattccaagtgagcttatgcgttacgctgctgataaagggtcgatcactgttgatggcattagtctgacaaccaatgccattaagcctgaacaaaacattgtatgccttaatatcatcccacatacggccaaatgtactaatatcgatcggcattggtcggtgggtgggcttgtcaatattgaggtagatttgatttctcgatatcttgaaagattgttatttgcttcaaatcaagtacaaaagcctaccagtagcatttctgaagagttgctcaatcaggcaggattttacctt

SEQ ID NO: 27044 - DNA, 1236 bp, Moraxella catarrhalis
atgaaacctcttgccgaacgcatgcgtccaaccacgcttgatgctgtcattggtcaaacccacttacttagtgagggagcgccgatttttaatatcgtacgccaagggtttttgccgtctttgattttgcatggatcggcagggattggtaaaacgacacttgccatgctactggctgatgctgttggtcgtccgtttcgccccttatcagcagtcagtagtggcgtcaaagaactcagagaagtgctcagatctgacgatgggctatttcatgagccacctgtcgtctttgtcgatgagattcatcgatttaataaagctcagcaagatgctttgttacaagcggttgagacaggtgaaattactttgattggtgcgaccaccgaaaacccttcttttagcgtcaataatgctctactgtcacgctgtcaggtatataaacttgaacccttaagtgatgatgagatttatgcactcattgtgcgtgcaatacgacaagataccttactaaaaaccaaagacattcaaattaatgacttagcggcactcattgatctatctcaaggcgacggcaggcgtgcactgaatttacttgaacttgtggcagcagcacctgagccaattatcatcgataatgcttctgttgctgctgtggcaggtcagcccttggtacgctatgataaatcaggtgatgggcattatgaccttatctccgctatgatcaaatccgtgcgtggctcggatgcagatgcggcgatatactggatggctcggatattggcggcaggtgaggatcctgcatttgtcgcaaggcggctggtcattttagccagcgaggatatcgggcttgccaaccccaatgccctactactggcagatgctggactacgctcagttcagtccattggcatgcccgaggcacgcattattttggggcaagtgattatttatttggcaaatagtcctaaatcaaattcaagctacaacgccatcaatcgtgccttaaagcttgccgaaaccgatcaatcgcccgtaccactacatttacgcaatggtgtcaccaagcttatgcaagcagaaggctatggcatgggctatatctatccgcacgattatcccaatcattatcacccacagcagtacctacctgatgcactgataggtacacggttttatgaatttgctgataaccaaaaagagcaagccaattttgcctttatcaattgtctaaaaacc

SEQ ID NO: 27045 - DNA, 639 bp, Moraxella catarrhalis
atgccattttatccatcaactcacgagtacaccatgcaccaaattaaccctgaactgctgaccaaatccaaacagtggcggcatgatattcaattttctcaagaggtgctgggcaaaccctttaactttaccagtacttgggggatttttagccctgaaaaattagatgatggcagcttgatgttattagattatattgattttcaaacacaagataactccattgaccttggctgtggctatggcgtacttggcatgacggcggcgcgtgaatgcccaaagggtcatcatttattgattgataaagattttgttgccatagaatacgccaaacttaattgtaaaaataatgggcttggcaatgccgaggtgatgctttctaatggtttttatcatgtggataaatctcgccaatttagtctagtcatgagtaatttgccagccaaagccagcaaagaacagcactatttatacttacttgatgcttataatgccatgacaagtggcggtagattttatgttgtaaccatcaatggactgcgtgattttatgaagcgttcttttaccgaggtttttggcaatgccgataaaatcaagcaaggcaaaacctacactgtgaccatggcaatcaaagaatca

SEQ ID NO: 27046 - DNA, 3753 bp, Moraxella catarrhalis
atgagccatttactcgaccaactgcgattttttaaaagaaaacaaggtgaatttgccaacagccacggtgagactcgccatgaaaaccgtgaatgggaaaacagctatcgggcacgctggtcatatgacaaagtggtgcgttctacacatggggtgaactgcacaggttcatgctcttggaaaatctatgtcaaaaatggtctggtaacctgggagacacaacagacggactatcctcgcactcgcccagatttgcccaaccatgagcctcgtggctgtcctcgtggggcaagctatagctggtatatgtattctgccaaccgcttaaaatacccaaaagtgcgtaaaccattattaaaattatggcgtgaagccaaagccaaacataccgatcctgttttggcatgggcaagcattgttgaaaaccctaccaaatctgctgaatacaagtcaaaacgaggcttgggtggttttgtacgctcatcttggcaagagtgtgcagaaatcattgcagcagccaatgtttacaccgctaagacctttggtcctgaccgcatcattggtttttcacccattcctgcgatgtccatgctcagttatgcgtcagggtcaagatatttatcgctcataggtggtgcatgcttgtcgttttatgattggtattgcgacctgccgccagcttctcccatggtttggggtgagcagaccgatgttgctgaatctgctgattggtacaattccgattatatcattgcgtggggttcaaatgtgccacaaacccgtacgcctgacgctcacttttttaccgaggtgcgttataaaggcacaaaaacggttgccattaccccagattatgccgaaattgccaaactttgtgacctatggctgaacccaaaacaaggcacagatgccgccttggctcaagcattttgccatgtcatcatcaaagagttttatctgaaatctcaaagtgattacttccaagactatgccaaacgctacacggatttacccatgttggtggtgcttgaagaaaaagacgataagtttaaagcagggcgttttttacgggcatctgacttaattgacaatttaggtcaagaaaataatcctgaatggaaaaccatcgccatgaaccaaaatggtgagcttgtttcaccttatggttcaatcggttatcgctggggtgaaacagggcgttggaatttggaaaataaagaaggtcaacataatggcgacgtggatttgactttgtcattaaaaggttctggcgagacggcaagcgttggtttggactattttggtggtgatgaacacccctattttaccgctgccgctggtgatgccattcagtataaaaacattccttgccataccatcagtcttgccaatggacaaaccgccaaagtcgccaccgtttttgatttgatggttgccaatttgggggttgataatgggcatggtggtcaaaatgtcaccgatgattacaatgatgccaacattgcaggtacgcctgcttggcaagaaaaaatcactggtgtcagtcgtgaaaaggtgattcaaatcgcccgtgaatttgccgaaaatgcccacaaaactcaaggcaaatccatggtcatcatcggagcaggcatgaaccactggtatcatcttgacatgaattatcgtggtgtgattaatatgctgatgctctgtggctgtattggcaaatcagggggtggctgggctcactatgtgggtcaagaaaagctcagaccacaatctggttgggcgcctgttgcgtttggattggattggcacagaccaccacgccacatgaatagtacaagctttttttacaatcactcaagccaatggcggcatgaaactgtctctgcccatgaattgctttcatctcatgccaataaatcgcaatttccagagcatatgctcgattacaacattaaagctgagcgggcaggttggttgccatctgccccccaattaaaccaaaatccactgaccattgccccccaagcaaaagccaaaggcatgagtgttcaagattatgtggttgaaagtctgcacaatgggtcattgcgttttgctgccgaacaacccgacaatccgcaaaatttcccacgcaatatgtttatctggcggtcaaacttactgggttcatcaggtaaagggcatgagtacatgctcaaatacttgttagggacaaaaaatggcttattgggtgatgaaacggtacaaactggctttaaacccaacgaaattgactttgttgaaaatgccccaacgggtaaaattgatttggtaaccaccttagactttagaatgtccagcacatgtttgtattctgacattgtactgcccaccgccacatggtacgaaaaagaagacatcaacacatcagacatgcacccatttatccacccattcaccgctgccactgaccctgcgtgggaagcaaaaactgactgggagatttataaatacatcgctaaggcattctctcgcctttgtgttgggcatttgggaacacaaaccgatgtggttaccttacccatgcaacatgacagtgccgatgaattggctcaaccctttggtggcacagattggaaaagtgcaggtgaaaaacccatacccggcattaattgcccactcatcaaagttgtggaacgagattatcccagcacctatgccaagttcacttctcttggtcctttaatggacaagcttggtaataactctaaaggcattgactgggacaccaaagaagaagtgcaacaattggggcagttaaattatcgcattcatgatgacagcgtcgccaacacacgccccaatatgagcagtgtcgtcaatgccattgaaaccgtactgatgcttgccccagaaaccaacggtcatgttgcggttaaagcatgggcagaattatccaaaaaaacaggacgtgaccacactcatttggcaaaagccagtgagcatgaaaaaatccgctttaatgacattgttgcccaacccagaaaaatcatttcaagtcccacatggtcagggcttgaatctgacaaagtcagctacaacgcaggctacaccaatgtgcatgaactgattccatggcggacaatcacaggccgtcagcaattttatgttgagcacccttggatacaagcctttggcgaacaaatgcaacaataccgtccgccaattgacaccaaaaccacccaagcatttaaaaaatatcaatccaatggcaacaaagaaattgtgcttaattttttaacaccacaccaaaaatggggcattcacagcacctattcagaaaacctattgatgctcaccttaagtcgtggtggtccaattgtttggataagtgagattgatgcccaaaaagcaggcattgaagataatgattggattgaagtctttaatgccaacggggcaatcaccgcccgtgcggtggtcagccagcgagtcaaagaaggcatgaccatgatgtaccatgctcaagaaaaactggtgaatatcccaggttctgaaaactcaggtactcgtggtggtattcacaactcggttactcgcaccatcttaaaacccactcacatgattggtggttatgcccaattctcttatggctttaactactatggtacggttggttgtaaccgtgatgaatttgttgtggtgcgtaaaatggcaaatattgactggctagagggcagggctgatgatgaattgccacgcccattacccaccactttggac

SEQ ID NO: 27047 - DNA, 1536 bp, Moraxella catarrhalis
atgaaaattcgctcacaagttggcatggtgttaaaccttgataaatgtatcggttgccatacctgctcagtcacttgtaaaaatgtttggaccagccgagagggcatggaatacgcatggtttaacaatgtggaatccaaacccggtatcggttatccaaaagaatgggaaaaccaaggtaaatggaaaggtggttggatacgcaatgcagatggctcaattaatcccaaaattgggggtaaatttagagtgcttgccaatatttttgccaacccagatttgcccatgatagatgactattatgaaccatttgactttgactaccaacatctgcataccgccccaattggtgaacatcagcccattgcacgccctcgctccttaattacaggcaaacgcatacaaaaaattgaatgggggccaaattgggaagagattcttgggtcagagtttgctaagcgtcgccgtgataagaattttgatgacatacaagctgacatctatgggcaatatgaaaacacctttatgatgtatttgccacgcctatgtgagcattgtctaaacccaacttgtgtggcatcttgtccaagtggggcaatttataagcgtgaagaagatggcatcgtgctgattgaccaagacaaatgccgtggctggcgtatgtgcatctcaggctgcccttacaaaaaaatctattacaactggaaatcgggcaaatcagaaaaatgtatcttctgttacccccgtattgaagcaggcatgcccaccatctgctctgaaacttgtgtcggtcgcattcgctaccttggcgtattattgtatgatgcagacaaaatccacgaagttgccagcctatcaaatgaacaagatttataccaagcacaacttgatattttcttagacccacatgaccctaaagtcatcaaacaagccttacaagacggcgtgccaatgagcgtcatcgaatctgctcaaaaatcccctgtctataaactggcagtcgattggaagcttgctctgcccttgcacccagaataccgtaccctgcctatggtgtggtatgtgccaccattatcacccattcaaaacgccgccgaagcaggtcaagtgggcatggacggactgattccagatgtggacagtttacgcattcctttaaaataccttgccaacatgctcaccgcaggcgatgaagagcctgtacgcttggcattaaaacgcctgcttgccatgcgaagctataaacgcctacaattggttgaaaaacaagatgctcaagaagtgttagacgctgttggcttaagcgttgcccaagtggaagatatgtaccgctatcttgccattgccaactatgaagaccgttttgttatcccaaccgctcaccgtgaagaagccctaagcgatgcgtttgctgaacgcaatggttgtggctttacctttggtaatggttgtacaggaggtaatgacacccacatgtttggacaaaagaaaaataataagcgtgattttatcaaaaccgtacaaacatgggagcta

SEQ ID NO: 27048 - DNA, 702 bp, Moraxella catarrhalis
atgaacacaacaaacccagaagattggttacatgtctttttatttggcatttatccctacatcgccttgacagtgtgcatctttggttgttgggcaagatttgatttgtctcaatacacatggcgtgcaggctcaagtcaaatgctgtcagataaaggcatgcgattggcaagcaatttatttcatattggcatcattgtcgtattgcttggacatttttttggcatgtttaccccccattttatttatgaacgcatcatcaccgcaccacaaaaacaactgatggcagtgattgttggtggcattgcagggataatgtgcttaattgggcttatcatgttaatttggcgacgttttaccaacccacgcatcagccacacctcaacttttagcgataagatgttactgttaattattttgcttcaattggtcatgggacttgcaaccatttggtcatatccgacgcatcgtgatggtgcattgatgttaagcttggcagggtgggcacaaaacttggcgatattacgcccagtctacgccgcttcattggtagaagatgctggactggtttataaaatgcacatgttcttaggcacaaccttaatcttacttgtgccatttactcgcttaatccatatcatttctgccccaatttggtatcttggcaggcgttatcaaattgtccgccaaaagagatctcag

SEQ ID NO: 27049 - DNA, 1275 bp, Moraxella catarrhalis
atgattagtgtagatgagcttcaaaaatcaattatcagtcgcgtggacgagtatttgaatattgataatcctttggtatccagacagagggtagtactggctttaaacgatgcacttaatcacatattggcagttgatattaatgcgaatctcgatataccacgccagaatgtttcggcaatggatggatttgccttggttgcacaaagccaactacagcagggtgatggttttaccgtcataggcgagtcttgtgcaggcacgccgtttagtggcgagattttgcctaatcaagcggtgcgtatctttacaggagcggttgtaccagagggttgtgatacggtagtgatgcaagaacatactacttttgatcaaattaacataactgataaatctcagccttattacattgtactaaccaagcctgctaaagccagtgccaatatccgctaccaaggcgaagagattgctcaaggcgataccttgcttagtgcaggtaagcgtctgaatcccagtgatattagtctactgtctagcatgggatatgatgaaattgaagtgttttcaccacttagaattggtctaatagccacaggcgatgagctggtttccattggtcagccattgagtgatttggctcagatttataattcaaacacaccaactttaaaggcactattaagaaaattgcctatcataatcaaggattatggcattgtcaaagatgtgtttgatgagacttatgaagtggtaaagcgtgccattgaagaatgtgacataattatctctagcgctggtgtttctgtcggtgactatgattttttaaccgaagtggtgagaagcttgggtaaaattaatcactataaagttgctatgaagccaggcaagccgtttgtttttggtgaatttgctgctgatgcgcgtaaagtgttatattttgggttaccgggcaatccactttctacagtagttggctgtattaactttgtgcgtccagcactatggcaggcactaggggcaatagatgcacctcttaccttacatctgcctgcgattacgacggcaaacatcaagaaaagtgtaggtaggcgagagtatcagcgcggctattttgaaatgggtgaaaaaaaattacaagtcacaccatcaagtgcgcaagactcgcaccgcatcaaacaattgtctcaagccaactgtctaattgtgcttgatgaaaatagtgtgggtgcgaataaaggcgagcaggtgataattcagctatttgattgggtggtg

SEQ ID NO: 27050 - DNA, 567 bp, Moraxella catarrhalis
atgtgtaacttatgtaatgaccctaatcatcaaccacaagccaaaaaatccgataaaccatttactcccttaaacatcgctgtactaacggtatctgatactcgcatactggacgaagatacttcaggaaaattcttggtagatagcctagtggaggcaggtcatgtattggttgaccgcaagctgaccaaagatgatatttatcaaatccgtgcagtgattagtgcatggatcgctgatgaacgtattcatgccattattaccacagggggtacaggtttttatcatcgtgataacatgccagaagcagtcggcgtgctatttgataaagaagtgcaaggctttggtgaaatgtttagatacttatctcatggcgaaatcggaatgtcaaccctacaatctagagcagtggcaggcatggcaaacaacacagtaattttttgcttaccaggatcaacaggagcatgtcgaacaggctgggagggtattatcaaacagcagctggataaccgaactcgtccttgtaactttgtaccacatttaatgcgtcaaaatccatcgcatggc

SEQ ID NO: 27051 - DNA, 2585 bp, Moraxella catarrhalis
tcgaccgttgcatttacgatatgttttatgacttggataatgtttgctgttttgggtatccctattcagcaagcacttgacttaaatgaaacccaatttggattacttgccgccacgcctgttttgacaggttcgctagttcgtttaccgctgggtatcatgacggataaatatggcgggcgcattgtatttttcgtcttaatgttagcgacagtattgccgatctttttaatggggtatgctgatcaatattggcaatttttgttattaggcttgtttgttggtttgtcgggcggatccttttcggtgggtatcgcctatgtagccaagtggtttgaggcagacaagcagggctttgccatgggtgtatttggtgcaggtaatgcaggttcagcgattactaagatgatcggtcctgccattatcgctgtaggggcgtccacagcagccagtgctgcagaaggctggcgttttttacctaaagtttatgcaggtattatgctgattacagccataggtttttggttttttagttatgataataaaacgcatcgtactgccagtaatgctactcttgccagtcaactggctgttctaaaggataagaatgtttggcgttatagccaatattattcgatcgtttttggtggctatgtagcactggcgctttggatgaccaagtattatgtcggcgaatatggttttagcctacaaacagcagcatttttggcagcgtgttttagtttgcctggtggggtattgcgtgcactgggtgggtggctgtcagataagtattcggcacacacagtcacttggtgggtactttggtcatcgtttttgctactatttgccttatcctatcctcaaacattcttgactattcagacagttgacggggaaaaaagcttttatattggcttaaatgccatcgtctttactgtattgattttcttgctaggtattgcctttgccattggtaaggcatcggtatttaaatatttgtctgatgaatacaaggataatatgggtgcagtatcaggtgttgtgggcttggcagggggtcttggcggctttattctaccgattatgtttggtgccgctgtggatatcacaggtattcgttcatcggcgtttatgatcatgtttggtgtggtgtgggtgagtttgatttggatttatttatcagaggtcaagccaaaaatagaacaagaccatcaatcaaaaaccctaaaattatagctaatattttggagacctaaatgaataatcaactcaaaggtggtcgtcgcatcgatgactggcgtcctgaagatgaaaaattttggcaaaatggcggcagccgtgtcgctactcgaaatctttttatctcaattcctgcactattgcttgcattttcggtctgggttatctggagcgtgattgtagttcgtatgcctgaagttggctttcaatttgataaagcgcagctgtcttggcttttggcactacctgccttatctggggcaaccatgcgtttattttatgcgtttttagtacctgtttttggtggtcgccgctggacgacactgtcaacagcatctttgcttatacctacaatttggttgggtttggctatacaaaaccctgaaacttctttcaccacatttgcaatcatcgcactattatgcggtttcggcggtgccaatttttcatccagtatgtctaatatctcatttttttaccctaagtctaaacaaggtatggcgttaggcttaaacgcaggtttgggtaatttaggggtatctgtactgcagtttgttgtgcctgtgatcatcggattttctttatttggtgcattggcgggggatggccaggttactgaatctggtaaagttttatatttacaaaatgctgcttttgtttgggttattccaattgctattatgactgtacttgcatggtttggaatgaatgatttaagcaacgccaaagcgtcatttaaagaacagtcaattatttttagaagacaacataattggatcatgtgcattctttacttggcaacttttggatcttttatcggctttagtgcggcgttccctatggttattaagcagtcgtttcctgagatcgatcctctaaaagttgcctttctaggtcctttggttggcgctctatttcgtcctgtaggtggttggttgtctgataaggttggcggtgcgtgcgtcacattctggaattacattattatgacaattgctgtcatcgcagttatgtttttccttaaaaatggtaattttacaggctattttgctgggtttatgttgctatttatcaccactgggattggtaacggctcaacgtttcgtatgattcctgtgatctttcgaaccatgcatgaacgcttacactcccctgatgctattacacaagcacgcaaagaatccgctgcagttgtaggtttttcggcgggatttgcggcatatggtggtttttttatcccaaaaatgttcggttcaggtctgggggtaaatggcaccttccttgtactaattgcattttatattatatgtatcgctttgacatggtggtattattcacgcaga

SEQ ID NO: 27052 - DNA, 1074 bp, Moraxella catarrhalis
atgaaaaaacttgctctagcaaccgcagaagctgctttatctgaatatgctgtacaagcaacaccgactgtttacggtaaagcatttttgactattgatgccaacaatactgatacaacttataattcaggtcttgtacaattatctgaagataccaatgaaagcgggcttaactcaaatacctcacgcattggttttaaaggttctgaagctttaaatgctaatactgatgttgtgtatcaacttgaatataagattgacattgatgctgatcgtggcgataactttaaatctcgtgatacttacctaggtcttgctcataaacaatacggcacattgttggctggtcgcttaacgactattgatgacagtgttgattttgccagcatgttggaaggtaataatgtcgctgacatcggtcctacttttaatgcccctcgtgccaacaatgcctttgcttatgtatcacctgagtataatggtactcagttcttagctatgtatgcatttgactcagatactgacaagggcggtcttgccaaagatgaccagtttggtgtgggtgcaacttatagcacaggccctatcaatgcaggtgcgacttatattcactacggtgatgacagtcacattcgcctatctggcaactatgcggtttctccagcattgactgtaggtgctttatatcaaatctcagaatttggtgtcgctgccaaaaatcaaaaagccagtcctttgtctgagggcaaggtaggcgataaaaaagaaaacacccttatcgtgagtggcgagatgaaaactgccacgccatggacagcctatggtcaggcaactttgattaaaaatgttgctggtaatgatggcgatgagtcagtgggtgttggtattggtggtaaatatgcctttaataaagccaccacaggtcatgtctacactggctatgtcaacagcgagcgtaaaaatgtcaagtatgagggcagtaatgaaacacataaaaatgcacacaaagatacaaagtttgatggttataagcccagtggctttggtatcggcgcaggtttagaatataaattc

SEQ ID NO: 27053 - DNA, 663 bp, Moraxella catarrhalis
gtggaagcctatcttaaacaaacgccagccgtccacaggcttattgtctcagaatctgccacggttcatgatgaggttttaccgttattatcccaaattgaccccaaacaaatcaccatcatcagcgatactttataccaacaaatacgcacgctgggcgaaagtatcagcgtcatggctgtgattgatattccccatcggtcattaccaacgatcagcggtgactgcttaattcttgatggcttgcaggatttgggtaatatcggcacactattacgaactgcttcggcggttggcattcagacggtcatcacctcgcctaataccgctcatttgtggtcacccaaatgtctgcgtgcaggtatgggtgctcatttttcaatatcaatttatgaacatatcgctgttaatgagattttacaaaagctaaaaacgccgttatatgcgacaagttcacatacaaataaagtgatctatgaccatgatttaaccagccccatcgcttgggtgctagggcatgaaggtcaaggtgtgcgtgatgaatttttaaacaatgcaatacccatcgccttaccacaaccaggcggacaagaaagcctaaatgttggtatcgcaggttcggtatgtttttatgaaatgttgcgtcagcgtcattatcttgta

SEQ ID NO: 27054 - DNA, 1053 bp, Moraxella catarrhalis
atgcttcgggttcttgctgatgaaaatattgccaatcttgatgattatcttttatgtcatcaggtggagcttatcaagatggcagggcgtgccattgaccgccaaagtctcatcacccatcaaccagatgcattattcattcgctcagtaacgcaggtaacccaagaaaatttgggcgacttgagcaacacaccgcttaagtttatcggctctgcaacgatcggtattgaccatattgacaccaagtatcttgccgaccatcatatcaattttgccaatgcatcaggctgtagtaagcattcggttgcccaatatgtcataacagccatattgcatgcccatcaatccccaaaaaccaatctgcgattaggcattatcggacttggcaatattggcaatactctagcacgctatgccaaacgactgggctggcaggtatttggctttgatccttttttggcgactgactctatcaacaatgcaagcttagatgagattttagattgtgatgtcatcagcattcatacaccattgacaaaaacaggtagccacccaacttatcaaatgctaaacgctcaaaccttggcaaaaatccgcccaaaggccttactgattaacagtgctcgaggagaaattattgatgaatccgccctgttagctgccattaaccaaaagcaattatcggttgtgttagatgtttttcctaatgagccattcatcagccaacagctactttatgcactcaaactggcaacaccacacattgcaggctatacccttgaaggtaaaatccgtgggactgatatgatttatcaagccttttgccaaacctttaacttaccaatcctccagcactttttggcattactaccgcccaacccttatcatttttctatgctcttaaaccatcaaaaccaacagccactggcttggttttatgatattcaggctgattttgaagcactaaaagcggcagcttgtccacatattttgggcagtcaatttgacatacttcgcaaaaattaccatttacggcgagaatggatttttgat

SEQ ID NO: 27055 - DNA, 1170 bp, Moraxella catarrhalis
atgattgaacaatggaatagagagttcgtcttacaacgcctactcgctttgaccttgcttgttatcttgattgtactgtgctttaaagtagtgcgattttttatcgtgccagcattatgggcagggattttggcatatgttacctttcccatttatactttttttcacaccaaagtccgtctaagccccagttttagtgcgtttttgatgactttttgcatctcgctcatgattggcgtaccgcttattgtgggtgtgttctacctacaacatgaagtgctaagttttgttggcatggtaattcgtcgcctacaagcaggatatttagatttacccagccaaatcaaggacttacctgttatcggacagacgattaaagacacgctttgggagattaacaaaaaccctgaaaccacgatggaggcggtgcgtgcttgggtgcagtcgcatttgtattatggcaaaatggcctttgatgcggtgctaaaaaaccttgccaaacttggcatggctctgatgacgttgtttttcttttatagagatggtaaaagtttggtacgccaaatccgtcaagccatgcgtaacatcatcggcgaccgcattgatgattacattgactcggtaggagcaaccacacaagcggtggtgtatggcattggattgactgccttggctcaggcgattttggcagggatgggctatgcttttaccaacgctcccaaccccattttactcacactcatcacctttgtggtggcactcatcccctttggtacgccctttgcatggggcggtgtggcggtgtggttattatcgcaaggacataccaccgaaggcattggacttggcttatggggaattttagtcatcagctgggtggataatttgatacgtccgattgtcatcagtggtgcaaccaaaatccccttcatcatcatctttattggtgtacttgggggcttgacggcatttggttttgtggggttgttcatcgggcctgtggtgcttgccattggcttggcggtgtggcgtgagtggataagtcagcacaaaaatgagatttttattaaccaagcaagcggctttgtggtcgcagatggtaaagcgttattggctgataccaaccccacccctagcaataaacaacaacctaacttaactaaggatgac

SEQ ID NO: 27056 - DNA, 972 bp, Moraxella catarrhalis
atgatggccagtgagtatgcacctaccttaactttgatgaatgccaaaaaacgggctcagatgctacagcatattcgagcattttttgaggcacgcaatatcatggaggtcacaacaccgatattatcgcaagcagccaatactgatgtatatatccaatcggttcaagcaacattccaaggtgctacaggtcaagccaaaggctatctacatacatcgcctgagtttgcgatgaagcgattgcttgctgcttatcagacgcccatttatcagatatgccaagtatttcgtgataacgaaaaaggccatcgccataatattgagtttaccatgctagaatggtatcgcccaaattttagcctagatgcattggctgatgaattatcagaactattaagcgttgtttatcaaaaacccatccacttaagccaaattagctacgcccaagcatttgtacattatttgggcatacacccatttgatgatatgagtacgccagatatcttgcgtcagtgtgctgtcgctcacaacattcatttggatatgggcgatgacaaacaaggctggttggatttattatttagccatcttattgagccaaaattgggcttacaaaaccccaccttagttatcaattatccaaagcttaccgccgcccttgccaaaacagcggtcgatgctgatggttatgagattgcaagacgctttgagctgtatattcatggcgttgagattgccaatgcttatgatgaacttgccaacagccaagagctgctaaagcgttttgagcaagataatcacgaacgccgccgccaaggtctgcccatcatgcccattgaccatcgtctgcttgccgcctgcgatcatctgcctgattgttgtggtattgccttaggcatagacagattattcatggtgctccaaggtcaattaaacatcaatcaagccattgccattacgacagataacgcc

SEQ ID NO: 27057 - DNA, 270 bp, Moraxella catarrhalis
atgagcgataacacccaaacccaagaagttggcgttgtaactggtaaagttatcagcaataagatggataaatctatcgttgtgttggtcgaacgccaaatccgtcacccaatgtatggtaaacaagttcgtcgttctaccaaaattaaggcacatgatgaaaataatatttgccaagaaggtgatatcgtacgcatcaaagaaactcgtccattctccaagactaagacttgggctttggtggatgtagttgaaactgctgtaaaaatt

SEQ ID NO: 27058 - DNA, 650 bp, Moraxella catarrhalis
atgagtcgaaaaattgtattagtcacaggtgcaagtcgtggtattggcaaggcaattgctaagcgttttaccgatgaagggcattttgttatcggaacagccaccagcaaaaaaggcgcagaggcgattggcgattatctgagtgaatcaggtggtattggtcgcatcttagatgtttgcaaccatgaagatattgataagctatttgaagaaattgacagtgtttatggtggaatcaatgtgttggtcaacaatgcaggcattaccaaagatggcttactcatgcgtatgaaagatgaagattgggcaagtgtgattgataccaacttaaccgctgtttatcgtatgagtcgccgtgcggttcgtggtatgatgaaagcacgccaaggtcggattattaatattacctcggtcgtcggacagatggggaatgcaggtcaagcaaactatgctgccaccaaagcaggcgtggagggttttagtcgtgcattagctcgagagattggttcgcgtggcgtaacagtcaactgtgttgcaccaggatttgttgaaacagacatgaccgaagcactagatgagcgtttggttaactctatgttagatgctgttccacgggggatccactacgttctacgagcgccggccaccgc

SEQ ID NO: 27059 - DNA, 1716 bp, Moraxella catarrhalis
atgaaagctagccaatttatatttgccactttaaaagaaacacccaatgatgccgatattgcctcaagccagctgatgcttcgtgcaggtctgattcgtaagcttgcctcagggttgtatgtttggatgccgatggggttgcgtgtactaaaacgcgttgagcgtattgtccgagaggaaatggagaaaatcgatagtcaagagcttttgatgccagttacccagccaggagagctgtggcatgaatctggacgctgggaggattacggtgctgagcttttaagattcaaagaccgtcacagccgtgattttgtgctagggccgacacacgaagaggtcatcactgatattgcacgcaatgagcttaaaagctacaagcagctgccgattaccttttatcagattcaaaccaaattccgtgatgaaatccgtcctcgttttggtgtgatgcgtgcgcgtgaatttaccatgaaagatgcgtattcttttcatattgataaagaatcgctcgccaacacttatcaagacatgtacgatgcctacaaccgcatttttacacgcttaggattaaattttcgagccgtacaagcagatacaggctcgattggtggctttgcgtcacatgagtttcatgtgttggcagacagcggtgaagatgatattgcgttctcaagcgattctgattttgctgccaatatagagcttgccgaggcggtttgttatgataagcgagcagcaccaacacaagcacgcaccgatgtggatacaccaaatatgaccacatgtgaagcggttgccgagcacctaaatattcctctcagccaaaccgtcaaaacactgattgtcaaaggtcgtcatagccaagataatccagaagcacccaaatttattgctttggttttacgaggtgaccacacgctcaatgaaatcaaggctgaaaaaattgccgatgctcatacgcctttgacgatggcaaccgaagatgaactcaaagaaattggacttatcaaaggctatatcagtaccgatttgcagctgcctgtttatgtcgatcgtgcggcggcggcattatctgactttgtgtcaggtgcaaatattgaacacaaacataccacaggcatgaactgggatcgtgatgccaccatcacgcaaattgttgatattcgtaatgtcgttgatggtgatccttctcctgatggtaaaggtatcattagtatcaagcgagggattgaggtgggtcatattttccagcttggggataaatattcaaaagccctaaactgctctgtccttggaaaagaaggcaaacctgtcactttgatgatgggttgctacggtattggtgtcagccgtatcatcgccgctgccattgaacaaaatcatgatgataatggcatcatttgggcagaaccagaagacaaggctgatagcatcgctcctttttatgttgccatcgtaccgatgaaatccaaagatggcgatgcggaagctaaggcccaatcgctataccaaaccctaaaagctcgtggtattaatgtattacttgatgaccgtgatgagcgagcaggggtcaaatttgctgaccttgaattgattggtattccgcatcgtattgtagtttcacaaagaaatcttgccgaaaataaatacgaatacaccaaccgagccacaggtgatcagcaaatgctaagcctagatgaactattggcattattt

SEQ ID NO: 27060 - DNA, 2127 bp, Moraxella catarrhalis
atgaatttcttgataattggaagcgaaacagtcatgacggattcagccacctaccgccaaccatataccgccaaagtctttgatgagattttgacgatgcgtcctgacacgccgattttggattgtatcgccagccctgatgacctaaaggcactgacaaacgatcaattgattcagttggctgatgagctgcgtgcgtatttactttactcaacaggcgtaagcggagggcattttggtgctaatcttggcgtagttgagctgacgattgcactacatgctgtgctaaataccccttatgataagcttgtttgggatgttgggcatcaagcttatgcgcacaaagttttgacaggtcgccgtgaacgccttccaagtatccgttcaaaagatggtctgaccgcttttcctgagcgtgaagaaagccagtatgatacttttggcgtgggtcattcatcaacctcaatatcagcagcgttagggatgagtttggcggcacgattacttggcgaaaatcgtaccgtggcagctgtgattggcgatggtgcgatgacaggcggtatggcatttgaggcgatgaatgatgctgtccaacaaaatgccgatttactggttgtcttaaatgataatgacatgtcaatctcagcggcaattggtggtttttcacgccatttggcaaagctatggcagcgtggacttgccatggatattgataagcatggtaatattttgatggtcaaacgcaccatctcctctgatgaccgccgtattcgtcattatttgcatatggcaaacggtgcttttgaagatgtttcaagtcgcctaccgagtaaaatcagcgaaaaaatcagtgagctttttcatggcgttacctcttcacctttgccagataaaattgctgaaaaaattggcgataaattatttgcagataatctatttaaagccattggttttacttatcttgggccgtatgatgggcatgatttacccaaactcatccaagtgcttgagcgtgccaaacagttaaaaggtgcgatcttaattcatgtacacaccattaaaggtaagggttttttacctgccgaagctgatccgatcggctatcatgctatcggaaagttacccaaagcaggcaaaaatcaagcacccgcatctgcaccaaccgccaaaaaatattcacagatttttggtgattggttattgcattgggcaaatattgatgagcgcttggttgccatcacgccagctatggcggaaggttcaggtatggttgagtatgccaccaaataccccaagcgattttttgatgtggcgattgctgagcagcatgcggtaactttggcggcaggcatggcaacttcaggcaaaattaaacctgtggttgcgatttattctacttttttgcagcggggttatgatcagctgattcatgatgtcgccctacaaaatcttgatgttacctttgctattgaccgtgcaggtttggtcggtgaagatggtgcgactcatgctggggtttttgatttggcatttttacgctgtgtgcctaatgtcataatcgctgccccaagtgatgaacatgagtgccatcagttattgaacacttgttatcagtatgacggtgtggcagccgtacgctatcctcgtggtgttggcgtggggcgtaaggttgatatgacagatgagcattacccaattgggcgggccaatgtggtctggcagtcatcaaactttgatacaaaaagcaccaaaaaactggcagtattatcgttcggcactcgcctaaaagatgctctgaccgccgcccaaagactgtcagaaagtcaagcaatcgcttgtatcgtggtggatatgcgttgggttaagcctttggatgaggcacttattttaaggctgcttgagatgggtgtgacgcatattgctactgttgaagagcatcaaatcacaggcggtgcaggcagtgcggtgaatgaattcatcgtaagcctacaagcgttggttaagctgttaaatatcggtatcaaagatgcgttcattcatcatgccagccatgaagaacagctgttgtattgccgattggatactgatggtatttatcaatctttaagtaatttaatcatcaaaaac

SEQ ID NO: 27061 - DNA, 309 bp, Moraxella catarrhalis
atggctaaccagagaatccgtatccgactaaaatcgttcgaccatcgtctgattgaccagtcggcacaagagattgtcgatactgcaaagcgtacaggcgcacaagtttgcggtcctgtaccgttgccgactcgtattgagcggttcaacgtattgacatcaccacacgtcaacaaagacgctcgtgaccagtacgaaattcgcacccataagcgtatgattgacatcgtgcaaccaacagataagactgttgatgcattgatgaagctggatctagcagctggtgttgatgttcagatcgctttgggc

SEQ ID NO: 27062 - DNA, 1644 bp, Moraxella catarrhalis
atgtcactatgttttttaatattaaatcaatctatcggaataaaaatcatgactttgcaatcacctaatgattttgatcaagctggtaaaacttcccacatgcaacgctttttaaaaggtgttgagtggttggggaatttattgccccatcctgtggttttatttatttggatgtcggtcattttactgggattatcagccatcttatctgccatggatgttgctgtcattgacccacgccctgagggtgccaaaggtcgtgctgaagatggcatgatttatgttgtcaatttgctcaatggcgaaggcttggcaaaaattgttgaaaatttagtcaaaaattttacagggtttgtgcctttgggtaccgtgctggtggccttactgggtgtgggtattgctgagtattctggaatgatttcagcggcactgcgtggcatggttatgaatgcccccaaaaaaatagtcactttagtcgtggtatttgctggtattatgtcaaatactgccgctgagcttggctatgtggtactaattccattggctgccatgatttttcatgctttaggaagacaccctttggcaggtttggctgctgcttttgcaggtgtttcaggcggttatagtgccaatttactgcttggtacggtcgatccattattatcaggtattagccaagaagctgcccgtatcattgacccaaattatatggttggtgcagaagccaattggtattttatggtagtcagtacttttttaatcagtgccttgggttacttggttactgaaaaaattgttgaacccagtcttggtaaatacaacccccatgatgctgatgaccctaccgtgcttgataataaaattgagcagttaaatgcccttgagaaaaaaggtctggtttgggcgggggtaagtatgctgattttttgtttactgttggcatggacggttgtaccagaaaatggtattttaagacatcctgaaacaggactgatcgcagggtcgccatttttacatggtattgttgtatttatttttgtattttttgccatccctggctatatctatggcaaagtgactggcagtattaaaacaaatcaagatgttgtcaatgcgatgagtcaagcaatgagttcattgagtatgtatattgtgcttgtgttctttgctgcacagtttaccgctttttttaattggtcaaatttaggatcagtaatggcggtgtcaggtgctaattttttaaatgagattggcttaacaggacctttgctactgattggatttattttaatttgtgccttagtgaatttgatgttaggttcagcatcggcacagtgggcgattacggcaccaatttttattccgatgctgatgctaacaggctatgcacctgagatgattcaggctgcttaccgcattggcgacagtacaaccaatatcatcacaccgatgatgagttattttggattaatcatggcagttgcaattcgttataagaaagatacgggtgttggtactttaatggcgatgatgttaccttattcgatgatatttttgttcggttggatgcttttattttatctttgggtatttgtatttggtttacctgtcggtccaggttcggcaacctattatcacatgggc

SEQ ID NO: 27063 - DNA, 1518 bp, Moraxella catarrhalis
atgagtgaaatgaaatgcccttatgaccatacccacttgaccatgagtaatggcgcgcctgttattgacaaccaaaattcaatgaccgcaggtgccagagggccactgcttgcccaagatttatggctcaatgaaaaattagccgactttgcccgtgaggtcattccagaacgccgcatgcacgccaagggttcaggggcatttggcacattcacggtaacccacgacatcacccaatacacccgtgctaagatttttagcgaagtgggcaaaaaaaccgaaatgttcgctcgttttaccaccgtggcaggtgagcggggggcggctgatgcggagcgtgatatccgtggttttgccctaaaattctacaccgaagagggtaattgggacatggtgggtaataacacgcctgttttctttttaagagacccaaaaaaattccctgatttaaataaagcggttaaacgagacccacgcaccaacatgcgttctgccaccaataactgggatttttggacactactgccagaggcgtttcatcaggtgaccattgtcatgagcgaccgtggcattcctaaatcttatcgtcatatgcacggctttggctcgcacacttatagctttatcaatgctgacaatgaacgcttttgggtcaaatttcactttcgcacccaacaaggcattgaaaatctaaccgatgccgaagctgaaatggtggttggtaaagaccgtgagagcaatcagcgtgatttgtttgatgccattgagcgtggcgatttcccaaaatggacaatgtatgtgcaaatcatgccagaaaccgatgcccaaactgtgccttatcacccatttgatttaaccaaagtgtggccaaaaggtgattatccgctcattgaagtgggtgagtttgagttaaataaaaatcctgaaaacttctttttagacgttgaacaatccgcttttgccccaagcaacctagtcccgggcatcagtgtgtcccctgaccgcatgctccaagcacgcctatttaactatgctgatgcgcagcgttatcgtttgggcgtcaatcgtaaccaaattccagtgaatgccccacgctgtcctgtgtactcaaaccaaagagacggacaagggcgagtgggcgataactatggcggtcgtccgcactatgaaccgaacagttttggacaatggcaagaccagccgcatttggctgaaccagcattaaaaattcatggcgatgctaagttttgggattatcgtgagaatgatgatgattattttagccaacccagagccttgtttgagttgatgagcgatgagcaaaaacaggcgttatttggtaatacggctcgtgcgatgggcgatgcccctgattttattaaataccgccatatccgtaattgcgataaatgccaccctgattatgccatgggtgtggccaaagcgttaggccttacggttgaagatgccaaaaatgcgtatgagagcgaccctgctcgccatctgcccagcttttta

SEQ ID NO: 27064 - DNA, 720 bp, Moraxella catarrhalis
atgaataaacaaatcctactgattgaagatgatccagatttggcggagctgatcagtgattatctatccatgaattattatgaagttcatcacgctgcaactggtcaaggtggcttggatattttggataccaaagagcgtgacatcagtttaattgttctagatttgatgttgccagatatggatggcatggaagtgtgccaaaaagtacgcggttcaaaaaataccatgattaacaaagtaccgattgttatgctcaccgctaagggggacactaccgatcgtgtcttagggcttgagatgggtgctgatgattatattgccaagccatttgagccacgagagctattggcgcgtatccgtgctgtcttgcgtcgtcacgaaacgccaaatcaagcagataccaactcaggcagcctaacttttggtcgtttgacggtttatccagacagccatgaggtcacgattgatgaaaagaccgttcgtctgaccacacaccagtttcagcttttacattattttgctacgcatgctggcaaagtactcaatcgtgagcagctttggcaagccatgccaaacgatgacagctcagaaaatattgatcgtgccatcgatgttcatatctcaagattacgcgctttgattgaagataatccacgccagcccaagcgtatcatcacagtgcgaggcgttggctatcagtttgccaccgatcaagtt

SEQ ID NO: 27065 - DNA, 966 bp, Moraxella catarrhalis
atgtcaaattttaccaacaatcacccaaaacgcccaccatttcatcgtattggtgtgatggggcgtgcaggcaaagccagtattgtagaaacgctaaatgaactcattagactactgaaaatgcgtcaattatcgattgtcattgatgcacagacagcggccattgagggcatcttgattgatggtgagcatacagatgacagcatcataatcacaccacgccacacgatgggtgagcagtgcgatttggtcatcgtggtgggcggtgatggctcaatgcttcaggcggcgtctgtgatggcaggtactggcgtgccagtgcttggtatcaatcgggggcgattggggtttttggcggatattaatccagatgagctgaccgaaaaagtcggacaggtgcttgatgggcaatattggctggttgagcgatttttattaaaacttcaaatcattcaaaatacgaccaatgacaatgcattgacacaagttttacatgaagatattgcgttaaatgatattgtcttacacgcaggcaagtcagttcacaccattgattttaaactaaaaattaataataaagatgtctatcgtcagcatgcagatggtctgattgtcgcaacacccacaggctcaaccgcctacgcactgtcagcaggtgggccgattattcacccaacattagacgccatttgtttggtacccatgcatccacacacgctatctgaccgcccgcttgttgttgctggcagcagccaaattatgattaatattcataaagataaccgcacacagcccatggttggtgcagatggtaagacttctgtgcctttggaaaatgaccaaacgctcatcatcgccaaacatgataagacgcttttattactgcacccaaacagctatagcttttatgaagcgtgccgtacaaaactacattggaatttatacagtgaagagttttcactggat

SEQ ID NO: 27066 - DNA, 318 bp, Moraxella catarrhalis
atgcattgtgatgtttataaatttccaaaaaatgaaggttggtatgtatacatcgcccgacctgactatccaaatgacacagaaaaccttaaggattggctgggtgttttgcctgcagcaatgcgtaccaaacttggttttgggcagtttattatgcatttagatttgtcatcaaggcaaaaattagctcaggcggacattcatcaagttaaagccaaacttaacgaacaaggctattatgtgcaagcaccgccatcggagatgttggcagctcaagcggctatcaaagcccaagatgctcaggataaacaatttgat

SEQ ID NO: 27067 - DNA, 1686 bp, Moraxella catarrhalis
cgtgtcatcaaagccccaacaggcacagcattgacctgtaaaagctggcttagcgaagcccttaccgcatgatacaaaataacctacaccctgatgtcgccgaaaacccccaaagtcttgtggtctatggcggaattgggcgggcggcacgcaactgggaatgttatgaccaaattttggcaagtctaaaacagctagaagatgaccaaacactgctcattcaatcaggcaaacccgttggcgtgttcaacactcacgaaaatgcccccagagtgttaattgccaactccaaccttgtgccacgctgggcaacttgggagcattttaacgagcttgaccgcaaagatttgttcatgtatgggcagatgaccgcagcagctggatttacattggcacacaaggcattgtgcagggtacttatgagacctttgccgaagcagggcggcagcactttggcacaaaaaaaggcgacaaaagcaccgataactggaaagggcgttggattttgaccgcaggcttggtggcatgggtggggctcagccactggcagcgacttttgcaggggcgacatcgcttaacattgaatgccaacagtcaagcattgattttcgtttgcgtacaggctatgtggataagcaggcaaacgacttaggccacgcttatgaactcatcaaagaacacaccagtaaaggtgaggcggtatccatcgctcttttgggcaatgccgctcaaattttgccacagattgttcagcgtgccaaaaatggcgacatcaagcctgattttgttaccgaccaaacatcagcccatgacttaattcatggttacctgcccattggctggacggtggatgattggagggctgcccaacaagacccaagccaacatgccaaattgacccaagaggctgccaaatcgtgtgccattcatgtgcaagccatgcttgatttgcaaaagatgggcgtgcctgccaccgattatggcaataatatccgtcaagttgcctttgacgctggggtgaaaaatgcctttgattttccaggctttgtgcctgcttatattcgtccgctattttgtcaaggcaagggcccgtttcgttgggtggcactctctggcgaccctgaggacatttataaaaccgaccaaaaaatcaaagagctgttcccagagaacacacatgtacataattggctggacatggcaaaagaccgcattcactttcaaggtctgcctgcccgcatttgctggctgggtttgggtgagcgagacaaggcaggtctggcatttaatgagatggtgaaaaatggcgaactaaaaggcccgattgtcatcggacgagaccacctagacacagggtcggttgccagccccaaccgagaaagtgaatccatgaaagatggcaccgatgcggtgtccgactgggcattattaaatggcatgctcaatgtggcaggcggggcaacctgggtaagcctgcaccatggcggtggtgtgggcatgggttatagccagcattctggcatggtaattgtcgccgatggcacagaagcggccgccaaacgccttgccaatgtgctggtcaatgactgtggcagtggcgtcatgcgtcatgctgatgcaggctatgaattggcgattgaaactgccaaaaactatggcttaaatctgccgatggtgaaataagtt

SEQ ID NO: 27068 - DNA, 1551 bp, Moraxella catarrhalis
atgaattcgctcatattaaccccacgaaacctcacctttgcccagcttcgccaagtgtacgatggccctgtcaaaatcagccttgacccaacagcgtatgaagcgattgacgcatctcgtcaagcggtgcaagccatcattgccaaagataagcccgcctatggcattaacactggctttggcctgcttgccaaaaaacgcatcagtgataatgagcttgagctgcttcaacgcaatttgattttatcgcattcggttggcacaggcgacagattgcctgatgaggtggtgcgcctgattatggtgatgaaagtatcaagcttggctcaaggcgtgtcaggcgttcgccgtgaagtggtggacagccttttgggcttaatcaatcacaatatcattccccatattcctgccaaaggctcggttggggcgtcaggggatttggcgcctttatcgcacatgacgcttgccatgttgggatttggcgatgtgtctgtgaatggcgaaaacatgtcagcaaaaaaggcccttgatgacgcagggttaactccgattgtgttggcggccaaagaaggattggcactgattaacggcacgcaaacatcgaccgccttggctttgcgtggctattttatggcacaagatttgctggcggccgccacggtggttggcagcatgtccattgacgctgccaaaggctcagatgccccatttgacgctcgcattcatgacgctcgtgggcatcatggtcagacacaaatcgccagtgctcatcgccagttaatcgctgacagccaaatccgtgcatcacacaaagaagatgatgaaagagtacaagacccttattgtttgcgttgtcagccacaagtgatgggggcgtgtttggatgtgattaaccaagcgggcaaaactttgttgattgaagccaatgccgttactgataaccccttgatttttaatgacaatgatggccctgtggcaatctcaggcggtaactttcatgccgaacctgtggcatttgctgctgacatgttggcacttgccatcagtgagattggttcaatgagtgaacggcgtatcgctttgctcattgatgccactttatcgggcttgcctgcctttttggtcaaaaatccaggggtgaactcaggatttatgatagcccatgtgaccgccgccgctttggcctctgaaaataaatcacacgctcacccagcatctgtcgacagcattccaacctctgccaaccaagaagaccatgtgtcaatggcgacttatgcaggcaggcgtttatatgacatggcttgtaataccgccaccattgtgggcattgagcttttggcagcggctcaaggcgtggattttcatctggaagagggtttacacacatcgccaaaacttgccagtgttcatcaaacattacgccaaagcgtcgcccattatgacaaagaccgctactttgccccagacatcgaaaacgccaaacagctggtgattgatggcaagctgattgacagctggcgggagttgcgtacggattggtttttggcaaaa

SEQ ID NO: 27069 - DNA, 1284 bp, Moraxella catarrhalis
atgtatgataaaaccatgaaaaataccatgatgaaaacacattttgacttattaatcacccatgccaatatcgccaccatgaacagcgattttggctttcatcttgataatcaaagcaatcaaacaaccaagacggcaacgccctatgggcaactgaccaatcacgccattggcatcaatgatggcaaaattacatggataggccatcatgatgatgcatcgtcattcaccactgataggttgattgacgctcaaggcaaatggcttaccccagccttgattgattgccacacccatttggtgtatgcaggcaaccgcagtgatgagtttgaagcacggctaacaggggtaagttatgaacaaatcgccaaaaatggcggtggcatcatctcaaccgtcaatgccacacgccaagccagctttgatgaattatacgcccaaagtgaaaaacgcctaaaagcattgcttgctgaaggcgtggcaacccttgaaatcaaatcaggttatgggctggatttgcaaaacgaacgcaaaatgttgcaagttgcccgcaagcttggacaagattatggcatcacggtcaaaaccacctatttggcagctcacgccacaccgccggagtataaagacgatgacggcaatgcccaaaacgatgcttatattgataaagtctgtgagtggttgccaattttgcatcaagagggtttggtcgatgcggtagatgcgttttgtgaaaacatcgcctttaacaaacagcaggtaaaaaaagtctttgaggttgctcaatcgttgggattgcctgtcaaattacacgccgaacaattaagcgatatgagtggtggggcgttggtggcaagttttgatggtttgtctgctgaccatattgaatacctaagcgatgatagcattcaacgcatggcacaatcaggtacggtgggcgtgctactgccaacggcattttatgtgttaaaagaaacgcaattacctccgattgacaaaatgcgacagcaaggcgtatctatggcaatatccaccgactgcaaccccggaacatcgccgtctacttctattttgctggcgatgaacatggcgtgtaccttatttcagctcacgccagaagaggcgctggcaggcacaacattaaacgccgccaaagcgttgggattgcaagacagcaaaggcaaaattgccattggttatgatgcggacattgccctttgggacattgagcgtcctgcggatttaagttatttgattgggcaaaataagtgtgttgatgtgatt

SEQ ID NO: 27070 - DNA, 2525 bp, Moraxella catarrhalis
ggatatgctatgtcgcaaatgctaaccgaatacagagcccatgtcgctgagcgtgaagtcttaggcgtgccaccacaaccattaactgatgtccaaactgccgatttgattgaactcctaaaaaaccctccacaaggcgaagaagagtacttgatagacttgcttgaaaaccgtgtgccagcaggggttgaccaagccgcttatgtcaaagccgcctttttaaatgccatcgtcaaaggcgatgccacttctccgcttgtgagcaaagagcgtgcggtatatctattaggtaccatgttaggtggctataatgttgcacctttggttgaactgcttgatgatgatgaactgggtgagatggctgccaaagcactcaaaaaaacccttttggtctttgatgcttttcatgatatagaagaaaaagccaaagcgggcaatgccaatgccaaagccgtgctagaatcttgggcagaaggcgagtggtttacaagtcgtcccaaagtgccagaagagatgaccatcaccgtatttaaagtcactggcgagaccaacacagatgacctatcacctgcccaagatgcgtggagtcgccctgacattccgctacacgctaacgccatgctaaaaaatgagcgtgagggcattcatccagaaaaaaatggtgaggttggtcctttgacccaaatccaagagctgcttgacagaggtcatcctgttgcctatgtgggtgatgttgttggtacaggttctagccgtaaatcagcaactaactctgtattgtggttctttggtgaagagattccccacattccaaacaaaaaagatggcggtgtgtgtttgggcggtaaaattgcccccattttctttaataccatggaagatgctggggcgttgcctgttgagattgatgtaaccgagatgaacatgggtgatgagattaccctaaaaattgaccacgcaaatgcaactgttgccgcctttaaagatggcacacaaattgccaaatctaaactaaaaacccctgtactgctagatgaggtgcgtgctggtggtcgcattaaccttatcatcggtcgcaacttaacaagcaaggctcgtgaatccttgggtcttgaaccatccactctatttcgcaccccagagcaacctgccgatactggcaaaggctttaccttagcccaaaaaatggtgggtcgtgcctgtggtctgccagaggggcaaggcattcgtccagatacctactgtgaaccgaagatgacaaccgtaggctcacaagacactacaggcccgatgactcgtgatgaactcaaagatttggcatgtctgggcttctcatctgaccttgtcatgcagtcgttttgtcataccgccgcttatccaaagccgattgatgtggtaacgcatcacaccctacctgattttatcatgaaccgtggcggtgtcagttacgcccaggtgatggggtgattcattcatggctaaaccgcatgttgctgcctgacaccgttggtaccggtggcgacagtcatactcgctttcctattggcatctcatttccggcaggttcaggccttgtggcattcgctgctgccactggtgtgatgccacttgacatgcctgaatctgtactggtcaaattcaaaggcaaaatgcaacctggcattactttgcgtgatttggttcatgccattccttactatgccatccaagcgggtgatttgacggttgagaaaaagggcaagaaaaatatcttttctggtcgcatcttagagattgatttgactgagatggaaaacgacttgaccgttgaacaagcgtttgagttatccgacgcttctgctgaacgctctgccgcaggctgtgccatcacggtatcagaagaaaaagtggcagaatacttacgctctaacatcgtcatgctaaaatggatgattgccgaaggttatggcgatgctcgtacactggctcgccgtgctgaaaatatgcaaaaatggcttgacaacccaagcctactaaaagcagatgctgatgctgagtacgccaaagtatatgagattgaccttgctgacatcaaagagccaatcctatgctgtccaaatgaccctgatgatgccaaactgctctcagaggttgcaggcgataagattgatgaggtattcatcggttcgtgcatgaccaacattgggcattttcgtgccgcaggtaagctgttgcaagaagtaccagcgggcagcctaaccactcgcttgtggattgcaccacccactaaaatggatgaacgccaactgatggatgagggttattacaacacttatgcccaggcaggagcaagaaccgaaatgcccggctgttcactgtgcatgggcaaccaagcacgcatcgcacccaactgtaccgccgtttcaacatccacccgtaatttcccaaatcgcttaggtcaaggggcaaatgtctatctggcatctgctgaacttgcctctgtggcatctgtactgggcagactgccaactgttgaagagtatatg

SEQ ID NO: 27071 - DNA, 1458 bp, Moraxella catarrhalis
atgtgtaagacttttgtactgttctataaagaagtatggacagttttacatattgtaaggactgactttttggagaaagtgatgagcttaaaatttggatacaaagcgctgagtttggcggtattttcaaccctaaccgcaaccgcagcacaagcagcaggcctggatcgctcagggcaagatgtgactgcttttttacaagatggcacttatgccgaaaccgtttatacttatattgatgccaatgttaccggtaaagatacctcaggcaaagatacaggtgatattgccgaagcttatgattttttccgttatggcgttaaagcagacatcaacgacacctttagtgtgggtgtgctgtacgatgagccatttggtgcagcaattaagtatgatggtaatagtaattttgtggcagataaaaatgcaacagcaacaatttttgcccaagctatcaatcaggctacaaaagcacaattaaacgatagccttgcttataaatcaattaagccagttttagacagtgttaaatcacctcagcgtgctttggcagtagcatcaatcgtagaaaccaattcagcacaagccaaacccattgctgaccgattaagagcagcggctgcacatgcagaagcaactgacggtcaaaagactaatgtcgaaattcgcaccaacaacctaaccatgttagtcggtgccaaattgggtgctaataaaaatttccaaatctatggcggtcctgtggctcaaagagttaagggcgaagtgcatttgcgtggtcctgcttatcaagtcatgacaggttatgatgccaaaattgcaacagatactcaattgggctgggcggcaggtttggcattttataaacccgaaattgccctaaaagccgctttgacctatcgctctgagattgagcatgactctgaaattgccgaaaccattcctgtgacgggctatgcgggtaaaaaggattttaaagttactttgcctgactcatggaacttagattttcaaactggtgtgaatccaacaacgctattaactgccaaagtacgctatgtaccatggtctgattttgacattcgcccaacacagtatacagaaaccacaaaacttcgttatccacagggtttaccaatcatcagctatgacaaagaccaatggtcggctgaagttggtttgggtaagcgtgttagcgatcgtttggctgtttcaggtgcggtaggttgggatagtggtgcaggtaaccctgcaagtagcttaggtcctatcaaaggctattattcattgggcttaggtgcgcgttataatgttacacctgaatggtcgctgtctttgggtggtaaatactttaaatttggagatgctcaagcacagctaccaaccaaagataaagtaggtaactttgatagtaatgatggctatgccttgggcgttaagcttgcttatcacgccaaa

SEQ ID NO: 27072 - DNA, 1143 bp, Moraxella catarrhalis
atgggaatttatttaacggcaaccggtctttataaacctgcttatcaaattagcaatgatgagttggtggctgcatttaatacttatgttgataattataatgccgaacacgctaaggcaatcgcagcaggtgataaggtggcccttcagcactcatcaagcgaattcatcgaaaaggcatctggtatcaaatctcgttatgtgattgataaaaaaggaattttagatcccaaaatcatggcgcctatttttcctgctcgcaaacttggcgaggagttgtcagtgatggcagagatgggtttagcagcactcaaagatgctttggatcgtgccaagctgacggctgatgacctagatggtattatttgtgcatcatcaaatttccagcgttgctatcctgccatcgccatcgagattcaacatgccatcggtatgcagcatggctttgcttatgatatgaatgtggcttgtagtgcggcgacttttggcattgcccaagcggtaggcagcatcaaagcagggcttggcaaaaaaatcgctgtgctaaatgttgaaattacctcagcgcatcttaattggcgtaatcgtgatagccactttatttttggtgatgtggcggctgcgacgattgttgaggagttgtcaaccccaaaaggttatgaaattcttgacagtaagctatacacacaattttctgccaatattaaaaatgagtacggttttatggatcgtagcgagtttttggcagcagatacacaaatgtatgcagacatcaaagagccagttactgataagcttttcttacaagaagggcgtaaggtattccgtgaagtttgccccaaagtttcagaaatcattaccatacatttgaccgaaaataacttatcagccgatcaaattaagcgtatgtggctacatcaagccaatattaatatgattgatttgattttgcgtacggtcgttggaaaagatgcggataaatccattgcacctgttgtcattgcagaatatggcaataccagttcagcaagccctgtggtagcgttccatgagactcaagacggtgttgaaagcgaagatctatgcgtaatgtgttcttttggtgctggttattcaattggatcggtattactcaaaacagta

SEQ ID NO: 27073 - DNA, 729 bp, Moraxella catarrhalis
atgaaaaaacacaattttatgactgatttacagataaattcagataaaccaatcattatcaccattgatggcccaagcggtgcgggtaaaggtacgctggcttatcggctggcagagcattttggttttgagctattagatagcggtgcgttgtatcgtattgttgggctgatggcttatcaagcaggattacttgataacacccctgatgagcttgccttatctgatttggtgcagtcgcttcatttaagtttttgcccaaacgctaaaacacgagccattgatatttatgttgataaaaagccattgcgtgatgatatccgtaatgaaactgtcggcggctatgcttctattgttgcagcatttccaaaagtacgctcagcactgcttgacttacaaagaaatatcgcagataacaagcttggcttggtggcagatgggcgagatatgggtacggtgatttttcctcatgcccatgcaaaaatttatctcactgcaagcgctcaggctcgtgccaaaaggcgtgttactcaattaactcaagcaggaaaacaggcaaattttgatgatatattggcggatatcatcgcacgagatgagcgagatgaaaatcgatcagttgccccaagtcgtcctgccgatgatgcgttattgattgatagttcagataagtcagccgatttggtttttgaagaagcaatgcagtttatagaacaaaaattatctgaa

SEQ ID NO: 27074 - DNA, 1737 bp, Moraxella catarrhalis
atgactatacatcacttgaaccgtactgtgctggacaggctacggctaatttttaaggtaaatataatggtatcatttgctgaactgtttgaagcaagccaatcagaacaaggtcttaacattgagcgtggctcagtgatttcaggaacagtcgttgctattgacagcgattggattacagttgatacaggtcttaaatctgaaggtatcgttgctcgtgaagagttcttaaacgaagctggtgagcttgaagtggcagtaggcgacagcattgatgttgtagttgaagctgtagataacggcatgggtcaaactgtgctttcacgcgaaaaagcgaagcgtgaagaaagctggcgtgcgcttgaacaactacacgaaaatgatgaaatcgttaaaggcgttatttcatctaaagttaaaggcggtttcactgttgagatcggttcagtgcgtgcattccttccagggtcattggtagatgttcgcccagttcgtgaaacgacacacctagaaggcaaagagcttgaatttaaagtcattaaaattgataaacaacgcaacaatatcgttgtatcacgccgtgctgttatggaagctgaaaattcagcagagcgtgatgagctactagccaagctagaagagggcatggaagtagaaggtatcgttaagaacctaactgattatggtgcatttgttgatttaggcggtattgatggtctattgcacatcaccgatatggcgtggaagcgtatcaagcacccatcagaagcagtggaagtcggtcaagaccttaaagtaaaagttcttaaatttgatcgtgagcgtaaccgtgttagcttgggtctaaaacaattgggtgctgacccatggactgaagttgagcaaacttatccagtgggtaccatcaccaaagcgcgtgtaaccaacctaactgattatggctgctttgctgaaatcgctgaaggtattgaaggtttggtgcatgtctctgaaatggaccatacgaacaaaaatattcacccatcaaaagttgttcaagtgggcgatgaggtgaatgtgatggttcttgagattgatggtgagcgtcgccgtattagccttggtatcaaacaaaccatgccaaatccatgggctgagtttgataaaaaccatgaaaaaggtcaaaaaatcagcggtaccatcaaatcaatcactgactttggtctgtttattggcctagaaggtggtattgatggtttggtacacctgtctgatatttcatggactgagtctggtgaagaagccatccgcaattactcaaaaggtgatactgttgaggcggtcgtattgtctgttgatgcagaagcaaaccgtatcagcctaggcattaagcagctaaactctgatccatttaatgaatacttgctatcaaatgatcgtggtgctatcgttaaaggtacagtaaaagaagtggatgctaaaggtgcggtgattactttggccgatgaagttgaaggttatttgcgtgttgcagatattgctcgtgagcgtaccgaagatgcctctaaagtcttgagcgttggcgatgaagtagaagctaaaattgtcggcgttgaccgtaaatctcgcaatattagcctatcaatcaaggcaaaagatgaagctgatgagcgtcaagccattaaagagctttctaatacagcagctgaaacacagccaaaaacacttggcgatattttcggtgagcagcttaaaggc

SEQ ID NO: 27075 - DNA, 1584 bp, Moraxella catarrhalis
atgacaacccatttaaccaatgaaatcaaccaacgcagaacatttgccatcatcagccaccccgacgctggtaaaaccaccatgaccgaaaagctgctgctttggggcaaggcaattcaggtagcaggcgaggtgcgtggacgcaaagccgaccgccacgccacatccgattggatgagcatggagcaagagcgtggcatctctatcaccacatcggtcatgcaatttccctataaaaatcatgtggttaatctgctagataccccaggacacgccgatttttcagaagatacctaccgcacgctgaccgctgtggactctgcccttatggtgattgacggtgctaagggcgttgaggagcggacgattaagcttatggaggtgtgtcgcatgcgtgatacgcccatcatctcatttgtcaataaacttgaccgtgagattcaaaatccgcttgccttgcttgatgagatcgaaagcgtcctaaaaatcaaatgcgtgccatttgcttatcccattggtatgggtcaggactttgtgggggtatacagttttgtggataacaagacttacttttataaaaaaggctttggttcacaaattgtagagattgagagtaaagatggctatgattatgctgacattaaggacaggcttgggcagattttatgggatgaatttatagaaaacattgaacttgcccaaatggcgtatgaagattgggatgagcgtgaatttttggcaggtcgtcaaacgcctgtgctgtttggtacggcgttaggcaattttggtgtgaacatgattttggatgtgctgacccaatatgcaccgcccccaaaagaccatgtggcagtagagcggacggtaaaagcggacgaacctgcctttacaggttttgtctttaaaatccaagccaacatggaccctaagcaccgagaccgtgtcgcctttatgcgagtatgttcgggcaaatacgagcgtggcatgaaaatgaaccatgtgcgtcttggcaaagaggtgcgagtgtcggacgctctcatgtttttggcaggcgaccgtgagacgctagatgaggcgtatgctggtgatatcattggtctgcacaatcatggcacgatacaaattggcgacagctttaccagtggcgagaccttgaattttacaggcattccgcactttgcccctgagctgtttcgccgtgtggtgctaaaagacccgatgaaatccaaacaattacaaaaaggcttacaacaactctcggaggagggggcaacccaagtgtttatgcctcaaatcaacaacgatttgattttgggggcggtgggcgtgctacaatttgaggtggtggcacacagattattagaagaatataaagtgcaatgcacctttgaaccgattagcattgcaacggtgcgatgggtttactctgatgataaagtcgcttttgaaaaatttaagaaaaaagcccacgaccagctgtcggtagacggcggtggttacctgacttatcttgctcccagccgtgtcaatttacaactcatgcaagagcgatatccagaggttgagtttcgggcaacaagggagcat

SEQ ID NO: 27076 - DNA, 2558 bp, Moraxella catarrhalis
aaatccttagtgattgtggagtcgcctgcaaaagccaaaaccattaataaatatttgggtaaagattatgtggtgcgttcaagcgtgggtcatgtgcgtgatctacccgttggtggcagtgcgaccaaaaccaacaaaacccaagatgttggcttgtctcgtgaagaaaaagcccaaaaagcattagttcgccgtatgggtgttgaccctgaacatgactgggcggcggtgtatgagatattgccaaacaaaaccaaggtgattcgtgaactaaaagcacttgccaaggaggccgataaaatttatcttgccaccgatttagacagagagggtgaggcgattgcgtggcatttaaaagaagtgattggcggcagtgatgataaatacagccgtgtggtatttaatgaaattaccaaaacagccatccaaacagcctttgagcatcctgatcaattaaacattgatcgtgtcaatgcacagcaagctcgcagatttttggatcgtgtggtgggctttatggtatcaccactactttgggcaaagattgcccgaggtctgtcagcgggccgagtgcaaagtgtcgcaactcgtttggtggttgagcgtgacgaagaaattcgggcatttgtccctgttgaatattggaaaattcacaccaataacaccgcagcaggcgagacgctaaaccttgaagcggtcaaaaaaaatggtaaaacgctaaaacttggcaataaagcacaagccgatgaagttgttttggcgttaggctcatcagactttattgtgtcagcgatcgaagaaaagcccactcagtctcgtccatcagcaccctttatcacttcaacgctccagcaagccgccagtacacgacttgggtttagtgtcaaaaaaaccatgattttggcacagcgtttgtatgaagcagggcatattacttatatgcgtaccgactctacttttttgagccaagacgccctaaatttggtgcgtgaatacattacagatcattttggtgatgactatttgccccaaaaacccaatttttatggtaataaacaaaatgctcaagaggtgcatgaagcgattcggccttctcatgttttggtaaaatcctcgcagctgactggcatggagcgtgatgctcagcgtctttatgagttgatttggcggcagtttgtggcatgccaaatgatgccagcacgctatcagtcagtcaatttgatggttgccgctggcgatatagagcttaaagccaaaggacggactttggtttttgatggctatacaaaggtgcagccgcctgctaagactgatgatatcttactgcccgctgttaaagtgggtgaaaagttgcctttgattgagattttgccaacacagcatttcaccagcccgcctgctcgctacagtgaagcaagcttagtcaaagagcttgaaagcctcggtatcgggcgaccatcaacctatgcgtctattatctcaaccattcaagagcgtggctatgttaagcttgaaaataaacgcctatatgctgaaaaaatgggagatattgtgacagaaaggttggtagaaagtttccctgatttgatggattatgcctttaccgcagggcttgaagataagcttgatgaggtggcggttggcgaggaagattggaaaacggtgcttgacagattttatcatgatttcaaacaaaagcttgattatgccaaaaccaccgatggcatgcgtcctaataatccaaccaatgtgcctgatattcactgtgatttatgccatcgcccaatgcagatacgcacaggttcaacgggtgtatttttgggttgtacaggttataatctaccacccaaagaacgctgtaaaggtaccaaaaatttgatgccagtttcggcatttgagtttgatgctgatgatgattcagcagaggtcaacgccctcatggaaaaaaagcgttgcccaaaatgcaatactgcgatggatggctacattgtcgacggtgggctaaagctgcatatctgtggtaataaccctgattgcgatggtcatgtgcttgaaaaaggtgtatttgagattgggggtgcaaccagtgatacaccgaccattgattgtgataaatgcgatggtcaaatggagcttaaaacggggcgttttggtgcatattttgcttgccgaaagtgtgataatacccgaaaagtactcaaaaatggtcaggcggcccctcctcgtatgacacccattgatatgcccaagctgcgttcacaaaaatttgatgaccattatgtgctgcgtgaaggtgcagcagggctatttttggcggcatccaaatttcctaaagttcgtgaaactcgtccaccaaagctaagtgaattcgtgagattaaagatcagcttgagccaaaattttattatttgtatgatgcaccagatacagatgatgttggtaacccaacaattttacgatggagccgtaaaaatcaaaaacggtatgtttgttcaaaaaaagacggtaaagcgacccgtttcgccttggtttggcgtgatggtgcatgggtacaagcc

SEQ ID NO: 27077 - DNA, 390 bp, Moraxella catarrhalis
cagcgctgccatcattatgccattcgtgcaggtcggaacttacccgacaaggaatttcgctaccttaggaccgttatagttacggccgccgtttactggggcttcgatcaagagcttcgcttacgctaaccccatcaattaaccttccagcaccgggcaggcatcacaccctatacgtccactttcgtgtttgcagagtgctgtgtttttaataaacagttgcagcagcctggtatctgcgactgccaacagctcaaagagcaagtcttatcaccatcggcagcgtaccttctcccgaagttacggtaccattttgcctagttccttcagcagagttctctcaagcgccttggtattctctacctgaccacctgtgtcggtttcgggtac

SEQ ID NO: 27078 - DNA, 576 bp, Moraxella catarrhalis
atgaaaagattatctttaattgcattattggcggtggcaggttttgctaacgcagcgacttatgagcttgatccttatcacaccaatgcgcgttttagcattgaccattttggcacctcaaccaatgtggcaggcttttatgagttatcaggtttgatgcagtttgaccgtgcagcaggcaaaggctcgattgatatcagcatcccagttagtagcctaactgcgtcttcatcactattcacacaacacctaaaaggggctgatttgttcaatattgagcaacacccaaccatgcgttttgtgtcaactaaattttatttcaaagggacgggcaaaaatcgtcagttacaatcagtgtcaggtaatttaactttgcttggtaaaacgcatcctgtcactttaacagcgactaaatttaactgttatcaaagcccaatgttaaatactgaggtttgtggtggtgattttacgacaaagattgaccgcaccaaatggggcatgaattatttggtagatatgggtatgcctaaagatgttcgtattgatattcaggtagaagctggtaaaaaagctcac

SEQ ID NO: 27079 - DNA, 660 bp, Moraxella catarrhalis
atgactttacaaagtattgacaaagtacccaaattatacttactgacgaatgatgatgagctgacaactttattagataagcttgaacgggtgtttgatacaggtgcggtgtcattactgcaagtgcgtcgtaagtccaccttgaaactttatgatttggcgacagtgtatcgagaagctgaaatgatcgtcagtcttgcgaatgattatgatattaaagtcgttatgaatgatagtctagagcttgcatcacattttgggacggggcttcatttgggtcagcgtgatggtagcgtacgggtcgccagagagattttgggagaccatgtggtgattggtcgcacctgtcatacagaccttgctttatttaaagaagctaagcgagaaggggcaacttacggtgctatgggtacagcatttgcatccatcactaagccacgcgccaaaattatctcaaaagacatattaaaaaaagcctgcgaacttgattttcctttatgcgtgattggtggtatcacccttgaaaatatccatcagcttcgagataagttaaacggtgcagccatcgattatattgctgtgacagctgatattatggggcattcggttgataccattgcagataaatgcttagcgtggcaacaaaaacttaacacttgg

SEQ ID NO: 27080 - DNA, 1092 bp, Moraxella catarrhalis
gtgaattttgatattaatttagtgatcgtaccgataactttggtgtttttgctgatttggttggtggataagcttgtcttaaaacaacattttgccatcaagcatcatgccaaagaagttaagtttactgaaactcaactttcaatgcataaacaaaaacttgagctggctttagcaaattatggcatgcgtagtgatgcccaaagttatacacctgatgctcatgctccaagtgatttgtatagcgcctatcaggattatcaggcaagccgtgtcaaacttgctgctttggtaggcaatcctcccaatcatattgcagttgtacggtgggcttatgaatttttgcccattttgttggcgattgtgattgtacgagcatttgtgattgagccgtttaatatcccatcatcttctatggtgccaactttatacacaggcgattttattattgtcaataaagcagcttatgggcttcgtttgccaattatacatactaagattttggatacaggcaaccccaaacgaggcgatgttgctgtttttcgttatcctgtgaatgataatatttattttataaagcgagtaattggcttgcctggagatacggtaagctttaatcgtggggtgttgtcgattaatggtgaaaaggtagaaacgacggcggtgaattatcaaatgccaagtgtgttattggataaaatgttacccaatatgattcatggtcaaacactcagcgatgcagaccgagcaggttttgggcgtcaagaagaatatttggcacgctatcaaactgaaaatttgggcaaccatacttatactgtacgatatgttataaattcaaactcatcagcagaagcaccatttttaattgagcactcaccagaggtggttgattctcatggagaacaatggtcaattgtgattcctgaaggtcaattttttgtgatgggtgataaccgtgatcgtagtgatgatggtcgtttttggggttttgtgccagaatctaatctgtcgggtaaggcaacttatatttggatgcataaagagtcaggttttagattaccaagttttgggcgtaatggtacaattgat

SEQ ID NO: 27081 - DNA, 966 bp, Moraxella catarrhalis
gtggataattccaaaaaaatcaaagtgttggctatctctatcgcagctgtcttgcatggattggtaggttttggattggcgaatatgactataaaaccaatcacaccgccacctgttacaccgcctttagagattgaatttatcaaagaaccagtgcctgaacccatcgcacttaatgaccttgaatcgcctgaaccaccaggcgaacctgttgttacaccagagcctgttgtagagccagaggtcgctacgcctgaggttattgagccgcccgaacccattcctgaacctgagccattacctgaaccaattcctgagcctgagcctgagcccgagattgatgtagaagccatcttagaacaacaaagacttcaagaggcttgggttgctcagcaacaacaattggccaaaattcaagaacaagagcgacttgaacaagaacgccttgaaaatgaacgcagggaacaagaacgacttgaacaagaacgcttagaaaacgcaaggcgtgagcaggagcgacttgacaacgaacgcagagccagagaacaagcacagaaagaagcccaagtggctgctgcaaggcgagcagctgcccaagcggcggctaatgctgccaaaaaagcaggcaatcatgggggcggtcagcctggccagaatcagaccgtggaaggtggtattaatatcagtaatgccagctggaaaaccaagcccagagtgaataatttttgttcagcaagaagtgatattgacaccacgcttcaagtgagtttccgtgttgatgctgagggtaaaatctccaatgtcaatttaaatggctcaacaggcgatgccaaattagaccgacagattatccgtcaaataggtcgtggtcgcctgcatccatttagagaaggtaacatcacgcgtgttggcactgcaatttatccgattacgctaaaattacaaaaagatgagtcttgtaccaac

SEQ ID NO: 27082 - DNA, 936 bp, Moraxella catarrhalis
atgagcatacattcatcaaccaatactccccaacaaactgacggcttggtcgatcttgtaacggttttggctgctgttactgatcataaagctcgtatcttaacggtcagcggcggtgataagttgcccagcggtcagctgacacccattcatcattcactacaagctggtgttaaagactgggtacgcacccaaaccgctcagccaatgggttatgtggaacagctgtatacttttgtagatggtgagcgtaaaaacgcacaaggtatgcccgttttgtatgtcagctaccttgggttggttaaagaagcgactgcccacagtctcaatcctgatgccacttggcaagattggtatgattattttccatgggaagatcggcgtaatagcagtaagcccattgagattttgtcaggtctgtatgcttgggtggatgctggcaacgatacccaagaacgccaagaacggctaagacgggttcaattatgctggggtttacctccttattcgtggtcagaagagcaggtactactacgctatgaattattgtatgaaacagggttggttgccgaatcgccttggcaaaacccaaattttgattttcgtcataccggtcgttttatgcagcatagccatcgccgagtactagccacggcactcgccagattgcgtgccaagataaaataccgccctgttatttttgaattgatggcagatgagtttacattatttcagcttcaaaaaagcgtcgaagccttatcaggtcaagaactgcataaacaaaattttcgcaggcaagttcagcagcaaaacctgatagaagccattgaaggcaggtttgctcatgagcgtggtcggcctgcacagctttaccgatttaaagacacggtgctgcttgagcgtttgttatctaacactcgcctgcccgtgagtaaa

SEQ ID NO: 27083 - DNA, 1248 bp, Moraxella catarrhalis
atgaccgatatcaccttaaaccaaagccataaattaacttggcgttcatttggacctggtattttaatggcttctgctgccatcggcggctcacatttggtcgcctcaacacaagctggtgctctgtatggctggcaattggcaattatgattatccttgccaatttttttaaataccctttttatcgctttggaacagaatatgcctactcaacaggcagcagcttagtggcaggttatgctaaaatttcccgtatctatctttgggcattttttgtcttatgcatcatttcaggtattattagcacaggtgctgtggcactactatgtgcggtcattttggggcaaattttgccttgggaactcagcactctagagctttcatgtattgtgatggtaacctcaggcattttattggtggcaggtcattatcggcttttagatggtttaaccaagtggattatcgccctgctgacagtagcgacggttgcagctgtatttatcgctgcaggtaagccctctgccatatcagccgactttattcctgcctcaccttggaatttggcggcacttggatttattgttgcacttatgggctggatgccagcaccacttgaattttctgccgtgacctcagtgtggaccgctaagaaaattcgtaccgattacaccaatcgctttcaaggttttgttgattttaatgttggttattttacttcagcggttttggcaatatttttcttggcacttggcgtatttgtacaatatggcacaggcaccgaaatcgccatgcaaggcggtgcttatgtgccacagctgattaatatgtataccgaaaccatcggcaactgggcaaaaatgctggtcgccacgattgcttttttgtgcatgtatggtacagtcatcacctgtgctgatggctatggtcgtaccaattcagaaagcctatccttaattttgaccaacagcacaaaagcaaccgaaaaatatgttgttatatggactgtatttacgattgtggcaggctacggtttaatcgcattttttctaggtcaaatggcggcactgctcaaatttgcgatgatctcagcatttgtgactgcaccgatttttgcttatttaaactacgctttggtcaaaaaagaaggtcatctaagcaccatcatgaaatggtatgcactggcaggcattgtatttttgacaggctttaccgtattattcttattacaattttttggtatgattggc

SEQ ID NO: 27084 - DNA, 552 bp, Moraxella catarrhalis
atgatgacaatgaaaaaagctgttatgttttctgttgctgcattgttagcagtgtcaacaatggcaacccaagcacaagaagctgtcgcacctgcagaaactcagactgctgatgcaactgaagtaactacagcggaagcccctgctcaagcggcagcgcctgtagaagaagcaccaaaagaaagtccacaggttcaaaagcttgtggcgatgtatcccaatttgatcgctcgtatagcaccttatggtaaagtttgttttgatggagaagaatgtgatattaatatcacagtacttgcaccagccgttgaaggtcaagctcgtgatggcgaaagcttgtataaagccatatgctcaacttgtcatgatgcaggcttgattggcgcaccaaaaattggcaccagcgattgggcatcaagaatcggtaaaggcacagcaacgctttataatcatgccatcaatggttttaatgcgatgcctgctcgtggcggtgctgatatctctgatgaagaggttcaaaatgcggttgattatattatccagcagtcaagc

SEQ ID NO: 27085 - DNA, 3599 bp, Moraxella catarrhalis
atgcgcctaaaatctttaaaactggctgggtttaaatcctttgccaatcctacgacatttacttttcgacacgatattactgcgattgttggaccaaatggttgtggcaaatccaatgtcatcgatgcaattcgttgggtgcttggtgagacctctgccaaacagctgcgtggcggggcgatgagcgatgttatttttgcaggtgttgaagggcgagctgcgaagagtttggcaagtgttgagctgatttttgaacatacgcaagacgaaacccacggcattcgccatgaattaaatctatatcaagagctgtcactacgccgtcaagtcactaaagaaggtaaatcggattattttatcaatggtcagcgagtgcgtcgccgtgatgtggtggatgtatttttgggaactgggcttggtgcgcgtactatgcggtgattgagcagggtatgattgggcggattgttgagtcaagccccatgcagcttcgagaatttattgaagaaggtgcgggcgtatctcgctatcaggcacgccgtgctgagaccgaaaaaaaacttggcgaaacccaagataatcttaaaaggctttcagatttacaaggtgagctaaaaaaacagcacaaaacgctcattcgtcaagcacagtctgccaaacagtaccaagccttaaatgatgaattaaaaacgcttcaaaaagaagagttaatcagacgcttatttgaagcgtggcatcatcacgaacaaaaaaagattgagcagggtaaatcaggtgaggtgcttgccaagctagacgctaaagccaatcaagtacgccgtgagcttgacctactgtctgcgcgtgttgccgaggctcagtggctaaaagatgacgccaaagacaactatcacaatgcacagatggcagagcagaccgcacagcataatttttatacagtcaatagccaaattacccaaaatgatgaaaaaattgctcgcctacaggctcagcatcaagaagctttgaccaagataaatcaggcacaagacgagcttttacaaattaaccaatcgctagatgtcattacgcctaaagtagaagcgatgacgcatgagattacccatgccaagcaagctcaaagtgaggtgcagttgacttggcagtcgcaccgagatgagctaagtagcctaatgcaagaaaaaaataatcttgaaaatctcaagaaattggcacaatctcagcgtcagcgtttggagattggattaaataaatggcaagttcgttatgatgagcttatcactgccaaaaatctatttagcgatactattgaagtgcaaaatcagctgtctgctgataccttaaaagctgtggcactcagacaaaagcttgaacatcttaatgatgatgagatgctaaaatcacttgtagacgagctgactcaagcagtgcaaacatcccaaatccatgtacaaagccaagaaaaacgccatgccagtttgatgggtgaatatgaaattttgcacaaactggtacacactaaaataccgtctcataaaattacgacgccgcctgatgctgatacatcaatagccttaaatgcactgccaagtctaaaagaaagtttggtactaacagaaatgggtttggactatgcagatgttttggatcagtttttgggattttggttgaatgcccgtctaagcgatgaactgccaacggctgttttaggtcatgtgatggatgataatgattatatgatcttaaaatcaggcaaaacaagaaacacaacctataccgatgagatgttgtctcaactaccaacatcaatacaacagcaactggtgcgttttgatcgactgtttagcatgcctacgcttgagttatttggtcgctgttatttatatgtgggcgatgagccgctcacagacttggacacaaatgtaccatttggtatgataattatgacaaaagctggttggctggtgggcagttttggtatgttacacctttcaaaacttggtgataccagcagtcagtttttaagtgatcgaaaaaaacaccttgagcgactagaggtgctagaagatgaactaaacacacttgaagattcgcttgaaaaagaccaaaagcagctcaagcaagtactgacaaggcttcaaagcagtaaaattgagcttgaagaaatcactgcccaaaaaaatgtggtcacccagcagctgcaccagttagaacaaggcttgaccatgctaaccgccaaacttgattctgaaaaagcacgccgtgagagtattgacagtcagcttaagcgactggatgatgaaaatagcagtattaaaaatgagctacaagagcttaatatgcagattgagacctgtgattttggcttaagggagcttgagccaaaagttgagcaagcaaatcaagccatggcggtgcagacggtgcgtatcgacgaagctgttgctaagcttaaaacccaaaatgatacatatcaggctttacaaatcaaacttggcacactgacgcaagcaaaaacccatgccgagcgtttgcttgagatggcaaaacatagtgcatcacaaactcaagcggacattgagacaaccaaaagcacgcagcaggaactcagtcaaaagctaccagtgcttgaagaggcgtttaaagctgccaaagcggtaagtcatgagcttaagattgctagtgatgaatatgagttggcagccaaagcacagcaaattgcccaaagtcaattgcaagaaacgctgactgaggcacataccaaatttgccaccgctcaagcaactttggcacagatcagtgcagatacagcggttggtgaaagccgtgttcaagacattggcggtgagcttatgcgtctggatgaatcgtttaatttagcgtctaaactggcagattttcggacaaatcctaatcaaaatttcaccgataattcagcaaggcaaaatcaaatcaaaagtaaaattgctgagcttggtgcggtgaatttggcagctgcagctgagcttgccgagcttgaggcgcgtgtttcgcccatggatgagcaaatcaatgacatcacccaaagcatgaaaaagcttcaagatgccattcgtgcgattgacgaaaaaaccaaaacactgtttttgacagcacttgaggcggtaaataaagagctaaatgcactattttcaaaggtttttggtggtggtcaagcaagcttaactttgatggcagatgatgacttgcccaaatcggacaaatggcgagcagggcttgtgctgatggctcaaccaaagggtaagaaaaactcaagacttgctgtgctttcaggtggcgaaaaaaccttgacagcattgagtttgatttttgctatttttaagcagcaccctgcgcctttttgtgtacttgatgaggttgatgcaccgcttgatgatgccaatgtcgccagatttacagggttgattagagaattggctgatgatgttcagtttatttttattagtcataataagcttgccatgcaaatcgctgatgagttaaaaggcattaccatgccaaccgctggtatctcaagtttggtgacagttgatttacaagaagcccaaaaatatttagaagtc

SEQ ID NO: 27086 - DNA, 2739 bp, Moraxella catarrhalis
atgataaaaaaaccacttgtttgtgcgatatcggccacctttgcgatgccagcggtagcagataataccaagctgggtgaagagccaaccaccaccttaaagggtgtattggtaagctcgcaaacgaaccaaaatacaggttttgtatctaatgattcaaaacaatccagtgatcttacgctttcaaaagataaattaaaatatcgttcggcaaccttgggcaatgcgttaagtggtgagcttggtattcatagtaacccttttggtggcggttcatctgcacctgttgtgcgagggcaagagggtgtgcgtcttaagattttacaaaatggaactgatgtgattgatgtgtcatcaatatcgcctgatcatgttgtggcgaccgatacacttttagcgtctaaagttgagcttgttcgtggtgctgatacgctgttatatggcttggcatcgccagctggtgtgattaatgttgttgatgaccgtatcccgaatcgtatgcctagtggtgctatccatgacaaaatcgaaggcgagacgatgcttcgatataacacaaacaaccatgaaaagcttgcaactgcaggggtgagctttggggtaggagatcgcattgcggttcgggtggagggcttaaagcgagaggctgatgactatcaagttccccattttcaggcagatcgcatgttagattatgtgccaggtagtgcaaataactctaccgttggcatgattggcgtgtcttatattcatgataatgggcatatcggtgcttcttatagccaccgtaaagatcgttatggtatcccagggcatatccactgcgacagccaacgagagcattttatcaaatggcataatatcacaaaatccaattattatttacccatttatcctcatttgatggaggattcagatattgatgacaatcctcatacgcattgccgccacaaccacgaagaccatatcggtgagcataatcccacgggcgtgcccatcaatcatgaacatcattcgccttggattgatatgaaaaccaatcgctacgacattcgtggcgaggtatatcggcctattcaaggtttggataaaattaagctaagcttaacttatgcagattattatcatgatgaaaaagatgctggcaatgagcaagacccaaacaatcacaaaccttctgagcgtgatacaacggtggataagggtcatgccagctctatttttacaaaaaaaggcgttaatggtcgcttggagttatatcatacaccgaccaaacgcttatctggggtattgggtattgggtatcaaacccaaaaatctgcagcaggagaggcgtatttgccaagctattttcaatcagaagcagaatggcaaaaagcccaaagtcaaaacattaaccaatatcgtccttacttattagttccaaataccaataaaagccttggtatttttggacttgagcaactaaagctaaatcaaatgacttttaaggtggcgatgcgtcatgaaagacaaaaaacaccaattgaatatgaccagcatttacttgaccatgctttgcagtattttttaagtaaagcacagctaaaagcacctgatcatcctgatttgacgacatataaacaacatgccacctcttatgctggtagtgccttatgggatattacgccaaatcatcgattgtcattgacctactcacataacgaacgcattccatcgccgatggagctgtattatcaaggcggacatttggcgaccagctcttttgagcatggcaataaaaacttggtcaaagaaaaatcggataattatgagctgggttttatgcatacagcagataaagtcagctataaagcaagcacttactatagcaattttgataactatatttttaatgagaccattgccaaagaaggcaatttatacatcagacgctataatcagacgacggctaagttttatggtgtggagggttcattaacttaccagccaaatgccaatcacagtgtgatgttttttggtgatatggtgcaaggtaaaattggtgcattatctgatattaaaggtaagcttgtatatgctggcagaaagtgggtttattttgatgatgatatcaaggatatgaccgttgatgataatggtgattatgatgccgatggtggtttgacttgtgccttaaaaacgcctgaacaatggggacaaattaacgataataatgattgtagtacaaccattaatgtctataaaaacggtacaacaacctcaggcgaggaggattacgaccgtttggcacgaaatccaacttacgcacccagagtaccgcccagccgcttgggcattcgttggcaagggtattttggtgatcattggtctgccaatgcagaatttaaccatgtgtttgcacaaaataaagttgccacctcaacggttgccattaaacctcaattcaagcagccagaaggttgccaacgccatgagagtcattgccgaatcagcgactatggcagtgataacaaccctttgatgatgcagccaagatatatcacagaaaacaaaacggcaggatataatttgctcaatgttggcttagattataacaatgcatatcgtaatgttgattatacgctgtcaattcgtgcgaataatttacttaatgaacaaatctacattcacaactcatttttgccgtttgtaccgcagatggggcgtaatctgactttaggtttgacggctaaattt

SEQ ID NO: 27087 - DNA, 366 bp, Moraxella catarrhalis
atgctttcagcggttatcccatccgaacatagctactcggcaatgccactggcgtgacaaccgaaacaccagaggttcgtccactctggtcctctcgtactaggagcagatcctctcaaatttccaacgcccacggtagatagggaccgaactgtctcacgacgttctaaacccagctcgcgtacctctttaaatggcgaacagccatacccttgggacctgcttcagccccaggatgagatgagccgacatcgaggtgccaaacaccgccgtcgatatgaactcttgggcggtatcagcctgttatccccagagtaccttttatccgttgagcgatggcccttccatacagaaccaccggatcac

SEQ ID NO: 27088 - DNA, 264 bp, Moraxella catarrhalis
atggcaatgttttcaatgatttgggcattaattgtaggttttgttgtcgggttattggcacgagcacttaagcctggtgtggatggcatgggctggatactgaccatgattttgggtattgctggtgcttatgtgggtgcatttattgccgactttgttggcgtcaacgcccaatcaggttttagttatttaattttttctgtgattggtgcaatcattttattgtttatttatgaaattttggcaggtaaacgccatttaaaa

SEQ ID NO: 27089 - DNA, 819 bp, Moraxella catarrhalis
atgtcaacacttgcaactatcattgaaacggcttttgatgaccgtgccaatttcaccgcccaaaccgtcagcccagaaattcgtgcggctgttgatgaggttattgaagcgttggataatggctctttgcgtgttgcccaaaaaattgatggcgagtgggttgttcaccaatgggtcaaaaaagcggtattattgtcctttaaaatcaatgacaacaaacccatgaatgcaggtgaattgggtttttatgacaaagtggacaccaaatttaatggctggacagaagaagatttcaaaaatgcaggcgtgcgtgtcgttccccctgcggtcgctcgcaaaggttcattcatcgccaaagatgtgatactcatgccatcttataccaacatcggtgcttatgtggatgaggggacgatggtagacacttgggcaaccgttggctcatgtgcccaaattggcaaaaatgttcatctatcaggcggtgtgggtattggcggtgtgttagagccactgcaagcaaaccctaccatcatcgaagataactgctttatcggtgctcgctctgagattgttgagggggtcatcgttgaggaaggttcggtcatctccatgggcgtgtacatcggtcaatccacacgcatttatgaccgtgaaactggcgagattttttatggccgtgtgccagcaggttcggttgtggtaccaggcaatttgccaagcccctgtggaaaatatagtctatatgccgccatcatcgtcaaaaaggtggacgcccaaacacgagccaaaaccagcctaaatgacttattacgcaccgag

SEQ ID NO: 27090 - DNA, 177 bp, Moraxella catarrhalis
ttgggaaagtggccagtatcagccagctttgggtacataaataccatgaaaactattataacaaattttattaaaaaagggaattatttttcatcattgatgactaataaagtaatcgccatcaaaaatcacggcaatccaagctcaatccatcatttaatcaaattaaatttgaat

SEQ ID NO: 27091 - DNA, 1398 bp, Moraxella catarrhalis
atgagcgaacaaacttcaagcatgtggggcggtcgtttttcagaggcgacggacagttttgtcgcagaatttaccgcatcggtcaattttgataagcggatggcacgccaagatattcaaggctctatcgcccacgccaccatgctgggtatgtgtggcatcatcacccaagatgaatcttgtcaaatcattaacggccttacccaaattcaagccgagattgatgacggtaagtttcagtggtcggtagtgcttgaggatgtgcatatgaatatcgaaagccgcttgacgacacttatcggtgatgtcggtaaaaaattgcacactggtcgcagtcgcaatgaccaagttgctacagacattcgcctatggctgcgtgatgagacggataatattctggtgctgcttgccaaactacaaagtggacttttggatttggcagccaaccacactaagaccatcatgcccggctttacccatcttcagaccgctcagcctgtcagctttgggcatcatgtcatggcatggtttgaaatgcttgtgcgtgacagcgaacgctttgtagatacacgccaccgaattaatcaaatgccgctaggttcggctgctttggcaggtactacctatccaattgatcgcaccatcaccgcacgcctgctcggctttgagggcatttgccaaaactcactagatgcggtgtctgaccgtgattttgccattgaatttactgccaatgcgtctatcttaatgatgcatttatcacgcatgagcgaagagctgatcttgtggatgagtgcacagtttggctttattcatattcctgatcgattttgcacaggttcatccatcatgccccaaaagaaaaaccctgatgtaccagaattggtgcgtggcaaggcagcgcgtgtctttgggcagctcaccactttgctgacactcatgaaaaatcagccactggcttataacaaagataaccaagaggataaagagccactgtttgactgcgtggacaccttaactggtagcctgcttgcctttgctgatatgttgccaaatatcatcccaaatgtggacaatatgcgtgcagcgaccatgaaaggatatgccacagcaactgatctagcagactatttggtcaaaaaaggcttaccatttcgtgatgcacatgaggtggtgggtaaagcggttgggcttggtgtctcaaaaggcgtggatcttagtgagctttcattagatgaacttcaaagttttagcccactgatagaatgtgatgtctttgattgcctaactttagaaggttcactaactgcacgcaatcacattggcggtactgcaccaaatcaagtattatcagcaattaaacggggtcatgaacgaattatcaatcccaaaaccgcc

SEQ ID NO: 27092 - DNA, 138 bp, Moraxella catarrhalis
atgcaagtcttatcatcgctgaaatctgctaaaaatcgtcatgaagactgccaaattgttcgccgtcgtggtcgtacttttgtgatttgtaagtcaaatccacgctttaaggctgtacaaggcggtaaaaagagaaaa

SEQ ID NO: 27093 - DNA, 954 bp, Moraxella catarrhalis
atggattcgggtgagaccttgacttttcaagcactgattttaacactgcaaaattattgggcatctcgtggctgtgtggtgctgcagccttatgatatggaagtgggggctgggacatttcacaccgccacttttttgcgtgccttaacccccgagcgttggaatgcagcttatgttcagccatctcgccgtccaaccgatgggcgttatggtgataatcccaatcgcttacaacactattaccaatttcaagtggtgttaaagcccaatcctgccaacattcaagagctgtatttaggctctttaaaagccattggcattgatacgctgacccatgatgtccgctttgttgaagacaattgggagagtccaacgcttggggcgtgggggcttggctgggaagtatggctaaatggcatggaagttacccagtttacctattttcagcaggttggtggcattgagtgcttccctgttacaggtgaaattacctatgggcttgagcgccttgccatgtatatccaaggcgtggacagtgtgtatgatttggtgtgggcagatggtgaatttgggcgtgtgacttatggtgatgtgttccatcaaaatgaagtggagcaatccgcctataattttgaacatgccgatgtggctaaattgtttgaattatttgatttttatgaagagcaagcagataagttggttgcggtcaatttacccttgcctgcttatgagatggtgttaaaagccagtcatgcctttaacctattggacgctcgtggggcgattagcgttaccgaacgccaacgctttatcttgcgtgtacgcacactggcccgcaaagtggcaatcagctataccgaagctcgggcaaaattgggctttcctttggcagatgatgcccataaggcagaagcgttggagaagtggttgccaaaagaaccaaaacttgtctta

SEQ ID NO: 27094 - DNA, 795 bp, Moraxella catarrhalis
gtgaaatttaaaacatttggacttatggcagccattgttggtacatttagtatctcagcttgtagcggtcaaaacgaacaaagcacaaaagccagtggtgacaccttgcgtattgcgaccgaaggcacttatgcaccatttaactacaccaatccagatggcagtttgggcggctttgatgtggatatcgccaatgcgttatgcaacaaaatgcaaaccgaatgccaaatcattgcccaagattgggacggtattataccagcattaaaaacaggtaagtttgatgccattgttgcagcaatgtcagtcacccctgagcgtagtgagcaggtggattttagcgagccttattttgtcaactctttggtatttttggcaaaaaaaggttcaaattttgatccgagcagcaccgatgccatcaataatgccaaaattgttgctcagcgttcaaccatctcaagtcaatggttaacccaaacttatccaaacagcaagccacagctgtacgatacgctggacaatgcttttattgatttaggtaatgagcgtgctgacgctatgatttctgacaaactgccagcattaacttggcttagctcggacttgggtcaaaattttgagatcaaaggtggggacattaatatcaatgataaagtctccattgctgtcgataaaggcaataccgcactattacaaaaattcaatgaggctttggctgcaatcaaggctgatggcacctataaacaaattgtcattaagcactttggtgaagcaggtatgccaactaatattgaa

SEQ ID NO: 27095 - DNA, 720 bp, Moraxella catarrhalis
gtgtttgacttacaaggctacggcccaattttattgcaaggtacaattctgaccataaagcttgggcttgccagtttggtatttggtctgttattcggtttgcttggtgcacttgccaagctttctggcgtttggatattacaaaaaattgccgatgcctatacaacaatcgtccgtggcatacctgagcttttgatggtttttttcatcttctttggcggtagtatcattttagtcaccattgcaaagcaaatgggctatacaggacgcattgatgtgagtcaattttgggcaggcgttactgccctatctatcatgtttggtgcttatgcgaccgaagtttttcgcatggcaattcaagacattcccaaaggacaatgggagtctgcccaaagcatcggtatgacgccaatacagacattgacacgcattattctacctcaaatgtggatggtggcactacctggtcttggcaacttaactttggtactacttaaagatacagccttggtttcgttgattggtttacaagatttaatgtattttgcacagcgtgcagcacaatccacccaaaaaccttttacattttatttagctgctgcttttatctatttggctttgacttcggtgattacactttttatcatgtggtgtgaatctcgtgccaaccctgccgcacggtatgccaagctacttcataaacgctcagggggtcaatca

SEQ ID NO: 27096 - DNA, 228 bp, Moraxella catarrhalis
atgtctaaaacaaaaaataaagctgtgcagcgtctcattgaattttttggatcacagatgaagctagcagatgctttggatgtggaacaatcgtctgtgagcggttggttaaataatcgcttttatattagtcgagataatgcagacttggcagaaagtctaacaaacggcgtggtgcgttcagaagagttacgaccacgaaagaaagcaaaaacccctagaagcaac

SEQ ID NO: 27097 - DNA, 1341 bp, Moraxella catarrhalis
atgattaaaaaacttctcattgcaaaccgtggcgagattgctctacgcatcgtgcgtgcgtgcaagcaattgggcattgcgacagtaggcgtttactctactgctgataaagacttgatgcacttacgctttgttgatgaagcggtatgtatcggtaatgcgccttccgctcacagttatttggatattaatgccctactggcagcagctgagattaccgcagctgatgccattcatcctggatatgggtttttgtcagaaaatgctgaatttgctgaacgggttgaagaggcaggcttaacttttgttggcccgcacccagagcacattcgattaatgggcaataaagtttctgcaatcaatgccatgaaagaagctggcgtaccaacggtaccaggttctatcggtgcaatcactttaggtaatgctgaagagcaagctcgtgaaattggctttccattgattgtcaaagctgcagctggtggcggtggtcgtggcatgcgagttgttgagcgttttgaagaactgttaatccaagttcaagccgccaaaaccgaagctcaaaatgcctttggtgatgatacggtctacatggagcgttttttaaaaaatcctcgccatgttgaggtacaggtgttgggtgatggtaatggtaatgctttgcatttatttgaccgagactgttcattgcaacgcaggcatcaaaaagtactcgaagaagcacctgctccagatattcctgatgaggttcgtacgccaattttagaagcatgcgttcatgcctgtaaaaaaatcggttatcgtggtgcaggcacctttgaatttttatacgaaaatggtgaatttttctttattgagatgaatacccgtgtacaagttgagcaccccgtaaccgagatgattacaggcatcgatatcgtggtcgaacaattaaaaatcgccgcagggtatggattatcctatcatcaagatgaaattacgattcgaggtcatgccatcgaatgccgtattaatgctgaagacccaaaaacttttatgccatcacctggtcaaattcagcgtttattcactccaagtggttcagggattcgctttgattcacatctttatcaaggctataccattccaagctactatgactctttaatcggtaagctcatatgccatgcccaaactcgccgacaagctattgctaagacattgcacgctttagatgagctggttattgagggcatcaaaaccaacattcctttacatcgagatgtcatcttgcaagatgaggcattttgtgaagaggcacaaaatattcattatcttgaaggtcatatgctaaaaacgcaa

SEQ ID NO: 27098 - DNA, 501 bp, Moraxella catarrhalis
atgattgattggtcaaaaatggacatgcgtgtttcacgcactgagattaaaaaatcccatgagcgtttgcaagcattatccgaaccgcttgccaaattgtccaaaaaacagcttgccaatttgccagtaagtgaatattttttggatgaattaaagcatttaaccaatatagacagccacgccgccaaaaaccgccaaatcaaacgagtgggtaaactcatcattgaagaaaaccgccacgcgctaacgcaggcgttatttgaatgtcaatttacccccgagcaaattgccaagattgaaacatggtatgatcgcctaaaactgtctgatgaaagcaccattaagcagtttgttaagcaatttaaaaaggcggaatataacagtatttatcaactgcttttgtggatagaatacgccaaacatttgggcgatgatgagctattggctgaaagcgtggcagattttgaaagttatgttaaagaggtggcgatattgtctaaa

SEQ ID NO: 27099 - DNA, 432 bp, Moraxella catarrhalis
atgaaccaaaaattacttttagcttctgtggtggcagctttgactttgaccgcttgtagcaagcctgccgatgagtccagccaagcaaatccctcagcagagcatgcaaccatgcaagacgagcatactcacgcacatgagcatcatgatgaccatgcaggtcatatgcacatccacactgatggcgatgcgtatcaatgtggcgatcagacagttcatattgtcgttcataatcatgaaggtgaaattgaagctcacctaaatcatgatggcattgagtatgattttaatcaagatcccagtaataaaaatcaatacaccagcaatcatggatttgctgataaccaaaaaaccatactcaccattgatggtaacaaggctgtcgtaactggtgataccaatcaagtgttgcttgactgcgtcaaagccagt

SEQ ID NO: 27100 - DNA, 2850 bp, Moraxella catarrhalis
atgtcatttaatgatttttcagaattattctatgaaaatgcttttgttcatcgtcatcttggtaaagatgccaatgaacaacaagccttattacaaaccgttggttttgatgatttggacagttttgttgatgctgtcgttcccaaagccgttcgtctgaataaagatttggatttaccagaggccatgagtgagcataacgccttggcaaaactgcgtgccatggcagataatattaccgttgccaaaagctatatcggtcaaggttactcacccactcgcctgcctgcggtcatccaacgaaatgtgctagaaaaccccggttggtataccgcctatacgccctatcaagctgagattgcccaaggtcggcttgaagctttacttaatttccaacaagtttgtattgacctaactggcatggatttggcaggggcaagcctgctggatgaagcaaccgccgccgctgaggcgatggcgatggctaggcgtgtgagtaaatcaaaatccaacgccttttttgtggatgagcgtacctacccacagacccttgatgtcattcatactcgtgccaaatattttggctttgaaattgtgatgggtgattttgatgttgccaaaaatggtgagttttttggggcatttttccagtatgtcggtaaagatggcgatgtggtggatttgaccgatgtcatcaccgctgtcaaagacaacggagcttatgccatcgttgccagcgatatcatgagccttgtgcttttaaaatcccctgctgatatgggtgctgatattgctttgggaagcacacagcgttttggcattccgatgggttttggtgggccacatgctgcctattttgcctttaaagacaaagacaaacgctcggcacctggtcgcatcattggcgtatcaaaagacgcccaaggtaataccgccctacgcatggcactacaaacccgtgaacaacatatccgccgtgaaaaggccaattcaaacatttgcacaagtcaagtgctccttgccaatctggcaggcatgtacgccgtctatcacggggcggcagggctaaaacgcattgccacacgcattcacgccctagcggtcgcctttgccaaagcggtcaaatcatcagagctggcagtgcgtcatgatgtgttttttgataccgtactggttgaatgtggagggcaggcacaaacgatttttaagaccgccaaagacaaaggctacaacttatggcagcatgacaatggcggtatttctgtatcatttcatgaacttaccgatgaagcagagtttgatgaactgtgtcaaatctttggagtcaaaggcagccttgatgccctccagatccaattgggcgatttattaagacaagatgacattttaacccatcctgtgtttaacagtcatcacactgaacaccaaatgctacgctacctaaaatccttagaggataaggatttggcgatgaaccgttcaatgatttcattgggttcttgcaccatgaaattaaacgccaccagtgagatgttgcccatcacctgggatgagtttgcaaatgtgcacccatttgcacccagcgaagacaccaaaggctacattcagatgattgagagcctacaagcccagctaaaagccattacaggctttgatgaaatcagcatgcagcccaattcaggggcatctggtgaatatgcaggcttgctcgccattcgtcgctatcatgaaagtatgggtcaagatgagcgtaatgtctgcctaatcccccgctccgcacacggcaccaatccagcaactgctcagatgatgggcatgaaagttgtggtcgttgcaaccgatgataatggcaatgtggacattgatgacctaaaagccaaatgtgatgaacacagcgataagcttggtgctttgatgattacttatccatcaacgcatggggtttttgaagagggcattcgtgatatttgtgatatgattcacgctcacggtggacaggtgtatatggacggtgctaacatgaatgcacaagttggcatcatgcagcccgctgatgtcggggcagatgtactacacatgaatttacacaaaactttttgcatcccacatggtggtggtgggcctggtatggggccaattggtctaaaatcacacttagcaccttttatctcaaaccatcgtatcaaccctgtgtttaatgcccagtctgactgttcggcagtttcagccgctccttatggttcagcaaatatcctgccaatttcatggatgtatatcaccatgatgggtcgtgatggtcttttatcagccaccaaacaagcactgcttaacgccaattatatcgcaactaagctaagcgaagattatcctgttttatatactggtaaaaatgggcgtgtggctcatgaatgtatcattgacattcgcccattaaaagcacaaacaggcatctctgaaactgacattgccaagcgtttgatggattatggctttcatgcaccaaccatgtcatttcctgtggcaggcacgctcatgattgaaccaacagaatctgaaagcaaagcagagattgaccgcctcatcagtgccttaaagcaaatcaaacaagaggccttaaaggtgcaaacaggcgaagatggttggacaccagatgacaatccacttgtcaatgccccacacaccgcctttgttataacaggcgaatgggcgcatccgtatagccgtgaagaagctgccttcccattgccttatatcaaggcacataagttctggccttcggtgggtcgggtggatgatgtttatggtgataaaaatctgatttgtgcttgcccgagcattgaaaattacgaa

SEQ ID NO: 27101 - DNA, 795 bp, Moraxella catarrhalis
atgaataagcttaaaattggcattatgggcgcatcaggacgcatgggtcgtatgctcatcgaatcgacaatgaaccacccaaacaccgagcttggcggggcttatgtacgcagcacatcaagcttgatcggcgtggatgctggcgaattcatcggcggtaaaaaatcaggtgttgcactctcaacacttgacggctctcaagttgatgtgatgattgattttagcttacctgaagccttcgatgaagcactcaaccagtgcgttacgcacaaaattccgctcgtgatgggcgtgacaggtcttagtgatgaccaagaagccaagcttcaagatgccgccaaacacattgccattgtctatgcaggcaactattcaactggtgttaatttatctctaaacctgcttgcgacgactgcccgtgtgctgggtttggatgctgatgttgaaatcattgagcatcatcataaacataaaatcgatgcaccctcaggcaccgcattaatgatggcacaagccattaccgaagcacgaggacaaaatataaccaatgctgccatctatggtcgaaaaggtgctgccaaacgccaacgaggagatattggtattcatgcgttgcgtggtggtgagattgtgggtgagcataccgttgaatttatgatggatggtgagattatccaaattactcacaaagctcaaaatcgtgcaacttttgccacaggtgcactaagagctgcattatgggcagcccagcagcctgcaggtttgtatgatatgcaagatgtattagagctgaaa

SEQ ID NO: 27102 - DNA, 834 bp, Moraxella catarrhalis
atgaatggtactttatacattgttagcacgccaattggcaacttatcagacatgacagaacacgccatcagcacactaaaatccgtcaatctcatcgcttgtgaggatactcgtacttcatccaaattgctaaagcattttaatatcaccacgccaacgattgcttatcatgaacataatgccgataagcaaaccgtacacctaattgaaaaattaaactctggtcagtctgttgcactcattagcgacgcagggacacccttggtctctgaccctggatatcgattggtcaaggcatctcacgaacacggtatcaatacagtgcctattgtgggtgcatgtgcagcgatagccgccctttcggtggcaggactgccctcagaccgatttacttttgctggatttttgcccgccaagtcgcatggacgacttaaagccttgcaacactggcaagcctgcacacaaactttaatattttatgaagcaccacaccgcatcgttgactccttaactgacatgatgactgtttttggggcaactcgtgaagcaactttatgtcgtgagctgaccaaaacctttgaaaccatcaaaaaactacccttaggtgagcttgtccaatttgtccaaaatgacagcaatcaacaaaaaggtgaaattgtcgtggtggttgcaggatgtgatgacacagtacaccaaagcacggattatgatgcgtggcttcttgctatcaccaaagaactcccacccaaaaaagctgccagcattgttgcagatgtacttggattaaaaaaaacgaccgtatatgatcggctgttagccctacaaaaccatatt

SEQ ID NO: 27103 - DNA, 915 bp, Moraxella catarrhalis
ttgatatctagacccattgggcgatttgcaccctcgcctacacaccatctgcatttaggctcgctgaccacggcggtagcgagcttttgtcatatcaaatcattaggtggtgattggctgttacgcatcgaagatgtggattttgagcgttgtcagcctaagtatacagacagcattttacatgatttggataagcttgggttacattgggacaaagaagttacctaccaatctaaacgcacagatatttatgatgagattttatccaatcgattatctgacatcacttatgcctgccaatgctcaagaaaacaacttgaggcacaccgaaatcaaaacgctaagccccacgcactcaaccagccaaccctctacccacgcttttgcctacataaagatttggataaatctcaccccaaaagtaaaattcgcttacagctgcccaatgttgagacagcatttgtagatgagctacaaggcgtgatttgggataatcctgcgttaagccttggtgatgttgtggtcaaacgccaaaaccaaatgattaattatattttggcttgtgccattgatgatggcttgcaaaatatcactcacatcatgcgtggactggatattatgcccatgacagtcgctcaaattaatattttacataaatgtcgcctaccaataccgagctatttttatcatttgccattactgatgaatacagatgggcaaaagctatccaaacaaaatcttgccacaccaatcaatacaaccaagcccagtgaaatgcttttatacgcactaaagctattaggtcaacacaccgtcaaacaaatgcatgccgccaaaccgcatgagattcttcgccatgccattgagcattgggataacacccctttaaaacatcgccacactttggccatcatt

SEQ ID NO: 27104 - DNA, 863 bp, Moraxella catarrhalis
cacgaaatcatcggacgcattgccaaagtcggcgacaacgcccaaaaatttaaggtaggcgacttggtgggcgtgggctgtatggtggattcttgccgtacctgctcgccatgttcatacggtttggagcaatactgcgaacacggcaatatagcacttacggtagtcttgaccgtcatgacggcacgctgacccaaggcgcttacagcacgtctatcgtggtgagcgaagattttgtgttaaaagtatccgaaaacctagacacccaagcggtcgccccgctactgtgtgcaggcattaccacatactcgcccctgcgtcattggaaagtcggcaaaggcaccaaagtgggcgtggtcggactgggcggactgggatatatggtggtcaaacttgctcatgctatgggggcggaagttacgctctttacccgttcgcttggcaaatccgatgacgcttactgcttgggggcgagccgtgtggtgctgtccaccgatgaaaatcagatgttcgaggtggcgaacacctttgatgtcatcattgacaccgtgccatacgcccacgatttaaagccttatgtgccgacacttgccttggacggtacgctggtactggtcggtctgatgggcgagctggaacaaaccattaacaccgtgccgatgattatgggtcgccgtagcatttctgcctccatgattagcggaattcgtgagacccaagaaatgttggatttttgtgccgagtataatatcgtgccagatgtggagatgataaatatgcaagacatcaacaccgcctatgagcatatgcaaaaaagcgatgtgaaatatcgttttgtgattgatatggcaagccttaaagca

SEQ ID NO: 27105 - DNA, 471 bp, Moraxella catarrhalis
atgagcgataataaagacaatttggatatccaatctggaacttcagcatctggctcacaacatacaaaagaccctatcacggttgcaaaagagagtgtggtagaggttgctaaaaaacattcagcaaaagattttttgttgtggttaattgccatcattgctatgatctcagcaactttggtatcccaatatttgccaaggtattgggcacctgccaataatgtttggacacagattgctattacggtaagcttggttgtatttggttttatatgtttggcgtttaccaatcaaggatcagctttcaaaacattgttaaaagatgcaggtattgagctgcgtcgtgtgacatggccaaccaaagatgagactgctcgttatacttggcaagtaattttgataatgattatttttggaattatcatttggttgctagatatgttttttagctacattgttggcttgattatt

SEQ ID NO: 27106 - DNA, 630 bp, Moraxella catarrhalis
atgaagcacatcacatttaaagatggcagcaccgcccctgtcaataatatttattgcattggtcgtagctatgctgagcatatcagcgagcttggcaatacacccacaggcgaacctttggtatttttaaagccaaccacagcgttgaccaccgacaacactctaagcttaccaagctattcagaagatatccatcatgaagttgagctggttgtttatatcaatcaagatgtggcagacgaccaaatccctgatctaagctgtattgcaggatatgggattgggcttgatttaacagcacgagatatccaaaattccctaaaagccaaaggcatgccgtggacaactgccaaaggctttcgtcatgctgcttggctgtctgtcttaaccaaaggcataccaacaacgcatcaattatcactgatggtcaatggtgatatccgtcaagacgatagtaccgataagctattatttgatatgacttatcaattgaattttttgcatgaaaaatttggcttgcgtcaaggcgacatcatttatacaggcacgcccaaaggtgttggcaggcttgtcagtggcgatacgctcgtcgccaagcttgatacagaatcttacaccattcatattatc

SEQ ID NO: 27107 - DNA, 2049 bp, Moraxella catarrhalis
atgacaacaagccgtaaaattttggtaacctctgccctaccttatgccaacggacccattcatttggggcatttggttgaatacatccaaactgacatttgggtgcgtgccatgaaagccatggggcataatgtgacttatgtgtgtgccgatgatgcacatggcaccgcaatcatgctaaaagcacaagacaatggcatcaccccagaagaacaaattgctaccgttaaggcaagtcatgaaaaggattttgcaggatttttgattgattttgataattaccactctacccacagctccgaaaatcaatatttttcccaaaaaatttacaccacactcaagcaaaatggttatatttttaccaaagatgtggaacagctgtttgatactgaaaaagggctttttttggctgaccgttttgtcaaaggcacttgtcctgaatgcgacgcacccaatcaatacggcgataattgcgaagtctgctctagcacctacaatgccaccgaactaaaaaacccttattcaacactctcaaactcatcacccatcattcgatcatctaagcactattttttcaatttaccgcagtttgatgaatttttaaggacttggacaaagtctcaaggacgacttcaaagcagcatctataataagctatctgaatggtttgacgcaggtcttgcaccttgggatatcagtcgtgatgcaccatattttggctttaagattccagatacacctgcagatgagcctgataaatatttttatgtttggctagatgcccctgttggttatatggcaagctttaaaaatctgtgcgaccgtaccgatatggattttgatgaatattttaataaagacagtcaaactgagctatatcattttatcggtaaagatatcgtatattttcattcactgttttggccagccatgcttgaaggtgcaggctatcgcaccccaacagcggttaatgcacatggatttttgaccgtcaatggtgaaaaaatgagtaaatctcgtggcacattcatcaaggcagaaacctatttgacgcatttagatcctgaatatttacgctattactttgccagcaaactgtcagcaaatgtcgaggatattaaccttgatcttgaagattttatgcaaaaagtcaattcagatttggttggtaaagtggttaatattgcctctcgctcagcaggatttattcacaaaaatcatgatggtaaattatcagatgaattgaccgaacccaaactgattgatgagattatctgtgcaggtgatgagattgctgccgcttatgaggcgcgtgagtttgccaaggtcacccgtctcattatggcctgtgctgacaaagccaatgagtatatcgatacccaaaaaccatgggcattaaataaagcaggtaaatttgatgaagttcaaaaggtttgcacggtttcgctaaatatttttcataaactgatcatttatcttgcacccattttaccaaaattatccgaacaagcccgtgaatttttaaatattgacagcttggagtttgatacacgccatcgccatttactcagccatcacatcaacccctttacaccattaatgcagcgtatagataaagataaagttaatgcgatgattcatgactctaaagaaaatcttacccaaacctcaggcactgataacaccaaaaaaacagttttggatgatacggataccgccaaatcggcatacattggtattgatgagtttgccaaagtgactatgaaagttgcccatgtggtcaaatgccaaagtgttgaaggtgccgataagctcctacagtttactttagatgtgggcgaggagcatactcgcaatgtatttagcggtattgccaagttttatcaacctgaagagctgaccgataaaaaagtgatttgtgtaaccaacttagcacctcgcaagatgaagtttggtatctcagagggtatgattttatcagctgaaaaacaaggggtattaacagtcatcacactgcctgacaccatgcccatcggagcggttttggct

SEQ ID NO: 27108 - DNA, 3720 bp, Moraxella catarrhalis
atgtcctttgtacatttaggtattcgtagcgaatacgccattatagactcaattgtccgtatcaaagatttggtcaaagccgccgtcgctgatggtcaagatacgcttgctttggctgactggaataatatgtttgcagcagtcaagttttataaagcgtgtatcggtgctggcattaagccaatcattggggctgaggtggtggttggtgagcatagtgataaagatgcagctgacgcacgccacagcgtcatcctttatgcgatgagccatcatggctaccaaaacctgatgcgtttgatttcagatgcttataccaaccgcccaatgaataatcatggttcggtagagtttgaaacacccgtcatcaccaaagcggctttggctgaatattccgatgaattaatcgccatcttaacacatcgctcagagattgctcagcctttacttggcaataaccctgacaatgccctgcctattttacaaacatggcaagatatttttggcgataggctctacattggcattcgccgagtcaaagccagcgatgataagtttaatgaaagtgccatcattcaagctgctaagcttggcattgctatcattgcacataatgatgtacgctttattcacgcaagcccaactgagacaaatgacaaaaataataccgtcagtacagactttgatgcacatgaagctcgtgtgtgtatcgcaaatggctataccttagcagatgacagacgcccaagagaatacaccgaacttcaatatttcaaaagccaaaagcagatggccgagctgtttgccgatctgccccaagcaattaaaaatacgcgcctactcgccagccgatgcaatataactatcacacttgggattaatgttctgcccgattttcccatcccaaaaggtgagaccattgagactttttttaaaaaagtatccgctgatggcttaaacagacggcttgagaaactttatcctgttgatcagcgagatgatgattgggataaagtacgcaaaccttatgatgaaaggcttgactatgagcttgatatcattcttaagatgggttttcctggctattttttaattgtcatggactttatccgctgggcaaaagccaatggcgtacctgtcggtcctggtcgtggctcaggtgcaggctctttggttgcttattcgcttaatattactgatcttgaccctttgagctatgatttgttatttgagcgattcttaaaccctgagcgtgtctcaatgcctgactttgatatcgatttttgtatcgaagggcgtgaccgtgtgattgactatgtggcacaaacatatggtcgccaagcagtcagccaaatcatcacctttggtacgatggcggcgcgtgcggtggttcgtgatgtcacccgtgttcagggtaagccttttggtctgggtgatcgcatctcaaagatgattccaaaaacacctggtattaagcttgaagatgcctttgatcaagaacctcaactcaaagagctgctgaccaatccagatgcaccagaccatgaattggctcttgagatatgggagatggccaaaaagcttgaaggtctcacccgtaatgtcggcaaacatgcaggcggcgtactcatcgcacccaatcgcatcagtgatttttcggccatctattgtgatggtgaaggtcatcctgtcagccaatatgataaggacgatgttgaagctgtcggcttggtaaaatttgatttcttaggacttcgaaatttgaccgtacttcaagccgctgttgataacattaaccaaactcgtcaagctcaaggtcaatcctcaattgatttagaaaccttgccactcgatgacaccgatgtatacacttcagtacttcaagaggccaaaaccagtgcggtatttcagctagaaagtagcggcatgaaaaaatacttagcacagcttaagccctcaaatatcgaagatatcattgcgatgtgtgctttatatcgacccggtccgcttgagtctggcatggtgtctgattttatcgacagaaagcatggtattcaagaagtggcttatccccatcctcagtttcagcatgaactgctgcaaccacctcttgaatcaacctatggggtcatcgtctatcaagagcaagtcatgcagattgcacaggtcttagcaggttataccttaggtggtgcagatatgctaaggcgtgccatgggcaagaaaaaacccgaagagatggccaagcagcgtagcacttttgtggatggtgcgattgagcaaaatatcgatggcggtttggcggcacaaatttttgatttggttgaaaaatttgcaggctacggttttaataaatcacattcggcagcctatggcgtgcttgcttatcagactgcttacctaaagcattattatccagctgaatttatggcagcggtcttaacatctgaaatggatgataccgaccaggtggtttttttactgtctgattgccgtgataattttgggttaactatcatcccacccagtgtcaatcatagccaatggaaatttgtggtcagagatgccaagacaattgtttatgggcttggtgctgtcaagggcgtcggtgaagaggcggttaatagcattgtcgctgcacgcaaggacggtgcttttaaggatttatacgatttttgtaatcgtgttgacatcaaaaaagtgggtaaacgctcactagaagcactcattaaagcaggctgttttgatattttagccgaaaccttaaaaccacattatatcaccgatcactcagattgcagttaccaaattcgccgtggcttgtggcggcagctccccgaagcaatggcagctgccgaccaaaaccgccaaaaccaattaattgggacgatggatttatttacagatgtcgatgattcactatttgtcgcaccgccacttgaagatgtctactggcagccacaagatcgcttacgctatgaacaagcgacgcttgggctgtatttaactggtcatcctttggatgaatatcgcagtgagctacccttatatactactgttaaaagtgtcgttgatttaaaagataccgccaaaggctttgcatggattgcaggcttgatttatgatgtggcattttttggggagcgtattgtcgtcaagcttgacgatggcaaaggtcgcattgaaatgagctgctatggtgagacttttaatcaatttaaagaagttttgaccgcaggtaagcgtgtgcttggtattgatgaagaatacaaaccgttatacaccaaaggtgagcgtgcaaatatgaccattgcaaatatcgtcatcgccaaaatcagcgtccgagaaaatgatgatggtcggatttttactcgcctgcatcacattgagtctatcgaaaatgctcggattcgccgactaaaggaaattcatctaaagcttgcttgtgatgacactcaagcacttgaggggattttaagtgtgataaaagaaaatagcccaccgcctgagctaatcaaacgaggctctcacccaacttcagagcatgatgatatagacatcagtcaagtgggcgatttatgtgtacctttatcattatacttatatgatgaatgcagtgttgcacgcatccaaaccaatgaccgattacggctataccccagcgaccacaatattgctcaattaaaaaatcatatcactgatgatcatttggtgtttcga

SEQ ID NO: 27109 - DNA, 1472 bp, Moraxella catarrhalis
gtacgcacccgaatcgcaccaagcccaactggctttcctcatgtaggcaccgcttatattgcactgtttaacttagtattcgccaaatccatgggtggtgaatttattttacgcatcgaagataccgaccaagtccgttctactaagcaatctgaacaaatgattctagatgcactaaaatgggctggattatcttgggcagaaggtccggatgtgggcggcccgcatgcgccttatcgtcaatctgaacgtgccgatatttataaaaaatacgccgagcagctgttagatgatggacatgcatttcgctgtttttgcacacccgaagaacttgatgccatgcgagaagcacagatggcagcaggtttgcccgttaaatacgatggtcgctatgccaatttatcacgagaagaatcagatgcgttggtcgcccaaggcaaaccatttgtgattcgtatgcgtgtaccatcaagcggcgtttgtaccatcaaagatatgctgcgtggtgaggttgtcattccttgggaacaggtagatatgcaggttttgctaaaaactgacggtctgccgacttaccatcttgccaatgtggttgatgaccatttgatgcaaatcacccatgttttgcgtggtgaagaatggttgccctcagcacccaagcatcagctgttatatgaatattttggctggcaaatgccagagctttgtcatatgccactacttagaaaccccgataaatccaagctgtctaagcgtaaaaatccaacctccattacctactatcgagatgcaggcatactccctgaggcattgataaattatctgggtcgcatgggttacagttgccaaatgaacaagaaaaattcaccctagatgagatgattcaaagcttcgatatccagcgtatttccttgggtggccctgtctttgatatcgaaaagctatactggctcaacggtgaatatctgcggacattatccgttgatgacctaaaaaataaaatcttggcatgggcaagcgatgacactaaactcaccgccatcgctcgtgccattcagccacgcattaatttattatccgatgcaatcaactgggcaggtttttattttcaaaatctgcccgccatcactgccgaagattttgcccacaaaagcctagataatgagcaaatattagaaattttatatttggcgacttggcaattagaaaacttgcccatttggagcgaagagaatatttaccaaacccttaaaggcttggcggcacattttgacattaaattaaaagattttatgcagccattttttgtggcgattgcaggctcgacctcaagcacacctgtgatgaattccatgtacatcatcggtgcagacatgactttggcacgcttacggcacgcttgtgagatactcggtggattgggcaagaaaaagctcaaaaaattagaagagaaaaataaatctctgccaaat

SEQ ID NO: 27110 - DNA, 822 bp, Moraxella catarrhalis
atgacaacaaacacccccagtatccttcaaaaaatcatcgcaaccaaacaccaagagattgcagccgccaaagccatcaaaacgaccaatgagcttttaaagtcggcagcttgccacatgcctcgaggttttgctgatgcgctaagagcagttgatacaacaaccgatattggtgtgattgcagaagtaaaaaaagcctcgccttccaaaggtatcatttgtcaagatttcaaccccgtgacaacagcacaagcctatgaaaaggctggtgcaacctgtttatccgtactcacagaccgtgattattttcaaggtcatgatgactatcttattaaagcccgcaaggctgttcgcttacctgtactccgtaaagatttcatggttgatgaataccaaattattgaatcggctgcgatgggggcggattgtattttacttatcatggcttgtttagatgctgataccgccttacacttacatcaaacagcaactgacttgggtctggatgtattgattgaaattcacaccgatgatgagctaacccaagcactaaatttacccaaatcagctcacaatatctacggcattaataatcgcaatttaaatacctttcaggtagatttagaaaatagcattcgcttatcccaacgactatttgccaatcttgggcaagatgcccttgtggttagcgaaagcggtattcatcatgccaccgatattcaccgaatgcaacaaaatcatattcaccattttttgattggtgaacaatttatgaaaactgataacgcaggtggtgcattatcacagttattaaagacaatt

SEQ ID NO: 27111 - DNA, 2244 bp, Moraxella catarrhalis
atggataagcaatatcaggtcttagcccgaaaatatcgacccaaaaacttttctgaacttttgggtcaatcacatgtcgcccaagcactgtcaaatgccattgatacaggcagattgcaccatgcgtatctgttcactggaactcgtggcgtgggtaaaacgaccatcgcacgcattcttgctaagtgcttaaactgtgaaacaggcatgacaagtcagccttgcggtgtatgcgatacttgtattagcattgatcaagggcgatttttggatctgattgagattgatgcagcttctcgtaccaaagttgaagataccagagagctgcttgaaaatgtcccttatccacctgtacaaggtcgttataaagtctatttgattgatgaagtgcatatgctatctacgcattcttttaatgcactgctgaagactttagaagagccaccagactatgtcaaatttgtatttgcaactaccgacccccaaaaacttcccattacgatcatttcacgctgcctgcaatttgttctgcgtccactaccgcaggcttgtttgttcgatcacttagccaaagtattagatgcagaaaaaatcccttttacagaaaatgccttatggcaattggcaagcactgcaaaaggttcggtgcgtgacgcactgtcgctgaccgatcaagcgattgcctttggtggtggtcagattcaaacagatacggtcttatcgatgcttggattggtaaatcgtaccgatgtgcttgagattattgagacaatttaccacgatgatcgaatggcaatcagccaacttatcaccaatatgcgtgataaaatggtcgatgctactgcaatctttgacgaactcattgactgcattcatcaaatggcactcatgcaggtgttgcctgatatccctttggatatgaatgatgaacaagcacatcaaattaaacgcttatcatctgccatcagctcggatatcttgcaactgtattatgaaattttaatcaaaagccgagacggcattcgcttggcaagtacgccaatgcaggctttagagatgggtatcttaaggttgttggcatttcgaccgctggcagaaggacaggtgactgttttaaatgatacgccagcaaagcagccagaggatgctgacaaccacaataacatgcctgatgatatcgttgacggtctaaaagatcaagcctgtgctgctggtgaaattaatgcgttatctaccgatagtcattttgatagcgacaagcaagatgatttgaatgatttggcatcacagataggcactgagttaatcttagatcaattagacaatgacaatgtaaatacaaaagatggtcaagatactaaccaatttgctcataccgatcaagcacaatctaccaatatagccgtcaatttgaccgtatctgaggaaaatttttgggtaaaacagccccagtctgatccacctgagcagttgcaaactgatgaagatttgccaagtgatcatgatacactcacccaaatggccaccgaaccatcacttgcggttatgtcggatagtagtgataccgatgagcttacagctgattttactgaagatttgcagtcagtcccagcagttacagtagcggcattggtcaaggttgatagtaagaaaaaagcatcacatcaagcagatctgacagctcatcagccagcttcacacaatttggatcaacagcccatcagtcattttgaccatattaatccgtcaaagcctttggcacacctgcccagtcaaccgatgaccaaagcccaaatgcttgagcagctaaagcccacaccaattgagcttgaggggggctggacaagtgaaaaatgggactattgggtacatttggcgcgtgaagaagggcattttgcacctgatgagcttgccttgatgagtacgagtgtgatggcaggcgatatcgctggcgaaagccgtttattggttgccgagattaactctcaagttcaatccagttttgagaatttgcacgccaaatttttagagcattacccacaaattaaactgtctttagagcctgtactggtggattgtgcgttagaagtgccaaaatctcgcttatctgatcgtcatagtcaagtgcagatgcaggctcaacatcagctggttgatagcccagtttttcaaacactttggcaaggtggttttatcatcgatgatggcacttcagtgctcaatcaatctaagttgcttattgac

SEQ ID NO: 27112 - DNA, 3888 bp, Moraxella catarrhalis
atgaaaatcttaaaactcagctttgaaaatatcaactccttaaaaggcaaatggcaaatagattttgaagatgccgctttttatcaccatgctctatttgccatcacaggccccacaggtgctggcaaaacaacgattttagatgctatttgtttggcgttgtatggtgagacgccccgtctgagtatttctgccacacaaaatgagctgatgagtattggtactgcttttgcagccagtagcgtgatttttcgtgctaatgacaaaatttatcaggtcagttggtcacagcgtagagccaaacaaaaaaccgatggcaatttacaagccgtcagccgagaaatcagcttacttcagcatgccgacgacacgcatggagaaattcttgaagaaaaagcaagcttagttaataaggaagttgagcgtattttgggcatgaataaagtccaattcactcggtcggtcatgcttgtgcaaggtgaatttgcagcgtttttacagtcagatgccactgagcgtggtcaaattcttgagcagattacaggcacacacatctatgccaaaattggtcaagcggcctttgaaaagcataaagaacagcttaatttattaaaaaatctacaaattaaattaggagaagtcaatttattaaatacagaagaatatgatggattaattaagaaaattagcgaaatcacacaacaaaaaaacttgcttgaaacacaaattaagctgatgagcgatcgccagaaaattgccaatgaataccaaaccttaaatcaggaaatggctcattatcaagcaaaactgatcgagcatcaagaagccttaacaaactttgagccaaatatacagcgcatgaaacacgctcatgatgccaaaaatttgcagccactttatacagcgtttcatgagtaccatcttgagtataacaataaacaagatcaattgattatactaaatcatcgcttaaatgaaatccaattaagccatcaaaagcgtaggcaaacacacagtgagcttaaagaaaaatttaacaaaataactgatgattatgaaaatttaaagccaactttgcaagcggttcgcaggcttgaccaacatattgcctctttgcgtaaagagcatcaaagcatgatccaaacccttgaaaaaacaaagcaggactatacatctacacaaaatttactcaaagaaactcagtcaaatcagtcagctttggtacaagatattgacaccattcaacaaaaaattaaaggcattgacagcgaaaatttaaagaaaaacttaaaattatgcgataatcatatctcacaatacgatacactcattcaagcaataacacacgcccatcaacagcagctttggcgtatcaatgtatttagcaatcatcttcatgaactcaaagataagcgagagcattttaagtctgttaatctaaatctacagtctatagataatcaaattggcactataaatataaaaattattgataatttaaacttaacaaaaaaagatgatattaatgtagatattttacaaaaaaatatagaagatcagtacgaaaaaatcaagcagcaaacacatcatttatatacgctagagcgaatcttgaaagattatgagcaatatgcacgcattcaatctgacatcagcgatacaaaccgtaagattatcaacctacaagaagaaaaaatcaaaattcaggatatcttagagacagtttctcaaaatatccatcaagcaagccaaacccacaaagccatcttggaaaattatgagctacacaagcaaattttatacatgaaaatgcactttgaccaactgcaagatggtagtccttgtccactttgtggcagtaccgagcatccttttaaattacagcccaatcatttggacgatgaacatgccaaacaagccaaagaaaaattagtattctgcgaaaatcagcttaacgaactcaatcacaccgctactcagcacacgaccacattacacaaactgcagatggctttggatgatcatcaagagcatctaaatactgcacaaaatacaagtaactctctttatcatgatcttaatgccctatggcaaacgatcgccagtgaatgcagcctagaacatgcaaatactctaccaagccgaaatactattggaaaatttattaaaaacagtcaagataaaattaaaaatctagaagagtcttatcagctgagcagtcggctattgcatgaacttaatcagctgattgctcaaaaagatagacaaatgatcgaaaaagaaaacttgaaaatcaatggtctaaagcttcgtgatgatgctttggtgctgatgcgtgagatatatgatggtaaagtacatttttgcgatcaactattatctgcattttatcagctcatccaagcacaaaataccatcagcctgccaaatgagcttaacgccattaaacagcatgtgtctaaaatcaccacttggtacgataatatcgcacatcacacccaaggcgatgttctaccagaagctgaagcattcaaccctagcccgttaacgctcaaggaagaagagtttggcaaagttcagtatgtgttatcacaaaccaagcaaatgcttgaaaatcaagccaatcaagccaccgcactcaatgaagattatatcaataagcaaaccaagctgattcacctagacgctcaaatcaacgcacataccaaaaaaatccaagaactcacacctgttattgctgagcttgagcatacgatggctaataaagtgcttgaaattaaaacacaaaccaatgaacgcatcactttattaggtgataaaaatcctgatcatactgaaaacaattatcaagataagctaacacagataagacagcagttagaaaatgccactaaaaatgtacatgatgatattgccgacttacatgcccaaaaagcaaccattgagagcctaaatctaaccataaaagaactggccaataaactcagccaaagcaaggtaagctttgagcaagcactgatggcatcggagtttgatactcaagcggagtttttggcggcattaatcttagaagatgagttaatcgagctaaaaaccgctcatgatactctcattaatcaactaagccaaacgacaatatcaatcaataactgtcaagaaaaacttgataatttaatcaaatcaaaccccaatgttcatcaattcaaacttgaagatttacacacagagctcatcaatctgcaacaacagctagagagtgtcaaccaatctattggcgaacttaacgccatcaaaaatagtgagcttcaaaaccgtcagcggcatacacagattcttaaagacatccaacgccaagaacaagaaaatgcaatttgggcaaaacttgatatgctgattggctcagcagatggtaaaaaataccgaaactttgtgcagggtttaacactggatttggtgctacatcatgccaatcaaattttggcaaaaatgaacgatcgctacttgttgacctttgatgcagacagctcaaggacacttgaaatcttagtgacagatcttcaccaaggcgatgcggtacgcagcagtaaaaatttatcaggtggtgaaagttttatcatctcactggctttagcgctcggtttgtcgcagatcaatagccaaaatatacaaattgaatcactatttttggatgaaggctttggtacactggatgaaaccgctttagatttggcacttaataccttatttgaactacagcaaagcggtaaaagcattggtattattagccatgtcgccagtctaaaagaacgcattgatacccaaattatcgttgaaaaacatgcaggcggatatagcaccttacatggtgctggtgtcaaaaacctttct

SEQ ID NO: 27113 - DNA, 669 bp, Moraxella catarrhalis
atgacacaaaccgcacaaacacaaaccgcacaaacatcaaaagatgaccctttgatatttgattgtcaatttcagctagcgcttggcaggctggatttatccgttgatttacaatcatcacagcctgtcatggggctatttgggatttcaggctctggcaaaaccagcattttacacaccatcgcagggctaaatgccccaaaaaatggcagtatccgtatcaatgggcaaacctggtttgatggcgaaaaaaaaatcaacatacccattcagcagcgacgagtgggcttggtgtttcaagatgcccaaattttcccccataaatcggtgatgaataatttgctatttggctatcacaacattgatgatgaccaaagacgctttcaccctgatgaaatcattgagctgttaaaattggggcatctgacccagcgtatgcccaccaaactatcaggcggtgaaaaacagcgagtggcacttgggcgggcgttgctttattcaccaaatttgttacttttagatgaaccattatccgccctagacagcattcacaaacaagagattttgccattttttgagcagattatccacaccactcacattcccatgctgtatgtcagccatgacaaatcagaaatccagcaactgaccgatgagatttattactta

SEQ ID NO: 27114 - DNA, 573 bp, Moraxella catarrhalis
atgaatatgataagtatcaaatatagaataaatgaaaagtctttaatggataactatgatgacattcttagtaaaccaattatttatggagtttttattattgagagtgactttgagttttatttaagagataaatgcatgattgatgatggattatttgaactatttaagtttaatgatgatttgtttgattggttttttaatcttaataaaattaacatagagctaatgagagacgataataaatacattatgcttggttatgacttagatagtgcatatatcaaaaactatattttgttcacaaaaaataatcaatatttaaaaatttcaattattgagtgtgataatcaagatggtacattaaagttattaagcaaaaaactaccagacaattatagaataatcaatgaaatggctcctatcaatattaacatatggttagaggaaatttataaaaaaacaaagcaatttcttgatgatataaccagcatttataaggattttgataattatatatatattaaaaaactcaatgattttttaaaagtttatgaaaataatgtaaaagca

SEQ ID NO: 27115 - DNA, 699 bp, Moraxella catarrhalis
atgactgatttttgttattttgaaatgactggtacagacagtgaaaaattcttacaagggcaaattactgctaatatcgctgatattggtgagcagtttttaccgacagcaatttgtaatttaaaagggcgtgtacaatttgggatttggattgcacgaactttggcaggctttgatattgttatgagttctgatatggcagataattttatcatgcatattaaaaaatatggggcattttccaaaattaccctatcatcagccaaccccatttatcctgatgtgatcgatgacatacccacttttaataaaacccagcaaaccgataccaagctttgggagcaattaagcatcaaaacaggtaattattggctgactgccaaaaccagtgagatgtatcaaccccaagagctgcgcctacaccaaaaagggggtgtggcttatgataaaggatgttatttgggacaagagattattgcacggctatattttaaggctcgcccaaaggcctatctacaccgcatcttgggggtgggtgctatcccacctactggcggtaatatggggcgtatgagtatcgttaatgcgctcgcaaccgatacaggttttgaggctttggtaatcgcccgccctgaggatttaacgacagttgaaattctacccctgcccaaggccttacaagaagacattggccgcaac

SEQ ID NO: 27116 - DNA, 780 bp, Moraxella catarrhalis
atgaacgatttttttagccaaattaagacgcatgctgatccaaatttcgtcgataaaacggcggtttatttgccaccagagcatcgattctctacgcttagccatgccttatctgagtatcacggtgtagatattttgtctttgacacaaaataatgatctgattgcaggggttgatagacaacaactgaatcaagcctatgaacagttgctcattaacaagccacagccccatgcttgcgtgcttgttgccattactgatgagattggcccaaggctattattgactcgccgagcaagtaatttatcaagccatgcaggtgaggtgtcgctggtgggcggtaagcgtgataagacggatcggtcttcttatgaggtggcgacacgagaggcatttgaggaggtgggtctattaagacaagacagcactttaattggatttttaccgatgcaaatctccaaaaaaggtcttttggtacgccctgtggttgtcagtatggcacctgcgatagcagacagtttaatcgccagtgaagatgaaattcagcggttattttgggctgatctgacatatctaaaaacaacgccacccatagattattattttgagcgtcctaattttgggcgagcatatttgcacacaccagcatggctgattgatgatcggcaaattggtgagcctgaagtggtgtggggattgacagggcgtatcatcgccaattttctacacatcggctatggggtgtgctatcagtggtactatcaccttcaggcacaccac

SEQ ID NO: 27117 - DNA, 1026 bp, Moraxella catarrhalis
ttgaccaaagcccttagccacttgctaaagaatattgaattaacccatgatgagatgcgtcaagtcatgctcatcatcatgcaaggtcgttgccctgatgcgttgatgggagccattttgatcgctttgcggcaaaaaggtgagtctatagatgaaattaccacttgcgctaaaacaatgattgagcttgccgataccattgatatttgcaatcccaatgcagttgatattgttggtactggtggcgatggttcaaacttatttaatgtatcaacagcatctgcttttgtggcagcggcggcaggtgttaccattgccaaacacggtaatcgtggtgtatcaacaagctctggctcttcagatgtgctaagcttggcgggcgtgcgtttggatattaataaaactcagacagtcaaagccattaatacgcttggcattggatttttatttgcacccaatcatcaccctgcaatgcgtcatgctgttggtgtccgccgattgctcaaagttcgtacgatcttcaatattttaggcccactgaccaaccctgctaaggttagccgtgctgtggtcggtgtttttagccctgaactgtgtgagccattggcatatgtttttgctaaacttggtcttacccatgtcatggtcgtgcattctcaagatggcttagatgagtttagtcttgccacgggcacacatgtcgctgagcttaaagatggtaaggtacatacttatctttgtcagcctgaagatgttggtattgtctcaagaactttatatggtctgactgtcaatgattcaaaacaaagtcttgaaatcatcaaaaatgcactgggcggcacagcaaatgatgatatcagcctaaaggcacgagcgatgattgccatcaacgcaggtgctgctatttatgtggcaggccatgccaaaacacatgccgaaggcgttgccattgccaagcaaattatgacaagtcgccaagctttagataagctaaatgcatttacaaactttacccagcactgtgaa

SEQ ID NO: 27118 - DNA, 663 bp, Moraxella catarrhalis
atggtattaacctcacacgaaaatcttggagacactggtaaaaaaacgggtttttggttggaggaatttgcttcgccatattatgcgtttaaagatgctggtgctgacattaccttagcgtcccccgctggcggtcaaccaccgcttgatccaaaaagtgatgagccagacgctcagaccgaatttactgaacgatttaagcaagatgccgccgccaaagaacagttggcaaccactcataaactggctgatattaaggctgccgattatgacgcagtattctatccaggcggtcatggcccaatgtgggatttggcagttgatgagcaatccatctcattgattcaagattttgtgaagaccgataagccagtggcttttgtttgtcatgcacccgccgcactcaaaaatgtgaaaattgatggcgaatattttgttaaagataaaaaagtgactggctttagcaattctgaagaacaagccgtcggtctgttagatgtcgttccgttcttgttagaagatgtgctaaaagaaaatgggggcaaatatgaaaaagttgctgattggcaatcgtatgtggtagaagatggcctgttaatcacgggtcaaaaccctgcttcatctgaagatactgccaagcggttaatccaaaaactacaggct

SEQ ID NO: 27119 - DNA, 264 bp, Moraxella catarrhalis
atgaccattcagcccactgatgcacagcgccgtatcatctatcaagctcgccgtggtctcaaagaattggatttttatattgattattatgtcaaatcgcattatttgagtgcagacgcagatgagcagcaggcatttgagacattgttaagttatgaagatccagatttattggtgttttttttgggtcaagaaacgccatcagaggcaggtgttgctgctttgattgacaagatgaaatcacttcgtcatactggcactgtc

SEQ ID NO: 27120 - DNA, 2085 bp, Moraxella catarrhalis
atgaatatccccgagtccatcattgagcagctcaatagtcaagctgacttagtgggaatcattggcaagcataccacgctcaaagcggcaggtcgtgaatacaaaggctgttgcccctttcatggtgaaaaaacgccttccttttatgtcaatcctgaaaccaacttatattattgctttggctgtcatgccaagggcaatccgatcacttttttaaaagaatttgaacggatgagctttattgaatcggtcaaattcttgtccgaacaaacgggcatcgagctgcccaaagatgacactgatcaaaaaaaattcaaatacaaaaaaaccgttaagactcagggtgccaagctcccaactcaaccttcgccagatccgagcagtcgccaaaacttcattcatcatcagtccgatacacgcccatcaccagcaaccgattgggtcaatgatttatcggcatacgatacttattctggattggctgatccaagccatcatgctggtcaagtgaatgagctttatggcactcaagcacccattttgactcagtcgcccaatgcagcacaaggtgatttatacagtctactaaccgcagtgcatgattattatcagctgatgcttaacaattttacttttgcaaaacagtactttttagatcgtggtcttagcgaagagaccatacaaacctttgggctaggttatgcacctgacggttggcagcatttggagcaagttttcccccaagatatcgagggtttgaaaatattaggtttggttcgagaatcatctaaaagtaatggcaggactttttgcttattgcgtcatcgggtgatttttccgattcgtgataatcaagggcgtgttgtgggctttgctgggcgaagcctaggtgatgaaaacccaaaatacatcaactcaagcgaatcacctgtttttcaaaaacagcagattttatatggtctgtatgaatcacgcaaacaaaaagccaaaaactacctactggttgagggttatatggatgttattgccttataccaagcagggatttatggggcggtagcgcctatgggtactgccgctaacgaaaagcaaattgagcgactgttacgctataataatcagctgactttatgttttgatggtgataatgcagggcaaaaagcagcgtggcgtacgctagaaattgccgcacccatcttaaacgatggccgtgagcttaaatttttaactttacccgatcatcacgatcctgacacttacctaaaatctcatggggcagccgtaatgcgtgatgctatcgagggtgcggtgagcttatcggattatatttatggcgttttggcaagtcaatacgacctaacacgccccgaatctaaggcacaagccatggcaacgcttaggcaactgaccgaactgctgccaaaaggctctagcttaaaatggtggttaaatagcgatatttatcaaaaattaaaagccattggtcgagaaggacagtttagcccaaaagttgagttaattaactataaccgccacgacgccgccgatgcaatcaccgaaatcgcattgcatctgattcacacccccattttgctcaaatctgatcctttggcatttgtcatcgaacactcaggcatggcacaagcacatttaccattatctaatcatcttgagcgacaagaaattagtttacccaaactgcccaattgggcaagttttaaaagcccattattagatgaaatcattgccacagtcagcacattaccaaatgaaattttacaagatgatacaaaaatggttcaaagctgtgcgtattttgtcattgctgctttgagcgatgttcacaaaagtcaaatacagcgatactggcaaagatttatccaatcttggtccaatcaagatctcaaagccatcacgccagtattttatggactgatttgcaccgccttaaaagatattctgcttaaacaacaaactaacagtaaaaatttaattttatcagaagtttataaaagacgcttgcaagcattggttcattgggataatatccataataaatcacaattggcagaaattttaacaaaa

SEQ ID NO: 27121 - DNA, 258 bp, Moraxella catarrhalis
atgcatgaaccccgctcaaaactgatattatctgccaatcacatggatgccatcatttgccctttggtgatggttgatcttgacggtatacgccttggtatggggggcggctactatgaccgcacatttgcaaaagccaaaaactgcctaaaaatcgcttggtgttatgattttcaagtggcagatcggctacccaaacagccttgggatatgtcggtggacatcatcattaccgatcaaaggctaattagattaaaa

SEQ ID NO: 27122 - DNA, 917 bp, Moraxella catarrhalis
caatctaatttgtgcatggagattgccctgccaacagcacctttggataacatcaatgatgaaaaaggtgagattgcgctgtgtactttatcagcgattaatttaggtaagattgaaaaattatccgatattgaagagcctgctgagctgatcgtgcgtgcgcttgatgcgttgcttgattatcaagattatcctgtaattgccgccaaaaaaggcagtactaatcgtcgcactttgggcgttggcgtgattaattatgcgtattatttggcaaaaaatggaactcgttactccgatgcagcggcgcttggtttaacccatcgtacctttgaggcactgcaatattatttgctcaaagcatcaaacaaactcgccaaagaacaaagtgcttgcccttggtttgatcaaaccaaatacagccaaggcattttgcctattgatacttataaaaaggatttggacagcatttgtaccgaacctttgcatcttgattgggaaagtctacgcacaaatatcaaagctacggtttgcgtaactctaccctatccgccttgatgccatcagagaccagctctcagattgccaacgcaaccaacggcattgagccgcctcgtggtttggtatccatcaaagcgtctaaagatggtattttaaagcaagttgtgcctgagattgaacgcttggcaagtcaatatgaactgctttggaatattcctgataataatggctatctgcgtttggttggaatcatgcaaaaattcattgatcagtccatctccgccaacaccaattatgaccccactaaatttgaaggtggtaaagtcccgatgaaagtgctgattcaagatctgctaaccgcttataaatttggtgtcaaaactttatattatcataatacgcgtgatggtgctgatgat

SEQ ID NO: 27123 - DNA, 2364 bp, Moraxella catarrhalis
gtggttcagatacgagatagcctgcccttattgggcggtaatagtagcagcatggatagtgcaactttggcagccagtttggttgccaagcaactgcatccagattttaaggcacagcttgccaatcacaaactcatcagtgcagttgatcacagtagtagcacgaccaacccttgcgatatcaatgtatcggatatcgatattgagacttggatttgtcatgttgccgctcgtattggtaaagaagatttacccatcttacgccaagcctgccaatttgtacaaatccatgccaataagccccatgtcacccgctcaggtgcttatatcacaggcattggcatggcggatattttggcgtatctttttcaaaatgaaaatgccttagctgccgccatgctttatcgtacagcacgccgtgaactggtcagcattcagacgattcgggtaaattttggggaggatattgcccatttggtgatggatgctttagcgatgggcagattatctgaaagcattgagagcaatcaacgacttgaagattattttgagtccaatcaaagagagcagctttctaatatttatagcatgctcatcagcacaaccaatgatgtgcgtgctgtgctaatcaaattggctgaacgcacctttgcaatgcgtgaactgtcctttgcacctcctgaccgccaaaaaagggtcgcaagagaggtgatgaccatttatgcaccgcttgcacatcgactctccatcgctcagcttaaatgggagcttgaggacttggcatttcgctatcttgcacctgatgaatataaaaaaatcgcaagtctgcttgccgaaaaacgcagcgaacgagaagcttatattcagctggttaaatccaagcttagcgaagagcttgagcgtgcaggtatccaaggcgaagtgtcagggcgtgtcaagcatatttattcaatttggcgtaagatgaagtcaaagaatctttcttttgatcagctttatgacattcgtgctttgcgtgtgatggtcaataccaatgccgaatgctactatacactgggcattgtgcatggtttatggcggcatattcctgagcaatttgatgactacatcaccaatcctaagcccaatgggtataaatcactacataccgcagtcatcgctgagcagcgtacacttgaggttcagattcgtacctttgatatgcattttgaagcagagcttggcaaggcatcgcatgtcaattacaaagaaggactcaaggccaaaaaggacgactatcttacccaaaaaatcagctcactgcgtcagcttttaggcaatgaaaaagcagatggcgaagaagatatcgagcttgatattgataatgctgagcggatttatgtatttagccgtgatggcgatatcactgaactgccaaaaggtgcaacggtacttgactttgcgtattatgtgcatactgaagtgggtaaccgtgctcaaggtgcacgggtaaatggtcgctatgtaccgctgactcatcagccaaaaacgggtgaccaaattgaaattatcaccagatccaatcgtgaaccaaatcgtgattggttgatggcgtcacttggctatatccataccgcacgggcaaaatccaaactgcgtcaatggttcaataaacaagatcgggacaaaaatattgaaacaggtaaggcgttattacttaaagagtttgatcgtctgtcaatttcacccaatcaaatcagcctatcagaatactttaccgatctgaatgtcaaacatgaagacgatctgtatgtggcgttggtcattggcgatattaccgtcacacagatcagtaatttggtcgcccaaaagcttaatttaaccacccaagtgcctgataaagccaaaattgaaatcaaacagccaattcgccccaataaatacaaaattgagcttgaagaccttgataatgttgagatacatttggcaagatgttgcaaccccgtgcatggcgaaccgattgctggatttatcaccttatcaagcggggtcagcatccacaatgatggttgccctgagtatttacgcttaattgagcgtgaaccagatcgctctgtgatcgcacactggcaagaaagctttggacgctatcagcctgtggtcatccatgttgaagccaaaaataccaacggactgctgcgtgatttggtgcatgtgattgatcgagaaaaagtcaatattcaccgcgctgaaactgtctttaatgatggtgcaatcagtcatatgaagttttatgttgaggtggcaggcattgcacatttatcacgcctactcaataaaattgaacagcagcctagtgtgctacatgctcgccgtgcaaccgct

SEQ ID NO: 27124 - DNA, 3064 bp, Moraxella catarrhalis
atgaatatttcggcttattctatcaaaaatcctttggttgccattttttaccttgatgatgattttgggaatttatggatttttacaaatgaaaattcagcaatttcctgatattgacctaccgggggtggtaacaaccattactttggcgggagcatcgcctgaccagcttgaaaatgatgttgctaaaaaagttgaaaataaacttgccaatattgagggcgttaaaagcattcgcaccacactacaaacaggtgcggtaaccatttttacggtctttgagcttgaaaaaccgaatgatgagcacttgacgatgtgcgttcagctgtcagcgaagttcaagggcaattacctgctgctgccaatccgcccatcatctcaaaagtctctacagcagggtttcctgtggcgacatattcggttgctgtgcagggcatgagcgataccaaattatcatggtttgtcgatgatacgattaccaaacaattatcaaatatcgctggggtgggaagtgtcagccgtattggtggcgttgagcggcagattttgatacagcctaagatggatatgatgacaagcttatccatgcccatcaaccagctggctcggcagatttatgccaaatggcaagatgcttcaggtggtgaagcaaagattggcaatcagattcagacaatacgcatactaggttcaggtcaacgggtttaggaattaaatgacctacaaatcaccacaccaacaggaacagcggtacgattgggtagtttggcggttattgaagatacccatgctgatatgacatcattagcaaagcttgacggtgaagaggtggtggcatttagtatcatacgctcaaaaggtgcaagtgagacctccgtggtggccgcagttgatgatgccttggctgacttacaggctcaaatgactgacctgaaaatcgaaaaaatcgttgatacgctgcacccattgaagaaagctatcaagcaacgatgcgtatgttgattgaaggctgtattttagcggtgattgtggtatttatctttttaagagattggcgagccacttttgtggcagccacggcattgctattgtctattattccaactttttttatcatgtatttgtttggttttagcttaaacatgatttcgctgttggcattgactttggtgatcggtgttttggtggatgatgcaattgtggagattgaaaatattgttcgccatcttaatatgggcaaatcccccatgcaagctgccattgaggcggctgatgagattgggcttgcggtcgttgcaacaacttttacgctgattgcggtatttttgccaacggcatttatgagcggggttgtggggcagttttttagccaatttggttgggcagcggttattgcaatttttatttcactgttggttgctcgcctgctgacaccgatgatggcagcgtatattttacgcccatccatttacacccaaaaacctgctggtaaattgatgacagcttatcttcagatggtcgcttggacgctaaagcatcgcaccatgacagtcgcctttgtatcgggattttttattacctcgctgatgttggcatcttttttgccatcggcatttattccacctgatgagatgaaccaaacccaagttagcattgagctgacacctgatgcaacctttgatgatacgctgcgtatcgcccaaatggcggtcaataaagtcaaagcagtcaagggggttgaaagcgtcttattaacagtaggttcatcacacagctcaggcgacccaagtagtatgcgtagtggatcggtcaataccgcaaagcttgatgttaagctttctgaccgcactttacgcgcaagcaaagtggacatcgaatcccaaatcaatcaagcacttttgaccgtaccagcggcacgctttaatgttggtatgtcagcaggtggcggtgaggcgggctatgttttttcgatcacaggtgctgatgcaaaaaaacttgatgccaccgctcatgagatcatcagacaaatccgtgtcttaccgatggtggcaagtgtgattaataacaatgcctttcccagacctgagctgtcagttattcctgatgagctgagcatggcggataaaggtgtcacaacggcagacttggtaaatacattgcgtgttgctacccaaggtgattatgataatgccttaccaaagcttagcctagatactcgccaagtgcctattgtaactcgcttaagccatgaagataagcaaagtttaaccactttatccaatctttatgtaccaagttcaaaggcgatgcctgttcagataaaagatgtcgtatcttgaaaattcaccacaggtgaggcaagtattagccgtctagaccgtgagcgtgccataaaaatcacagtattgcctaccaaagatgcctctttgggcgatctgattgatcgtgtcaaatccacccaaattatgcaaaacctccctgagggcatccatctgattgatgaggggcaagctgaggatatggctgagctatttactggcttgatacttgcgatggcggttgggatattttgtatttttgcggtgctgatgctgttgtttcatcgttttttacagcctttaacgattttgatggctttaccgttatctgttggcggtgcatttattgggctaattgttacaggtagtagcatgtcgatgcctgccatgattgggctgatttactcatgggtattgccaccaaaaactccattttattggtggattatgccatcattgctcaagatgaacaaggcttaagctgctttgatgtgctcattgatgcgtgtcgcaagcgtgctcagcccatcatcatgacgaccatcgccatgggtgcagggatgttgcctttggtgatcggattaggcggggttgactcgacatttagccgcccaatggcatcagcggtcattggtggtttaatcacctcaacattattaagcttggtggtgattcctgtgttttatgcgttgatggacgatttgggaaactggttaaaaaagccatttaacaaacgccatcggcag

SEQ ID NO: 27125 - DNA, 1047 bp, Moraxella catarrhalis
atgaatacgcctgatttgatggagttattaagatttgcccatcaaaaaaacgcttcagatttacatttatccgcccaacagcccattatgctgcgtattgatggcaatcttttgcccatggacatcacgcccattgatacagatggtatcatgcagatgctacgccctgtgatggatgacacagattatcatcaatggcaacacaatcttgaacatgattttgtactttcgcttgatggtatcgctcgctttcgggtgaatgtattttttcaggcacacggtgcggcggctgtttttcgggtaataaaaacacacattcccagcctacaacagttaagctatgatgaatatatttatgatagtatgctaaaaatagccaagcttcaggcaggcttggtactcatcacaggagcaacaggctcaggcaaatcaacgacacttgccagttttatcgaccacatcaaccaacaccaaaaaaagcacattatcaccattgaagaccccattgaatatgagcatagctccaagctttcgctgattaatcaaaggcaagtcggtaaagatacccgaagctttcaaaatgccctacgctcagcgttgcgtgaagatcctgatgtgatcttagttggcgaacttcgtgatcttgagaccattcgcttggcactgacagctgccgaaactgggcatttggtgctggcaaccttgcacacggtcaacgccccaaagagcattgaccgtatcattgaggtgtttgatgctggcgaaaaacacatgattcgcacgatgctcgccgactcactaaaggcggtggtcgcccaacggctattgcctgcccaaggcggtggtcgtgtggcagcgtttgagattctcacgcatacgcctgcggttgcccatttgattcgtgaaaataaaatttctcagctgccttctgtcattcagaccagtttggcccaaggtatgattgatttgacgcaatctttatcacgcttggctgaaacaggcaaaattacgccagccactgccaacgaacaaatcaatatgctgcga

SEQ ID NO: 27126 - DNA, 1044 bp, Moraxella catarrhalis
atgccaaaatttaacaatttaaggtatgataaagcatttatcaatgacccatttatcataaaatatctaaataccatgtccaatcatttcatctttgatttaagtacgcatcacatcaccgcctttattcaaaatgccaatcatcttgatcaggtaaggcagtggcaaagcaaaaacctaccaaacctattagacattatcctaacgcactcaagcctgcctgaaccattaaacaaagcttgccgctatgcgatgagtaacggtggcaagcgtgtacgcccacttttggtattatcaacttttttaacgctcattaaaacaggtcatcaaacagatgatttgaccaaaaaaatacaaatgttatttcgtgccatgatggcagttgagctgattcacagctattctttgattcatgatgatttgccttgtatggatgatgatgcgttacgccgtgggcaaccgacttgtcatattgtgtatggtgaagatgtcgccctacttgcaggcgatgcacttcagtccatcgcttttgaagtattatttgagtgttacgacaaaaattcagccgatgatgccattgcatataaattagccaaactcttaagttgccgagcacggcgtatggtatcagggcaaatgcttgacatcaaaggggaaaatcaaatgctctctcaagacaagctagaagccatccatcgtgataaaacaggcgcactcatcgaagcggcagtgatgatgggtgcgatttgtgcagatgtgcagactgatactttaggttatcttaagcattatgctcgtgcaatcggattggcttttcaggtgcaagatgatgtgctggatatcaccgccgatacgataactttaggcaagccagctggcagtgatgaaaaacttgaaaaatctacttatgtcaaattgcttggcgtaaaaggtgctcaagagtacgccaatcaactgtttgaggaagccagatcacaggttaaatattggggtgataacaacctactgcttcaaatcacagattggctccaaacaagaaaattt

SEQ ID NO: 27127 - DNA, 1148 bp, Moraxella catarrhalis
atggctcaagataaaattgccatccgtggtgcacgcacgcacaatctaaaaaatattgatgtagatattccacgagataaatttgtggtgattactggcttgtcaggctcaggcaagtcatcacttgcgtttgatactttgtatgccgaagtcaacgccgttatgttgaaagtttatcagcatatgctcgacaatttttaagccaaatgcaaaagccagaagtagatagtattgatggtttatcacctgcaatcgccattgaacaaaagtccaccaaccacaatcctcgctcaacagtaggtacaattaccgaggtatatgattacttgcgtcttttgtttgcacgggtgggtgtgccttattgccctgaacatgatgagccgatggtcgcacaaacagtcagtgagatggtagatgggattatgagtttgccgactgagaccaaattgatgattttagcacctgtcgtgcgtgagcgtaaaggtgagcatattgctttgcttgagcagttgccatctcaagggtttacacgcgtgcgtattgatggggtgatttatgagaccgatgagttacctagccttgaaaaaaataaaaaacacagcatcgaggtggtggttgaccgatttaaagtgcgtgatgatttgggaaatcgtgttgccgaaagtttggaggttgcattaaaacttggtaatgatatcgccattttgtatcacatggatggtaatcctgttggtgatgatgagcagatattatctgctaagcattcttgccctgtatgtgaccgtgcggtgagtgagcttgagccaaggctgtttagctttaataatcctgcaggtgcttgccctgcatgtgatggcttgggtaagcgtcagtattttgcggccgagcgtatcgttacccatcctgaaaaatcactgaatcaaggtgctattcatggttgggataaacgtcatgcgtattattttggcttattatcaacggtttgccgtcattttggcattgatatggatatgccgtggcaagacttatcaaataaacaccaagcgattattttaaatggttcgggtagacaaaaaattgaatttaattttaccgatgaacgagggcgtaaaacgaccaaaaacactccctttgaggggattttgcct

SEQ ID NO: 27128 - DNA, 1041 bp, Moraxella catarrhalis
atgagttgccatcatcagcataagcagacacccaaacacgccatatccattaagcatatgccaagcttgacagatactcataaacaaagtagccaagctgagccaaaatcgtttgaatgggcgtttttacatcccaaatattggggagtttggctggcttttgcgttgattttaccgctgatttttctaccgctgcgttggcagttttggatcggcaagcgtcttggcattttggtacattacttagctaaaagccgagttcaagacactctaaccaacctgcagcttaccttcccaaatcaaccaaaatcaaaacacaaggccaccgcacggcaagtatttattaatcaaggtattggtatttttgaaagtttatgtgcatggtttcgccctaatgtctttaaacgcacttttagcatttctggtttacagcatttgattgatgcccaaaaacaaaataaagcggtgattttacttggtggacatcgcacgacgcttgatttgggcggtcggttatgtacacagttttttgcggcggactgcgtgtatcgcccacaaaacaaccctttgcttgaatggtttatctataatgcacgccgctgtatctttgatgagcaaatctcaaatcgtgatatgaaaaaactcatcactcggctcaaacaaggtcggataatttggtattcacctgatcaagattttggtcttgagcatggcgtgatggcgaccttttttggtgtgcctgcagcaacgattaccgctcagcgtcgtcttattaagctgggtgataaagccaatcctcctgtcatcatcatgatggatatgctcagacaaacgcccgattatatcgcaaaaggtcaccgtccacattatcacatcagcctaagcgctgtgttaaaaaattatcccagcgatgacgaaaccgccgatgctgaacgcatcaatcgactgattgagcaaaatattcaaaaagatttaacccagtggatgtggtttcatcgccgctttaaaactcaagccgatgacaccaattactatcaacat

SEQ ID NO: 27129 - DNA, 462 bp, Moraxella catarrhalis
atggcaaaaaaaccaagtaatcaaatttgtgccaataaaaaagcacgacatgaatatttcatcgaagaaacctatgaggcaggtttagtgcttgaaggctgggaggtaaaatcgattcgtgcaggtaaaatgtcaatcaccgaaagctatgtcatttttaaaaataatgaagcatttttatttggtgcacatattcagccactattaaccagctcaacacacattaatccagataatatccgcacacgcaagctgttactcaatcggcgtgaaattgataagctttatggcatggtcaatcaaaaaggttatgccgtggttgccttatcttgttattggaaacatggtcgggtgaaatgtgaaattgctttggcaaagggtaaaaaactgcatgataaaagagcaacgctcaaagaacgagattttgcacgcgataagcagcgaggctttaaaaatcagctg

SEQ ID NO: 27130 - DNA, 1551 bp, Moraxella catarrhalis
atgccaaaaaacaccactataaagcatgttgaagcactgggcagcacccttgatgaccctgaaacgctattaaataaacatcgtcaaattgccgaaagttttgaagcgaagcttgccaaagaagcagtttttgatgagaattttaataatttggcagatgctcatttgtctttatcggattatttgacagcagtcaaaatggtgattgatgacagttttgatcatgaggtttgggtgcgtgctgaaatccgtgccatgaacactaaaggcggtcattattatttcgaattagctgagactgatgatgccgatcagattaccgcaagctgccgtgcaactttatggcgatttcgtgccaagacagtgatgagtaaatttaccaaaatgacaggtcaaagcctacaagcaggtattttggtcttggtaaaatgctcggcgagttttcatgccaattatggttttagcctaaacattagcgatattgacccaaattatacgctcggcgagatcgctgctgcatatacacagatgaaaaaacggctgagcgaagaaggcctgcttcatttaaataaaaaacacgccataccatttgatattcgccatgtcatcgtaatcgcccctgaaaaggcggcaggtttaggcgactttcgtgccgaagccgatcggctcgccttggcaggtgcttgccaatttcactatcattatgccacttttcaaggcaatcatgcgcccaatgagatacgccttgcaatttctgagggtatgaataattttaaaaatacctatgatactttgccagatttgttggtcattattcgtggtgggggtgcggttggcgatttggcttatttgaatgattttgaattagcggctttggtggcagaatgtccgattcctgtttgggttggtattgggcatgagcgtgactcggtaattcttgatgaggtagcacatagcagttttgataccccatcaaaagctatccttggtattgagtcgcatttggtcaaaatgacgcgtcaagcggtcgctacaatggagcgtttgactaaaatgaccaatactcatctaacaatggcccaagcaaatagccaaagacaaattgagaaaatccaaagaagcagtttgcacgccgtcaatatggcaaaaaaagacaatttatatcaactaagccacataaaaagtaccgcaaaattccgccatcaccaagaaaaatcggctctaaccgccctacttgctcagacccaaaaatcaagtttggcgattatatcgcaagccaaacataccacaaaaatccaccttgatcagcataatattctatttgattatttatctaaactaaaaaaagactgtcgccatttacaaagtttgattttaattcagcatccaagccgaatgctaaaaaaaggctatacactcattcataatgctcagaccaatgaaagtattcatagcaccaaaacactccaacaaaatcagtcagttaagataacctttaaagatgggacagtcagtgcagtcatcaaagatatcagtacacacaaaaacact

SEQ ID NO: 27131 - DNA, 1344 bp, Moraxella catarrhalis
atgaaaaataatataaaaaaactacacaatcatcagctttcatctcgtgcaaaagttatcttagttattgaagaaattttaaatggtaaatcgctgtcagagctacttgatcctttattagaatcaacggagatgagtagccgagggtttgtacatgaactactgctgggtactttgcggcagtggtgggcattatctcgaatttctgagagcttgattgaaaatcctgtgacagatcaaggggtgcaggccgctattaatatcggcttgtatcaacttatctatatgaatataccagagtatgctgcgattaatgacacggtggaagccttaaaacagcttggtaaagaatatggcacagggcttgtgaatgcaattcttcgaaaaactcaaaagtcaaaaacaaaatttaccaagaaagtcaataaaaaccacagcttaccaaattggctggctaagcagctcaaacaagattggggtgagtattatgatgagctgggttgtacactaagatttgctgcaccgatttttttgagagttaatacgaagttttcagacaacgtatcttattgccagattttagatgagcatcatatacagcatagtttggtatcgcttggatataatcaggcacaagccgtcaggctagatggtggtgtaagaattggtgaattgccttattttgatgaaggatgggtgtccgtccaagatgcacatgcacagttggcagggtttttattggcacctactttgcaatcacaaggcagtcatcaatcggtgctagatatgtgttgtgccccaggcggtaaaaccacgcatttacttgagatgtttcacatgaaacatttgactgctattgatagtgatcgtattcgattaaaacgggtacacgaaaacatcagtcgccttaagcttgatacgaaagatatttctgtggttcatgctgatggcacatcttggcgatcggatcaatgctttgatgtgattttgcttgatgcaccttgtactgccacaggtgttttgcgtcgccatccagatattgggctgcttagacaagaacaggatattgcaactaccgttaatttgcaaagaagcatactggacaatctatggtcacggttaaaagttggtggcgtgcttttgtatgtgacttgctctatcttgaaggctgaaaatgagcgacaaatcattgattttttgagagctaatgacgatgcaaacgccataccttttgatttaagcttaccacatcaaatcaagcagcaggtaggttatcaatgcttacctttagataccaagggtggcgacggtttttattatgctttgctgacaaaaacagcaaaa

SEQ ID NO: 27132 - DNA, 2148 bp, Moraxella catarrhalis
atgccattaccatttttaaaacagcgtcttaccaagattatcccgaccaaagcactaagcaccaatccccaagcaccaatcccaaatagcaactatccacacttatttgagccactggatttaggctttactacgctcaaaaatcgtgttgtgatgggttcaatgcacacaggtcttgaagatagattttatcattatggcaaactggctacttattttgaagctcgagctaaaggtggtgtgggactcatcatcaccggtgggattgcacccaaccgcacaggatggctaatacctgcaggcggtacactcaaccgcttgggtgatatcgtacatcacgcacgcataacccgagcggtgcataagcatggtgctaagattttattacaaattttacactcaggacgctatggatatcatccttttgttgtcgcacccagtccaataaaatcgcccatttcgccatttaaacctcgccaaatgagccaaaacaatatccaatcaaccatcgatgattatgctcataccgccaaacttgccaaaaaagcaggctatgatggtgttgagattatgggttctgaagggtatttaatcaatcagtttttatcagctcgtaccaataaacgcacagacagttatggtggcagcctagaaaatcgcatgagatttgctatcgaggtagtgcgtgcggtgcgtaaagcggcaggtatggattttatcatcacttttcgtttatcgatgattgagctggtcgaagatggtgcaaccatgcaagatgtcatcacgcttgccaaagccctagagttagcaggtgtgagtatcattaatactggcattggctggcatgaagcacgcattcccaccattgtcacaagcgtacctagagcagcatttacacgctatactgccgccgtcaaacacgccattaacattccagtgattgccgctaatcgcattaatatgccgcaaactgccgaagaaattttgtcaagtggtcaagcagatttggtgcaaatggcgcgtccttttttggcggacagcgattgggtgaataaagctgcaagcaaccaagatcatctgattaatacctgcattggctgtaatcaagcatgtttggatcacacctttgccaatcagcgcgcctcttgtttggttaatcctttggcgtgctttgaaagtgaaatcagcgtcaaacccaccaaaaagcccaagaaaatcattattgttggtgcaggggttgccggtctatcagctgccgtaaccgctgccagtcgtggacatcaagtgacaatttatgagcagcatacgcacatcggtggtcagtttaatatggcaaaagtcattcccggcaaagaagaattttttgagacaattcgatattttcgtgagcaaatcaaacaccttaatatcaccgtacacctaaataccaaggtggataaagccatattaaatcagtcaagagcagaccatgtgattattgctactggcgtagttccacgcatgttgccctctctggaaggtgcaaacttgccacaagtcatcagttatagcgatcttttgactggtaaaaaaatcgcaggtgagcgtgtggcagtcttgggtgcaggtggcattggttttgatgtggctgaatttttaacacatggcagcagtgtatctgatgcagtcaatgatgcaacttacaagcccaaagcaatggatgtcgataccttctttacacattggggtgtggaccagcaggcatgttatcagaccaaaggggcattggttgaacccaattataccacgcctgtgcgtcaagtttatctgttgcagcgtagtgaaggcaagcttggtaaaacattaaataagaccacaggatgggtacataaagccgccatcaaacaagctggcgtcattcaaattgcaggcgccagttatgataaagttaccaatgaaggcttatggatcaccattgatggcaaatctcagcttctgcgtgttgatacggtcgtactgtgtatcggtcaagaatctgtcaatgatttgatgccaaagcttggcgatacacccaaagcagactatcaggtgattggtggtgccaaatcctccgctcaattggacgctaagcgagctattaaagagggttttgagctggctgcaagatta

SEQ ID NO: 27133 - DNA, 717 bp, Moraxella catarrhalis
ttgcaattgccacaggtcgcacttgggattatacccatcgaagtacgcaagctgattgatgaggttggtattgactacctattaaccatgaatggtcaatacaatgaattcgctggtaaaaaattattcgattttccattgcaatatcagcaagttaaaaagatattagaagtatttgagcatcataacattgccactgcatttatgacaagggctgaaatcttttgtttcaatcagaatcacaatttgaaaactgctttaggtgcattggacatcacaccacaaccagctaataaagaaacttttgattttcatcaacccatttatcaaatcttagcattttatgaagatcatgaagccgagaaaatcattctaccacctgacattaaaacaactcgttggcatcggtacgctgtagatgtattggattatcaaagttcaaaagcacgctcaatagcaagactattaaatcagctaaatatctccaaatcaggggcggtagcttttggagatgacttaaatgatatggaaatgtttaagttggtgggagcggccatcgctatgggtaacgcacatcccatgttaaaacaacatgctcatattatttgcccacgccatgatcaagatggcattgaaaaaaattttaaaagcgctaaactggacttaatcaacccccaaacaaaacccccctttgcttctgcaaagaggggtttaaaa

SEQ ID NO: 27134 - DNA, 915 bp, Moraxella catarrhalis
atgacctttttgtctgtgcggttggttatggctgtatttcattgcttatctgataaacaacaaggctatctgtttacctttatcaccatgtgcatttggggtgcttttgggctaatggctcgcatgaatgcctattggcatattcagatttgggatgtgttgcttttgcgatttggtatcgctgctgctgtacttttacccattttatggtggaaaaaagactatcaatttttgtttgattttaaactgctgatattggctctagtaggcagtattgggtattgtatctttgtttataacggatttttttatgcacctgtggcacatggcgtggtttttttaaatggtacatttccgctatttgccgctcttattggctatataatgctaagatcgcccatcgaccgacaaacaggcatcggcttatcaatcatcgtgatgactttacttttaatgaccatcagcataatcattggcgatgggtattttgggcgtggcgatttgatgtttattaccagtggtttatgctggggcttgttttcggtattgcttcgtaagtggagcttttcggcatggcatatcatgtgcggcgttgcgatttggtcggcagtcatctattcgctgatttatgccatatttatcacgcctgcttttcataccgccacacctacgcatttggcaattcagggtatttttcatggtatctttgtggtcattattgccacattaacttatgccgaagctgtcgcaaaaattggtatcttcaaagcaggtagtatcgccaacttagcaccctttattgccagtatcattgcagtaccactgcttggcgagatgctaaatacgaccttagttatgggtttaattggcatggcaatcggtgcgttacagccttggcgttggtttattgggcgt

SEQ ID NO: 27135 - DNA, 1428 bp, Moraxella catarrhalis
atgaataaaaacacgaataaaaaatttcgaatttttttagcaaaacttaattataaactgtattcgaatacgctacaaacattgctcatggtatgctttattgtctttgttagtgttgcattatccatatcattattttggagaagcctttatttgcctgagcttagaaaccatgccagttatttatccacggaaattaaactattaacctcagtgggcgataaatggcatgataatcctgaatttatgcaatggctaacagacaatacgcacattgaaatcatcaccaatccccaagattttccaagcatcaccgataaacctgtagttgtttatcttacccaaattatggcagaagaaatatcgcaatcacttggtcgtgaggtggaagtgtattttaaattcaaacccacccccaaactttggattcatgacagcgctcatcctgatatctggattcgtgagccgatgatgtattattcacagtacagcacaggcgttatttacggatttttatttggcttgccactactgaccattatgactattttagttttggtacgaggactaaaccgtcctttaaaaaaattagagcgtgctgcaaacaattatatccttcatggtcacgcaaccaccttacccacccaaacagggcccaatgaaattcgcaaagccaatacagcatttaatcggctctttacaaccctcaatcaagcccaaaaagaacgcactattatgcttgcaggtatcagtcatgatttgcgaacacctttaactcgtatgcggctgactgccgagatgctgcctgatgaatttttccgtgagggtttggtctatgacattgaagatatggatgccattttagaacaattcatctcttttatgaaagatggttctgatgagcctgttaaaccaaccaatttggatgcaatatttaaagaaattttggttcagtttgatggtattcagtttatttacaactcaaccattactcaacctgtgcctgtccgaactttatcaataaagcggttaattgtcaatttggtcaataacgccattcgctatggagagcagccaatacatttgatcgcaaaaatcatacccccagctcagaacacacaaaatgatcatatctttgatcactacccaacactggttttatgcgtcaaagatgaaggtgaaggcgttgctgaagaccaattggagcgaattatgcagccgtttgagcgtggtgagtctgctcgtaccacacaaggcagcggactgggtcttgccatcgtcagtcgcattgctcatctgcatcaaggtgtcgttgaggccatcaatcatcccaatggcgggctacaagtttgtatcaaaatcccgttaatgacccagattaatgatacgccaaatgatgattttgacactacgtcaactaatctggct

SEQ ID NO: 27136 - DNA, 807 bp, Moraxella catarrhalis
gtggataaaaatggcaatccttttacggttgctgcaggtgaaaacggtaaagctgtgcttcatgcgaatggtaaagtgtattcagattttgacagcaggcgtgttgatcagcattggtttgattgtgatgtctttgactgtgatagtccagttgatgcttatgaagcaaactatggcaggtttgttcgcaccactaaagtcaacttggatcgcagaaaaactgatcctaataccaataaaacttacgcaacgacttctcaatattctcataagatactgatgccatttccgtcaagccaagggtatttagaaaatttatattctgatcgtgatttaaataccaataccaagcagatgaatcttgactttaaaaagtggctggataaaggtagtgtatctcatcacatgacttatggtgcaagctatgaaacaaccgaaaaatccatggtcaataaatctggatataatgcttggtcatcgacttggtggagtgataaaaccttaggctgggattttagtgaaaaacttcgtacctgtgataattcatcaacatttaatggtctgttgtgcccaagacacactactttttcatttttaattcctgtaaaaaccaaagatggctcggtttacttaaatgactctgtcttaattggtgatcgggttcgtttgggattgggatatcgctataaccgtatcaaatatcagccaaattatatacctggacaaactgccaaaattccagatgatttggtcaaaggtctatttattccactaccaagcaatgatgttggcgaagaaccaaaatgg

SEQ ID NO: 27137 - DNA, 177 bp, Moraxella catarrhalis
atgaaaaaaatgaaagttactcaagtaaagtcgagtgcccatcgtttggcaagtcataaagcttgtttgaaaggtttgggactacgtcgcattggtcatactgttgaagttgaggatactccatcaactcgtggtatggtaaatcgtgtacattacatggttaaagtggaggaagcg

SEQ ID NO: 27138 - DNA, 5382 bp, Moraxella catarrhalis
atgaatcgcttttgctaccgtgttatttttaataagaacctaggaagattggttgttgtttctgaaataacgaaagcacagggaaaatcaggcaatttgggtggtggtcttggtaaaaagccaacttggctttccatctctttgatgacaaagcttgcgccattaaccatcgcttgttggcttggctgtagcggttctgcatttgccaatgttatttctgacagtcaagcacctgtctttcaaagacccatcattgctgccgccaaaaacgaccgtcagcaaaccgttgcccttgttcaaattcaaaccccagttcagggaatatctcataataagtacacacaatttgatgtacccaatcaaggtattgttctaaataatgctcgtacaggagcaggcacccaattggttggtgcagtagctgccaatccttttttaaagcaaggtgaggcacacaccattgtcaatgaggttcgtagcagcaaggcaagccaattggcaggctccatcgaagttgctggacaaaaagccaatttggtgattgccaatccatcaggcattacagttactggtgctggctttattaatgtgcatgaagcaaccttatcgacaggtcaagcaatcaacaagcaaggacatattcaccacactgtcaacaagggtgccattgtcatccaaacaccaaagagtgcgaatgtggccactcaaacaacgactaataatattggtcttggtggaccaaacaaaaacgccgacttggtaaatctgtacagcaagaccgccaacattaacgctcaagtacaggcagaatatgccattaccaccgttaccggaaccaaccagatcagtgatgtaggacaagttacgcccatcaccagtaatcaaacgactaccaatacaacaaaacccacgactgccattgacatcaagtccctaggtggaatgacagctggtagcattagcttggttggtaccgataagggctttggggtaaatcaagcaggtagtctaaatgccaaacaagccattaccatcaccgcagatggtaaaattacccactctggccaatcaagtgtacagcaaggggtggtcagcctaaaaagtaacaccgcagtgggattgaatggctcaaccagtaataaaaccaccatttgggccagcaaagacatcgccatgagtgcacctaccatcatggccaaccatgcctctttgaacagtgccagcaacatcacattgcaggccaaacaagagcttggcacaaacaacacaacaattcatgctggtaaaaagattgaggcaattgtctttgacaatccaacaccaaaaaacacaaatggtacggccagcttcaccaacacaacctttacaacccaaggggcgttgaccactgccaacttgcaaggtaatttaacacacaaccaaagcatcattgatgccgcaggcaatgtctcaagctttgctaaaggccagcaaacacttgaccataccaatatcaccagtcaggccaacatccaaatccaagctaacagcgatctgattgtcaacaacagtcaaattaactccgccaaacacaccaccatctatgttcaaggcaatcaaaccaccacaaacagcaccttgattgccaaaggcattgtcagcgatgtggtcaagggtgatcatcgtattaacggtaatggcacctaccaaggcggtgctgtcttgcttgacagtacaagccttaccttaaatggtaggctcattgccagaacgaccaaatcaccactactcaatagcaacaaaaacgcacaagtgctcaacggttctttatccattcaaacggaccgtgcgcttaccctaaacagcacaaatcacaatttagccatcggtggagatattagcctagtcagtcaacaaggcaagcttaccctacaaaacaccaatcccgttaccaatggcaatcaagcgcactataccttaaacgctcatcaaggcaatcttactttgcaaggcagtgaagtgcaactacaaggtgtcaacctaaagtccaaaaataacctcactgtctatgccacccaaggtagtgtagtgatggatggggttaagcgtgagtttagcaataaaaatcaaagtgggagcgatcaaaagcgtgccttggaggcaaaacttgatgaagccgccaggctaagtcttaccacaagagccgatgcattcaccaacaccaaatccagaattgaaaaccagttaggcattttaaacagcaactcaactggctttattcacaccccaaccaccttagtctcacaagctggtgacattggtgtgtatgccaaacaaggcattctttcacaaggcgccttacttaacgccgtaagtggtaacattaccctagaggcgcaaggcgtgctaccgtttgcctaccagcaaacaaccaagtcatcgcagtcaggcagctcaaaccaatctgatgccgaaacccaaactgacaaggcggcctccatcatcttaacaggcagccaaaaccgttatgaaatcggtcaagacggcaatgaccaccaccgccttttaagctttggttcaccaagcatgctaaccgctggtagagacatagacattcgtgcaaccaaagcagccactgacaagcaagatgagacaccaactttggtcttgcaaggcacaaaagcaaaagccaatggtgcaattgacattcgtgccaatcatcacctactgcttgatgttggtatcgattttgaatatagttatgataaaaccacacgcaagcacggcagatggtatagacgtaagtacacgacaacagaaaccaccaacgaatgggtggatgctgacgttgttgaactaacggcgggtgatttacgcttacaaacaacaggtaatgacagcaataatggtcaaaagcaccatctagacatctatggcgctgaactcaacactactggtaacatcacactgggcgccagtggcaatatcaatctgtacgctacaaaagacactcacaccacccaacaaaacaaccagaccaagaaaaaattcctaggtattaagactggtaccagtaatagcaaatacaactttagtcaaatcgctgccgtaccagcttccttatctgcgcaattcatcagcagtcgctcaaaaggagataccctgcttgaaggcacgcgctttgagtacctcaaaggcgcacagatcagtgccggcggcaaaattcggctattggcagccttaagtgagctacaaaccgccactcaacgagaggacaattgggtcgtatggcagcgcacccaaggcgaaggtcaacacactcagacagcccaactgccaagctttacaggtacagcagcccccatgtttgaagctcaaggtggtctaaatatccaaatccccatatctgaaaaagatgttcaaaaaagacagctcaaagatgaaatcatcacccttgccagtcaaccacagtacagctatctaaacgatctggtgaatcgcaatgatgttgattggcagcaaatcatcctaaccgacaaagattgggattataagcagcaaggactgacccctgctggtgctgcgattgtggcgattgcggtggcttatgcgacaggtggtcttgggtcagaactttcggcatctattgtgagtgcgacaaacagtacagcattaggggcagcaggaaaagcagctttaatcagcatcagtcaaaaagccagcatcagtctcattaacaatcagggaaatctaaaagccgtatttaaagagcttggagatgacagtacagtcaaaggcgttgttaccagtgcagttacagcaggcttattagaaaaaatcggcggcacggactgggcaaaagatttaggtaaaaatacccaaaatggatttgatgataaattatttaaaagcatcattgatagcacggcatccgctttggttcaaacaggcattcaaggtggcagtcttggtaacaacttagaatatgccctaaagctaggtttagcgacagctttacaatcagaagccgctaatcatattaaaggacttgaagataccgactggatattacacaaaatcgcccatgctgccgcaggatgtgctgctggtgcattacaaaaagactgtgaatcaggggcgattggtgctgccgttggtgaggtagtggctggacagctatctaggtcatattaccaaaatattgatggtgataccattctaattttaacagacgaacaaagaaactcaattattaagcaaagccagcttgccgcatctgtaatcgctgcttattcagggtatgatgcacaaattgctgcaaatactgcagaaacctctgtagaaaacaatgcgatttgggcggcgattccagtggttatttatgtagttgataaggtctataccgcttatcaagtctatcaagacattaaagccttaactgatggcaaaaccagtgttgataagctagcaaaagaaaagggcgaatcgtacattatgcaagccattgctggcaatattggaaagtatggctacaagattattaaatcgggtggcaagagggttgtacaggctgtgcaatccaagaccgtcaaccacgcatgtaccgtctattgcttcaccgcaggcacactcattcacaccatccatggtctaaaacccattgaaaccattgaacatggtgatttaatttggtcaagacaagagtttggcacagaatatggctaccgtcctgtcatcgctactaaggtcacgcccaatcaagaaatctatgaagttgttgtcaaacacagcaataactccacagaaacctttaaaaccactaaagaacacccattttgggtagaaggcattggctggcttaaagcttctttactagaacaaggcatgaccttgctagataagcatggcaatccaaacatcaccatcgtcagtcaaagtaaactagaccacaccgacaccgtctacaactttgaagtacaagacttccacacctaccatattggcgaatatggggtgtgggtgcataatgcggattgttgtggagttgatgttaaaacatctcctctgcctgttgctggggctaagagatcagataaagttaatgaaatctataagtcaaacccaaagcacacattaggtcaaacaggaaatcgtccgaatgctggtattgagccaaaaaactcttttgagctatttgaaaactcttttcagtctggaaataaaagatattccattgattctgatggaaacattcatcaatttgcaaattccaatgatggtacttggcattgggctggtagaacaggcaaggatcaagctgtagatcagcgattaaaaggcaataacatacctcaagatgttattaagcatttcaatctaaatcctaaaaaggtaaagaaatta

SEQ ID NO: 27139 - DNA, 912 bp, Moraxella catarrhalis
atgcagggaatcatcacattattacttattttaagtccaatgtttgttggttttgcactaccaacatcacaaaagttggccgcatttggtggacaggctctgacttatctgatttatcttattttgattgtcattggtattgagcttggtttggtggatgatttggtgcaaaaggttggggacattatcaaatatttggttgtgttaatcacactgaccattggctttggagcgattagcttggttttttttgataaattcactcaaaaaaatcagttatctaaacacacactacccagccaaaaacccaaaatcagcctaaggggcagtttggctcagctcatttgtttggcaattggatttatggctgctaaatttttgccagctggatttataccacctgaaaagacgaccaccatcctgctaatggcactattatttttggtgggtgtcagcctaaaaggatcagggattggattaaagcaagccttggtcaataaaacaggtctacaggtcagtgtcatatttattttttgtaccaccttatcaggcatcatttttgcaagcatttttcatgaagtcacgctgatgcagggtttggctttggcatcaggttatggctggtattcgctatcaggtacgattatgacagatgcttatggtgcggtttggggcagcgtcgccctgcttaatgacttggctcgtgaggtgattgccttaatctttatcccatgggtcatgcgttattcgacatctgtcgctgtgagtttaggcggtgtaaccagtcttgactttaccctaccaaccatcttacaggcgggtggtacacagattatgcccatcgccatcagctttggatttatcgttaatattgtatcacctgtgctaatggtgctgtttagctcatttgga

SEQ ID NO: 27140 - DNA, 1038 bp, Moraxella catarrhalis
atgaagatacttatttcaaaggaagaaatcgcacgcttattcgagctacctttgatggatttgctgatgcaagcacaaacggtacaccgtgagcatttcaacgccaatgaagtacaaattagtacgctattatctatcaaaacgggtaattgccctgaagactgtggctactgttctcaatcaggtcattaccgagataaaacaggtctgaccgccgaaaagcgtttagaaatcaaaaaagtgcttaccgctgctcgccgtgccaaatcacaaggttcatcacgcttttgtatgggtgcagcttggaaacaccccagcgaaaaagacatgccttatttggtggatttaatcagtgaagttaaggccatgggacttgagacttgcatgactttaggtatgctaaagccagaacaagccaaaactttggcagatgcaggccttgattattataaccacaatcttgacacctctcgcaattactatgatacggtaacaagcacacgcacttatgatgaacggttggcaaccattagccatgtgcgtgatgcaggtattaatgtttgttcagggtctattgttggtatgggtgagagtcgtgaagaccgtattgattgggtgtatgagctgacccaaatgcccattccaccgcagtccattcctgttaatttacttgtaccgattgctggtacgccacttggtgataaagtcattgccgaaggtcgattatcggtcattgaatggattcgtaccattgcggtaactcgtatctgttgcccaacaagctatgtccgcctatctgctgggcgtgaaagtttaagtgatggtgagcaagcattggcgtttatggcaggtgcaaactcatttttttatggtgataaattactcaccacaggcaatcagtccacatcacacgatgaccgtctgatggctgagcttgggttaacgccctctaaacctgccccaaagcccaaaattattgatgctatgagtggtgcggtgatgactgccgagatgccccataattgcccactgtcagca

SEQ ID NO: 27141 - DNA, 1689 bp, Moraxella catarrhalis
atgccaaaagccaaaaccgatgctaccgatagcacacaaaccagttttcataccgcagataccacgacaggtcaaatgacttttgcgatcattcagaccaatttttgggtgggggacatcgcaggtaatgtcaaaaaaatgcacgctttaaccctagacgccaaagctcgtggtgcagatatcgttatctttcctgagcttgctttggtaggttatccgcccgaagatttactattacgcccaacattgggtgaacgggtgcgtgaagcgatggcaaaacttgccgaaatcgaaggcatcgtcgtgattttgggttatccgcacattgatcatcatggcacattcaattcggccgccatcttacaagatggtagccaaaaaggattttatcataagcaatgcctaccaaactacggcatctttgatgaacagcgatatttccaaaaaggtcttaatcaagtcttgtttgattataaaggcgtaacaattggtcttttgatttgtgaggatatttggcatgatgagcccatttacatgctcaaacaagcaggggctgatttggtcatcgtcatcaatgcgtcaccttttgaaattggtaaacaaaccgcccgcaaatcactgttaacccgacactcctccacccatcatttgcccatcatttatgtcaataccgttggcgcccaagatgacattgtctttgatggtggctctttaatcacacaatcagatggccgtgtggcacacgaaggcgtgagattcttaaatcagcttttgatggcacggtttgacacccaaaacaaaacctttgatacacaagctaaagcacctttggtactgtctgaagagtctgagatgtatcaagctttggttgtgggcctaagagattatgtcaatcgctcaggctttaagggcgtgattgttggcctatcaggcggtattgacagtgcactcaccctttgtattgcggttgatgcgttgggttctgatagggtgtatgccgtgatgatgccgtatgaatacaccgctcaaatcagcctagaagatgccgaagcccaagcagcacgcttaaatgtgtcttatactgtctgccccattcatgatgctgtggcaggcttacgctcagccttagcgccactgcttgccaatagcgagcctgatgtcaccgaagaaaacttacaagcgcgcgctcgtggcacgatcttgatggcactgtctaataaatttgggcatatggtcatctcaacaggcaataagtctgaaaatgccgttggctactcaacactttatggtgatatggtgggcggatttgatgtcctaaaagatgtgtataaaaccgatgtctatcgcttggcgaactatcgcaatcgcctggaggataatcctgttatccctgaacgagtgatcactcgcccgcccagtgctgagctgcgtcccaaccaaaaagaccaagacagtctaggcgattatgagacgcttgatagcatcctaaaaatgtatattgatgacgatttgggctataaggcaattgtggcggcaggatttgaaccaaaaactgtcgaaaaaatcctaggcatggtggatcgtgctgagtacaaacgcagacaaggtgctatcggcactaaaattaccaaaaaatcgtttggtcgtgaacgccgttacccattggtaaatggctggtcaatcaaaggc

SEQ ID NO: 27142 - DNA, 3552 bp, Moraxella catarrhalis
atgattgatacatttaagcccaaattagatttgccaaccaaggcaaattttaagacaactttacccttacttggcggtgctgatttgagtttttggcttgcactggcagccaaaagtgaagagcggctgattgtgatgatcgccaatcatcaaaatgaactgaatcagttggatactgagctgtctttttttggcattgatgcacatgtttttccagattgggagattttggcttatgatcagctgtctgttcatcaagacattatctcagagcgtattgctttactaacgagaatgccaacaactggtgtcttattggtcagtactcagacattgatgcaacgtatcgcaccaccaagctggctgataggacagcattttgatttggctgtcggtgataaatttgatattcatgaacagcgacttcgattaaccaaagcaggctatgtgcagacggagaatgtgtttgagccaggagaatttgcggttcgaggcagtattgttgatatttttgccgttggtcaaagcctaccttttcgtcttgatttgtttgatgataacattgagacgatcaaattttttgatcctgacagtcagcgtactttatccgataatgatttagctcagctaaaaaaagatgcccaagcaggcatgaatacgcatcatgcccaaaagctgccatcatctgccaaaatcaccgaatttcgcctgctgcctgctagagaatttcccttggaagcaggcaaagagatgtttcgccaaaattttgcgagcctgtttcctaatgccagcgcccgcaagatagaattttataatgatgtcatggcagccattgctcctcagggaattgagttttatgcaccgttattttttgagcttgacgcatggatgaaaacaggcaatttatttagctatttgcccgatgatacactggtggttagtcatgataatcttagtgcttgtcatgatgagtattatcagcaaatccaagcacgccatcattctcgtgcacatgataaatcattgccgattatgccgcctgattatttatttttggcgaataatgaatttcatcaagtattgaaagcctatcccagagttgttatcaacacaaacaacgatacggcaaaaattggtgccatggagagtttaccgccgccgattttgccgattaatcatcaagctgccaagcctttatcagaactgctatcattcataaaatcagggcaagtaccgattttattggtcgctgaaagtgctggtcgccgtgaaattattcttgagctattaaaagataaagtcgctgtcaaagtggttgataattatcaagaatttattaataatttagatgattttaagactgattgtattgctttgagtgttgcaccgattgagcgtggtctttggttgcgtgatgaaactggcggattatgcatcatctcagagacacaaatttttggtaggcaggtgcttcaaacacgccgtcgtcgtcaatcaagtgtttcacaggcttttttgattaagtcggtaactgagttgaccgaaggggcgttggtggttcatcttgaacatggcatcgggcgttatcaaggtttggtggtgctggatgtgggtgaaggtgagcaagaatttattcatctaaaatatgccgatgatgccagtatttatgtacctattaccaatttggcactgattgggcgatatagcggctcagatttgcagacagtcagcctgtctaaaattggttcgggcaaatgggaaaaagccaagctaaaagctttggaacaaatccatgatgttgccgccgagcttttaaatgtacaggctcgtagaaatgctaaatcaggcatcagttttgatattgatatgtctcaatatgagctatttgccagccaatttgcttttgaagaaaccatcgaccaagctgaagctatccatgccgtgatgcacgatatgaagcaaagtaaaccgatggataggcttatctgtggtgatgttggctttggcaagaccgaagtggcgatgcgtgcggcattcattgctgttcaggcgggctatcaagttgccgtacttgttccaacgacgcttttggcagggcagcacgaggacagctttttaaatcgctttgctgattggcccattaagattgaaagtttatcacgatttggcaataaaaaacatcaagatgccattttagcagggctggcagatggtacggtggatattgtgattggtacgcataagctcattcaggacgatgttaaattcaaacagcttggtttgatgattattgatgaggaacatcgttttggcgtacggcataaagagcgtattaaagcactacaaaccaatattgacagtttatcaatgactgccaccccgattccacgcaccttaaatatggcgttatcgggcatgcaggatatttctatcattgccacaccacctgccagacgcttggcgattaagacttttttattacccaaatctgatgagacaatcaaagaagcaattttacgggagatactcaggggcggacaggtatattatctacataatgatgttgctagtatcgaggcggcagctgacacactgcgtgaattggtcggtgaagcacgagtagcggtagcacatgggcagatgaatgagcgtgagctttcggtggtgatgaatgatttttatcataaaaagtttaatgttttggttgctagcaccatcatcgagacaggtatcgatgtgcctaatgccaataccatcattattcaccgagcggataaatttggtatcgctcagttgcaccagttgcgtggtcgtgtgggtcgtagccatcatcaagcatactgctatctgatggtgccatcattgaaaggattatcaagcgatgccaaaaaacgcctaaatgccatcaccagagccaacactttgggtgcagggtttatgcttgccagtgaagatttggaaattcgtggtgctggggaaattttaggcaaagagcaatctggtaacatgcaaaccattggttttggcttatatatggatatgcttgagcgtgcgaccaatgccatcaaacaaggcaagacaccgagtcttgccacaccactggatttggttagtgatattgatattcatgcatcggcactgatacctgatgagtatttgggtgatgtgcatgagcgtttggtattttataaaagaatcagtagcttggatgatgtcaatcagctcatagacattcgtactgagatgattgacagatttggcacattacccacccaaacccaaaatttatttgcggtgcatcgcattcgcatacgagccaaagccttagggattactaagattgatgcaacccaaaccaccatcagtattgagtttcgtgccgatacgccgattgatggattggcgattattaagctgattcagtccaatgacggttatcgcatgaatggtgcaacggccatccgatacaccagccaagagcttatggatacccaagctagaattgacaaggtgaatgagctgttactatattttgaatctaccaaaactgcc

SEQ ID NO: 27143 - DNA, 2634 bp, Moraxella catarrhalis
atgagccaaatttctttagaagattataatttttctgccatcgaaaaacaactacaaacccaatgggaaagcgacaaacgctaccacaccaataacgaaacaacggataaacccactcgctacatgctctcgatgttcccttacccaagcggcaagctacacatgggacatgtacgcaactatgccatcaccgatgtgcttagtcgctattatcgccaaaaaggctacgaagtcatgcagccaatggggtgggatgcttttggtctacctgccgaaaatgccgccatcgctaatgcggttgcacctgccaaatggacctttgacaatattgctaatatgcgtgaacagctcaaggcattaggactttcgattgattggtctcgtgaatttgcaacatgcacacctgaatattaccgctgggaacagtggctatttctacaattgtataaaaaaggcttggtatataaaaaacttgccaccgtcaattgggaccctgtggataataccgttcttgccaatgagcaagtggtcgatggtcgtggctggcgttcaggtgcgattgttgaaaagcgtgatatcccgatgtactactttaagatcactgattatgccgatgagctgttagatgacctaaaaaccttggaggggcattggccaaagcaagtactctctatgcagcaaaattggatcggtcgcagccaaggtatggagttggattttacttattcaatcgatgaccatgatgctgttttgcgtgtctttaccacacgccctgataccatcatgggggtcagttacttagcggtcgcagccgaacatccgcttgctcagcatgccgccaaacaaaacccagctatcgctgaattctgtgcagaatgtaaacaaggctcggtcgctgaagctgacattgccaaagctgaaaaagtcggtatcaatacaggcttgaccgcaaagcatcccatcacaggtaccgatgtgccagtatgggtagcaaactatgtactgatgagctatggctctggtgctgtcatggcagtacctgcacacgatgagcgtgattttgaatttgccaataagtacaatctgccaattccacaagtcattgattttaaggacaaaccaagtaactatagcaccaatcaatggcaagactggtacagtgataagacagggttttgtatcaattcaggcattttggacggcttgtcttatcatgacgcagtcaccaaagtcaatgaaatcatcaccgaaaaaggcttaggtcaaaccaccactcagtatcgcctgcgtgactggggcgtgagtcgtcagcgttattggggctgcccaattccgatggtaaactgcgaatactgtggtacagtgcctgtcgatgaagctgatttgcctgtggtgctgcccaccgatgttatccctgatgggcgtggcaacccactcaaaaatatgcccgaatttctacagaccacttgcccaaagtgcggtcagccagccgagcgtgaaaccgatacttttgatacatttgtagaatcaagctggtacgctcaacgttttgtatcaccacacgatgacagccaaatgattgagcgtactgctgccgataaatggctgcctgtcgaccaatatgtcggtggtgttgaacatgcggtactacatttactttatgcaagattttttcataaagtgatgcgtgatgaaggcttggtaagtaaagatgagccttttgccaatctgttggctcaagggatggttttggcaggtacttattatcgctcaaacaatgatggtagtacaacttactatttcccgcatgaaattgattttgtcatgaatggtaccgaaatcgaaggcgctaccttaaaagccgatggcaagcctgtcaccattggcaaaattgaaaaaatgagtaagtccaaaaataatggtgtcgaccctcaagagattattgagcaatatggtgcagatactgtgcgtctttatacactatttaccgcaccagccgaccaaacacttgaatggtcagacagtgccttaaaaggtccacacaattttatcaaaaaagtatggcgtaccgttggtgagcatttgtcagccattcaaaatcaccaatcaaatgatctaacaattcataaagacacgctttcaaaagatgccaaaaatctacgccgaaaaactcatgaaaccatcgctaaaatagatgtcagcttaggcgagcatttggcgcttaatacgcccgtctctagtctcatggagctttgtaatgaaattgcaagctttaaaccaactgataataatgacattgctgcacgccatgaagctatcgttgcgttattgacactgctatctttatatgctccacatgttggcgaatatttgttagaagcactaaaaatcgatgcacgcacccaagctttcccagtcttggataaatcagccttaatcaacgataccatcaccatggtggtgcaggttaatggtaaagtgcgtggtaagatggaggttgcctctggtacagatcaggccgagcttatccgtgaagccaagaatattgaaagtgtgtcgaagtatctcattggtgacattaaaaaagagattgtcgtacccaataaactcatcagctttgttgtggcgggtgct

SEQ ID NO: 27144 - DNA, 1251 bp, Moraxella catarrhalis
atgaacaccaccaaccaaccatcaaacagccaagcttatattgaccgtgaagagcaatacggcgctcacaactatcaccctttgcctgtggtattaagccgtggcgagggggtgcatgtttgggatgttgagggcaaacagtattatgattttttatctgcctattcagcggtcaatcaagggcattgccaccccaaaatcatcaccactttaaccgaacaagccaaaacgctgaccttaacatcaagggcatttcacagtgataagcttggtgagtttgaagcctttgcctgtgactattttggctatgataaacttttgccgatgaacacgggcgcagaagcggtagaaaccgccattaaaatttgtcgaaaatgggcatacgagaaaaaaggcattgatgaaaaccaagccaaaatcattgtctgtgagaataattttcacggtcgtaccaccactatcatctcattttctaacgatgaaaatgctcgtaaaaacttcggcccttatacccaaggttttattaaagttgaatacgacaatcttcaagccttagaacaagtgttaactgataataaagatgtggcagggtttttggttgagccaatccaaggtgaggcgggtgtgtatgtgccatctgaaggttatcttgccaaagccaaagccctttgtgataagcataatgtgctgtttttaggcgatgaaatccaaacgggcattgctcgcacaggcaaattacttgcccttgatcatgaaaatgtgcgtcctgacatcttaattttgggcaaagctgtctctggtggcgtttatcctgtatcagtggtcatggcagatgatgacatcatgaatgtcattcgcccaggacagcatggctcaacttatggtggcaatccgctgggggcagcggttgccaaaaccgctttagaggtggtgcgtgatgacaatttagcggataatgctgataagcttggtcatatctttcgagaagagatgcaaaagttggtggataagcatgagcttttaaccttggtgcgtggtaagggattgctcaatgcggtggtcatcaatgacaccgaagacagcagtacggcttgggacttatgtttggcactcaaagaaaatggactgcttgccaaacccacacacggcaacatcattcgatttgccccaccgcttgtgatgactgaaacccaactgcgtgagtgtgtggacatcatcgccaaaacggttgccaagtttgaagcagacaga

SEQ ID NO: 27145 - DNA, 1641 bp, Moraxella catarrhalis
atgcaaaaaattctaagaattttaatcattatagcgatgctaattacagcatatttgctgattttggcatggcgtgatgactatgcaagaaaacctgtagttacgcagcctgtggcaacccaaaccactcatgctgatgtgccaacaacacaggttgtgggtgatattccaagcttgacagcaggatcggtagctgatttggctgataccgatttgatcactgtcagcactgaccgttatgaaattaagatcaatcctgttggtggcgatattgtttatgctgctttaaaacagcacaatgccaccaaagatagtactgagccatttgtacttttagaaaccgatttacgcacctatgttgcacaatctggattgattggacgagatggcattgacacagctgaaggccgtgcggtttaccacagcccgcgtagcagctatgtgcttaatccaagtgcagggtcgctacaagtccctttgacatatcacaaagatggcttgacgatcaccaagacctatacctttaatgcaggcaaatacccaattaatctgagttataatattaataataattccaatcaaccatggcaagggcaaatgtatgctcagcttaagcgtgatagcagtaaggatcctggcctagaggataaaggcatgcttggcatgtcaacttacttaggtggcgcttggggtgtgccaagtgatccttataataaactgaaattttctaattttgacgataatatcaatattagcagtaaagacggctgggtggcaattgtccagcattattttgtatcggcttggacgccatcaaacagttttgaagctgacttttttgctcgtacgacaggcaaggatttttatattggttataatagccccgtgattaatgtggcgtcaggcaagcaaatcacccttaacagtacgctgtatgcaggtccaaaagttcagtcagaaatggcatcggtggctgaaggcttaaatcaaacggtggattatggattgttatggccaatctcaaaagtgctgttcgctattttggataacattaataaagtgattggcaattggggctggtcaatcattgtactgactttaattatcaaagtcgctttattttggctatcaaataaaagctatatgtctatggcaaaaatgcgtgccatcgccccaaaattgcaagcgctcaaagataagcacggtgatgatcgcatggcgatgagtcaagagatgatgcagttataccgtgatgaaaaagtcaatccaatggcgggttgtttgccgattttgattcagatgccgatttttttggggttgtactggatgctggttgagtcggtggaactgcgtcatgcaccatggattggttggattgccgatttatcagcaatggatccttggtttattttaccgatttttatgggtataaccatgtttgtccagcaaatgctcaatccacagcctaccgacccaatgcaagcaaaaatgatgaaaattttgcccatgatttttgtggtgttcatgctatggttcccagcaggtctggtattgtactggacagtgaataacttatttagtatgactcatcaacatcttgttaataagcgtgtggaacgccaaatgaaagcaaagcaagct

SEQ ID NO: 27146 - DNA, 1863 bp, Moraxella catarrhalis
atgctacacaaccttacctttggtctgttttctaaaaaagacaccgcaagttttatgcaactgatggtttatgttaaaccttataaaatgcgtatcgtgtttgctttacttgctattattggagtagcattcacagaaagctatttagcggcattcattgcaccgcttgttaaccaaggttttgttttacctgacggtacagatatgcccatgctgattggcgatggtatattagcacaacttaagtattatgtagatagttttcagcatgccatttggggtaccaagcataaagtttgggttgttccgctattttttatgggtttggtcatttttcgtggtatttgtcgttttatcagtgcttatctgatggcatgggtagccacgactgcgattggtcatctgcgacaagatatgtttgataaaatgctgttattgccatcagaacagtaccaaagtatgtcatcgggcgaaatgttgatgaacatggtacaaatggtagaaaattccatcaatcatgccagcggtgtttttattgttttaacacgagataccttgattgtcattgggctggtttgtgtactgttttatttaaactggcaacttgccttactgatcatggtcatgtttccaattttatcggggttatcacgctattaccgtaatcgtctaaaaggtgtcattaataacgcccaaaaaagtatcggttctttaaataccgtgattaatgaaacccatcaaggtcatcgggtcattaagctgtttggtgggcaacaacactcagccaataaatttaatcaagtcaatacgctcatcgttcaacttggcaaaaaaatcagtcaggcagatgctgcacgctctcccatcagtgaagttgttggctcaaccgctttggcagtggtgatattttttgccttatggcaaagtcagcaaggtatgacgaccattggcgaattcatggcatttattgtggcaatgatgcaaatgtttggtcctattaaaaatcttgctaatatcagcataccgatgcagacgatgtttttagcagccgattcggtgtgtgcttttttggataccaaatccgagaccgaccaaggtacaaccaagcttagcaatgtccaaggttatattcattttaatcatatcagcgtacagtatggtaatgaaacaaccaaagctttggatgattttaatcttaatatccgccctggcgaaaaaatcgcttttgttgggcgatcaggctctggtaagacaactgccatcaatctactaccacgctttatcaatcctgttgctggtgagattttgttggataatattaatattcaagaagtcaaccttgctaatctaagaagccagtttgccttagtctctcaagagatttttttgtttgatgataccttatttgaaaatgtgcgttattcacgcccagctgcgaccgaaatggaggtgatggcagctttgcaggccgccaatctcagcgaactggttcataaacaccccaaaggcatacatcaaccgatcggtactaatggcagtcttttatcaggaggtcagcgtcagcgggtatccattgcacgcgccatcttaaaggatgcgccaattttgctactagatgaggcaaccagcgcgcttgataatgagtctgagcgtcttgtacagcaagcacttgagcgtctcatgacaggacgcaccagcatcattgtggcacaccgcttaagcaccatcgaacaagctgaccgtatcatcgtcatggacggtggaaaaatcatcgaagaaggctcacatacggagcttttggcaaaaggtggatattatgccatgttgcacaatacctcaaatgcgatttgtggtcaatcgatt

SEQ ID NO: 27147 - DNA, 525 bp, Moraxella catarrhalis
atgaccatccccaacccccaaaatgaccaatttgacatcaacgaaactggctataaaaccagccataccgccgtacgcaaggctcgccgttttgctgtgcagggtctgtatgaatggctgatgactgattaccgctttgccaaacaaagacgagatttgttagggggtaatgagccacataccatcgccgcccgaactcgtgccgataatgccatgcacaccgtacatttgggctattatcatgaactgatgcgtaatatccctgcccaaattgatgaattagaatccctgattgtcagccaacttgacagagagttatccaaacttgacattatcgaacacgccattttactcattggcacttatgagcttaaacatagcctgcatatcccctacaaagtggtgttagatgaagcaatgaagctcaatgtccattttggggcaaccgatgctcataagcttatcaatgccgtcatggataagattgccaaaaatgtgcgtcagccagaggtgcaagctgataaa

SEQ ID NO: 27148 - DNA, 687 bp, Moraxella catarrhalis
atgtggaatgaaatcgtcacaaaatttgtcagtgaaatgcacccaagaatgtgggagatggttgcccaatccacttgggaaaccatctatatggggcttgctgccactgccatcgctgttttggttgggctaccgatagggtttttggcatttttaaccgataaagggcgtatccttgaaaatcgcagtgtatttgtaattttggatgttattattaatattggtcgctccgttccttttattattttgctcattattctcatgccagtcacacgatttttggtgggaacaacccttggcacaacagccgccatcgtccctttgagtgtggcagcaattccattttttgcacgcttgagtgccaatgctttattagaagtacccacaggactgaccgaagctgccaaatctatgggtgcaacgcattggcaggttgtcagcaaatactattttgctgaaagcctgcccattttgattaatgcggtcacattgaccttggtgtctttgattggttattctgcaatggcaggtgtggttggcggtggtggcttgggaagccttgcgattaactatggtgagcatcgcaacatggtatatgtcaagtggatttcaaccatcatcattgttgccattgtgatgatttttcaaaaagccggcgatgtcttggcagccaaagttgaccaccga

SEQ ID NO: 27149 - DNA, 420 bp, Moraxella catarrhalis
atggacatcaaaaaaattcgtgaacttttagatctgatggaagaaaaagatctgttaaatttggaatatggttatgatgacaaatacatcagccttactcgtaatactgccgtgcagacagtcgctaccacccaagttgtttcagcagcaccgtcagctacaactcctgctgtcgtcaagccaagtggtcagcttgaaacttcgcccatggttggcgtcttttattcagcacccagccctaatgatcctccttttgtcaaagtaggtcaaaaagttgaggctggtgatacgcttggtatcatcgaagccatgaaaatcatgaatcccttagaagccacccaaagcggtattattgaagaaatcttggttaagaatgccgaagtggtcgaatttggtcagcctgtcattcgctacaaagcc

SEQ ID NO: 27150 - DNA, 1566 bp, Moraxella catarrhalis
atgtcaaaaaaacccaaaaccacccaagataccgacccagtcgccttgattgaaaccgctccacaaacaaaaaaatctcaaacttttgagcatgtagagaacgatcaaacccatcctagtctcatcagtcctttagatggtcagcgtgtgggtttggatcgctccaataaaaacaaaataaagcacaattatgaatatgatgccatcgtcattggtgcaggccctgctggtgaagcggctgcaatgaaacttgctaagtctgggcatcgtgttgccgtcatcgatccgcgtgaccaagtcggtggtaattgtgcacatgttggtactattccaagtaaggcactgcgtcagtctgtttttaatattattaactttcgccgagatcctttgtttaaacaaaataaagatagctatcaagttccactaagtaaagtcttaagtcgtgcgcgtgaagttatccgtcatcaggtcaatacgcataagcttttttatgagcgtaaccaaattcaagtcattcatggttggggcagttttattgatgcacatacgctagaggtgtacatcaatgatcaggagcctaccaaaaccattacctttaatcaggcaatcattgcggttggttctcgtccttatcgccctgagattttagatttcgatcatccacgcgtctttgactctgataaaatcctacaaatggattatattgcccgcaaaatcatcatctatggtgctggtgtcattggctgtgagtatgcctctatttttacaggtttaggctatgtggttgatttgattaataataaagatcagcttttgagctacttagataaagaaatttctgatgcactaagccatgacttccgtcaatttggcgtacgcattcgtaaccacgaagaaatcgatcaccttgaaacgcatgatgactgcgtggtattacatctaaaaagcggtaaaaaaatcaaagccgacgcgatcttatggtgtaatggccgctcgggtaataccgatagcctaaacctagaagcggttgggcttaccgcaaatagccgtggtcagcttgaagtggacaaaacctaccgtaccagcataccacatatttatgctgtgggcgatgtcatcggctggccatcattggcttcggcagcctacgaccaagggcgtaatgcagcagggtttatggtaggtgatgaagatgctgagtttgtcaatagcgtcccaactggcatttataccattcctgaaatctcaagcattggtaaaactgaagctgagctgaccgccgaaaaaacaccttatgaagttgggcaggctttttttaagcacttggcacgctcacagattattggcgagcgttcaggtgtcttaaaaatcctatttcaccgtgaaacacttgagcttcttggtatccattgctatggtaaccatgcttctgaaattattcatattgggcaggcagtcatgaaatgtggtcatacgcttgaatattttatcaataccacatttaattatccaaccatggcagaggcctatcgtgttgctgccttaaatgggatgaaccgaattttt

SEQ ID NO: 27151 - DNA, 1425 bp, Moraxella catarrhalis
gtggtctttgttaacgatgaaggtcaaattttgggtaatttgggtgatgcccaatatatatcacgcgccacagcacttatccagcaaagccactttaaaggcacgcttggtaaaagcgttaccgactatgctttagatgaccaagcatctccagccatcagtattgttggcgtgggtaaacttgataagcttgctgataatatcgctaaagttgccgtggcaacttatgatgtgattaaaaattctcaaagtgcggcaattttgtggggtgataccatttgccaaattcactttacacaatttgtcaccgccttaattggtgcaagctatcgttttgagcatcacaaaaccaaaccaaaagatgccgatactttgcgtgaaattgtcatcatcagcaacaaagacgctcaaactgactatgataaagcgcttgcatttgctcaagcaactgctgctggtattaccaccgcacgagatgtcgccaatgaagctcccaatgtgcttaaccccagcgagcttgcaaaaaaagccaaacaacttgccaaggattatgccgataccgtttcggttaccgtgctgaatgaaaaagacatgaaaaaacttggcatggggtgctttcttgctgtctcacaaggctcagatgcagaaggcaaacttgccgttattgagtattatggcaaatccaaaaaatccgataaaaaagctaagctagataagccatttgctttggttggtaaaggtctaacctttgattcaggtggcatctcactaaaacctgccgctggcatggaagagatgaaatttgatatgggtggtgctgcctctatcttgggtactgtgcgagcagtcgccgaagctggacttgaaattgatttggtcgctgtacttgcttgtgctgaaaatatgccttcatctcgttcagctcgcccaggtgatgttgttaccgctatgaatggtactactgttgaaattttaaacaccgatgccgaaggtcgcttggtgctgtgtgatgcactttgctatgtccaagagcattacgatgcacgcattatcatcgatacagctaccttaactggtgcttgcgtgattgcactgggcagcgttcgttcaggcatgtacagtaatgatgaagatgcactctttgccctgcaagcagccagtgagtatacgggtgatttggtttggcatatgcctttagatgatgcctatgatgagcagattaattcaaaaattgctgatgtccaaaatattggtgggcgtgaagcaggttcagttaccgcagcatgtttcttgcaaaggttcatcaaagaaggtcaagcttgggtacatcttgatatcgcaggtcctgcttggaagagtggtagcaccaataccgcctcaggtcgtcctgtggcgttgctaacccagtatctacgcagccaagcc

SEQ ID NO: 27152 - DNA, 480 bp, Moraxella catarrhalis
atgaaattacgaattttaagtattgggcacaaaatgccaaattgggtacaacaaggctttgaagaatacctcaaacgcattcagcccatgattagtgttgaaatggtggaactacctcctgccaaacgcagcaaaaccccctcacctgccgagattgataaatataaagccatcgaagcgacgacaattttaaatgccaaacatccaaaagagcgattatggctgcttgaagttaagggtaaaatgctgtctactgagcatttgagtgataagctgagtgtggcgatgcaagatggtgcagatattgccttggtgattggtggtgctgatggcgtttcgcctgagatattgcaagcagcagattttaaatggtcattatcggagctgaccttgccgcatccgttggtgcgtatcattgtcatagagcagttgtatcgtgcgatgagtctgattaatcatcacccctatcatcgtggtggg

SEQ ID NO: 27153 - DNA, 1905 bp, Moraxella catarrhalis
atggctaaagttattggtattgacctaggtacaaccaactcatgtgtggcagtacttgaaggtgataaagtcaaagtaattgaaaacgcagaaggtgcacgcaccacaccatcgattgtggcatttaaagatggtgaaactttggtcggtcaagcggctaagcgtcaagcggtcaccaacccaaaaaatactttatttgcaatcaaacgcctaatcggtcgtcgttttgaagataaagaagtccaaaaagacatctcacttgtaccttttaaaattgtcaaagcagataatggcgatgcttgggttgaggtcaatgataaaaaacaagcaccgccacagatcagtgctgaagttttacgcaaaatgaaaaaaaccgccgaagactatcttggcgaagctgtaaccgaagctgtcgttactgtacctgcctattttaatgatgcccagcgtcaagcaaccaaagatgcaggtaaaattgcaggtctggatgtcaaacgcatcatcaacgaaccaactgcagccgctttggcatacggtatggataaaaaaggtggtgataaaactgtggcagtttatgatttgggtggtggtacatttgatgtatcaatcatcgagattgccgatgtcgatggcgatcagcaatttgaagttttagcgaccaatggcgatacccacttgggcggcgaagattttgacttagcattgattgattatttggttgaagagtttaaaaaagaacaagatgttaacttaaaaggcgaccctttggcaatgcagcgtctaaaagaagctgccgaaaaagccaaaattgagctatcaagcagccaatcaacggaagtaaacttgccttacattactgcagatagctcaggtccaaagcacttggtggttaccatcagccgtgctaagcttgaaagcttgactgaggatatggttgctcgcacaattatcccttgcaaaactgctcttgaagatgctggcttatcagcaagcgatattgatgatgtgattttggttggtggtcaaactcgtatgccactggttcaacaaaaagttcaagaattttttggtaaagaacctcgtaaagatgtcaacccagatgaagcagttgccatgggtgctgctatccaaggtgcggtactgtctggtgataaaaaagatgttctgctacttgatgtgacgccattaactctaggtatcgaaacgatgggcggtgtgatgacaccaatcattgagaaaaacaccatgattcccaccaaaaaatcacaggtattctcaacagcagcagataatcaaccagcggtatcaatccaagtttatcaaggtgagcgtaaaatcgccaaccaaaataaactgttgggtaactttgacttaacggatattccacctgcacctcgtggtgtaccacaaattgaggttacttttgatatcaacgctgatggtatcatgaatatcagtgctaaagataaaggcacaggtaaatcacaatctattcagattaaggcagactctggtctatcagaatctgaaattgaagagatgattcgcaccgctgaggcaaatgctgccgaagatgagaagtttgctaaccttgcaaatgctcgtaatgaagcagatggtcgtattcatgctgtccaaaaagcactaaaagaagctggtgataaagttacaactgaagagactactgctgttgaatctgccatcagtgcacttgaagctgctgccaaagaagatgatgctgatgacatcaaagctaaacttgaagctttagataatgcgttcttgccaatcagccaaaaaatctacgctgatgcaggtgctcaaggtgctgagccacaacaagaacaagcaaaacccgctgatgatggtgtcgttgacgctgaattcaccgaagtcaaagacaag

SEQ ID NO: 27154 - DNA, 1146 bp, Moraxella catarrhalis
atgaaatttaccttacatcataccgatggcggcaacaatcatgctcgccgtggcactgtcagcttagcacatggcaatgtccaaacacctgcatttatgcctgtcggcacttatggtacagtcaaaggcatgttaccccgtgatatccatggtatcggtgcagatattatccttggaaatacctttcatctttggctacgccctggcatggaagtgattcgtcattttggtggtctgcatcattttattggctgggataagcccatcttaactgattcaggcggttttcaggtgtttagccttggtgcaatgcgtaaaatcagcgaagaaggtgtggcatttcgctcacctgttgatggtgctaaagtctttttatcacctgaaacctccatgcaaattcaaaatgacctaaactctgatattatcatgcaatttgatgaatgcacgccttaccccgccacacacgatgacgccaaaaaatcacttgagctgtctttacgctgggggcagcgttgccttgatgagcatcatcgcctgggaaataaaaatgcattatttggtatcattcaaggcagtatgtataaagatttgcgtatgcaatctttacaaggtttgctaaagatgccttttgatggttatgccattggtggtctgtctgttggtgaacccaaagaagagatgataaaagtacttgattatctaccatgtgccatgccaaatgataagcctcgctatctgatgggcgtgggcaagcctgctgatattgttgaagcggtacgccgtggtgttgatatgtttgattgtgttatgccaacacgcaatgccagaaatggccattattttgtgacaggtaatcatgacaataaaggtgtgattcgcattaaaaatagccaataccgtaccgatgacacaccactggatgagcattgcgactgttatacttgccaaaacttcagccgtgcctatctttatcatctgcataaatgtaaagaaatgttatcagctcagttggcaaccattcataatttacgctattatcaacgcttgatggttgatatccgtcaagcgatcgaacaccatgcctttgatgaatttgtagtgcaattttacgctcgctggggtatggcagtaccaccatttaactca

SEQ ID NO: 27155 - DNA, 1104 bp, Moraxella catarrhalis
atgacaaccaccccaaaacctaagacggcgacaacaagctcaacgactgccacaaccgttcccaaaaaaacaacatcgactcgtaccaaagtatcgaccgctacagaaaccaagccaaagccatcaaaagcggaagcgattatgacacaaacggtgggtcaattagaagagttacttgagcatgctacccctgaggagttggcagaatttggtgaagcgctcaaagaataccttcccacaactcatgtcatcagccaagttcgtaccgataaatcacgagatactcagctttcggataattggcgtgaaggcggttatccatataaatatcgcttaagtcgtaaaaattacgaagcccaaaaatacaagctacaaattgaactgttaaaactccaacatcatatcaaaaccactggtcaaaaacttgtcattatctttgaagggcgtgatgctgcaggcaaaggtggcaccattaagcgatttatggagcatttaaatccccgtggtgctcgtgtggtcgctctagaaaagccaaccgaacaagagcgtggtcagtggtattttcaacgctatgtgcagcatctgccaaccgctggtgaaatcgttttatttgaccgctcttggtacaatcgtgcggttgtagaacgagttatgggcttttgtacggatgaagaataccgtatttttatgcatcaagtgcctgaatttgaaaagcatttggtagaatctggcattcatttggtgaaattttggttttcggtcagtcgtgaagaacagcgtgtgcgttttgccagccgtgaaaatgacccgttaaaacagtggaaactatcgccagtggataaagcctcgctcaataaatgggacgattatacacttgccaaagaagctatgttctttaatactgacacggcagaagtgccttggattgtgattaaatctgactgtaaaacacgcgcacgcttaaacgccatgcgttatgtactcaataaattaacctacgaaaataaagacatcgctcaaattggtaatatcgatcctttaatcgttggtcgtgcaggtgcattgtatgagatggatgaacgcacagacttgactgtcagcact

SEQ ID NO: 27156 - DNA, 846 bp, Moraxella catarrhalis
aaagccactttgcttatcgtgcatggcatgagtgagcatggcggtcgttatgctgattttgcaaggtttttggcagataatggcgtacttgtggcaacttatgaccagcttgggcatgggcagacagtcaaggacaaatacgagcttggtttttttgacgaaaaacaccccgtccaaaccctgtgtaaagatgtcatcatcatggcggataaattaaaagacaaggcacgcacgctcacctcccgcccagtttcccattatatcatggggcattctatggggtcattcattgtgcgaacggtactgacccatcacagtacacgctttgatggcgtgatactcatggggacagcagacagttttggactgctcaatcgcatgagtttggtgagctttgggctattaaatcagctgtttgccaaacaggtgaaccaaaaggctgctcatctgatgaatcatgttttactctcccagcttcgctcgcccatcagtgcctcaccatttgcttggcttagtgaaaatattgatgccgtcagagcctttgaaacagatccgctgacaggatttgcctttaccaataatggctggatgactttatttgctttgatgcagcgtgccatgcgtcctgattggtataccaatatgccaagcaattacccaattttattaatcagtggcaataatgaccccgtaggcaatatgggtcaagacattcaaacactacaagaaaaactgatacatgccaactgctcggtcagtgttcaactttatcctaatatgcgtcatgagccactgcatgaaaaacaagcacaaaaagtctttgtggacatcttagcttggattgag

SEQ ID NO: 27157 - DNA, 1098 bp, Moraxella catarrhalis
atgaccgctccacaacgcacccctttatttgatgctcacaccgaacacaatggcaaacttgttgattttggcggttgggagttgcctgtcaattatggctcacaaattgatgaacaccatgccgtgcggacagatgcaggcatgtttgatgtctcgcacatgctggttaccgacatcaacggtgataatgccaaagcctttttacaaaagctacttgctaacgatgttgccaaattaggctttgtcggtaaggctttatattctgccatgctaaacgatgatggcggcgtcatcgatgaccttatcgtctatcgcatgaacgaagatgagagtgcttatcgcatcatctcaaacggcgcaacccgtgaaaaagactctgcacactttgccaaagttggcggggcatttggtgtcactttgaccccacgccatgatgttgccatgcttgccatacaagggccaaatgccatcaccaaactccttaccgtcaagcctgaatggacagacaaagtcaatgccctaaaaccctttgttggtgtggatttgagtgatgattggtttgtcgcttatacaggctacacaggtgaagatggcgttgaggtggtcatgccagcagatgaagcgactgggtttttcgatgaactcatcaaagcaggtgtcgccccatgtggacttggtgccagagacaccttgcgtatggaagctggcatgaatctatacggtaacgacatgacagatgatgtcagccccctagaagcaggcatggcgtggacggttgatttaaaaaatgaaaaccgtgattttgttggtaaatccgcccttatcgccctaaaaaatgacggcgtcaaaatgcgtcaagttgggttattgcttgccaaaggcggtgtacttcgtgctggcatggaagtgattaccgaagatgggtttggcatcaccaccagcggggtattctccccaactctaaaccaatccatcgccatcgctcgtgcgcctgccagctttacaggtgagcatgccaaagttatcatgcgtggcaaagagatggatgtgcgtgtactcaaattaccatttgtcagacatggcaaaaagcaatttgat

SEQ ID NO: 27158 - DNA, 1239 bp, Moraxella catarrhalis
atgtcagcaatcattgccataccaaaaacattaaaaaccatcattttttatggtgttgcctttggtagctttcgtatgctcattggtggcatatccaccctatatcttttgagcaaaaatattgatttaattgacttaggcttattaaaatcatttcaatttgggttaatgatgataattgatttacccttatcttacattgccgatagatatagccgaaaactatctaccatacttggaattttatttgggtcattttggttgttgactaccgcttttgcctcagaaatttggcaattttatgttgcagaagcatttaatgccatctccttatcattatttggtggtgcttatatatcttatttaatagatataaaaaacaaacaatacccagatctagataataaaactttactctcttatgacaataaatacaacagcctaggtatggcaatttgtgcttttgtaggcgccagttttttagaaccagcatcaaatatcatatggattattgcaggcacattattatttatagtcagtatgggtgcttttttacaactacccagtgatatctaccaaagtacgcataataatataagtgatttaaagattaatacacccaacttctcagaaaatttgggtcgtttaatctcaatactcaaaacaaaacaagagatatgttatgggctaatagtgctatctatcttgctaatatattttcaaactatattacaactatggcaaccagttattaaaaactttaatacaggcaatttgggatggatttatggcatgtttttttccatcgtctctcttgctcagcttttgtcaagttatgccattaatagtaacattaaaaacaaatacacatatattctgatttgtctatttttatcactactgctcatgctatctgcaatcacactgtttcagcactcgacaaaaggggttgtattaatagtcatctctttatttattatgttttttggcattaagtttttaatgattgaagcttcagctaaatttcatgacattatacccaacaaccatcgttcgctgcttgatggcatggcattttttatcagtcgtaccatattactgattatttttcctgcaattacctatcttatacaaaaaatgggctttattgctttaccactaatttttagcatattaatcactttatatatgttcattggtcatcaatttaagacaaatattaataataataccagtgtt

SEQ ID NO: 27159 - DNA, 477 bp, Moraxella catarrhalis
atgaaaattgaagagtttagaagcctaaatgatgatattgaagtcgtcattaaccgctctgaaaaaatcaaaggcttaaaagaaaaagccaaagacaatgatggcgagctatcaaaagaagataaaaagacattaagcgatgaagaaaaaaagcaaaaatctttgcgaaaacaaatccaagaaaaattgattaaatttgccacacgcattccgatttttatgtatttatcagattatcgagaacacagtttaaaagatgtgattacggtgcttgaacctgagctgtttacccgagtaacagggcttacgcaggcggatttttctttgcttgtgtcattaaatgtgtttgatgaagcggtgatgaatgatgcggtgtataagtttaaacgctatgaagatgccagtcttgaatatgcagggattgataaaaaagagggttatgtggggctttataatacccaaatcaaacgacaatgg

SEQ ID NO: 27160 - DNA, 411 bp, Moraxella catarrhalis
ttggaacgttggtttgaatttatcggtaatcatccagtcttagttggattgctgattgtattaatcattgcattttttgccatcgaaggcaaacgcagtggtcgtaaagttccgccaagcgaattgggcttattggtcaataatcaaaatgctcgcattattgacattcgcccagctaacaagtttgccaatggtcatatcactggtagccaaaacataccgtttaacgaccttaaaaatcacctagctgaattacaagccattgaagtgcctgtgattttggtttgtgatattggcatgcaagcaggtgctgctgtacagctgatcaatcgacccaattttatgcgtcttgaaggcggtattcaaggctatcaatcagcgggcttgcctttggttggtactaataaaaag

SEQ ID NO: 27161 - DNA, 930 bp, Moraxella catarrhalis
atgacaaacaaacctaccgttgcgttaataggtgccccaaccgatgtgggtgcaggtgtgcgaggcgtgaacttagggcctgatgccttacgcattgctgacattgataaagccattgaacaatatggttttactgtcattgaccgtggtaatttgcaaggcccagccaaccccaatcagccccctgtgaacggctaccgtcattttgatgaagtggttgcatggaacaaaatggcacacgatgctgtgtatgatgagctgaaaaatggcaactttcccattttgatggggggcgaccattgtttaggtttggcatcattgaccgctgtggcacgccattgccgtgagcaaggcaaaaagttgcgtatcctttggcttgatgctcatgctgattttaataccagcgaaatgaccccatcaggcaacattcatggcatgcctgtggcttgtgcttgtggttttggtcctgatgagttaaccaccattggcggtgtcagaggagcgattagcccaaaagatgtgtatcaaatcggtatccgcagtgtggacgctaaagaaaaatacttcatcaacgaaaaaggcgtcactgtctttgacatgcgttatattgatgaaaatggcatgcgtcataccatggaacaagcgttaaaagacttggataatgacacgcacttacacatcagttttgatgtggattttcttgacccaagcatcgccccagcggttggcacaacggtgatgggcgggcctacctatcgtgaagcgtcattgtgtatggagatgattgccgatactggcttaatggcatctttggacatcatggagctaaacccaacccttgatgaacgcaaccgcacagcggtcatcatggtggattttattgaatccttgtttggtaaatccaccctagtcagacctgacacaacccaa

SEQ ID NO: 27162 - DNA, 1917 bp, Moraxella catarrhalis
atggtcgcaattaccctacctgatggtagtatcaaacaatttgacggtaacaccaccgtgatgcaagtggctcaaagtatcggtgctgggcttgccaaggccaccgtggcaggtcgggtgaatggtcggttggtcgatgccagcgaccccatcaccaccgatgccacggtagagataatcaccccaaaagatgatgcaggcgtggagattatccgtcattcaaccgcccaccttttaggtcatgcggtcaaacagctctaccctgatgttaaaatggtcatcgggcctgtcattgatgatggcttttattacgacatttatagcgaacgcccttttacccttggtgacatggcaaagattgaagctcgcatgatacaactcatcaaccaagattatgatgtcatcaaaaaaatgaccccacgagatgaagtcatcaaaacctttttggagcgtggtgagacttataaacttcgcttggtggaggacatgcctgatgaaacccacatgggcttgtatcaccatcaagaatacattgacatgtgccgaggcccacatgtgcccaacactcgctttttaaaggcgtttaaactcaccaaaatgagcggtgcgtactggcgtggcgacgccaaaaacgaacaattgcaacgcatctatggcacagcatgggcggacaaaaaacagcttaaagcctacttacaacgcctagaagaagccgaaaagcgagaccatcgcaaaatcggtaaagccttgaacttatttcacatgcaagagcaagcccccggcatggtgttttggcaccccaatggctggacaatctggcaagtacttgaacaatatatgcgaaaagtacaaaaagacaacggctatcttgaaatcaaaaccccgcaaattgtggacagaagcttatgggaaaaatcagggcattgggataactatggcgagatgatgttcaccaccgccagcgaaaaacgagattacgccatcaaaccgatgaactgcccttgtcatgtgcaggtgtttaatcaaggcttaaaatcctaccgtgatttgcccctacgcttggctgagtttggctcatgccaccgcaacgagccatcagggtctttgcatggcatcatgcgtgtgcgtggctttacccaagacgatgcccacatcttttgcaccaatgcccaaatcaggcaagaagcccttaattttatcaaacttacccttgatgtgtataaagactttggatttgaccacattcaaatgaagctgtccactcgcccagaaaaacgggtgggggcggacgagttgtgggacttggcagaacaagccctagccgacgccttagataacgctgggcttgactgggagctacaagcaggcgaaggggcgttttatggtcctaagattgagtttagcctacaagattgcatcggacgggtttggcaatgtggcacattacagttggactttaacctacctgaacgcttggacgctgagtttgtgggagaatcaggcgagcgtgaacgccctgtcatgctccaccgtgcgattttggggtcatttgaacgcttcattggcattttgattgaacattatgcaggtctcttccctgcgtggcttgccccccagcaagtggttgtgatgaacatcaccgacaagcaagctgacagcgtgggcgatgtggttagcaagctaaatgccaaaggctatcgtgccatcagtgatttgcgtaacgaaaaaattggctttaaaatccgtgaacgcaccttagaacgcattccgttcatgctgattttgggtgataaagaagtggagtctggcacggtcaatgtgcgtactcgcgcgggcgaaaacttaggcagtatgagtcttgatgactttatcgctgttttagataaggcgattgagaaaaaaggtcggctaaatttg

SEQ ID NO: 27163 - DNA, 1218 bp, Moraxella catarrhalis
atgagtgattttttacccatcaaagaccaattgacgcttatcatgcgaggggtgcaagagatttattccaaagaagatttgataaaaaaattagaaaaaaaccgcccgctacgcattaagcttggcatggacccgacagctgctgatttacaccttggacatactgtggtactaaataaattgcgtcattttcaggatttggggcatgaggtgctgtttttgattggtgattacacggcacgcattggcgacccatcaggcagaaatgccacccgtccgccattgacagaagccgaggtgaaagccaatgcccaaacctatgccaaacaggtttttaaaattttggataaagacaaaaccaaaattgtctttaattccgactggtttggcaaaatgagtgcaggggatatgatacaactggcaagccaaattactgtttcacggatgcttgagcgtgatgatttttcaaaacgctataacagccagacccccatcgccattcatgaatttttataccccttggtgcaaggctatgacagcattgctttagatgccgatgtggagcttggcggaactgaccaaacttttaatttattgatggggcgaacgctacaaggtcgctatgataaagagccgcaagtgtgtattactatgccaatcttagaaggcttggatggtgtacaaaaaatgagcaaatctttggggaattatattgggattaatgaccctgctggtgtcatgtatcaaaaaattctatccatgcctgatacgctcatcgctcgctactttgagcttttaagctttaagccaatgagcgaagtcaacgccttgcttgatgatatgaaaaatggccgtaatccccaagaaatcaaacgcattttagctctagagctgattgagcgttttcatgacaaagaatctgctgataatgcccacaaatcagctggcaaccgcttggcagacggtgagttgcctgtggatttgccagaggtaagcttatctttaaatggtcaagataaattatttatcacccaagtcttaaaccaagcgggtcttgctaaaaactctgctcaggccaaagacatgctatctcgtggggcggttaaagtggacggtcaagtggtcgatggcagttttgccttagaacaagggcaaacggtggtgattcaagcaggtaaaaaagcgtatgccagagtctggattcaatcagcccaaata

SEQ ID NO: 27164 - DNA, 1050 bp, Moraxella catarrhalis
atgaatgacaaacgattgatacagcaagatatttattatatgcagcttgccattgcggcggcaaaaaagggcatttataccacaagacccaaccctgctgttggctgtgtattggtcaaagatagtctggtcatcggtcagggttatcatcctaaggctgggcagccacatgctgagatttttgccttggctgatgccaaagcacagggttttgataccaaaggtgcaaccgcttatgtgacacttgagccatgtagccatacgggccgtacaccgccttgtgctgatgcgctcattgctgcaaatcttaggcgagttgtcgttgcaagcttagaccctaatcccaaagttgctggtaatggtatcaaaaaacttcaaaatgcaggaattgaggtcttggtgggggtgtgcgatcagcaggcagctgcgttaaatttgggttttttgaaggcgatgaggacaggcttgccttatgttaggctgaaaactgccagcagtttggatgggcgtacagcgacggcatcgggcgaatccaaatggatcacaggtatagaggcacgagaagatgtgcagcgactgcgtgccaaaagtgctgcgattgtcacagggtcaggcactatcatagcggataatcctgcgttgacagtgcgtagcaaacagcttggcgtagatctacatatgatacccaagcccaaggtagtcattgtcgatcgtagaaatagattatcagatttggatgattaccaagtcttaaatcacgataataccttgatttggcgtaatgatttaatgagtctactaaaaactttggtatcacaatatgcctgctatgatgtattgatagaagcaggtagtgagctgtctggcgcctttattacagaaggcttggttgatgagctgattgtataccaagcgccgtgtattttgggtcaagatgcccgtccgatgtttgcatgtcagcttgatcaattggtgcagcagtatcgatttgggctacattctgctgatatcatcggcaatgatattcggctaatttatcgcagtttaact

SEQ ID NO: 27165 - DNA, 702 bp, Moraxella catarrhalis
atgcgtttggataaatttttaagcaaagccacagaactgtcacgcaaagatgccaaaaaagttcttcatgctggtgaaattactgtcaatggcaccatcatcaaagactcaagtcatcatgttgatttggcaaatgatgagatactttgggcaggtgaagcactatcggttgctgatggcaatcgatatattttgctgtataagcctgatggttttgaatgcaccttaaagcctaaagaataccccatggtaactgacttaattgcggtacctgaggtggccaatctgcgtatcgcagggcggttggatgttgatacgacaggcgcactgctattgtcagatgatggtgcgtggttgcatcgtgtgaccagccccaaacgccatcagcccaaacagtaccaattaacacttgctgatgcgatggataaagatgctcaagcatatgccatcaaacaaattgccaacggcattttattagaaggcgaaacagaaaaaacccgcccagctgtcttgtcttttattgatgagacgcatgctgtgctgacacttaccgagggtaaatatcatcaagtcaaacgcatgatggcatactttggtaataaagttatcaagctgcaccgtgccagcattggtcatatttcacttgaagggcttcagatgggtgaatgccgctttttaacgccagatgagattaatcaattt

SEQ ID NO: 27166 - DNA, 411 bp, Moraxella catarrhalis
atgacatctgttctgattgacacatctcaaaatttagcgacttctttgccaaaagctaaaaacttccaaaaataccatcgcctactcatacctgccgactttaaggcggtatttgattcacccgttaaaaaggttcataccctgcatttgttggcatttattggacagggtcagggtttgtcggcaagattgggtttggcaatcaccaaaaaaaagctaaaaaaagcggtggatcgtaatcaacttaaacgactgtgccgtgaaaattttcgccatcgccaagcttcttgggtggcgattgatgtggttgttattgtcaaggcaggctatcctagagaatttgacatcgcgaccgaagtaacagaattatttaataaaattaataaattatattctgatgaactgagtgtt

SEQ ID NO: 27167 - DNA, 1398 bp, Moraxella catarrhalis
atgacaaccagtatccaacaattaccgaccatcgccgccatcgccagccccatcggtcaaggcggtgtcggtatcatccgattatcaggtaaagacgcttatcgcatcggttgcctaatgacgaggcggtcaaatttaatacccagaatggcatattttggtggtttttatggtcaagagggtgtgattgatgagggtgtgataatttattttaaggcaccacattcattcactggagaagatgtggtggagctacaaggtcatggcggcatggtactacaaaacatgctgttggctcgggtgtttgagcttggtgcacgccaagcagcagcaggggaatttagctaccgagcttttgaaaatgataaaattgacttggtgcaggctgaagccatcagtgatgccatttcagccacttctgtcgctcaggctaccagcgctattcgttctttgactggtgaattttcccaaaaaatcaatgagttattagataagctcgttcatcttcgcttgtatgtggaagcttcgatcgattttcctgaggaagaagatgttgattttttgtctgatggtatcattgaaaataaattaactgagattttgtcaggtattgatcgtatcttagcgacagcaaaacaaggtcagctgttgcgtgatggtgtgcatgtggtgctggcaggtaagcccaatgcaggtaaatccagtctgcttaatcgcttatcgggtactgagcgtgccattgtaacagagattgcaggcaccacgcgtgacactttggaagaaactttgattttaaatgggttaactgtacatttaactgatacagcaggtcttagaaaaactgatgatcatgtcgaaaaaattggtatcaagcgagcatttgatgcgatccgtcaagcagatgtgttgatgatggtttatgatcttacaacagaaactgatccgttagcattagccgatcagctgttttgtgagggtgtgactgaggatgttggtgatattattcgccaaaaattgattttggttgcaaacaaaagtgatttattggtctcaaaaccagttttacaggtttcatgtgaaaccaaatcagtccccaaacttgtttatgtttcatgtgaaacaggtgaagggcttgatgaattgattgaaatattaacccaaaaggtgggttttcatcctcctgaaaatagtttgattgcacgcactcgccatcttgatgccttaaatcgtgccaaagggtatgccatcgaagcgtacgagcagcttaccatttatcatgctggtgaattggtagcagaaagtctaagacagtctcagcaagcattgggcgagattacaggtcagatgagtgcagatgagctgctgggtaagattttttcaagtttttgtattggtaaa

SEQ ID NO: 27168 - DNA, 1275 bp, Moraxella catarrhalis
atgtcaaagaaagttactcttaccgttgacggtaccgaatacgacatgcccgtgctggagagcactttaggtcgtccagtactggacattagtgctgttgccaaagcaggtttatggacttatgatcctggctttatggcgactgcaccagtagaatctgccatcacttttattgatggtgaaaaaggcgagcttttacatcgtggctatgccattgacgacttagcatccaaggctgagtatttagaagtttgttatgcgttattatacggcgatttgcccaacgccgaacaaaaacaagcattttatcaacgcatctctgatcatatgtctgtacacgatcagttgcgtaaattctttgagggtttccgccgtgatgctcacccaatggcaatcatggttggcgtggtgggcgcactgtcagcgttctatcacaaccatttggatatctccgatgctgagcatcgtgacaatactgccgtggatttgattgcaaaagtaccaacccttgctgcgatgagctataaatactcaatcggcgagccattcatgtatccacgcaaagattttagctatgctgaaaacttcttgtatatgatgtttgccacaccaggtgagccagattataaagtcaatcctgtgcttgtcaaagcgatggataaaatctttaccctacacgctgaccacgaacaaaacgcatccacttctaccgtacgcttggcaggctcaacaggtgccaacccatacgcatgtatcgcagcgggtatcgtagcactttggggaccatcgcatggcggtgctaacgaagctgttcttgagatgcttgatgaaatcggctctgttgaacatgtcgaagaatttatggaaaaagttaagcgtaaagaagtcaaattaatgggctttggtcatcgtgtctatcgcaactttgatccacgcgccaaagtcatgaaagagacatgtgatgaggttttgggcgctttgggcatcaatgatcctaaactcgagcttgcgatgaaacttgaaaaaatcgccctagaagatccgtattttgttgagcgtaaactctatccaaatgttgacttctactctggcatcatcctaaaagccatcggtatcccaacctcaatgtttaccgtaatctttgccttggcacgtactgctggctggattgctcactggacagaaatgcactcagagtcttttaaaatcggtcgtccacgccagcgttacactggcgagacgcatcgtgagttcgtacctgtggacaaacgtaaa

SEQ ID NO: 27169 - DNA, 438 bp, Moraxella catarrhalis
atgggcgtggtagacattcaaactgccctaaaagctgctttggatgtaaatttggatttggttgagattgttgctgatgcaaaaccgcctgtctgcaaaattatggattataaacgctatttgtacgaacaaaaacaaaaagctaaagaagccaaaaagaatcaaaagcagactcaagtccgtgaaattaaactgcgtcccggtactgaagaagctgactatcaagtcaaattgcgtaaaattgttgaatttctagaaaataaagacaaagtcaaaatcagtattcgcttccgtggccgtgaaatggcccaccaagaaattggtaaagctcaacttgatcgcatcatcgaagataccgctgagattgccatcgttgagcaagctcctaaggtagaaggccgccaaatgggcatgctgttaggtcctgccaagaaaaaa

SEQ ID NO: 27170 - DNA, 786 bp, Moraxella catarrhalis
atgcaccgattattaccgccaacactgatggcaagctttttattattaagcgcctgcagctctggcaattctcatgccaaagatacctctaatgccagccagccaacaacccaaacttcttctcaaagcgataccacgcttgtcaagacgctccaagataatttgacccaagcaggggttgatatcactgtgacaaatgccctgccaacaaccatgcctgatatctattgggtcagctttgaaaatgcccctgcaatgttcacagataaatcgggtgaatatttaattcaagggcaaattgtcaaattaagtggtgattatccgacagatattaccgctgacattcagtcatctttggccaaagaaaccttagccaaagccaatactgatgatatgattatttaccctgcaaccagtcagcataaagcatctatttatgtttttagcgacccaacttgccactactgccgaatgctacacaaggatatcaagcagctcaatgctggcggtattgaggtgcgttatttggcgtggccacgctcagaacaagacataccgctcaccgaagcaatttggtgcagccaagaccgaaaagcagccttaacagcagctaagcttggtcaaactgtccatgccaagcattgtaaaaaccctgttcaagaacatttggcattagggcgtagtttgggcgtatcaggcacgcctgctgtttttgccgaatctggcaggcagattggtggctatatgcctgccaaagatctcatccatactgccattgaacaacga

SEQ ID NO: 27171 - DNA, 1968 bp, Moraxella catarrhalis
atgttaaataaccgacttagtggctttttgccaaaatcgctttcagtgcgtgcttggctggcagttggcgttattgtattttttgcgacagtcacagccagcacttcagcagtcttagcctgggtatcaaaatctgatgctcaagcactcaactctgtcggatcaattcggatggcaacttatcgcattaattatttattaacaaccaataccactttaccaattgatgatcatgtaaaacttgatcctaccttatcgatcaatcaacaactgattgatgatatgcaagcgcgtttgaatgtgctgtatgcatatcagaatatgcctggcaataaggacactgagatagatagccaaactaaaacaattcaacaccattggttaaagatgctaaagcctgctttagtaaataatgatagtaccgcagtattagtggcgtctggtaaatacattaaagaagttcacgagctaactaaaaaaattcaggttcgcagtgaaacccgccagcactggcaacaagtattacaaatgtctgcgcttggtatcatcttattaaccctattattaggtatgtatgagcttcggcgtaatgtactaagacccattcactttctcatagacagtacgcagcatttcagacgcggtcatcatgtgcctgcgctggtaactggctatcaagagtttcaaacgcttagcaactcattcaatgatatggcagataccattagcgaacatcaagccaagctcaatcaagaagtgttaaacaaaactcggcatcttacccaagctaaccaattgcttaaactattgtatgatttttccaatcagctcaatcaagagcctgttacattatctaagctacatcatttacttgagaatttttcaaagataaatccaagttttgggtttacattatgcttgcatgatcacctaaaattaaatgaatctagcacttcaggacctctcttgaaaaatgacactgtgcttgtgtcatctaaagatagcattagtattcacagtcactctgttgaagaattgcaaacaggcaaaaccgatcttttgtcgagtgaaatttgttctacaggcaactgcgatcaatgcgctcttaaagccagatctacgacaagaatttatccaatcagcgcccaaaacaactactggggcgagctgatggttcatcagcagtctgaagaagatgataccaccattaccaaagaacttgtacaagtgttggtaagtttagtaagcctagtattcaccatccaaaaacaacgtcagcaagagcatcaattaatacttttagaagagcggaacaccattgcccgcgaactacatgactcattggcacagtcattgtcatatctaaaaattcagctttctatgctaggtacgcacgcgcgccaactttctgacgcagctcaacaaaaccaaaatgatacgctcatggatcataatgaagccatgcttcaagttttagggcaagcacgttcagggcttgatgctgcctacattcagctgcgcgagttacttgtgacctttcgcttaaaaatagaatcgggcagttttgataatgccattgaacaggcctgtgacgaattttctgcgaaaggtggttttaatattacattagataatcggattttaagccaaaatctaagtgctaatgagcaaattgacttattacaaattattcgtgaagcattatccaatattcagcgccatgcatacgccaaagaggtaactgtcagcctttatcaaaaaacacatttagacactgaacagcgtatttatctggaaattggtgatgacggcgtgggtttaccaaagcatattgatgaacaacagcatcatggattaaaaattatgcaagagcgcacgcacagtttgggtggcgagtttgatatcagtcaaaacaccccaaagggcactttggtgcgtatttggtttttacctaaattttatgagaac

SEQ ID NO: 27172 - DNA, 906 bp, Moraxella catarrhalis
atgccagaattacccgaagttgagacaacaaaattaagcctagagccattgattggtcaaactgtcacatgcgttcaagtcaggcatccacgcttacgctatgatattgccaaagatttggatagtttggttggctttgtcctaaccaaactacagcggcgtgctaaatatttactactggatttttatcacgcacatgacagtcgccaaaaaactttactgattcatttaggcatgtcgggcagcttacaacagcatatcaatgaaccaccccgcaagcacgatcatgtcttgattgactttgccgattctcatggtaaaatcattactctacattatcatgatcctagacgctttggcatgattctttgggtcgtcaatgatgattatatcgaccagccaaacacctacgcacgatttttggcacacttagggcccgagcctttgagcgatgattttgatgctaactatctcatcagatacatcatgcgtcccaaatctcatcaaaaacctttaaataaacccatcaaatcactgattatggatcagtccgtcgtggttggtgtgggcaatatttatgcagctgaaagtttgtttttgtcaggcattcatccgctcacgcctgcctatttggttcatgaagataagctggtacgattaactcatcacatcaaacaaatattagctcgtgccattacccaaggtggttcaacccttcgggattttacagttggcagtggtaagacgggttattttcagcaaaccttgctcgtctatggcaggcaaggggaatcgtgtgccacttgcggtagtttacttgaaaatatcaaaatcagtggtcgggcaagcgtctattgtccaaactgccaaccttatcatgatcacaataacccaagcagtcaaaat

SEQ ID NO: 27173 - DNA, 614 bp, Moraxella catarrhalis
aacacgcttgagatagtacaagacagccgtaaccgttggtatgcctgcatcaccgtcaaagaataccctaaaacacaatgcggtacgggtagtgttggcatagacttaggtttaaaagacagtgcgaccacttcaaaaggtggcaaactcaccatcaaacaaaccctaaaatatgccaaagagttagccattgctcagcgtgcaggtaaaaagaagcgtgtacgggcaatctacgccaaaatcaaaaatacacgccaagacttaatccacaaattcaccacccaattagtcaaagacaatgccctaatcgtggttggtgacgttaaatcacgctcattcacgaacaagaaaaccaaactggcacaatcaacctatgatgcaggatggtttgaactcaaacgacaactggaatacaaatgcaagcatgcaggttgtcgttttgaaatcgtcaatgagaaatacactacccaaacttgctcgtgttgccgtcaaattgacagcaacagtccgaaaggtagagcaggtttgcgaataagagaatggacttgtgcaaagtgtggcacacggcatgattcagatttaacgccagtcggaacattcttgcggtcgggctt

SEQ ID NO: 27174 - DNA, 930 bp, Moraxella catarrhalis
atgacaatcaagaccttatccgaagttctagcagaaatgggcgaatcgcctgtttctgctgataatcatcaaatccaggtacttgatgaaaccaatttttatcaactcaccacaaccaagccgccaaagcttaaccgtttgccaaaaaataataccttaaaaaaaccaagccaaccaaaatctttagtgaccgcatcaagtcatgacacagccccaatcagtcatacgcccacagataaaacacaaccaccaaaagccctaaaaaaccaaaaacccaaatctttatccaaatcccaaattggcgaattattaaaacatactcaaggcggtcaagattctattgccatgcctaaaaaacttgctgacagccttagtgatgttgccattgaaccattaatacaaactgacaaggcaaccaattatttacgctggcttgcgttttattatttatcacggcgagaaatgtcacagcatgaattacaaaaaaaactgcttgccaaaggctgcgaacctcaagcggtggaggatttgttacaagaatttgctcacaaaggctatcaatcagatgaacgctttgctatgatgctcgttcgtgaaagtatccgaaaaggtcgtggaaaaaaccacattctacaagttttaaagtctgccaaagtcaacttgcctgagagtgttgatagcattgaccaactgatccagcaagctggagcagactcattgaccgatggcactattcttacttgtgatgaatcagagacggtcaattggcttaagctggctgttgaggtgcgtacacgcaaatatggagatactatcccaacaacacccaaggataaagccaagcagctgagattcttgcagtatcgaggttttgagttttgggtttgccttgaggcactgaaattatctttagcggattttcaagaagct

SEQ ID NO: 27175 - DNA, 1503 bp, Moraxella catarrhalis
atgaaaagcatgattgataccctaaatgggattatttggagccctgcactgatttacctgtgcttggcagctgggctattttattctatcttgactcgctttgtgcaactgcgtcattttaaagaaatgatccgcctgcttttttctggcaatcaatcacctgaaggcatcagctcatttcaagcgctgaccgtctctttatctggccgagttggcatgggtaatattgcaggtgttgccgctgcgattggttttggtggccctggggctgtattttggatgtgggtggttgcctttttgggtgctgctactgcatataccgaatctaccttagctcagatttataaagaaaacgaccgtggtcagtaccgtggtggtcctgcttactactttgaaaagttctttggtggtgggtttggtaaattttatggtattttagtcgccatttcattcatcatctcttgtggattattcttaccaggcgttcagtcaaatggtgttgttaaagccatcacgggcatcacaggtgaaggcactatggtaaatactgcatttggtgcggttggtacaaataccctggtggtaaccttggtcatggttcttattttaggcttaatcatttttggtggtattaagcgtatcgctcgtgtggctgaatttgttgtacctttaatggcattgggctatattttgatggccgtgctgattgttttatttaatatcaaccaactgcctaatatcatcagtctaatcgttggtgatgcctttacagcacaagcaggcttgggggctgcaattggctggggtgtgaaacgaggtgtgtattccaacgaagcaggtcaaggtacgggaccgcaccatgctggtgcagcagaggtagaacaccctgcacaacaaggcatggtacaagctttttcggtctatgttgataccctatttgtttgttcagcgactgcctttatgattttaatgactggcatgtacaacattcaaggcacactgccagaaggtcagttcttggttcaaaatgttgatgcagccaccatcatcagcggacctgcatttacacagatggctgtttctagcatttttggtagttttggtaatacctttgtggcggttgcggtatttttcttctcatttaccaccattatggcttattattatattgctgaagttaatgtggcatatttgacacgctcaattaaaacaacaggggctttatttttcatcaaactggtgcttatctttgcggttgcttatggggcaatcaataactcaggttatatttggaatatgggtgatgttggtgtcggtttaaccgcatggcttaatattgtcggtattttggcgatcttctttatggctaagcctgctattttggcactcaaagactatgaagctcaacaaaaagctggcgtaactaagtttacttttgaccccatcaaactgggtatcaaaaatgccactttctgggaagaacgcaataaaaaagaacaaaac

SEQ ID NO: 27176 - DNA, 429 bp, Moraxella catarrhalis
atgactactactatcagtgccaaacccgctgaagttgtacatgactggtatgtcgtggacgctgaaggcaaaactctgggtcgcctagcttctgagattgcttctcgtcttcgtggcaagcataagccatcgtacactccacatgttgatacaggcgattatatcgttgttatcaatgctgacaaaattgctgttactggcaaaaaagctcaggataaaaaatactatcgtcatactggctatccaggcggtattaaagaaactaacttcactaaacttcttgcacacaagcctgaagatgtgttgtttaaagctgttaaaggcatgcttccaaagggtcctttgggctatgcgatgattaaaaagctaaaactgtatgcaggcaccgaacatccacatacagctcagcaacctaaagcattagacatc

SEQ ID NO: 27177 - DNA, 1173 bp, Moraxella catarrhalis
atgtcccaattctccgataaatttcttggtttttttgataagctcaatccacgaacggtattgcttaccagtttgagcttgatcatctgtatcagccttttgatgattgcatcagcatccattccattttctgctgctcgcgatttggcatcactgaggtttttttggtatcagttggcatatgtcgtcatcggtactatgattgcaatgattgtttatcgcattcctttgagagtttattatcaacgaacgcatatcaatgtggtatttttgatgtgggtaaccgctttggggctactcatacttacagcaatgtttggtgatgtgattaatggatcgcggcgatggcttgaccttgggatatttaatctacaagctggtgaagttgccaaagctgtcatggtgtttgtaacagcagattatgtcgtgcgtcgatctgcagagctacggagcaatgtttttacaggggtgcgtctattggcatggtatttaccagtgggcggactgttgctatttcaaccagattttggtactgtcttggtactatttgccactttgattgtcatcatctttgtcagtggtgcgcctgcactacagtacgcttggattttattcatggcaatcgttttaggaggcattgcagcttggcttgagccttaccgccgtgaacgaattttatcttttaccgatgcttttgatgatattcaaggttcagattttcagctggcacgcagtttgatcgcttatggtcgtgggcaattaagcggcattggttatggggatagtgtccaaaaattatcacacctacccgaagcacacactgattttctgcttgccatcacaggagaggaacttggctttttgggtgtggcaacagttttatttttggagatgctgattattcttagcattatggtcattagcctaagagcattaaaatgccgacaacttcgcttaagttataccatttttggttttgcggtggttatatttggtcaggtcatcatcaatgctggtatgaccatgggacttgcacccaccaaaggcttaaccatgccattttttagttttggtggctcatccatggttgtgcttttgattatgattggttttattttaagagtagataaagaaagccttgagattcatgcacagcgtctcaacgataaatat

SEQ ID NO: 27178 - DNA, 990 bp, Moraxella catarrhalis
atgagcagattatcgcatttcatcgcacccactcattctagccatcaatcagatccaagctcacctgcttggggctatttatcatcttggtgtgatgagctaagactacaaaattactctaagcataccatcacaacctatcaaacagccttaatacagtttttcaattttttggagtctgataactatcttggcggcgatcctttggcttgccgtcgccaagatttaactcgattttttagcactcgcttagaagaagaaaaaataaaacccatcagtgccaagcttagcttatctgccattcggattttttatcaatttttaatcaagcaaggtgttatcgcagttaaccccacaacaggctataaaatcaaatcagcaccccgaaaactgcccactgtcgctgatgagctgctcataaagcaactgcttgaccaaaaaacgcctgaagatacagccaaagcatgtctatggataagagataaagcaatgtttgagctgatgtatagtagtggacttcgcctatctgaactggcaggcttaaatatgggcgatgttaattttgacattggcatcgtacgggtgttgggcaaaggcaacaaaactcgccaagtccctgtgggcaaaaaagccatgattgctcttcaagactacttgcctcatcgtaacttatggcaaaagaaaaattgtaaagcgttgtttatcagtgagcgtcacggcactcgtcttagcacgcgtgcgatacagcttcgcctaaaagtatgcgccaccatggcgggcattgagcttaatatgtatccgcacctattacgccactgctttgcctctcatgtactgtcatctagcggtgatctgcgtgccattcaagagatgcttggtcaccaaaatatcagcactacccaaatatacacgcatgttgattttggcacactgacgaaagtatatgaccatgcccaccctcgtgcgtatcgcacaaaaaataatcacggc

SEQ ID NO: 27179 - DNA, 135 bp, Moraxella catarrhalis
tttgataaaattactgttatcaacaaaaacattttagggtggttagctcagttggtagagcatctgccttacaagcagagggtcagcggttcgatcccgttaccacccaccatatgcagcggtagttcagttggt

SEQ ID NO: 27180 - DNA, 1347 bp, Moraxella catarrhalis
atgaatactttgccattattttttaacctaaataacaaaaccgtgctgattgtcggtgggggcgatatcgcctaccgaaaagcacaattaatggcaaaggctaaagcaaagcttgtggtgattgcgaaacattttgaggctgaatttttggattttttacagtctcatcatcatgtattttttcaaaaatcctttgaaccaatcgatcttaatcagcatacacccactttagtgatcggtgcaaccgatgaccatgaagtaaatttggtcattcatcgtgcatcaaaagcgtatggtgtgccggttaatattgtcgatacgccagatttgtgtgattatatttttcctgctattgtagatagaaacccaatcgtgattggtgtatccagtaatggcaaagcgcctgtacttgcacgcttgattagagccaaaattgaatcatcattgcccagtcgcttaggagagcttgcagacaaagcaggtaaatttcgagataccatcaaaaactctctacccaccatcactgaacgccgatatttttgggagtcaatttttgatcgtgccttaaaagatgaaacaattggcacactcagcgatgagcttaatcaatttaaaaatcatgatacccgcttgggtgaggtctatattgtgggtgcaggggcaggcgatccagatttattgacttttaaggcactcaggctcatgcaacaagcagatatcgtactttatgacgcactggtatcaaatgacattttagagctttgtcgccgtgatagccaaaagatttttgtgggcaaaaaaagaaaagatcacaccaaaactcaagatgaaatcaaccaactattagttgattatgccaaacaggggcatcgggtattacgcctaaaaggtggtgatccatttgtctttgggcgaggcggtgaagagatgctcgcctgccaagctgcccatataccctatcaggtggtcagtgggattacagctgcgttggcggcaagcagttatgcaggcataccactcacacaccgtggtatcgcaacttctgtacgatttttgacgggttgttatcaaacaaatgagccgtttaatggtctaaatagtacttaccaaactgatgagactttggtgttttatatgggtctgcacgcactgactaaaattattgattctttaatcagtgctggcctgccaaatgatttacccatcgccatcatctcaaatgccagcctacccacccagcaggtgctaacaggtacactgacagatattattgataaaaagcatcaatccaatcttattgcacctgccattattattgtcggtcatgtggtcgatttgtatcagcca

SEQ ID NO: 27181 - DNA, 789 bp, Moraxella catarrhalis
gtgcttgttatttttttactgtgtctgatactttatataggatcaggtctttatttggcatatgccttatttcaagatacaccgattcatcggttggtgcttggcatattgatttttgccatcttattacatggttgggtgttgacacctgaaatcatcacgctctacggactaaactttaacttatttaacacgctaagcttaactagcctattttttgtactattttatgtattatttggtctgtatcgcccaattttaagcttagggattttggcggtgccgatggcagcggttggggtgagtttgggctattttggtcaagtagcttacaaaccacttacggatttatcaaacactctacaaatccacattttgctatcatttgctgcgtattgtgtgctactgatggcagccgttcaaggggtgctattacgcttacaaattcgtgagcttaaacgcaaaaccattcatcgcttttgggtcagccgcctgccgtctttacagagcatggagagtcttttgtttgatatggtgctgactggatttgtgattttgagtatcgcacttgggtttggtctggttgcaacttatgacatcttagatcaacatttggcacataagatggtatttagcttgctgagctggctattatatgggcttttgattgctggtcattatcgctacggctggcggggtaagcgtgccgcaaattttgcggtatatggatttttattgctggcgatcggttttgtcggctcaaaggcagtgatggaatttttaatcggc

SEQ ID NO: 27182 - DNA, 1548 bp, Moraxella catarrhalis
atggcaaaatctcggctctttcgctccaccgtcattgtcagttccatgaccatgctttctcgtattttaggtttaatcagagacatggttttgatgagtgtttttggtgctggtgggttgatggatgcgtttttagttgcctttaaaatccccaattttttacgccgcctgtttgccgaaggggcattttcccaagcctttgttcctgtattaactgagtacaaagaagcacgcactttaactgaggtgcaactgctgattgctcgtgtctctggcgtattatccttggtgctacttgtattgacggtggcggttatctttttggcacctcaagtggtgtatttattcgcaccaggttttgccgatgacccccaaaagtttgacactaccgccaagctgttacgcttgactttcccttatttattattcgtctccatgacggcattttttggtagcattctacaaagttatggaagatttgcagcacccgcctttgctcctgtattactaaatctttgtatgattggcggtacattaatattagcaccaatgcttgataagccaatcatggcattgggttatgctgtcgccatttcaggcattttgcagctgctcatacagttgccacagctttggcaacaaaaactgcttattccacccagtattagctttaaagatgaaggcgttaggcgtattttaaagctcatgctgcctgccatttttggggtatccgtcacccagattaacttattattaagcaccgtatttgcctcattaatgattgcaggttcagtatcatggatgtatgctgccgaacgcttaagtgaattgccattaggactcattggtgtggcgattggtacggtgattttaccaagcctatcatcaagtcgtgccaagtcagatgatgaaaattttcgccaaacgctagactgggctgcccgcttaattcttgtcatcggtataccagccagtcttgcgatatttgttttatcagatattttgatggatgctttgtttgtgcgtggtcaatttacccaccaagatgccttgatgagtggtattgctctaaagtctttatcaggagggatcttaggatttatgctcattaaaatttttgcacctgcattttttgcaaatcaagacaccaaaacgcctgttaaaattggcatcatttcagtatttgctaatatgatttttagcgtcgtatttattgggctattttatttaatgaaactgcctttacatggtggattggccttggcaaccacagcagcaagttttgttaacgcaggtctactctatgccgttttacatcgccgtggtatctatcgttttggtactcactggaaaaagatgatacgacaatttgtgattgccaatattgccatggtgattagcttatctgtcattttgcccttatatccaattgatgctaatcactggctcaaaattgccatcttgctgggcatatgcggttttggggcaatcatttatggtatcacactactcatcactggttttcgcccaagtcagcttaagcatggt

SEQ ID NO: 27183 - DNA, 1933 bp, Moraxella catarrhalis
ttgagcgacatggtgaagaataccttattgtggctggcgatcatcggtatcgtggttgtgatttttagcaatcttgatagcggtaaagctgatgccgatatgatgaattattcggcatttgtgaccgcagtgtcacaaggcgaaattaaagatgtaaaaatcagtggcgaagagattactggcactaaagtcaatggttctgaatttgagacagtacgccctgaaattactgacaatgaattgatgccactactgcgtgagcataatgttgaagttcaaggtacactacctgaacgccaaggcattggcatgcagcttctgatggcagcattcccaattctcttaattgtcggtttgttttggcttatcatgcgaggcatgagcggcggcggtgctggtggcggcatgggtggtcgtaacccaatgagttttggtaaatccaaagccaaaatgctgtcagaagatcaagtcaaggtgacttttgctgatgtggctggcgttgaagaatccaagcaggaagttgccgagattgttgatttcttaagagatccaagcaaatttactaagttgggtgcaacattcctcgtggtgttttaatggttggccctccagggacgggtaaaactttgctagccaaggcaatcgcaggtgaagccaaagtaccgttttttagtatctcaggttcagacttcgttgagatgtttgttggggtgggtgcaagccgtgtacgtgatatgtttgaacaagccaaaaaaaatgcaccttgcatcatctttattgatgagattgatgctgtgggtcgtcatcgtggttcaggcatgggcggtggtcatgatgagcgtgaacaaaccctaaaccaactgctggttgagatggatggctttgaaggtaatgatggcgtcattgtcattgctgctacaaaccgtgtcgatgttttagataaggcgttgtacgccctggtcgttttgaccgtcaagtctcagttggcttgcctgacatcaaaggccgtgagcaaattttgatggtgcatttaaaaaaattacctgcgaccatcggcgtggatatcaatgctttggcacgaggtacgcctggatttagcggtgctcagcttgccaatttagtcaatgaagccgccttatttgctgcccgccgaaataaagacagcgttgatatgcatgactttgaggatgccaaagataagctgtttatgggacctgaacgcaaatcgatggtacttcgtgaagaagaacgccgtgcaacagcgtaccatgaagcagggcatgcattggtggcagagctgttacctggtacggaccctgtacataaagttaccatcatgcctcgtggttgggctttgggtgtgacttggcaattgcctgaacaagatgcgatcagcaattataaagataaaatgcttaatgaaatctccattttgtttggtgggcgtatcgccgaagaaatctttgtaaaccgcaaatcaactggcgcatctaatgactttgagcgcgctaccaagcttgcccgtgccatggtaactcgctacggcatgtcagatgagttgggggtgatggtctatgaagcagaagagcatggcggttattttggcggcagcacccgcacaatctcagaggcaacacagcaaaaagttgatgacgaaattcgccatatcttggaagctcagtatggtgttgcttatcagctcattgatgaaaatcatgacaaaatgcatgccatggttgaagcacttatgaagtgggaaaccatcgatcgtgagcagctattacaaattatggcaggtgagacacctcgtgaacccaagaactatcagcacatcgtgcagacacctgtggcagccgaagaacctgccgatgacgatactttaccgccgccattgccagtgtgatagcctgattaaaatcatgagcaaaatctc

SEQ ID NO: 27184 - DNA, 330 bp, Moraxella catarrhalis
atgaatattcaagcattaatgcaacaagcccaagccatgcaaaaacaagttgaaaaaaatgttgaagctgccaaagcaagtcttgcaaccaaggaagtgcaaggcgaagcaggcaatggcttggtcaaagttaccatgacaggtcgccatgtcgttaagcgtttagccattgacccaagtctaatggatgatgagcctgacatgatagaagatttggtagctgccgcaattaatgatgcggtgcgtcaagcagatgaactgtatgaagaggtgatggctggtgcgacaactggcatgggtctgccacctagtatgaaaggcttgtttggc

SEQ ID NO: 27185 - DNA, 549 bp, Moraxella catarrhalis
atgtcaaccgcattgcaggcttacccaagccaccaaattgtttataattacttaatattaggatttactatgagtggattttgcaccctaaatatcgcctctactgatttgaccatgacagtattgatgacacccgatatggcgaacttttcaggtaatgtgcatggcggtactatcttaaagctgcttgaccaagtcgcctatgcgtgtgccagtcgttatgctggtggctatgtagtgacactatcggttgaccaagtgatttttaaagagccgatttatgttggtgagctggtaacttttttggcgcgtattaaccatgtcggcaccacttcgatggaagtgggcatacgcgtagaagcagaaaatatccaaactcgcacagcacgtcataccaacagttgttattttagcatggtggctgtcgaccaagcgggtaagcctgtgcctgtaccacctttggttgtggatgattctcttgccaaacaacgctacgaaatggcaaaaaagcgtaaagagttacgcataaagcttcagcaacacgactgg

SEQ ID NO: 27186 - DNA, 645 bp, Moraxella catarrhalis
atgaccacttctttaaatattcatgtcattgatcacccgcttgtccgtcataaactgtcgatcatgcgtgaaaaagaaaccagcacttataaatttcgcacgctaaccaatgagcttgggcgactgatggcgtacgaagcgagccgtgattttgagattgaaagctttagcatgcaaggctggtgtggtgaaattacaggcgagcagattaaaggtaaaactgtcaccattgtaccaattttacgcgcaggcttgggcatgcttgatggtgtacttgatctattaccaactgccaaaatctctgtcgttggacttcagcgagatgaaatgacactagaacctgtgcctttttttgagaaatttgtcagtgatattgaccgtcgccctgcattaattttggatccgatgttggcaacagggggcagtatgatcgctacgattgatatgcttaaaaaacatggctgtactaacatcaaagcattggtattggtcgcagcacccgaaggtgtgcgcttagtcaacgaggcacaccccgatgtcaaaatctataccgctgctttagacagccatcttaatgaaaacggctacatcattccaggtcttggtgatgctggtgataaaatctttggcaccaaacagattggt

SEQ ID NO: 27187 - DNA, 1133 bp, Moraxella catarrhalis
  misc_feature (625)..(625): n=g, a, t or c
gttggtttggttgggtggcgtggcatggttggctcagttttgatgagtcgcatggttgaagaaggcgattttcagcacattacgcctgtatttttttcaaccagcaatgctggtggtcaagcaccaagttttgatggtgtggacggcggtacgctcaaagatgcaactgatatcctagagttatctcgatgcgatgccatcatcacctgccaaggcggtgattatacaaagcaagtacacagtgcattgcgagatagtgggtggcatggctattggattgatgcagccagtagcctgcgtatgcaagaagatgccatcatcattctagaccccatcaatcgtgatgtcattgataaggcacttgctgatggtaaaaaagactttattggcggcaactgtacagtcagcctaatgctgatggcaattggcgagctattccgtcgtggttgggttgagtgggtatctgccatgacctatcaagccgcttcaggtgctggtgcgaataacatgcgtgaactcatcaaaggcatgggtgttctgcgtgattcggtgtcagatcagcttgatgaccccgcctcagccatccttgagattgatagaactattgctgatacacagcgtagancgattttcccaagcagcattttggtgctgtactggcaggcagtttaattccttacattgacagtcagctagataatggtcaatctcgtgaagaatggaaagctcaagctgaaaccaataaaatcttaggtaaatcagctgatgaaaccatcaatatcgatggtatttgtgtgcgtatcggtgccatgcgatgccacagccaagcacttaccatcaagctcaccaaagacattcccttggcagagattacaactgcactgcgtgaaagcaacaatccatggcttgatgttgttgaaaatgataaagccgccagcccaaatttggaaggaagggccggattacttgaacaccctgtggctgttacaggtacgctaaatgttgctgtgggtcgtctgcgtaaactgaatatgggcggcgaatacttgaccgcatttacagtcggtgatcagctactttggggtgctgctgagcctttgcgtcgtatgcttgccatcctgcaaggtcgtatc

SEQ ID NO: 27188 - DNA, 1836 bp, Moraxella catarrhalis
atgtgcggtatcgttggtgccattcggacacatcacaatgtggtagattttttaacagatgggctaaaacgcttagaatatcgtggctatgactcatcaggcatcgctgtgcaaaccgaatcaggcatccgccgtgtacgccgtgtggggcgggttgcactgatggaagaagctgccaaacaaaaacaaattcatggtctgacaggtatcggtcatacccgctgggcaacccatggcggtgttaccaaacccaacgcccacccacacatttcagcagggcttatctcggttgtacataatgggattattgaaaattttgagaccgaacgcacacgccttcagcacttggattatgaatttgaatcacaaactgataccgaggttatcgctcacagtgtacatcaagaatataccaccaatggcggtgatttataccatgccgtccaaacagcttgctcaagatttcatggtgcttatgccatcgcagttatcgctaatgatgcaccaaatcaaatggtcatcgcacgcatggggtgcccgctgttagttgcatttggcgataatgaggtttttgttgcgtctgatgtctcagcagtcattgcctttactcgccgtgtcacttatctagaagatggcgatattgccctacttcaagctgatggtatccaaaaactacttgataaagacggcaatcaggtcaatcgcagcattaaaacctctgagatgtctttagcatccttggagcttggtccttatagccactttatgcaaaaagaaatcaatgaacagccacgagcagtttctgacactgccgaaatttttttagaaggtggatttgttgctgataacttcggtgaagaggcgcctgaaatctttgccaaaattcaaagtattaaaattttggcgtgcggtacttcatattatgcagcactcactggcaaacattatcttgaaagtattgccaaaatccgttgcgatgttgaaattgccagtgaataccgttaccgtgatgtcatctcagaccccgacgagctggtcattaccatcagccaatcaggtgaaactttagataccatggaagcacttaaatatgccatggcacaaggtcatcgctacagcttgtccatttgcaatgtcatggaatcggccttgccacgcaccagtacacttgccatcttcacgcgtgctggtgctgagattggcgtggcatccaccaaggcattcaccacacagctggtggtgttatttggtcttgcggtcactttaggtatcttgcgtggtcatgtggatgaatcacaggcacaagactacgccgaggatttgcggttattaccaggcagtatccaacatgccctaaacttagaaccacaacttgcatcatgggcgcaaagttttgccaacaagccaagtgctttatttttaggtcgtggtattcattatccgattgcccttgaaggtgctttaaaattaaaagaactcacctacattcatgctgaggcttatcctgctggagagcttaagcacggtcctttggcactggttgatgaaaacatgcccgtcgtcgtcatatcacccaatgatggactacttgataaagtcaaagccaatatgcaagaggtctctgctcgtggtggtgagttatttgtattatctgatttggatagtgattatactgccagcgaaggcattcatatcattcgcacaccacgccatatcggtacactatcgccgattgtgcataccatccctgtgcaattattggcatatcatgtggcactggtcaaaggcacggatgtggataagcccagaaatcttgccaagtcagtcacagttgag

SEQ ID NO: 27189 - DNA, 1692 bp, Moraxella catarrhalis
gatgctcacacgcctgaacatgcaacgggactgaccgaacaacagcaggtgattgcaagtgattttatggtagcatcagccaatccattagtaactcaagcaggctatgatatcttaaaataaggcggtagtgctgcagatgcgatggtggcggtgcagacgacactaagcctagtagagccacagtcgtcaggcttgggcggtggtgcatttgtgttgtattgggataataccgccaaaacattgaccacatttgatgggcgtgagacggcaccgatgcgtgcgacgccagagttatttttggataaagatggccagccattaaaatttatggaagcgttggtcggtggtcgctcggtgggtacgcctgctatccctaaactgatggagataatacacagcgatacggtgtatggccttggggaaaattatttgatacgccgatccgcttggcaaaacaaggctttgaggtgtcgccaaggcttgccatctcggttgagcaaaattggcagcatttggcacgctatccaaaaacagccgcttattttttgccgaatgatgtgccgctacaagcaggcagcttgctgaaaaatttagaatttgctgacagtgttcaggcgttagcagttcaaggtgcaaaaagctctgcatactggtaaatatgcccaaaatatcgtttcggttgtccaaaatgctaaggataaccccggtcaattatccttacaagatttatctgattatcaagtggtggaacgcccacctgtttgtgtgacttatcgtatttatgaagtatgcggtatgagtgcaccaagctcagggattgctgtgggtcagattttggggattttaaatgaattttcacccaatcaggtggggtgtgatgctgaaggcttgcgtctcttgggcgatgcttctaggcttgcgtttgcggatcgtgatgtatatttgggcgaccctgattttgtacctgtacccattcgccagttgatttccaaagacgacctaaaacatcgcagccagctgcttaagcagtcggataaggcactgcctagcgtatctgcaggtgattttattcatgagtgggtatcctcacaagcgattgagttaccttctaccagtcatatctcaattgtggataaggcgggtaatgtgctatcaatgacgacttccattgaaaatgcgtttggctcaactttgatggcaaatggttactggctcaactttgatggcaaatggctacctgctgaataatgagctgacagactttagttttgagccaataaagcagggcaaacaggtcgccaatcatgtcgagcctggtaagagaccacgctcctcaatggcaccaaccatcgtatttaaagcaggcaagccttatatggcaatcggctccccaggtggtagccgaatcattggctatgtcgctaagacgattgtgggcatcgtgactggaatatggatatccaagatgccatcagtgcacccaatttattaaatcgttttggtagctatgaattagagatggatacaaccgccgtccaatggcaacacgcattaaatgatttgggctataagactgatgtgcgtaagctaaattcaggtgttcaagccattattatcgagccaagcaggctggttggcagtgccgatccacgccgagaaggtcgagtgatgggtgattagaggtgaagc

SEQ ID NO: 27190 - DNA, 132 bp, Moraxella catarrhalis
atgaagcgtacatttcaaccaagcgttttaaagcgtaaacgcactcatggtttccgtgctcgcatggcaaccaaaaaaggccgtcaagttttggcacgtcgccgtgctaaaggtcgtcatcgtttgactgtg

SEQ ID NO: 27191 - DNA, 792 bp, Moraxella catarrhalis
atgatgaataccaataccaaaccccaccccaaaaccgaattatgtgatgcagaactgatgcgttatagtcgtcaaattttattagacggatgggatattgaatcacaacttaaaattaagcaatcatccgtttcactaattggaatgggcggtttaggttgtatggttgctccgattttagtgagagcgggtgtgggtgaagtgcatttatttgattttgataccatagatgacagtaatttacaaagacagctgttgtacactcaagcagatattggtttaccaaaagcacaaatagctaaacaagcactgatagaacaaaactcttgggctgcagtccatagtcataatattgcactcaatgatgatactataaaagaaaacttaatatctattaaatcagacttatggattgattgcagtgataatttcgatattcgtcaaacacttaaccgccattcgatcataaccagtacagccctactttcattgtccgccattggcgaaactgggcaagttgcactttttgagccaaaaaaaacaggctgctatgcatgtttatttggtacttcaatgagggcagcccaaaactgtgcaacttctggtgtcttagcaagtacggtggcggtgatcggtgcacttggtgctgacatcgccttacattttctcggtaaagatcaaaataccttaaaagatacgctgatggtatggcaaggttctcgtgccaattttcaaaaaatgaagtttaccaaaaacccctcctgccctatttgtcaaaaatctatcgcgcta

SEQ ID NO: 27192 - DNA, 831 bp, Moraxella catarrhalis
atgcctaacatcaccaacaaccatacctttaatatcgttcaattatccgatctacacctgacgggggacattggtcaagcccccagttatcagcgatttttggcagtttttcagacagcaaagcatctaaacccggatttatggcttttgacaggtgatttggtgaatgatggtaatagcgatgcttatgattggttatttaatcagctacaagcaaccaaaataccctatttggctgtcgctggcaatcatgatgtgacacacgaaattggcattcatttggcacaccaagagcggatacatgtgccgattttacccgatcgacgcctaaaaaattgctttcggtatacttttcaagcagggcatgattggcaaattttattactaaattccagtgtatcaggcgaaatatttgggttattaactcatgaaacactactttggcttgatcaaactttaaccactcactctgaacaaaccatcatcgccctacaccaccaccccacaaaggtcagttcagattggatagatgctcatctactcaaaaatcatcaagatttttggtgcgtgattaaaaaacacgctcatgttcacacgattttgtgcggacatgtacatcaagtacatacgctgcatccactaccagcacatcaggttcagttgctaagctgcccttcaacagaccgtcaattcatgccttttgtggataattttcaaattgctgacacgcctgctggctgccgtatgatacagattgacaacaaaggcatcgtatcaagttacatacaaattgtgcaaaatacgcattcattttgtcttaataatgcaaat

SEQ ID NO: 27193 - DNA, 921 bp, Moraxella catarrhalis
atgagcgtacgccattttcgtaatcttttagatatgacgcctgccgagcttgaggctatcatcagtcgtgcaagcaagctgcgtcaaatgcagcagtgtggcgagatttatcgtccgtttgtggggcgtacgcttggcatgatttttgaaaaatcctcaactcgcacacgcatctcttttgaggctggtatgggtcaatttggtggtcatgccatctttttatcgccaaaagatacacagcttggtcgaggcgagcctatcgaagactccgccaaggtgatttcaagtatggttgatatcatcatgattcgcacttttgagcatgacaagctggatttattttgcaagcattcgtctgtacctgtgattaatgcgttgactgatgattttcatccgtgccagttgcttgctgatatgcagacctttcatgaacatcgaggcagcatcaaaggcaaaactgtcacttgggtcggtgatggtaataatatgtgtgcctcttatattttggcagctcatcaattcggctttcagttgcgtgtgacagcaccatatggatttgagccgaatcctaagctcatcgaagagtatagccactgcgtcacttatgttgaagaccctcaagaggctgccaaaggggcacatctgattacaactgatgtatgggcgagtatgggtcaagaatctgaacaaatgacgcgtgcacgccgatttgctccttatcaggttagccctgccatgcttgataaggctgatcctgatgttttgttcatgcactgcttgcctgcccatcgtggcgaagaaatcagctttgatctgttgaacgacccacgctctgtggtttgggatgaagccgaaaaccgactgcacacccaaaaagcactgatggaatttcttcttaaagataaaattaatttaagttca

SEQ ID NO: 27194 - DNA, 789 bp, Moraxella catarrhalis
atgcaacattttatcgttattggtaatcctatcgatcactcaaaaagtccacaaatccataccgcctttgcacgcagtgtcgggctgcctgtgagctatcaaaaacaatattgtcccaatgacgcagacagctttaccgccgttgtgtctgctttttttgctgggggcggtgtgggagcaaatattaccctgccctttaaagaaatggcatttgagatgattaaatcaaacggacgcctcagtacgcatgcccttgctgcaggtgcggtaaataccattttacaagaccaacaaggtctgtatggtgataacactgacggtcgtgggttggttgcagatttgtacgcacaggcaatcgagctggataataaaaaaattgctcttatcggtgcaggtggtgcggcacggggcgtcattttaccgctgctagaagcgggtgcacacatcagtatttttaatcgtacttttttgaaagcaacaaatttggtgaatgaatttcagtccgataaactcagcgctcattcacttgatgagctaaagactggtggtaaatttgatgtgattattaatgccacttctgccacaacaataggacaaatacttgatttgggcgactgctcagcaaattttgcctatgacatgatgtatggcaaaccatcagaatttttaacacattttaaacaacaaggtgctgatatctctgatggttttggtatgctaatccagcaagcaaaactgtcttttgaacaatggacgggcaaaacaatcgacttatcccaagtgcaattt

SEQ ID NO: 27195 - DNA, 1398 bp, Moraxella catarrhalis
atgtcaaaaaaatatgccgtcgtcggtttgggcagctctggactgtcagctgtgaattttttggtcaatcacggtcacaaagttagcatcatcgatggtaatcccaatcctaccttggcagataaactgcccacaggcgttcattgtcattttggcagcttggacagtgaactcttaagctcagccgatcagatcatcatcagccccggcattaacccaagaacgccgagtattgtcgccgccaaagctcaaggcattcctgtgatcagcgatgttcaattgttcattgatacactcaaagcacgagatctaactcaagcaacaaacacaccaatcatcgccatcacaggctcaaatgccaaaagcactgttacgacattagtaggcgagatggcaaaacatgcaggcatgattgttggtgtcggcggtaatattggcacgcctgcacttgaattattaacgatccaaaatatggatttggtggtgcttgagctgtcaagttttcagcttgagcatatctcaaatttggcagctcaaggggcaacaattttaaatctctccgctgatcatcttgatcggcacgatggcatggtggattatttggcacaaaaattgcgtatttttgaaaattgccaaaccgccatcatctaccaagacgatgccaatttagccaagcaatgcttgaccacactgacaagcgttgccccaaatcacaccattatcacaacaaatagcttacttagccaccaaacggcagatttttatttatttgatgatggtgatggtatggcattatatcatcaaaaaaacaaacttttaccaatccatcaattaaaaatcaaaggcaagcataacctactcaatgccttatctgcacttgccttaggcacagctgccaatcttcccatggatgccatgcttgatacccttaagactttcaaagggctaccgcatcgctgtgaatatattgatgatattgatagcaaggcatattttaatgattcaaaaggtacaaacatcggctcaaccattgcagcaattgatgggcttggcacggtttatggcatatcatcactggcattgattttgggtgggcttggtaaaggtcaagattttagtgagctgtcagcatatgttatgcagtgggtggatagtgtgtatttaatcggtcaagatgccccgataattgagcaagatttactcaaaggtgatgcacatttggcatctaaaatatatcaggttggtacacttgatcgggcagtattggcagccagtcaaagcaccgctagggctgtgcttttgtcacctgcttgtgctagcatggatcaatttaaaaattataatgagcgaggtgataagtttgttaacatggttcacgctttagcccatgcacccatt

SEQ ID NO: 27196 - DNA, 864 bp, Moraxella catarrhalis
atgtatgtccacacgcccacacctgctcaacaagaaaaacagtcaaatatccgaagtgctttttttatttctgatgggacagcgatcaccgctgaaaccttgggaaaatcattgctaagtcagtttagcgatgtggaatttgacattcaggtcattccttatgttgatacgccacttttagcgcgtgaagccgttcaacgcattaataacgcttatcaatccagcaatctacgccctttggtatttgataccattgtctcggatgatattcgtgaaattatcaatgctgccgatgcacacaatttagacatctatgaaggtttaatcaatcgtatcgccaccgaaatcaaccacaaacccaaccctcatactggcatggcacatagcagagttgattcagatgattataaggcacgcattgatgcggtgcattttgcacttgataatgatgatggggctcgtaccaaccactatgacggtgctgatattattttgattggtttatcacgctcaggcaaaacaccaacttctttatacttagcactacaatatggcatccgtgccgccaactaccctttaactgaagaagacttagacaccagtcaattgccaagagtgctaaaaccatatcaccataagctttttggtttgaccattgatacagaacgcctagtacgcatccgccaagaacgcaaagctggtagtcgctatgcaagtttggcacaatgtcaagaagaacaaagggccattcaagccatttatagtcaccaaaaaatccccagtttgaatgtctctgaaatgtctgttgaggagattgccacccgtattttacaaattacaggcctaaagcggcggattggtgtt

SEQ ID NO: 27197 - DNA, 909 bp, Moraxella catarrhalis
gtgttgggcattggtgatgactgtgccatcagcaacattccctcaaacagtcagctggtcagctgtgtggatacgctggtggcaggacggcattttgtccatgagaccagcccccacgccatcgcttataaatcggtggcggtcaatctgtccgaccttgccagcatgggagcgacgccttatgccattttggtgggcttatccttaccaaagtccatggcaaatgacgacttttgtcaggcatttgcagggggtttggcggctgcttgcacaccgtttgggatagagctgattgggggagacaccacaagctcacccattttaacgatttcagtaacggcacttggatttgtgccacatgggcaggcaatcacacgccaaggggcatgcgtgggcgatgtggtgtgtgtcagtggtacggtggggctggcaagccttgctttgcatgggattttggacgatttacatggagacggacacgccaaccgaccgccaaagagcttgcctgaaaaattacgccaagccatgcaataccccgccccacaagtggcacttggcaggcagctcatcggctttgcaaatagcatgatagacatctcggacggtttggggcaggatttggggcatatcttaaccgcttcaaatgtcggtgcggtgattgaccttgatgccatacccagtgatgccttgcttgatgccttgccccatgcccaaaaatggcaacatcaaatcaatgggggcgatgattatcagttgtgcttgaccatgacaaaagcaaattttaaacaatttaatcaatcatatccaaacagcatctttgccattggtgaaatcgtggcacagcaagggttaacattgatgaatcatcatcaaaaagtggatttaacagtacaagggtgggagcatttt

SEQ ID NO: 27198 - DNA, 762 bp, Moraxella catarrhalis
atgacagcaaccatcaaatcagccatcaaacctttattcatcgccatgatggtcatgggggcaacatcagcccatgcagaccttaccgtgtatgccgctgccagcatgaccaatgctgttgaagacatcaataagttgtatgaaaaaaaatacaacagcaaagtaaaaacttcctttgccgcctcatctacccttgccaaacaaattgagcaaggtgcgcctgctgacatttatatctcggcaaacacctcttggatggattatcttgccaaaaaagataagattgttagcagcagctacaaaaacctattgggcaaccgcttggtgatgattacccccaaaaacaaccccatcaagaccaacatcaaaatagacaaatcctttgacatcggtaatgcctttacaggcaagctatgcactggcaacaccgccagcgtgcctgtgggcaaatacgccaaagaagccctaaccaacctaggttggtgggacaccatcgggccacgtttggtagagaccgaagatgtgcgtgctgcactaaactttgtgaaccgtggtgaatgccagttgggcattgtctatgccacagatgccaaagtggtcaaaaatgtgcaagtgattaacacctttccaatcaccacacacacgccgattgtctaccccatcagcatggttaagcaaagtcgtgaagcccagcagtattataactttttacagaccaaagaagccaaagcggtttatcgcaaatatggttttagtgtattg

SEQ ID NO: 27199 - DNA, 3282 bp, Moraxella catarrhalis
atgactgagtccattgactacaagaacaccctaaatcttgccgataccacttttgccatgcgaggagaccttgctaagcgtgagccactttggttggaacaatgggaaaaagacgatgtttatgggcaaattcgtcaggctcgccaaggccgcaaaacctatattctacatgacggccccccttatgctaatgggcaaattcacttaggccatgtggttaataaagtcctaaaagatattatcatcaagtataaaaccttggatggttatgacgccccttatgtccctggttgggactgccatggtctgcccattgagcaaaaagtagagcaaaaaattggtaaagtcggacaaaaggtcaatgcaacaaagtttcgtgaagcgtgccgagagtatgccaaaagtcaggtgcaactacaaatggcagattttaaacgcttgggtgtgcttggcgattgggacaatccttatttgaccatgaattaccaacaagaagccaatatcgtgcgagcattgggaaagatttatgacaacggtcatatcgtgcgtggcatgaaacctgtcaactggtgcttagattgtggttctgccttagctgaggcggaggttgaataccaagacaaaacctcagatgccatctatgttggctttgatattgtcaatcgtgaaaacctacccatcatcgccaatatcagtggcacgcttcaagccgtcatttggacaacaaccccatggacactgcctgccaaccaagcaatctcggtacatggcgattttgattatgccgtcattaagggcaaaaaaacccccatctttgcactaccaagccaaattgacagtaaaaattttaccctaagaaccctaaccaaagccgataagcaggcactacaagcgtgtgcatccgaccctgccatttggcaatttatgccaaccaaacgacacctgccagaggtgtttgaaccattttttgaacaagcagtgaaagataaagcctatgccattattgataagcgaactggcaatatcatcggcacaacccgtttttgtcatgacaatgccaaagatgataccatcggtattggttttaccttcatcacacccgaattttggggcaaaggggtaaatgatgagattaaacacaccttattaaaccacgcctttaaatacagaaatgccgtctgttttcagatacatgaaggcaatgaccgctccaaaaaagcggtagaaaaattgggggcagtttatcaaaaagatgtagaaaatgactttggtaaaatgtgggtctataccatcacaaacccaagcaccatcaatcacaccgcccattttatcgtggcaaatgatttggtggcggattttagcaaaaatgtggcacttgatgatgttgagacaatcacaaccatcaaaggggcggatttgaccgtcttaaacgcccaacacccccttatcagcgaacgccaagtacccatcatcacaggcgagcatgttaccgctgacagtggtacagggttggtgcataccgctcctgctcatggtgtggacgactatattgtgggcaacaaatacaatttacctgttgaaaaccccgtcagtgatgcaggcgtgtatttggacaatgccaaggtttttgtgggtgaacacatctacaaagcgcagcctaagattatcgagactttggggtcaagcggacacttgcttgaccacaaaaaaatccgccacagttatccacactgctggcgacacaaaacccccattatttttcgtgccacgccccagtggttcatcagcatggaacaaaacggacttcgccaaaaagccctaaacgatattaaaaatatcacatggacaccagcatggggtcaaaaccgcattgaagccatgattgatggtcgccctgactggtgtatctcacgccaacgcacatggggtgtgccgattaccttttttatccacaaagaaacagaccaattgcacccacgcacctccgagcttattgaaaaagccgcccaaatcattgaaaaaggcggtattgaagcatggtttgatgctgacattagcgactttttgggtgatgagagcggtgagtattacaaagtaaccgacacactggatgtgtggtttgattcaggtgcaaccaattttgctgtcctaaatcaccgcaaagagctatccaaccctgctgatttatatttagaaggctcagatcagcatcgtggctggtttcagtcatcgttactggtcagtgaatctatttatggtcgcccaccttataaacaagttttaacgcatggctttactgttgatgccaaaggccataaattatccaaatccaaaggcaataccaaaggttttgaaccatcagatattgccaataaaatgggtgtggatattttgcgtctgtgggtaggttcgtcagattatcgctacgagatggctgtatctaaagaaggctttgaccgtacaaccgatatgtatcgccgcattcgtaataccattcgctttttacttgctaatacggatgactttgaccccaaaaccgatatggtatcaacagataaactcatcagtttggataaatatatcttatatcgcaccaaacatatccaacaagagattatccaagcttatcatagcatggattttcatcaagtttgccaaacggttatgggattttgttcccaagacttgggcgggttttatcttgatattatcaaagaccgcacttataccaccaaggcagatggtctgccacggcgttcagctcaaacaactttatatcacattgcccatgctttattgcgttggattgctcctgttttatcatttactgcccaagaagcttggcaggttttaaaagatacacaaggctatatttttaccgctgaatggtaccagttaccagactttcagatgaatgatatcagtcacgaagattgggataaagttgccttaatcaaagatacggtgaataagtccatcgagcaagcacgcagtgataaaattgtcagcagtaatctgaccgccaaagttaccattaccgctccacaagatatcactgatatcttaaataagtttggtgatgaactacgctttgtattcatcacctctgatgcaaccgtgagatctggtgatacgctgtctacaaccatcacgcctgctgatggcacaaaatgcgtccgctgctggcatgttcgtactgatgttggtacacacgccgagcatcctgagatttgtggtcgttgtgtgcagaatttagatgatggggagatgcgtttgtatgcc

SEQ ID NO: 27200 - DNA, 1083 bp, Moraxella catarrhalis
atgaaaaactctttattattccaaccggcgcagccagcccaccaagcgacggattgttttgacacggtattttatggcaatgagtttaccctagcaacatccaactcaacagaaaaattgactgataactttcagcgtaaactaacctatcttagactttctatcactgatttttgtaattttcgttgtaattattgtctacctaatggctatcaaggcaaacgtcctaataacgagctgacacaacaagaaattgctactttattggcaggatttgctgctcttggcaccaccaaagttcgtctgacagggggtgagccatctatacgccatgatttgcctgacttgatcagactcatcaaaaatacagagggtatcaagaccgcgtgtatcagctccaatggctataaattaggcaaacatctatccgcttggcatgatgcaggcttagataaattaaatctaagtattgacagttttaatcccacaacatttcataaaattacaggatatgatggcttgcctactctacttcgtgatattgataaactcttatactcaactagcatcaccttaaagctcaacggcattttgatggcacataccgcctatgacaatcttatggcagcactggactttgtcaaagatcgccccattacttaccgtttcattgaatttatgcaaacatcagataatagccaactgttttttgccgaacatactagcagtcagcatatcaaaacctatttaatcaagcacggttggagggctcaaatgcgtgcaacggatggtggacctgcaactgaatacagccaccctgattatgtcggtaaaattggtctgattgaaccttattcacccaaattttgtgatcattgcaatcgcctacgtgttagcagtcaaggtcaagtgcatctttgcttgtttgatagccaaaattacgacattcgtccttatctgacacaaggtgacacccaggggcttattcaagctttacaagccttaatgcctatcaaacctgaacatcatcacctgcactctgccgacagcggcatgatgtataatttatccttggtaggcggc

SEQ ID NO: 27201 - DNA, 444 bp, Moraxella catarrhalis
atgactttaaaagactcattaacccaaaccatcaaatcttctatgaaagctcgagagatggaagtggtaaaaatcctgcgtaatgtacaagccgccatcaaaaaagtagagattgatactcagacaactttagatgataatgctgtgcttgagctgttacaaaagcaaatcaaacagcgtcaagaatcattggatatttatcaagcgaatggtcgagatgatttggcggccaaagaaaaatttgaaattgaggtcattgggcagtttctacctgctcaacttgatgaagcggcactgaatgatatcatcgctgcgactattactgagcttgaagccaatagcatgaaagatatgggacgcgtgatgaatgcagttaaagaaaagaccgtcggtcaagctgaccctgccatcatttcaggattggtcaaaaaagcactgacggca

SEQ ID NO: 27202 - DNA, 828 bp, Moraxella catarrhalis
atgaattttggtaaaatttttggtatttgtgcactggcatctggcatcgcattggcaggctgcagcaatcaatcaaacgaaccagctgccatatctgatacagctgcacagactatcaaggttggcgtcatggcaggtcctgagcaagctgtggcagaggtagcaggtcaagtcgccaaagaaaaatacaacctgaccgttgaattggttgagtttaatgactatgccatgccaaactcagccgtctcaaaaggtgaacttgacgccaatgccatgcagcacaaaccctatcttgaaaaagacagccaagaaaaaggcctaaataacttggtcatcgtcggcaacacctttgtatacccattggcaggttattcaaccaaaatcaagacattaaatgagctaaaagatggtgcaaccatcgccgttccaaatgatccctcaaacttagctcgtgcattaattttacttgaaaaacaaggcttaattaaattaaaagacaacaccaacctattctcaaccacacttgatatcgtagaaaatccaaaaaaattggtcatcaaagaagtggatacctcagttgctgctcgtgcaattgacgatgtggacttggcagtggtaaataacaactatgcaggtcaagtaggtttaacagccagtgaaaatggcgtttttgttgaagataaagactcgccttatgtcaatatcatcgtcgctcgtgctgacaataaagactctaaggccatccaagactttgtgaaagcctatcaaaccgatgaagtggaagctgaagccaaaaagcaatttaaagatggtgttatcaaaggctgg

SEQ ID NO: 27203 - DNA, 1413 bp, Moraxella catarrhalis
atgcaatatatcagtacccgtggcaagactcagccgatgcagtttagtgatgtgcttttgatggggcttgcacctgatggcggtctgatgctgcctgaaacttatccaagtattgatgaagcaactttacaaaaatggcgtaatcttagttatagcgagcttgcatttgagattatgtcgctgtttgtgacagatattcctgcagatgatttaaaaaatatcatcaataaaacttatacaaaagcagcttttggcagtgaggatattacgcctgtgactcgtctttatgatcggttggcactgcttgagctatcaaatggtccaacgcttgcttttaaagacattgccatgcagtttttgggtaatgcgtttgaatatgtactaaaacaaaaaaacgagcgtttaactgtcattggtgcgacatctggcgatacgggcagtgcggctgaatatgcactgcgtggtaaagataatatcgaggttttcatgatgtcacctgaaggtaagatgagtgcttttcagcgggcacagatgtatagcttggatgatgccaatattcacaatatcgccgtagagggaatgtttgatgattgtcaagatatcgttaaagccctccaagaagatgcaaaatttaaggcaaaatatagcttaggtacggttaattcaatcaattggggccgtattttggcacaaattgtatactattttaaaggttattttggtgcaaccaccgacaatgcccaaaagatcagtttttgtgtgccttctgggaattttggcaatatttgtgctggccacatcgcacgccagatgggcttaccgattgatcgattgatcgtggcaacgaatgaaaatgatgttttaaatgagttttttaatacaggcaaatacacgccacgcacttcggtcgaaacttatgtaacttccagcccatcaatggatatttcaaaggcctcaaactttgagcgttttgtgtttttattgcttgataaggacagtgtgcaagtcgctaagctgtttggagatgttaaaagtggtaagggttttgatttgtcggataatttaaaactggtgagtgaaaaatttggatttatagctggtaaatctacgcatcaagaccgcttggcaaccatcaaaaaagtttatgatgatacgcagcgattgatcgatccacacactgctgatggtgtaaaagttgcgattgagctacaaaaagcagatgagatgattttggttgccgaaacagcattaccagccaaattccaagaaaccatcgtagaggcagtaggtgagatgaccttgctgcgtcctgagcatacccaaggcttagaagataagcctcaatatgttactgtggtgcctaatgatactaaggcggtagcagcattgattgagcaatatattactgcgtgc

SEQ ID NO: 27204 - DNA, 1083 bp, Moraxella catarrhalis
atgaccgtccaaacctataccccaagcccaaaacctacccccaaaaaagccgtacaaggcgaaaaattgcgtggctatgacaaagtcgctcgcattcccatcaaggtcattcccactgttgagacccccaaaaagcccgactggattcgtgttaaattatccagtcctgccgaggtggaacgcatcaaaggcacactgcgtaagcaaaaactctacaccgtctgcgaagaagctgcctgccccaatctgccccagtgttttggggacggtaccgccacttttatgattatgggggatatttgtacacgccgttgcccattttgtgaagtggcacacggacgcccaaacccactggacaaagatgagccaaaacacaccgccgagacgatacttgggcttgggctaaaatatgcggtcatcacaagcgtggacagagacgatttaaaagatggcggtgctgggcattttgtggatgtcattaacgaatcaaaagcccttagcccaaattgcttgattgagattttggtgcctgactttcgtgggcgtgaacaggttgcactggatttattaacccaaaccgcccctgatgtttttaatcataatattgagaccgtgccacgcctttataaggcatttcgcccaggctcagactatgagcattctttgagcttattaaaacaatacaaagcacgccgacccgatgtcgccaccaaatgtggatttatggttgggcttggcgagaccgaagatgaggtttatgccttgcttgacgacctaaaagcccatgatgtggacatcatcaccattgggcaataccttgcccccagtaaaaaccacgctcctgtggacagatatgtacatcctgatgagttcgcccgttataccgaatatggcaaaaagctgggcttttttaacatttgggcaaatccgatggtgcgttcaagctactttgccgaccgtcagtattatggtgaagattgcccgccgcctgtgcgtactcaaaagtccttgccgaagagaaattggcaaaggcagagcgtggcgaaaaagttgggtgtttttgattgtcataaaattggggtt

SEQ ID NO: 27205 - DNA, 720 bp, Moraxella catarrhalis
atgagtgaagcgatcaccgcccctgaagatgatctaacagtcatcacgacccatgcacgcaccaagacagatattagccatatccatgagtttttaggttgtcgcacctcggagcgttggctaaacttggcatgtgaacatctaccactgctactccaagatcatgctaactgtgaaaaaaaggcagcaggcacagcgatgaatttgatttttcgttatgaatttcatcgcactttacaagagcgtttggctcaattggtgcgtgaagagatgctgcactatgagcaagttttatcattaatgaaagagcgtaacattgattggtattatctgcctgcaggtcgctacgccaaggggcttttgaaacacaaacgcacctatgaacctgctgcgatggtagatgtgctgattattggtgcattcattgaagctcgatcatgtgagcgatttggggcgttgtcagaggttattgatgatgaaaaactggcacgctattataagtatttactcaaatcagaaagccgtcattatgaagactacttaatgttggctcgctccatcacagatgacagtattgatgaacgggtggctttttttcgtgacattgaatgtgagctgatacagtcgcctgatgatgagctacgctttcatagtggcacaccaagcgatactttgatggcaaatggtgtgccaccaatcatctcatcgcccaacaagttg

SEQ ID NO: 27206 - DNA, 492 bp, Moraxella catarrhalis
atgacaacttataccgaacaaaaaaatgccgtaacccatattgatggtgcgttacatgaaaatgccaatttgcgtattgggattgccgttggtcgctttaatggctttttggttgaaagtttggtagagggggctttggatgctctgctgcgtcatggcgtgctgggtgagaacatcacggttgtgcgtgtaccgggggcatttgagttgcccttgaccaccaaacgcatggcggtcacgggcaattatgacgccattgtcgtgcttggggcgattatccgtggggcgacaccgcattttgatatcgtggcaagtgagtccgccaaaggtttaagccatgtggctttgcatcatgacattcctgtcattaatggcattttgaccaccgaaaacattgaacaaaccattgaacgagctggcacaaaagcaggcaataagggttatgaggccgccatgactgccattgaaatggtcagtgtcttaaaggcactt

SEQ ID NO: 27207 - DNA, 1260 bp, Moraxella catarrhalis
atgaccactcaaataaaaagccattatcttggtaggattagtaagattaattggaaggcctttggccctggaattttgatggcatcggctgccattggtgcatcgcatttggtgtcatcaacacaagcgggggcattattcggctggcaacttgccattgtcattattttggccaatgtgctgaagtatcctttttttcgttttggcatcgattatgtgtatgacacaggcgacagtctgattgcaggttatgccaaaaaatccaaagtctatctttgggtgtattttattttatcagtcatctcctccatcatcactttggcggcggttgggctcatgtcagcggtgattttaacctttatgtttccaagtttgggtctaacgcctttaacagcgtcggtcattgtgctggcgatttcttgggtgttgttgattgctgggcgttacaatgtgttagatggcataaccaaaatcatcattttggcgttggcgataaccacggttgcagcggtgtttatcgcagcaggcaaacccaccgtcatggcggtggattttgttgagcctagcccttggaatctggcaagtttgagctttattgtggtggtggtcggctggatgcctgcgccgcttgaattttctgtgattacttctatgtggacggctaaaaaaatccaaactgaccacaccactcacgaacaaggacgattggattttaatgtgggtttcgccacatcaaccatcttagcggtgctttttttggcattgggtgtgtatgttcagtacggttcagggcaagagattcaaaccgctggcagtgcttatgttgggcaattgattgacatgtacactgccaccattggtgaatggtcacggttgttggtggcatttattgcgtttatgtgtatgtttagtaccaccctcacctcaggtgacggttatgggcgtgccaatgctgaatgctggcgattgataaagggtgagcatgaaatcagccgtggtcagttgatattttggatatcgtgggcggtgtttggtgggtttattatcattgctttttttgaaggtcagcttagtaatatgctcaaatttgccatgagttctgcgtttgtgtctgcacctgtttttgcgtggctaaactactctttggtacgctcagaacaaaagctgtcatccggcattcaagcgttgtcaatcatcggtttgatgtttttgcttggatttgctttgttatatgttgccaataccatgggcgtttttggc

SEQ ID NO: 27208 - DNA, 1047 bp, Moraxella catarrhalis
atggacgaaaataaagaaaaagcactcaaagccgccttggctcaaattgaaaaacagtttggtaaaaataccatcatgcatttgggtgatgaaacagccaagcttgatgtggatgtggtctcaacaggttcgcttgggcttgatattgcattgggtatcggtggcttgccaaaaggtcgaattattgagatttttgggcctgaaagctctggtaaaaccacactgaccttacaaaccattgccgagtgccaaaagcaaggcggtacttgtgcctttattgatgctgaacatgcacttgatccgatttatgccaaaaagcttggcgtcaatattgatgatttgcttgtctcgcagcctgacaatggcgaacaggcacttgagattgccgatatgctcgtacgctcaggtgccattgatctgattgtcgtagactcggtggctgctttgactccaaaagctgaaattgaaggtgaaatgggcgacagccacatgggtctgcaagcacgcttgatgagccaagcactgcgtaaaattactggcaacgccaagcgttcaaattgcatggtgatttttattaaccaaatccgtatgaaaattggcgtcatgtttggcagtccagaaacgaccacaggtggtaatgccctaaaattctatgcctctgtgcgtcttgatattcgacgcattggctctgtcaaagatggcgatgagattattggttcagaaacacgcgtcaaagtcatcaaaaataagatggcaccgccatttcgccaaaccgaatttcaaattatgtacggtgagggcattaaccgcctaggcgaggtgatcgatttgggtgttgatattggtgctgttggtaagtcaggtgcttggtacagttatggtgatggtaaaattggtcaaggtaaagccaatacggtcaaatatctgcaagaaaatcctgccattgccagcgaaatcgaagccaaagttcgtgagagtaaattagccacagtcacacccatcgtagaatcagatgagcctgaagagcatttagaagatgataatttc

SEQ ID NO: 27209 - DNA, 1077 bp, Moraxella catarrhalis
atgataacattgcttaaaaaaacaacactgctggcaacagcgtttggtatcttttttggcttaactgcttgctcaaacaataccaaaacttccatccaaaatactgacacgacagccagtagtacagaagctaatcaagatccaattgagcttttgaatgtttcttacgatgtgtctcgagatttttataaagcgtataatgaagtttttataaatcattatttgaccaactacccaaataccaaaattaagatcaagcagtctcatggtggctcaagtaagcaagcactttcggtaaaaaatggactgcaagcggatattgttaccatgaatcaaggctctgatattgagctattggctgatgccaaattggtggatggcaattggcgacacgcattcccaaaccatgccattcctttcaccagtactatcgtatttttggtacgagaaggcaaccccaaaggcattaaagattggaatgacttggcaacaagtggcatagatattatcatcgccaacccaaaaacctctggtaacggtcgctatgcgtttttgggtgcttatggctatggcttgaatgcttatcataatgacgaagctcaaactcatgcgttcgtcaaggcacttttaagccatgttaaagtatttgaaaatggtgggcgtgcggcaacaacaacctttgcccagcgtggcatcggtgatgtcttaatcacctttgaaaatgaagccaatgtgattaagagtaaatttggcaatgtggatattatttacccaagctacacagtgaatgcagaaaatccgattgctgtggtgaaatctgttaccgacaacaaaggcacaaccaaagctgcaaccgaatacctcaatcatctgtacagcgatgaagctcaagagcttgccacgaagtttttcttaagaccaagcagccccgatatcctagccaaacacgccgataaattccctgtcatgacaaccttttttcctaatgatgtctttggagactgggcaagtatcatgaaaacttattttagtgatggcggcttatacgataagcttgccgtccaagctcaaaatcag

SEQ ID NO: 27210 - DNA, 1095 bp, Mycoplasma genitalium
atgaataacgttattatttccaataacaaaataaaaccacatcattcatattttttaatagaggcaaaagaaaaagaaataaacttttatgctaacaatgaatacttttctgtcaaatgtaatttaaataaaaatattgatattcttgaacaaggctccttaattgttaaaggaaaaatttttaacgatcttattaatggcataaaagaagagattattactattcaagaaaaagatcaaacacttttggttaaaacaaaaaaaacaagtattaatttaaacacaattaatgtgaatgaatttccaagaataaggtttaatgaaaaaaacgatttaagtgaatttaatcaattcaaaataaattattcacttttagtaaaaggcattaaaaaaatttttcactcagtttcaaataatcgtgaaatatcttctaaatttaatggagtaaatttcaatggatccaatggaaaagaaatatttttagaagcttctgacacttataaactatctgtttttgagataaagcaagaaacagaaccatttgatttcattttggagagtaatttacttagtttcattaattcttttaatcctgaagaagataaatctattgttttttattacagaaaagataataaagatagctttagtacagaaatgttgatttcaatggataactttatgattagttacacatcggttaatgaaaaatttccagaggtaaactacttttttgaatttgaacctgaaactaaaatagttgttcaaaaaaatgaattaaaagatgcacttcaaagaattcaaactttggctcaaaatgaaagaacttttttatgcgatatgcaaattaacagttctgaattaaaaataagagctattgttaataatatcggaaattctcttgaggaaatttcttgtcttaaatttgaaggttataaacttaatatttcttttaacccaagttctctattagatcacatagagtcttttgaatcaaatgaaataaattttgatttccaaggaaatagtaagtattttttgataacctctaaaagtgaacctgaacttaagcaaatattggttccttcaagataa

SEQ ID NO: 27211 - DNA, 1953 bp, Mycoplasma genitalium
atggaagaaaataacaaagcaaatatctatgactctagtagcattaaggtccttgaaggacttgaggctgttagaaaacgccctggaatgtacattggttctactggcgaagaaggtttgcatcacatgatctgagagatagtagacaactcaattgatgaagcaatgggaggttttgccagttttgttaagcttacccttgaagataattttgttacccgtgtagaggatgatggaagagggatacctgttgatatccatcctaagactaatcgttctacagttgaaacagtttttacagttctacacgctggcggtaaatttgataacgatagctataaagtgtcaggtggtttacacggtgttggtgcatcagttgttaatgcgcttagttcttcttttaaagtttgagtttttcgtcaaaataaaaagtattttctcagctttagcgatggaggaaaggtaattggagatttggtccaagaaggtaactctgaaaaagagcatggaacaattgttgagtttgttcctgatttctctgtaatggaaaagagtgattacaaacaaactgtaattgtaagcagactccagcaattagcttttttaaacaagggaataagaattgactttgttgataatcgtaaacaaaacccacagtctttttcttgaaaatatgatgggggattggttgaatatatccaccacctaaacaacgaaaaagaaccactttttaatgaagttattgctgatgaaaaaactgaaactgtaaaagctgttaatcgtgatgaaaactacacagtaaaggttgaagttgcttttcaatataacaaaacatacaaccaatcaattttcagtttttgtaacaacattaatactacagaaggtggaacccatgtggaaggttttcgtaatgcacttgttaagatcattaatcgctttgctgttgaaaataaattcctaaaagatagtgatgaaaagattaaccgtgatgatgtttgtgaaggattaactgctattatttccattaaacacccaaacccacaatatgaaggacaaactaaaaagaagttaggtaatactgaggtaagacctttagttaatagtgttgttagtgaaatctttgaacgcttcatgttagaaaacccacaagaagcaaacgctatcatcagaaaaacacttttagctcaagaagcgagaagaagaagtcaagaggctagggagttaactcgtcgtaaatcaccttttgatagtggttcattaccaggtaaattagctgattgtacaaccagagatccttcgattagtgaactttacattgttgagggtgatagtgctggtggcactgctaaaacaggaagagatcgttattttcaagctatcttacccttaagaggaaagattttaaacgttgaaaaatctaactttgaacaaatctttaataatgcagaaatttctgcattagtgatggcaataggctgtgggattaaacctgattttgaacttgaaaaacttagatatagcaagattgtgatcatgacagatgctgatgttgatggtgcacacataagaacacttctcttaactttcttttttcgctttatgtatcctttggttgaacaaggcaatatttttattgctcaacccccactttataaagtgtcatattcccataaggatttatacatgcacactgatgttcaacttgaacagtgaaaaagtcaaaaccctaacgtaaagtttgggttacaaagatataaaggacttggagaaatggatgcattgcagctgtgagaaacaacaatggatcctaaggttagaacattgttaaaagttactgttgaagatgcttctattgctgataaagctttttcactgttgatgggtgatgaagttcccccaagaagagaatttattgaaaaaaatgctcgtagtgttaaaaacattgatatttaa

SEQ ID NO: 27212 - DNA, 2511 bp, Mycoplasma genitalium
atggcaaagcaacaagatcaagtagataagattcgtgaaaacttagacaattcaactgtcaaaagtatttcattagcaaatgaacttgagcgttcattcatggaatatgctatgtcagttattgttgctcgtgctttacctgatgctagagatggacttaaaccagttcatcgtcgtgttctttatggtgcttatattggtggcatgcaccatgatcgtccttttaaaaagtctgcgaggattgttggtgatgtaatgagtaaattccaccctcatggtgatatggcaatatatgacaccatgtcaagaatggctcaagacttttcattaagataccttttaattgatggtcatggtaattttggttctatagatggtgatagacctgctgcacaacgttatacagaagcaagattatctaaacttgcagcagaacttttaaaagatattgataaagatacagttgactttattgctaattatgatggtgaggaaaaagaaccaactgttctaccagcagctttccctaacttacttgcaaatggttctagtgggattgcagttggaatgtcaacatctattccttcccataatctctctgaattaattgcgggtttaatcatgttaattgataatcctcaatgcacttttcaagaattattaactgtaattaaaggacctgattttccaacaggagctaacattatctacacaaaaggaattgaaagctactttgaaacaggtaaaggcaatgtagtaattcgttctaaagttgagatagaacaattgcaaacaagaagtgcattagttgtaactgaaattccttacatggttaacaaaactaccttaattgaaaagattgtagaacttgttaaagctgaagagatttcaggaattgctgatatccgtgatgaatcctctcgagaaggaataaggttagtgattgaagtaaaacgcgacactgtacctgaagttttattaaatcaactttttaaatcaacaagattacaagtacgcttccctgttaatatgcttgctttagttaaaggagctcctgtacttctcaacatgaaacaagctttggaagtatatcttgatcatcaaattgatgttcttgttagaaaaacaaagtttgtgcttaataaacaacaagaacgttatcacattttaagcggacttttaattgctgctttaaatattgatgaggttgttgcaattattaaaaaatcagcaaataaccaggaagcaattaatacattaaatacaaagtttaagcttgatgaaattcaagctaaagcagttcttgacatgcgtttaaggagcttaagcgtacttgaagttaacaaacttcaaactgaacaaaaagagttaaaagattcaattgaattttgtaagaaagtgttagctgatcaaaaattacagctaaaaataatcaaagaggaattgcaaaaaatcaatgatcagtttggtgatgaaagaagaagtgaaattctctatgatatctctgaggaaattgatgatgaatcattgataaaagttgagaatgtagtgataactatgtctacaaatggttatctaaaaaggattggagttgatgcttataatcttcaacatcgtggtggagttggggttaaagggctaactacttatgttgatgatagtattagtcaattattggtctgttcaactcactctgacttattattttttactgataagggtaaggtttatagaattagagctcatcaaattccctatggttttagaacaaataaaggtattcccgctgttaacttaatcaaaattgaaaaggatgaaagaatttgttcattgttatctgttaataactatgatgatggttatttctttttctgtactaaaaatggaattgttaaaagaacgagcttgaatgaattcatcaacatcttaagtaatggtaagcgggctatatcttttgatgataatgacactttgtattcagtaattaaaacccacggaaatgatgagatttttattggttctaccaatggatttgttgttcgcttccatgaaaatcaactcagagttctttcaagaacagcaagaggtgtatttggtatcagtttaaataaaggagaatttgttaatggactatcaacttcaagcaacggtagcttacttttatcagtcggtcaaaatggaataggtaaattaacgagcatagataaatatagactcacaaaacgtaatgctaagggagttaaaactctaagggttactgatagaacaggccctgttgttacaacaaccactgtttttggtaatgaggatcttttaatgatttcctctgctggtaaaattgtgcgtaccagtttacaagaactttcagaacaaggtaaaaacacttctggtgttaagttaattagattaaaagataatgaacgtttagaaagagtaactatctttaaagaagagttagaagacaaagaaatgcaactagaagatgttggatccaaacaaattacgcaataa

SEQ ID NO: 27213 - DNA, 1254 bp, Mycoplasma genitalium
atgttggatccaaacaaattacgcaataactatgatttctttaaaaagaaactgttagaaagaaatgtaaatgagcaattattaaatcagtttattcaaactgataaactaatgcgcaaaaacttgcaacaacttgaacttgctaaccaaaaacaaagcttgttggcaaaacaagttgctaagcaaaaagataataaaaagctattagctgaatcaaaagaacttaagcagaagattgaaaacttaaataatgcttataaagattcacaaaacattagtcaagatttacttctaaattttcctaatattgctcatgaatcagttcctgttggtaaaaatgaatcagcaaacttagaacttcttaaagaagggagaaaaccagtttttgatttcaaacctttaccacatcgagagttatgtgaaaagttaaatttagttgcttttgataaagctactaagattagtggaactaggtttgttgcatatacagataaagcagctaaactacttagagcgataactaatctaatgattgaccttaataaaagcaagtatcaagaatgaaacctgccagttgttattaatgaattaagtttaagatcaaccggacaactacctaagtttaaagatgatgtttttaaactagaaaacacccgttattatctttctccaactttagaggtacaacttatcaatttacatgctaatgaaatttttaatgaagaagatttacctaaatactacactgcaacaggtattaactttcgtcaagaagcgggtagtgctggtaaacaaaccaaaggaactattagattgcatcagtttcaaaaaactgagttagttaagttttgtaaacctgaaaatgctatcaatgaattggaagcaatggttagagatgctgaacaaatcttaaaggcacttaagttaccttttagaaggttattgttatgtactggtgatatgggctttagtgctgaaaaaacatatgatcttgaagtttgaatggcagctagcaatgaatatcgtgaagtttcttcttgttcatcttgtggtgattttcaagcaagaagagctatgattcgttacaaagatattaacaacggtaaaaacagttatgttgctactttaaatggaacagcattatctattgatagaatttttgctgcaattctagaaaattttcaaacaaaagatggcaaaattcttatcccacaagcattaaaaaaataccttgattttgacacaatcaagtaa

SEQ ID NO: 27214 - DNA, 633 bp, Mycoplasma genitalium
atgaataaaggtgtttttgttgttattgaaggagttgatggagcgggcaaaactgctttaattgaaggttttaaaaaactttatccaactaagtttttgaactatcaacttacttatactagagaacctggtggtactttgttagctgaaaaaattcgtcaacttcttttaaatgaaacaatggaacctctaactgaagcttatttgtttgccgcagctagaactgaacatatcagtaagctaattaaaccagcaattgaaaaagaacaactagttatttcagatagatttgttttctctagttttgcataccaaggattaagcaaaaaaataggcattgatacagtaaaacagattaatcatcatgcgttaagaaatatgatgccaaactttacctttattttggattgcaattttaaagaagcattacaaaggatgcaaaagcgtggtaatgataatcttcttgatgaatttattaaaggaaagaatgattttgatacagttcgttcttattatttaagcttagttgataaaaaaaactgtttcttgattaatggtgataataaacaagaacacctagagaaatttattgaattgttaacaagatgcttacaacaacccacgcattactaa

SEQ ID NO: 27215 - DNA, 1329 bp, Mycoplasma genitalium
atgaaaagcgaaattaatatttttgcactagcaactgcaccttttaatagtgcattacatattattaggttttctggtcctgatgtttatgagattttaaacaagataactaataaaaaaataacaagaaaagggatgcaaattcaacgcacatggatagttgatgaaaacaataagcgaattgatgatgtgctattatttaaatttgtctctccaaattcttatacaggagaagatttaattgaaatttcttgtcatggtaacatgttgatcgttaatgaaatttgcgcacttcttttaaaaaaaggaggtgtttatgccaaacctggtgaatttacccaaaggagttttttaaatggaaaaatgagtttacaacaagctagtgctgtaaataaattgattttatctcctaacttattagttaaagatatagtcttaaataatttagcgggtgaaatggatcaacaattagaacaaatagctcaacaagttaatcaattagtaatgcaaatggaagtaaacattgattatccagaatatcttgatgaacaagtagaactatcaactttaaataataaagttaaattgattattgaaaagcttaaaagaattattgaaaatagtaaacaactcaaaaaacttcacgatccttttaaaattgccattataggcgaaactaatgtaggtaaatcttctttactcaacgctttattaaatcaagataaagcgatagtttcaaatattaaaggtagtacacgcgatgttgttgaaggggatttcaatttaaatggttatttaatcaagatcttagatactgcaggtatccgtaaacataaaagtgggcttgaaaaagcaggaattaaaaaaagctttgaatctataaagcaagctaatttggttatttatcttttagatgcaacacatccaaagaaagatcttgaattaattagtttttttaagaaaaataaaaaggatttttttgttttctataacaaaaaagatttaattacaaataagtttgaaaatagtatttctgcaaagcaaaaagatattaaagaattagttgatttattaactaaatatattaacgagttttataaaaaaatagatcaaaaaatctatctgattgaaaattgacagcaaattttaattgaaaaaattaaagaacaattagaacagtttttaaagcaacaaaaaaaatatttatttttcgatgttttagttacccatctaagagaagctcaacaagatattcttaaactactaggtaaggatgtaggttttgatttagttaatgaaatttttaataatttttgtttaggaaaataa

SEQ ID NO: 27216 - DNA, 789 bp, Mycoplasma genitalium
atggaatactttgatgcacattgtcatttaaattgtgaacctttactgagtgaaattgaaaaaagcatcgctaatttcaaattaattaatttaaaagcaaatgttgtaggtacagatttggataattctaaaattgctgttgaattagctaaaaaatatcctgatcttttaaaagcaaccataggtatccatccaaatgatgttcatttagttgattttaaaaagacaaaaaaacaacttaatgaactattaataaataacagaaatttcataagttgtattggtgaatatggttttgattatcactacacaacagaatttattgaattgcaaaacaaattctttgagatgcaatttgaaatagctgaaactaataaattggttcacatgcttcatattcgtgatgctcatgaaaaaatttatgaaatattaacaagattaaagccaactcaacctgtgatttttcattgtttcagtcaagatataaatattgctaaaaagctactatcattaaaagatttaaatattgacatcttcttttctatcccagggatagttacttttaagaatgctcaagcattacatgaagctttaaagattattcctagtgaattacttttaagtgaaactgactcaccgtgattaaccccttctccttttcgaggcaaagttaactgacctgaatatgtagttcatactgttagcactgttgctgaaataaaaaaaatagaaattgctgaaatgaagcgaattattgttaaaaatgcaaaaaaattattttgacattaa

SEQ ID NO: 27217 - DNA, 1770 bp, Mycoplasma genitalium
atggaaggaagttgaagttataaattactttatgtttttttgtgtatagttcttggtattttatatggaattgctaaccctatcttattagcacaaggtcttggttttatttttcctattactagtagtaatggtcgtgctgttgactcaatatattcattaatttacccaacaaatttaaatgtattcattaggctcacaattgtgagcgtaactgtttttgtagcttatgcattaatctttgtatttaatgtagcgcaaaactatgtagggattaaactttaccaacaaacatgtgctactttgcgttgaaaggcatatttaaaaatgcagagtatgtcaaccagcttttttgatacgcaaaataatggtgatcttatgagtaggttaactaatgatatgtataacattgataacctattcactcaagctggtggacaagctattcaaagtttgtttaatattttaacaacctcagtattaatatttttattaagcccagttattgcacttatttcactttcaattttagctacattaattactttttcttttgcctttctaaagaaatcaaaaacttcatatagtcaagtacaaaataatttgggtgatatgtctggttatattgaagaggttttaactaatcataaggttgttcatgtcttgaagttgcaagagataatgattaaggattttgatcaatacaacaaatcaatgatcaaaccaactgtaagagggaatacatattcgatctttcttttttcttggtttggttttatatcaaatattacttatctggtttctatatcaattgctactgcttttagtgttaattctattccttcatttggaattagtgttattaactattcattcatgttgtcttacattgcttctttaaggcaaataactttagcattagatcaaatctttaccctttgaaacttagttcaattaggggttgttagtgcagaaagagtatttaaggtattagatcttaatgtagagaaagatactgctactattgacaaattacctgatattaaaggtaatataaggtttgaaaatgtagcatttggttacaataaagataaacctactttaacaggaattaactttagtgttaaacatggagatgtagttgcaatagtaggtcctacaggagctggtaaatcaactattattaatctattgatgaaattctataaaccttttgaaggaaagatttatatggataactttgaaattagtgatgtaactaaaaaagcatgaagagaaaagatttctatagtattacaagattcattcttatttagcggcacaattaaagaaaatattcgtttaggcagacaggatgctactgatgatgagattatcgctgcatgtaaaactgctaatgctcatgatttcatcatgcgtttaccaaaaggatatgacacttatatttccaataaagcagattatctttctgttggtgaaaggcaattattaacaattgccagagcagtaatccgtaatgctccagttttgctcttagatgaagcaactagttcagttgatgtccattcagaaaaattaattcaagaatcaataggaaggttaatgaaaaataaaacttcttttataatttctcatcgtctttcaattattcgtgatgcaacattaataatggttattaatgatggtaaagtacttgaaatgggtaatcatgatcagctgatgaaacaaaatggattttatgcacgtttaaaacaatcttcggttcgttaa

SEQ ID NO: 27218 - DNA, 1539 bp, Mycoplasma genitalium
atgaagcgttgttatattacaacccctatctactacgcatcaggtaagccacacataggtcatgcttttaccactattttggcggatgtaattaagcgttttaaaatccaaaacggatatgaggcttttttgcttgttggcagtgatgaacatggcaataaaatagaaagtaaagctaaaagtttaaatttagatcctaaaacatttgttgatattaacgctcaagcttttaagttaatgtgaaagacccttaatattagttttgatcactttattagaacaactgatgaaatccataaacaacaagttcaaaaaacatttcaagatttatatgacaaaaaactaatttatcaaagtgaatgaaaaggggcatattgtgttgagtgtgaacaaaattactttacttttaataaacaaacaatgttatgtgaaataggtcataatctcagtcttgtccaagaaccttgctgatttatttctttttcttctactaaaaattgaattgaaacaacgataggaaaaaatcaacttaacattattcctaaatcacgtgcttctgaattaaaaaataactttataaacaatggtttaaacgatttagcattaacaagaaaaaatgttacttgaggaataaaagttccttttgatccaaatcaaacaatctatgtttggtttgatgcattgttttcttatatcaccaatttaggatttagaaatggtgatcctaattttataaagtgatgaaataatgacaataaagaaagagaagttatccatcttatatcacgtgaaatcaccagatttcactgcatctattgaccgatttttctacacttacttgatattaagttaccaacccaatttttatcacatggctggatagttgatggtgaagggagaaagatgtcaaaatctttaaacaacgttatctctccagaacaattaattgatcaatttggtgttgatggtacaagatattgtttattaaaagagatgcgtttagataaagataatcgttgtagtgttagcatcttaaaagagatttataatgctgatcttgccaatagttttggaaaccatgtttcacgtacttttggcatgattaaaaagtatctaaacggcaaattagaataccaaattattactgataatgcacttcaaaaaataatgattttaatagatgaatcaatcgttcaatttgatcattactttaacagttatgaattttatagagcgattaatctacttttaaaaattgtttttgaattaagtaaattaattgatgatttcaaaccatgagaattgtttaaaaatcaggaattctcacttttaaaacaactactttttacttgtgttaggtgtgtgcaggtatgctatgtgttgttaacacctatcttagtaaatactgcttcaaaagtttttcatttatttaatttcgctgatgatgcctgtagaaaagatcaattaagagatgcaactttattaaaaaaaattattatctctaattcaatggaagttttatttaaaagagtagattaa

SEQ ID NO: 27219 - DNA, 867 bp, Mycoplasma genitalium
atgcttgttaactttaaattgatgcttcaaaaagcaaagctaggtaaatatgcaatccctcacattaacatcaataactatgaatgggccaaagctgttttaacagcagcaaatcaagctaatagcccaattattgtttcagtatctgaaggtgctttaaagtacatgtctggttatagtgttgttatcccgcttgttaagggtttaattgaatcactaagtgttaaagtaccagtgacattacatttagatcatggtagttatgatgcatgtatccaagcattacaggctggatttagttcagtaatgtttgatggttcacatttaccatttgaagaaaatttcaataaatctaaaaagttaatagagatagcacaaaaaacaaatgcttctgttgaacttgaagttggtactattggtggagaagaagatggtgttataggacaaggtgagttagctaatgttgatgaatgtaaacaaatcgctagtttaaaaccagatgctttagcagcaggaattggtaatatccatggtatctatcctaagaattgaaaaggattaaactttcctttgattgaaacaatatcaaaaattactaacttacccttagttttacatggtggctctggaatcttagaaaatgatgttaaaaaagcaattagtttagggatttgcaaactaaatattaatactgagtgtcaattagcatttgcacatgaaattagaaaatacattgaatcaaataaagacttggatcttaacaaaaaaggttatgatcctagaaaacttttaaaagaacctactcaagcaattgttgatacttgcttggaaaagattgatttgtgtggttctagaaataaagcatag

SEQ ID NO: 27220 - DNA, 1104 bp, Mycoplasma genitalium
atgttaagtgcagggatagttggtttacctaatgttggtaagtcaactttatttagtgctattactaatttgcaagttgaaatagcaaactatccttttgcaactatagaacctaatactggcattgttaatgttagtgatgagagattagataaattagctagcttaattaatcctgaaaagatagtttatacaacctttcgttttgttgatatagcaggtcttgttaaaggcgccagtcaaggtcaaggattgggtaatcaattcttagcaaacatccgtgaagtggatttaatttgtcatgttgtaagatgttttcaagataaaaaaattgttcatgttaacaatacaatagatcctgtttttgattttgaaattattgttaatgaactaatccaagctgattttgaattaataacaaacagaatcggcaagcttaaaagaaaagctgaatcaggtgataaaatcgctaaagaagagtttgtattacttgaaattgttttaaatggattaaaacaaggtcaaatgcccattcagactctaagtgaaagtgaattgaaaacaattaaatcacttaatctattaacagctaaacctattctaatagtagccaatgtatctgagaatgacttattaaaccttgataataatgaagctttaaaaaaattgaatgcttttcttgatcaaaaaaagattcccaaggcaatcacagtttgttctttaattgaaaaagaattaagcggtttgaaattagaacaacgtcaatactttttggatgaacttggcttaaaaaattattcaggtttaaaccgagtaattcaagctgcatatcaaactttaaacctttggtctttttttacttttggtaaaaaagaagttagagcatgaacatttaaaaagggttgaaatgctcctcagtgtgctgggcaaattcattctgattttgaaaaaggatttattaaagttgaagtaattagttgagatcaattgtttgcaatgaaatctttacaagaagctaaaaaacaaggtttgataagattggaaggcaaaaattacttaataaaagatggtgatgtttgtaactttaaatttaacgtcacttaa

SEQ ID NO: 27221 - DNA, 621 bp, Mycoplasma genitalium
gtgataaaaaaagttcaacatgctttaatcttgaatgaattgacaaaactgcgtgataaaaatacaacaacctcccagtttcgcatggccttgaatcaaatcacttcattactcttttttgaagcaactaaacagctaccactagcaacagttgaagttgaaactccctttgctaaaacaaagggctacaaattaaaaaatgacattgttcttgtacctattatgcgtgctggacttggaatgattgatgctattgttcgctattcagataaaatcagagttggtcatttaggaatctatcgtcaaacccaaacaaccagtgtaatttcatactataaaaagatgcctgaaaacatctctgattcacatgttattattcttgatcctatgcttgctactggaactacattgttaactgctattaaatctattaaagaagataaacctatcaaaattagtgttattgctatagtagcagcacctgaaggaattaataaagtagaaaaaatgcatcctcatgttgatatatttcttgcagcaattgatgaaaagttaaatgacaatagatacataatccctggtcttggtgatgctggggaccgtttatttggtactaaataa

SEQ ID NO: 27222 - DNA, 4356 bp, Mycoplasma genitalium
atggtatttaatcttgagaatgaaaaagataaaaaggttcttgcactctccaattttttgatagataacaatatccttgaccacaatgagcttaacagcttaattgaaaggattgaatcaatttactttaataaatatattgaagagaaggtttttctatttgcaataactattagtcgccctttaactattgatatttgaaatgctttatatgaaggatttaatgaattaaatgagggatttaaagctgataatgaatcttttaaacttaccattacctttaaggagaatgagccattctttaaatcaaaaaatagtttttcttctgtaacgatagctattattaaagactattttcacagtttcttttcaaaagataagaaatacaaaattctcattgaacaagagttaagtaatcccaattttcttagttatgaaaatgacgaattaaaagcacaatgtcaaaccaaagaattaactgaatgattagttcaaaaaagtaaatctttcattttttggatgaataatgctggttttaaaaactttaacttcattgcactttatcctattgataaaaatgaatctaaattaaaagtaaaagctgtaactgtttctcaatatgataagcagtttgaaacaaaggtatttgcaacagaatttatccctatccacaagattaaccaacagatcgatgatgtcaagattattgggcaaatctttgaattaaaaacccatgaaagtttaactggtaaaaaaacacttaatatctatgtaactgattttcaattaggtggatcgttaattttgaaatgatcctatactgatgaaaaaaagattgaaggaattactattggcaattggataaaagcccatatccaagtagaacgtgaccctaatactcaaatcttatatggaattgttagagagataaatcctgttgaaatacctaataactataaaaggttagatttatcaaaacaaaagcgagtggagttagtttttcatactaaaatgactgcttttgatggtatcaatgacattgaagaatatgcacagtttgctaaagaaagaggttgaaaagcaataactgttacagataaagataatatccatatttatcccaagttttatgaagtggctaaaaaatatgatttaaaagctatctatggtttggaattcaacttaactgatgatcacatcaaaattgttcacaacccagataacactaagttaagtgatgccacctttgttatttttgatattgaaaccactggattacatggtaggtatgatgatgttattgagttttcagcacgcaaaattaagaataacagcgagatagatcatcagcaattctttttaaaaattgacaaacctatcccaaaaacaatcactgaaatcaccaaaataactgatgagatgcttgaaggcggtattgatcaacagcaaggtttagaaaagataagaaattatctagatgattgtgttatggtagctcataatggtattaattttgatttaccctttttgcaaactcaatttgaaaaatacaacatcaaaccattaacaaacccactgattgataccttatgtttatcatgagcattgaatcccttgttttcatcccatactttaagcaatatttgttctaaactaaaacttgaatttgatgatgaaagattacaccgtgctgaatatgatacagaagctttaaaaaaagttttcttttactttaaaaagcagttaaaagaaatgggtattaataccttaacagagatagatcaaaacctaaataaaaagtgtcaaattgatctgatgaaaagggtatttacaaacacagcaatcgtttatgtaaaaaaccaacggggctttcaaaacctatatgagatgttatcaattgcattaacagatcataatgctaacagaccattagttttagctagcagcttagctaaatttagaaaatcttttttattaacagaaaaccctgttcagggtgacatctttaaagctgcattaacaaaaccaattaatgaacttgaaaaagcaattgaaaaagttgactttgtgcttatttcacaacccaatgcttaccttggttatacactacgtgaaggactgaaaaaagaacttattaatgatgcaatcaaactagttatcaaaacagcaacaaaacttaagaaattagttgctgttgcatctgatgcttactttatccatccttgggaaaatgaatattataaggcaatagtttgtgctaagggcttaggtgggaaatgacatagacactttaacaataaagaaaaagaacaaaccgttcctgaagtatttcttcacaccactgatgagatgctaaaaagaatgagttttttaggagaagatattgcctataaattagtcgttgaaaacactaataagatagtgaagctacttgacttaaatgaattagtaccaactaaaaacaagctttatccaccagtgatgcaagattctaaccaaaaattaattgataaaacttgaaaacaagctgaaaaaaggtatggtaaaaatttacctaaacttattaaggaaagaattgaaaaagaactaaatgcaatcattagtaatggttttggaattgtcttttgaatttcccatctattagtagaacaatctgttaaagatggttattttgtaggtccacgtggttctataggctcttctttaattgctaatttaattggtatatcagaaatcaatccattagctgctcattatctttgtgaacaatgtcattactttgaagttagtgacagtgttgatgatggatatgatttgatgattcgtgattgtcctaaatgccatgaaaaagcaagtttcaaaggtgatggtcataacattccttttgctacttttatgggtttttctggtgataaaattcctgatatcgatcttaatttttctagcgaatatcaagctaaagcccatgattatgtcagaaaattatttggagttaataacaccttcagggcaggaacaattgcaacagttgctgaaaaaactgcttatggttatgctagaaactattttgaaatcattaaacgtgttgatcttgcaactactgctgaaattgaaagatttaaacaaaagcttataggaattaagagaacaacagggcaacatccagggggaattatgatctttcctagtgatcattctgtttatgaatttactccctgtggttttccagcagatgatgttgaaagtgaatgaaagaccacccattttgaatatgatgcattaggtgatgccatattaaaacttgatatcttaggtcaagatgatccaacaatgttaaagcacttagctgatctaactaagataaatccccaaaatatccctcactttgataagaacttaatttcgatgttttcttcaaacaaaccattaaacctaaaaccaggcattgttgatgaagttacaggagcggttggtatccctgaatttgggactaaatttgttagaaaaattttagaacagacaaaacctaaagactttgctgacttaattagagtttcaggattaagccatggtaaaaacgtgtgagcagataatgcacaaaaactaattaaaagcaataggttaactttaagagatgtaattgcttgtagagatgacatcatgctttatctaattaataaagggatgcaagcaaaagatgcttttgaaatcatggaaaaagtaagaaaaggtattaaagtaaatgctaaagaagttagcctgatgcaaaactgtggtgttgaacaatattggattaatgcttgtttaaaaattaattatctattccctaaggcacatgctgcagcttatgttttaatggcttgaagaattgcttgatttaagctttatcaccctttgagttactatgcttgtttattaagtttcaaactaaaggaacatgatattaatggttttgaaaaagggtatgaatttattaaaaaccgtttagatgaacttaataagctttacagaataaaaaagattaaaccaaaagaagcggagcttttaacaagttatgaagtttatttagaaatgatggcacgcaatataaagttgcaacaaatctctattcaaaactctaatgcaaggatgtttgttgaacataatggtgttttaattgcgcctttcatcactattccaggaatgggagaagcggtagcttcttcaattgtagaagcaagaaatgaaaaaccatttgcttccttaaatgatttcaaaaaaagaaccaaaattactaaaaaacacgttgaaacgatggaacaattacaactgtttgatgaatttgaacatcaagatgatcataaacttttcaactaa

SEQ ID NO: 27223 - DNA, 777 bp, Mycoplasma genitalium
ttgtattttcaaaattctactcaattaggatgatggtttcttgctgaattgataggaacatttatcctaattatctttggtaatggtgcagttgcccaagttaatttaaagaagatggctacaagtgaaacaaaagccaagtttttaacagttgcacttacttgaggaataggtgttttatttggtgttttaactgctaatgctatctttaagggtagtggtcatttaaaccctgctatatcattattttatgcaattaatggcagtatcaaatcacctactgcattaatatgacctggttttgtaattgggattttagctcaattcttaggtgcaatgatagctcaaacaacacttaactttttattttgaaaacaactatcatcaaccgatccacaaacagttctagcaatgcattgtacaagtcctagtgtatttaacattactaggaattttctaactgaatttattgcaactttaatattgataggtggagttgttgctgctagtcactttcttcataacaacccaaactctgttcctcctggatttatggggctttgattggttgctgggattattattgcttttggtggcgctacaggctccgcaattaatcctgcaagggatttgggaactagaattgtgtttcaattaactccaattaaaaataaggatgcgaattgaaagtacagctgaattccagtaattgctcctttatctgcaggattagttttatcaataattattgggttttcccctgcacctgttctttaa

SEQ ID NO: 27224 - DNA, 642 bp, Mycoplasma genitalium
atgggtaaatatcaaccatcttttcaaaccaaaaagggctgaactgaagttatttgtggcccaatgttttctggaaaaacagagaaattacttcacaaaataaaacggtgaaagatagccaaaatttcagttgttatcttcaaaccaataattgatactagacaaactaatattgtcaaatcacgcaacggtgaatatgatcaagcaataactattaattctccttttgagatctatgatcacttagttgataaaaactatcaaattgttgccattgatgaagcacaattcttttcaaatgagattatagaagttgttacaactctcaatgagataggaacaaatgtaattatttctgggcttgatactgattttagagctgagccttttggttgtattccccaacttttagcaatagctgatgtagttaataaacttgatgctatttgcaatgtttgtggtagtttagcacaacgaacccaaagactagtaaataaaaatactaatgataaccttgtcttaattggtgatgcagaagcttatgaagctagatgcaaactgcaccactcatttttaactaaaaagcacgttactgttaaaaccaaaaactttaaagaacaggtgcaggggaaaacccaataa

SEQ ID NO: 27225 - DNA, 1245 bp, Mycoplasma genitalium
atgaacttcttgcaaaaaccaaggggagttaaagattggtttggtgatgaattagtttattttaattggattgttaaaaaaataagatctttagcatttaattggggttttagtgaagttaaaactccgttgtttgaaaatgcacaactttttcaaagatctaatgctaatgctgatattgttcaaaaagaactataccagttttttgataaatctcaaagagaattagctttaagacctgaagctactacaccaatagtaagacttgcttgtgaaaacaaattaatgcaagaagcaaattttcccttaaagttattttgcattggttcaatgtatcgttatgaacgtccacaaaacaataggtttcgtgaacattggcaatttagttgcgaagtatttggtttttccaacctgtttatctttttagatacacttttgtttgctaactctttgcttgaagcacttggaattactggatatgtgcttaaaattaataatcttgctaactttgaaacacttagtaagtgaaataaagccctaaaagattatttaactccatataaattagaactaactgagctttctcaaaaaagattagaaaaaaatcctttgagaattttagatgacaagatagatcaaaaaaaatcatttgttaaaaatgctcctaaaattactgattttttagatgcaagtgcaaaacaagattcagaattgttaaaaacacaactaaaaaaacacaatattagttttgaatgaacagacaatctagttagaggattggattactatactggatttgtgtttgaatatgtaaaaaatcaagacacaattttagcaggtggagtttatgataacttagttgaagaattaagtagtaatccaactcccgcattaggttttgcttgtggaattgaacggttaattaactgtttagaaattgataaaaaagcatttattttgaatactaaaccaaagcagatgttagtaatttgcttatttgaagaagcgcttgaagaattggtttgactagctaaattatgaagggaatataaccaagtaactatttatcctaaggttattaaagttgataatgggattagattagcaaatcgcttgggttatactttcattggcattgttggaaaaactgattttgacaaaaaagctattacaatcaaaaacttagtatctaaacaacagaccatttacacttgaaatgaacttggagaacgaaatgtgttttaa

SEQ ID NO: 27226 - DNA, 1653 bp, Mycoplasma genitalium
atgtgttttaaccaacgaattttaattggctcaatttcaactgaacaactcaataaaacaatagttattattgggtgaattaaacggattaaaaagttaggtgaaattaactttattatcgttggtgataaatcaggaactatccaagtaacttgcaaagataaagaacagattcaacaacttacaagagaagacatagttattgttaaagccaaattacaacgcttagatagtgttagatttgaactgataaatccaactattaaacttttttcaaagtcaaaaactcctcctttaattattgaagatgaaactgatgctttagaagaagttaggttaaaataccgttaccttgatctgagaagacgtttgatgcaaaaacgattgttattgcgtcatcaatttatattagcaattcgtaactgatttaaccagcagggttttattgaaatagaaacacctaccttatccaaatcaactcctgagggagcacaagactttttagttcctgcaagaattagaaaagattgtttttatgctttagttcaaagtccacaaatctataagcagctcttaatgattgcaggagttgaaaaatattttcaaattgcaagggtctatcgtgatgaagatagcagaaaagatcgtcaaccagaacacacacaaattgatttcgagatctctttttgtaaccaaaaaatgattatgaatctagttgaaaaactcttttttagtgttttcttagatgtttttcaaatcaaaataaaaaagacttttcctgtttttaaattttcagaactttttgaaagatttggtagcgataaaccagatttacgttatggttttgaaataaaagatttcacctcgctttttcaagatcatcagaatcagttcactaaattaattgaagcaaaaggcattattggtggtattgaacttactaatattgagttaagtacagacaaaattaaagcattaagaaaaattgctaaggaccatgatgtgagtttagaagttcataataaaaataattcaacattaaaaacttcaattaaatgtgatgaaaaaaacactcttctgttagtagcaaataaatctaaaaagaaggcatgaactgctttaggagcaattagaaatgagttgaaataccacttggatattgtcaaacctaaccaatacagcttttgttgagttgttgatttccctctctatgattttgatgagaaaacaaatcagtgaatatcaaatcacaacatcttttcaaaacctaaacaagaatgaattgataattttgaatcaaataaaaacgaagcattaagcgaacagtttgatcttgttttaaatggttttgaaattggtagtggttcaataagaattaatgatccaattgttcaaaaaagactaatgaattctttgaacattgacccaaataagtttgcttttcttctagaagcttatcaatatggtgctcctgttcatggtggaatgggactaggtattgatcgtttaatgatgattcttaatcaaactgataacatcagagaagtaatcgcttttcctaagaataatcatggtattgaagtccatacaaacgctcctgataaaattgacaaagaggaggttaaatgatggataaaagaactagtgaaatag

SEQ ID NO: 27227 - DNA, 1527 bp, Mycoplasma genitalium
atggatctaaaaaaacaatacattattgccttagatgaaggtactagttcttgtcgatcaattgtttttgatcacaatcttaaccaaatagcaatagcacaaaacgaatttaacactttttttcctaatagtggttgagttgaacaagatccactagaaatttgatcagcccaactagctaccatgcaaagtgctaaaaataaagcacaaatcaaatctcatgaagtgattgcagttggtattaccaatcaaagagaaacaatagttttatgaaataaagaaaatggtttgcctgtttataatgccatcgtttgacaggatcaaagaactgcagcactatgtcaaaaattcaatgaggataagttaatccaaaccaaagtaaaacaaaaaactggattacctattaacccctattttagtgctactaagatagcttgaatcttaaaaaatgttcctttagcaaagaaactaatggagcaaaaaaagttgttatttggcaccattgatagctgattaatctgaaaactaactaatggaaaaatgcatgttacagatgtttcaaatgcttcaagaactcttttatttgacattgtcaaaatggagtgatccaaagagttatgtgatttatttgaagtaccagtttcaatcttacctaaagttctgagttccaatgcttactttggtgatattgaaactaatcactgatctagtaatgctaaaggtattgtaccaattagagcagttttaggagaccagcaagcagctttgtttggtcaactctgtactgaacctggaatggtaaaaaatacctatggtactggatgttttgtactcatgaacattggtgataaaccaacactctcaaagcacaatctgctcacaacagtagcatggcaactagaaaatcatccacctgtatatgcattggaaggtagtgtgtttgtagcgggtgcggctataaaatggttaagggatgcattaaaaattatctattcagaaaaggaaagtgatttttatgcagaacttgcaaaagaaaatgaacaaaacctagtttttgtaccagctttcagtggacttggagctccttgatgagatgctagtgctaggggtattatcttaggaattgaagcaagcactaaaagagagcacatagtaaaagctagcttagagtcaattgcttttcaaactaatgatttattaaatgcaatggcaagtgatctaggctataagattactagcattaaagctgatggggggattgttaaatcaaactatttaatgcagtttcaagctgatattgcagatgtaattgtttctatccctaaaaataaagaaaccactgcagttggtgtttgttttttagctggacttgcttgtggattttgaaaagacattcatcaacttgaaaaactcactactcttgataaaaagttcaaaagcactatggacccaaacataagaaaaaccaaaattaacagttgacataaagcagttgaacgtgctttaaaatggaaagaaattgattaa

SEQ ID NO: 27228 - DNA, 267 bp, Mycoplasma genitalium
atgaaaaaatttcaagcagttattaaagacccagtgggaattcacgcacgtcctgcttctatccttgcaagtgaggctagtaagtttaaatctgaacttaaactggtagctccaagtggtgttgaaggtaatattaaatcaattattaacttaatgtctttaggaattagacataatgacaacattactatcaaagcagatggagctgatgaagaagaagctttagcagctattaaagcttgtcttgaaaaaaataaagttatctaa

SEQ ID NO: 27229 - DNA, 948 bp, Mycoplasma genitalium
atggaacaaccgttgtgtgttttagggattgaaacaacctgtgatgatacaggtcttagtattgtcattgatcaaaaaatcaagagtaacattgttatctcttctgctaacttacatgtaaaaacaggaggagttgtacctgaaattgcagcacgatgccacgaacaaaatctctttaaagcaataagagatttaaattttgagataagagatttatctcacattgcttatgcatgtaatcctgggttagcaggatgtttacatgtgggagccacttttgctagaagcttaagtttcttattagacaaaccattgttacccatcaaccatctttatgcgcatatcttttcttgtttaattgatcaagatttaaataagctgcaattaccagcattaggccttgtaatttcaggtggacatactgccatttatctagttaaatcattttatgaacttgaactaattgctgaaactagtgatgatgcaattggtgaagtttatgacaagataggcagagcaatgggctttgattatcctgctggtagtaaaattgatagtctttttaataaagaattagttaaacctcactatttctttaaaccttctactaagtgaactaagttttcctattctggtttaaaatctcagtgtttaaacaagattaaacaaataagtgctaataaaacccgaattgattggagtgaattagcatccaattttcaagctactattattgatcattacattgatcatgttaaaaatgcaattaaaaaatttgcccctaaaatgttgttagtaggaggtggagttagtgccaattcttatctatctaacagaattagtacattaaatttaccctttttaattgctgatagcaaatacaccagtgataatggagcaatgattggtttttatgcatcacttttaattaatggcgataagaattaa

SEQ ID NO: 27230 - DNA, 1152 bp, Mycoplasma genitalium
atggcgataagaattaaaagtacaagagttggtagatttgtttctgaatcagtgggattaggtcatcctgataaaatttgtgatcagattgcagatagtatcttagaccaatgtttactacagagtaaaactagtcatgtagcatgtgaagtctttgcttctaaaaaccttattttaataggtggtgagatttcaacaagtggctatgttgatgttgttcaaactgcttgaagaattttaagaaatttaggttacaacgagactgatttcagttttttaagctgtatcaacaaccaatcactagaaattaatcaagcagttttaaaaaataatgagattaatgcaggagatcaaggcattactgttggttatgcagtgaatgaaacaaagcaactaatgcctttaggagttttactagcacactcgtttttaaaacaagcagaaaaactaacaaaacaatttgattttttaaaaaatgatatgaaaagtcaagtggttttaaactacagtttaaaccaagttgaatgtgaagaagttttactatcaattcaacacactaatgctattagtttaacagaattgagaaaagtgattgaaaataatgtaattctacctgttttaaaccaatatggttttcaagataaaaagccaacttgtttagtgaatcctggtggttcttttgttttaggtggacctatggcagatactggactaactggtagaaaaatcattgttgacacctatggtccatatgctcaccatggtggtggtagctttagtggcaaagatcctagtaaggtggatagaacaggtgcttattttgcacgttttatcgcaaaacatattgtaagtttaggctgggccagtgagtgtgaagtcagtattagctgagtcttttcaaaacccaatccacaatctattactgttaagtgttttaacactaacatacagtatgatgaagtgttaattaatagagttgtaaataactatttcaactgatcgattactaaaattattgacaagctaaaattacttgattttgttaagtattctgattatgcagtttatggacattttggtaatgatctttcaccatgagaacagcccactgaattggataaattagaatgcttaatcaaaaatttccattag

SEQ ID NO: 27231 - DNA, 1341 bp, Mycoplasma genitalium
atgttcaaagcaatgttatcaagcatcgttatgcgcacgatgcaaaaaaaaattaacgctcaaacgatcactgagaaagatgtagagttagttctaaaagagattagaattgcattgcttgatgctgatgttaacctgcttgttgttaaaaatttcatcaaagcaattagagataaaacagtaggacaaaccattgaacctggtcaagatttgcaaaagtctctattaaaaacaatcaaaacagaactaattaatatcttaagccaacccaaccaagaactaaatgaaaaaagacctttaaaaataatgatggttggtttacaaggatcaggtaaaacaacaacttgtggcaaactagcttattgacttgaaaagaaatacaagcaaaaaacaatgttagtaggcttggacatctacagacccgctgccattgaacaacttgaaacgctttcacaacaaactaacagcgtattttttgcacaaggcactcaaccagttgctaaaacaacaaaagcagcactcagtgcttttaaaactgcaaaatgtcaaacaatcatttgtgataccgctggtagattacaaacaaatgaaacattaatggatgaattggtaagtgttaaaaatgaattaaatcctgatgaaattatcatggtagtagatggattaagcggtcaggaaattatcaatgttgctcaaacgttccacaaacgtttaaaactaactggatttattatcagtaaattagacagtgatgctagagcaggagctgcactttcattagcttcacttttacaagtacccattaaattaattggtgtttctgaaaaattagatggattggaacaatttcatcctgaaaggatagccaatcggatcttaggtttgggtgatgtaatgagtttagttgaaaaagctgaacaagtttttgataaaaaagatttaactaaaaccatcagcaagatgtttttgggaaaaatggatttagaagatcttttgatctacatgcaacaaatgcacaaaatgggaagtgtcagttcactgataaaaatgttgcctgctaacttttctgtatcagaagaaaatgctgaattaattgaaaacaaaattgaactatgaaaggttttaattaactctatgactagagaagaaaggagacatcccaaattaattaatcgtgatcctaatagaaaacagcgcatcataaaaggttcagggagaaaaatggatgagttaaacaaactgatgaaggaatgaaataagatgcaactaaaagcaacagaaatgggtaaactattaaaaacaggtagtaacccgtttggtggatttggacaattcttttaa

SEQ ID NO: 27232 - DNA, 672 bp, Mycoplasma genitalium
atgaaattagaatacaaccggattattgatagcaccttagtcaaagctgatacgcttccccatgaaatagatactttatgtgctgatgctcataaataccagttttttgcagtgtgtgttaatcctagttatgttagttatgctaaaaacatcttgaaaaatactgcagttcaactctgttgtgttgttggtttccccttaggacaaacaacccaaaaacagaaggtatatgaagctaagattgctattaaagagggagcggatgaaattgatatggtaatgaatattgctgagtttaaaaaacgttgtgcttgtgttattactgaaattagagctgttaaaaaagtgtgtggcaagcgtaaattaaaagtaattattgaaactgcacttttaacaaatgatgaaatcaaagatgcagttaatgtttgcattgatggcaatgcagattatgttaaaacttccactggtttttctttccgtggtgcatctttagaagatgttcagattatgaataatgctgcagcaaatttaattaaaatcaaagcttcaggtgggattaaaacagcaaagcaatttatagatttatttcaagctggagctagtagaattggaacttcaaatgcggtccaaataatgcaagaattaaaaaaaatgaaccatgaatatcattaa

SEQ ID NO: 27233 - DNA, 1266 bp, Mycoplasma genitalium
atgaatatcattaatttaattaataaaaaacaacgcggaaaagctttaaatttagctgaaatcaattggtttgttaatgctgttttaaacaaaaccattgctgattatcaaattactgcatttttgatggctatttggtttaaagggatgaacccaaatgaactttttttattaacaaaagcaatggtggatactggtgaaattattaagtttaatcaccatggcaagattagtgttgataaacattcaactggtggtattggtgataaggtttctttagcattggttcctatcttaactagtttaggatttagtgttgctaaattatcaggaagaggccttggttatactggtggaacaattgataaattagaagcagttggagttaaaacagaattaactgaccaacaagcacaagcatgtttagataaaaatgattgttttatcatcggacaaagtaaggacatcgcaccagttgataaagtactttatggtttaagagatattactggaacagttgatagtttgcctttaattgcatctagtattatgtctaaaaagctagcagttatgaacgagtatattttcattgatcttaaatatggaaaaggtgccttttgtaaaactaagaaaattgctaacgaacttgcaaaactgatgcaaagtattgctaaaagttttaaaagaaagctgtctgttaaattaagtgatatgaatcaagtacttggtaaagctgttggcaatgtaattgaagttaatgaagctgttaactttctaaaacaagatttagatcaagtaggacaagattttattgatttaatgcaaacaattgttattaacattctacttgaaacaaaacaagcaaaaaccaaacaaaaggctattgaactttatcaggatgttttaactagtaaaaaagcatgaaatcgctttttatcttttattgaatctcaaggaggaaatgttgaattatttactcaaaaagaaggtttttttaaacctaagtataaggcatctataaaagctgaaaaaagtggtatactacattttactgatccaattgatttagctaaaattgggattaatctaggggcaggtaggatgaagaaaacagatcaaattgatccaatggcagggttatttttaatgaaaaaagataatgagtctgtggcagttggagacactgtattaaacctgtatagttctagtcctattagcaatgaatatatctctgctgctcaaaaaacaataattattaataaataa

SEQ ID NO: 27234 - DNA, 1653 bp, Mycoplasma genitalium
atggataaacttagattagaagttgaaagatggttaaatcatcctaatgttaattgggagttaaaacaacaaattaaggagttgaatgaatcagaaattcaagaactttttagtttggaaaaacctttatttggcactgcaggtgtaagaaacaaaatggcaccaggttatcatggtatgaatgttttttcttatgcctatttgacccaaggttatgttaagtacattgaatccatcaatgaaccaaagcgtcaactacggtttttagtagcacgtgatacaagaaaaaatggtggtttatttttagaaacggtttgtgatgtaattacatctatgggtcatttggcttatgtgtttgatgataaccagccagtttcaacacctctagtgtcccatgtcatttttaaatatggttttagtggaggtattaatatcacagctagccataaccctaaagatgataatggttttaaggtttatgatcatactggtgcacagcttttagacacacaaacaaaccaattgttaagtgatttaccttgtgttacatctatgctagatttggaattacaaccaaatccaaagtttgtccatactcttgacaatgaaaaggtttataaaaactatttcagagagttgaaaaaggtgttggttattaacaacaacaatttcaaagacattaaggtagtttttagtgggcttaatgggacttcagtttgcttaatgcaacgctttttaaagtaccttggttatagcaatattatcagtgttgaggaacaaaattggtttgatgagaattttgaaaatgctcctaacttaaatccagagtataaagatacatggatattagcacaaaaatatgctaagaaaaataatgctaagttaattattatggcagaccctgatgctgatagatttgcaattgcagagttaaataataatcaatgacattatttttcaggtaatgaaacaggagcaattactgcttactataaacttaatcataaggtttttaaatcaccttacattgtctcaacttttgtctcaacttatttggtaaataagattgctaaaagatatggcgcttttgtgcatagaaccaatgttggttttaagtacattggtcaagcaattaatgagttatcacaaacaaacgaattagttgttggttttgaagaggcaattggtttaataactagtgataaattaaaccgcgagaaagatgcttatcaagctgctgcattattgcttgagattgctagacattgcaaagaacaaaacatcacgcttttagatttttataaaagaattctttctgagtttggtgaatatttcaatttaacaatatctcatccctttaaagctactgctactgattgaaaagaagagattaaagctttatttaatcaacttataaatgctaatttaactgaagtggctggttttaaagtagttaaagtccatcttgataaacaaacaaatatcttagagtttggttttgaaaatggctgggttaaattccgcttttcaggtactgaacctaaattgaaattttactttgacctaactaatggcactagagaggctctagaaaagcaagctaagaaaatttataaattctttgtaaatttactcaaactcaacaaagcttaa

SEQ ID NO: 27235 - DNA, 951 bp, Mycoplasma genitalium
atgcaagctagtgaattaacaccaaagtggtatgtagctcctgttagtattaaagatgaagctgttgtaaaaaatctaaaagctaaaattcaagctttaggatttaatcatgagattgttgatgttaaagttctaaaagaaagggaagttcatgaagaagtttattcattaaaatcaggaaaacttcctcgttccttaaagaacactacttttaacaaatggtttgttcttgatgattaccgttatcttagggtaaaaattagtgaaaaaaatctccttggtagatacatctacataaagatgatttatagtgaagatgcttgaagaattgttcgtaacttccctgggatcactggcatagtaggttcttctggcaggggtgctttacctatccctttagatgaaaaagatgctaataatttagaacaaatgcttaaagggatatcaatcaatcctagcaaacgaattatgctaacaaatactgccattattgaaatggacagtgataaatttgatgaaaaatttcaatatatcttaaaacaaaaacaagccattcaaaaaccaaaagaggatgaagattcagaaattgttgatgctgaaaaactaaaagaagcttttaaaaaactacaaaatagtcaagaacaagatgaatggaaagaaaaagcaacgattattcaaagtgagcaaaccaaacttgatccatcagtattagttccttttttgggcaaatatgaaattcttgatactgacaataaagttgaacaactctttgaatttagtgttggtaatttagtagaggtacatttaactgatactattcatgttcaaggacagataaaagcactttatcaaggtacagttaacaaagcagttgtagagatagaattaacatctaaaacccaattaattaacttacctttagaaaatttaagctttgttgagtttgagtaa

SEQ ID NO: 27236 - DNA, 834 bp, Mycoplasma genitalium
atgaaaacacttaaagtagttgctacaccaattggtaatattcaagagataagtgaaagagctaaaaaagcgttacaagattgtgaagtgttattctgtgaagatagtagagtaacaagaaaaatgctggatttactcaacattgattgcaagcaaaaaaagtttgttattaacaacagttttaaagaaaaacagaatttaacttttgctgaggaatttataactaactttaagtgttgtcttgttagtgatgcaggttatcctagtttatctgatcctggtaatgaaatgattaattggatcatatcaaaaaataaggagataagaatcgaagttattaatggtcctagtgcattaatgtgtggattgatcactagtggttttaaaacaacaccacttttgtttttaggttttttaagtcacaaacaaaatcagctcaaaaattatttaagtacctatcaaaatcagaaaagcactatcgttttttttgaagcagtgcataggttagaaaatactttagaaactgtgaaaaatgtttttaaaaacaatgacgtttttataggaagagaattaactaagttacatgaatcacattattgatttaacaccagtgaaaacactttacctgacatcactttaaaaggagaatttgtaattgttattgataatcaaaatattaatcaccaaacattatcttccaatcaatacttagtatatgaaataaagaagttaatggatattggtgttaagttaaaagatgcatgcaattatttagctaaaaaaatgcatttaaaatcaagtatgctctatacacttttccatgaaagtatttaa

SEQ ID NO: 27237 - DNA, 537 bp, Mycoplasma genitalium
atggatcaaaaagcacgtataaaaattgatggggtaattgtttgtgagggtaaaactgaccaagctaaattacagcaaatttttgatgtagatgtaattacaacaaatggttcagctttaaaaaaagaaactattaacctaattaaaaaaatcagtgaaaagcaaactgttatcttgttattagatccagatcaacaaggcaaaaagattagaagtaaattagaacaacatctaacaaactattacaactgttatgttgatatgaatgcaaggttaaaaaacgctaaaaaagctggtattgctgaaatggaaactagtgctttaattgctgctttaaataatcgtgttgcaatcacaaaaaatgctaatcaaagcatattatgagatcagtatttaagcttaaagttaaatgataagaaaaagcgattacttttatgcaataatcttaatttaccttattttaaccacaagcaactatttaaaaaacttaacttattaaatctaacttttcaagatgtatgaaaacacttaaagtag

SEQ ID NO: 27238 - DNA, 894 bp, Mycoplasma genitalium
atggtttgcgaacactttgctgatggtgaaacttatatccgttttgatgaatcagttcgtaacaaagatatctatatttttcaatcaacctgtcctaatgttaacgatagcttaatggaacttttaattgctattgatgcattgaaaagaggtagtgctaaaagtattactgccattctaccctattatggatatgcaagacaagatagaaaaacaaaaggaagagaaccaattaccagtaaattgattgctgatatgttaacaaaagcaggtgctaacagggttgttctaactgacattcatagtgatcaaacccaaggtttttttgatattcccgttgattctttaagaacttatcacatctttctttttagagttatagaactacttggtaaaaaagacttggtggttgtttcccctgattatggtggggttaaaagagcaaggttaattgcaaatacactagaactaccattagccattattgataaaagaagaccatctcataatgttgctgaatcaattaatgttttaggtgaagtgaaaaataaaaactgtttaatagttgatgacatgatagatactggtggtacagtaattgcagcagccaagctattacaaaaagaacaagctaaaaaagtgtgtgtaatggcaactcatggtttgtttaacaatgatgcagaacaaaagtttatggaagcatttgatcaaaaactaattgatttcttgtttgtatcaaactctattcctcaatataagtttaaagctgtaaagcagtttgaagtagttgatctagcatctttatatgaagaggttgttctgtgttacgctaacagcttatcagtttctgcaatatatgaacgtcacattgaatggatcaaaaagcacgtataa

SEQ ID NO: 27239 - DNA, 438 bp, Mycoplasma genitalium
atgttaattcttgttaacaatcctaaggctaaatatgactatcatttaatggaatcttattgtgctggaatagttttaaaaggaagtgaagttaaagctttaagtttaggtcaaggtagtttaaaagaagcttatgtttttgttaaaaacaatgagctttttttagaacagttcactattccaccttatagttttgcaggtccattaaatcacgcttcagatagaattaagaaacttttattaaataaacatgaaattaaacaaattatcaataaaaaacaacaacaatctttatctgtaatcccaagtaaagtattctttagaaatggcaaaattaaagtggaaatttgattggcaaaacctaaaaagaaatttgacaaacgtgaaactattaaaaagaaaacaatccgacgcgagcttgaagctgagtatcgataa

SEQ ID NO: 27240 - DNA, 894 bp, Mycoplasma genitalium
atgaaattatctgtaattatacctacttacaattgtgcatcatttattgaaaaagcaattaattcaattgttaaaaatagacctaatgatttggaaatagaagttttaattattgatgatggatcaattgacaatactaacaaagttattaagaaaattcaagaccaaattaataatttaactttgcagtatttttacaaaagtaatggtaactggggtagtgttattaattatgttagaaacaataaactagcaaaaggggaatgagtaacagtattggatagtgatgacattttttcaaaaaaaacaatttctatttttcaaaaatatgcccaaaaacaaagatatgatgcgattatttttgactactataaatgctgaaaaaagtttttgtgaaaaattcctacctatgcaaggtttagaaaagaaattaaaggtgaattgaaaaaacaaacacctttttgtattcccttagctaagttttttaaaaatgaggttttctatcaacttcctaaactaagagaaaatgttggttttcaagacgctatttatacgatgcatgcattacaaattgcaaataatgttttccatgtttctaaagctggaggatattacttttttaaaagggtaggtaactctatgagtatcccttgacacagttctaggtttgatattgaagtacaaatctgcaaggatctgattgaaaataatgcgcaagagatcgctttagtgcatttacttcgtttaaaatttcgtaatttagttgatgataaaaagattaaatttacagttaaaagagacttttgttttagtggttttagttggtatagtaggttaattttatctctgatgtataacttctgattgaaacgttatttcaacagttctgaataa

SEQ ID NO: 27241 - DNA, 2043 bp, Mycoplasma genitalium
atgtttaaaaatttattaagaccatccctattttttaactggagccaaaaaacatttaaaaataaattttcgtttttaaaacaagcagcaaatgcattacaaaaacaggctgttatcaatgataacaatgttgcatttgaagctttaaaaaagcgtgaagaagagattacaactggaattattactagtttagctttacctcacttacaaagtcaaagtgttatagaaccttttgttgctgtatttaaggttaaaaacttagattgacaatcattagatcaaaaaccagttaaattgatatttttaattggtgttcttgttgacaaaaccaatttgcatcttgatttcattagtaacttttccaagttaatgttgaatgaaacatttgcaagtaaggttttaaatgtcactagctataacggcttgattaaactaattgatctttttaaccaacaaaaagtgcaagaccaaccagctgttgaaacaaaaaaagagtatgactttgttgctgtaacagcatgcccaactggcattgcccatactttcatggctaaagaagcgttggaagcatttgcaaaaaagcataacttatatgtaaaagttgaaactcaaggtacagatgggatacaaaatcaacttacaagtgacgatattaataacgctaaaggtgttattcttgcttgtgatcgtttaattgatttctctaggttttatgcaaataagaatgtgattgaagtgtcaactactaaagccattaaaaaacctgatgaggtgtatgaattaattaaaaaccaaaagggtaaacagcttgcaaatagtgctaaaccaactaatcaaacccaattagctgaaagtgaaggggaattcaactttaataattttcacaagcggatttatcgtgccattttaagtggtgtttcttacatgctaccattcgttgtttttggtgggatattaattgcactctcttttctaattgatataaataacgctaataatgctggtggtaactttggcacaattaatcctgttgctaactggttaaataagctaggaggaatttcctttagtttaattgttcctatcttatctgcatacattgcatatgcattggtatcaagacagggattattacctggttttgttgttggtttaatctcttcaggacaatttttattaaatattgttctgaccaatggaacaattgaatggttagcaccatcacaagtatcaagtggcttttttggtgctatctttggaggacttttgagtgcttgcttaataattgttcaacaaaactacatctataaaaaattacctcaatctttgcagggaattaaaaacatcttgtttattcccttgtttggtactttattcactgctggtttattttgggttattaacattcctttaatttatctaaactatggattaagtctgtttttaaatattatgaacagccctatcctagcacctttacttggttttgtaattgggttgatgatgtgctttgatttaggggggccaattaataaagcagcttatgtttttggtgttgtttctttacaaaatcaaaatgcaggaacaatttcgatggctgcagctatgctatcagggatggtacctcctttatcaattgctttggcagcttccattcgaaagagctgctttgataaacaggaattacctgcagcttatgcttgttatctgatgggattgagttttattagtgaaggtgctatcccatttgttgttaaaaaacctaaggtgatgttaactgctaacttaattgctggagcaatttgtggagcattaacaggagcatttgccttatcaattcgtgctcctcatggcggtgtttttgtgtttgcacttttaaaaactactttacaagggattgaaggagctacattacaaactggagttggcattggtttggcattggtttgtttaataattagtatgatagttggtagtagtattatcattggctatgacttgattgcaaaacataaccaaagaaagcaaaatctgaatagttaa

SEQ ID NO: 27242 - DNA, 768 bp, Mycoplasma genitalium
atgaaatcacttggttttgatccaactgtcattacttttttgggacaacccactaaaaacttatttttagagttggtaaaaccttatgatctaaatatagttagcttcatttctgaaactaaaacaagaattaaccttaagttattaaaagatgaaaaaactactgaaattaatgatttaagtcctttaataacagatgctaatctaactgaattgttaacttttttaaaagctaatgttaagaataatgatttggttatcatcaacggaagatttaaatttgaagctttagaaaaagttctaaacttggtctttacattaacagaaaatgtggttatagatgttgatgaaagcaaaatgttaacgcttttaaatcagtctaaaccactagttatgaaacctaacattgatgagtttcaaactatgattaatactttttttcacgatcaacaaagcttaatagcagcaattaaaaaatttcattactgtaagctcttattattatctgatggtgacaaaggagcttatctttttgatcagaataagttattgtttgtaagttctatcactcctaaacaagtagttagcaccacaggagcaggtgatactttgttggcagtttttttagcaaatttgattctaaaggtagatttaaaaactgctttgattaaagcaactaactatgcaagtgcaacaattagtaagttaggtgttgttgatagtaaagacaaaattagtgttataaccccaaaaagttactatttataa

SEQ ID NO: 27243 - DNA, 3996 bp, Mycoplasma genitalium
gtgttaaacctaattaaaaatgttattcgttctttaaagagtgctaagattgctttaatagcgttaacttttttaatttttgttgctgttggtggttttgtgttgttaaataacacagttaataattttaacgctgcttttaactatgtcacccacactggtaaattaagcaatgccatcattaatgagcgttatgactttggtaaattagagtttcaagaacagaccaataattctcagaatagtagcgacagttttactttaactttaactaatgattcaagaacaagttttattaataatgccttgagaactaacccttctttgtatgaaggattagtaacccaaacttttagctatcaaaacaaaactgaaatgactgaaaaaaccaatatagttaatcagtctaaaattattgctgctaacaatcttaacaatgcattaagtaaagataaacagctcttagtttcaggtcaacttgaaaaactaaatgctgtttttcgggaatataaagctattaatattactgacaaaagtgtttttaaaaaattgatagtatcagaacctaatgatttggtaaatagcctagttatttttgatggtcaaaatttatctagctccaaacaaagtgatttcaataattttttaaatcaatttaacgaaattaaatcaaagggtaaagataatttaagtactactttaaaaactgggcagtatcaggcatttttacaaactctttttgattatgctcaagcgagtgaaacaacattaaaagatcagcttcaaaagttaatttcaaatccagattcaagtgaaacaaatcaggttaaaaatctctttgatactccaagtacgcttactaatattgggggtcaattaaccttacaatgaacagaaaatagcctaacaaaacagatagttatctttgatcctagtagttatgaaacaatagtcgctcctggtaactgaacttatcaacaacaattaggtaaagaagtttatcctgatattaacaactgagaaagtattaaaaaactaccacttgaacaatttgaaagtgaatttttaaaaattgatcaaaagtataagatcagtattgataatatcgattatttagttattggggttggaattagtccagattttgtttatcctgtttttagtgcatctttaattgttcctaacattgaaaatgaacaactttactatgttaaccaaactggatatgaaagaactttttcctcttttttaacaaatccagttgaaacagcaatagtagcaagattgattaatcttgaaagtgatcttaatactatcaaccagtgagctgttgaaaacatgtcatgaccaacaaacattaaagctgcatacagtagttctgataccactaatattttgaatttattagcagcaagaacagtttttatccctaatctaattaacacaattaatttagtggctttgtttttaactattgctatcctaactgttgctataattgtcagcattttaatcctgattagttatttaaagaaaaacactgagcaaattggcattttaaaagcaaatgggttaagtggtaaaaagattaaccttagcttgttaatctttgggttaattcctgctatagtaggtgctatttctggatatagctttggaattggatttcaagacgtagctattcatctatttagtaactattgatttataccaacagcaacatcaagtttttcagtagtaggattgttgtttttttcactgtttgttatcttaattatgagtagtatatcgcttttagtgggatcaattatcttaaagaaggatgttgtaaagattttaaagcatgacagtgaatttaaagtttcaagattaggacttagttctaagaaattgtttgctaggtttggtattatgaccaggtttagagtagcattagcatttaacgctccttgaaaattagtttttctaaccttgatgagttcatttacaatgatgattttaaaccttagttttgcaactaaagatagctttgaaaatgctcaatcaaaaactaatttaactaatcagaaccaccaatatgaatttgaactcgcttcagcaacaacacaaagtggtttattgaagtgacagttatttgcagaactaggtacaactgataaaagaagtgaaagtagtgtaaagcttgcaaataaaaggatggatattagtaatgttgatgcatctaaagattgaaagaaccaacaagtaattaattttttaagcgatgctagtggctttagtaatgatttaaattaccttgaaaacattgttcaatccaagataggtttagactattcattgggatttaacaatattgtttcaaatccctgaaggttaagtgaaacattaatgccaactaaccaagcatctgcttccaacactgcttttcaaaattttttaaaagcaatcattactataaatccaagccaaggatcgcaattcattaaacaaacccaagatccattaacaaaaagatttatctatgcaattgacagtgataaggcattaaaaaataataatgaacaaaacggttcccaaaaccacttaactttaaatgatgattttgctaaatttctctacagtcaatttgaattaattaaaaagagtgggaatgcaagtaatgaagatttaaatgcaattgattttgaaaacccccaaacaatcagagatttttacaacaagtacaatgctttaccaccattagattacaaacttagctttaatgtaataggtttacccaaagagacaattgctggacaaattgacacccctaagtatggatttttaacccttcatggtgaatatcaaaatactcctatcaagattaaaggtattaaagattgaaaagataaagtggataatttaggtccagttttgagtgatcaaaacaaccacattattaatcaagaattgtttaaaaattattcttttgatcctttgatagttaacaattctgctgcaaaaaaataccaacttgcaataggtagtgagattaatattgcagttaacaacagcttcaaacggattgacaataagatcattaatcaagatcctttagtgaatgctacctttagagttgtagggattaacaattccgctcatgatcctgaatttttcactagttatagtactgcttttaaagtattggaatatcccaatgaatggttcgtaaaaaaacttccatttaatagcttctatgctaattcgcttttaagttttgttcaatctacttcgctattttctgaatctggtatttttcctgctactagtagtttttcaactaataacactgtacttgttgagttaattaaaaaaaccattaattacaagaatggtcaaatgaatcaaacttcaagtaatgactcttctaagaaagaaaattaccaaaaattgcaaaaagcattaggaatatcaactgatttggagattagtaaagttaatgaatatgttgctatcttagcaagggtttataatggtttaccttacaactctactattagctttattagcaatgttgctgctaacaacgctttatttggaaatattgctaacaccaccaagcagattcaagctgttgtaattgcagtgattattcctataatcatgttgattattcttttggtttcaactaccttaattcaagagttgaaaaaaattgctattagattaaaagcattgggatattccaatttaaaaattctcgcttcatttttatcaatatacatccctttatttgcctttggtttgttgatttctatccccttttctatctatctaattgcactacataatgaggtaatttttgcaagctcatcgatctttttagatgcttttttaagttttgaaagtgcaattggttcaatgttagttttactagcggttttatcaattacctttgtgttgaattgattagagttgaacaaaattaagattgacaaggaaatcaaaaactcctaa

SEQ ID NO: 27244 - DNA, 1401 bp, Mycoplasma genitalium
atggattttttctctttaaacaaaatcataaaacccaaccagaaattcactagtaatgaagctgaatttctacagatagctactgattatttggaggaaagtcaaaactatcttcaaaagggtttaaagcaattaaaaaaagaatataaaagatccattatttataaccctaaccttgaatataaacgctttgttaaatgaaaagaaaatttcactgaaacatttgaaagttattatgacaggttttttattaccaaatacaaccattattcactaagcttactttttagctttattaatgaacagattgaaacagttattgctagttacaactcatttctaaatgagcataataagttagcttttaataaagttagttttagttttgaaaagaaactttttgaagctacacaacagtttaataacttagaaaaaaacactgctattagtgatgatttaccgctccagtttaaagttagaacaactcaactaaaagcccaaagagaaagggaattgaagaacttgttgaataaaatcaagcttaaaaatttaagtgaaaaaaaacaagaaattttgttaaataactggtttaatagcaacgaacgtttgtttttaaaaaatgaagtgaaaaaggttaattgactaaactcgccaagacaaaaacaacaagcagctcaaattgatgatcaaaacattattgaattgaaaaatgtgtataaatacatcactaatggcattactacaaatgcagttcttaaaggagttgatcttgccattaaaagtcatgattttattgtgattttaggcccttcaggatctggtaaaaccacattactaaacattatttcagggatggatagagcttctagtggtagtgttattgtcaatggttataacatgatttgtttaaatgatagaaagctcactaaattccgtcaaaagtatgttggttacatctttcaacaatacggtttattacctaatttaacagttagagaaaacattgagataggagcaaatcttcaaccagatcctagtaaaaggatcagcattgatgcacttttagaagcggttgggatggatagtttgcaaaagaagcttcctaatgaattgagtggtgggcaacagcaacgtgtttccattgcaagagcttttgctaaaaaccccttattaatttttggtgatgaacctactggggcacttgatcttgagatgacccaaattgttttaaaacagtttttagcaattaaaaagcgttatcaaacgacaatgattattgttacccacaacaatttaattgctaacttagctgatttagttatctatgtagcagatggaaaaataaaatcactacacaggaacttaaatcctaaacaggttgaagagatccattgaatttag

SEQ ID NO: 27245 - DNA, 1947 bp, Mycoplasma genitalium
atgaaatacttatatgccactcaacaccttactttaaatgctattaagcatgctaagggaggacatgttggcatggccattggtgcaagtcctatcttatttagtttatttactaaacactttcactttgatcctgaccaaccaaagtggatcaacagagatcgctttgttttaagtgctggccatggtagcatggcattatattcaattttccattttgccggacttatttctaaacaagagatcttacagcataaacatggtcaaattaacacttcttcccatcctgaatatgctccaaataacttcatagatgcatcaacaggccctttaggtcaaggctttggcatggcagttggcatggtgttagcacaaaagttattagctaatgaatttaaagagctaagtgataaattgtttgaccattacacctatgtggttgttggggatggagatctacaggagggggttagttatgaagttagtcaaattgctgggttatataaattaaataaactaattgtgcttcatgattcaaatagagtgcaaatggatagtgaagtaaaaaaagttgctaatgaaaatctaaaggttaggtttgaaaacgttggttggaattacatccatactgatgatcaactagaaaatattgatcaagctattattaaagccaaacaatcagataagccaacttttattgaagtgagaacaactattgctaaaaacacccaccttgaagatcagtatggaggacattggtttattcccaatgaagtggactttcaactttttgagaaaagaacaaatactaactttaacttttttaattatccagatagtatttaccactgattcaaacaaactgttattgaaagacaaaaacaaattaaagaagattacaacaatttgctaatttctcttaaagacaaaccactttttaaaaaatttactaattggattgacagtgattttcaagccctttatcttaaccaactagatgaaaagaaagtagcaaaaaaagatagtgctactagaaactatttaaaagattttttaaaccaaattaataatcctaattccaacttgtattgcttaaatgctgatgtatcacgttcttgttttatcaagataggtgatgataatctccatgaaaatccttgttctagaaatatccaaataggaattagggagtttgcaatggcaacaataatgaatggtatggcacttcatggtggtattaaagtgatgggtggtacttttttagcatttgctgattattcaaagccagcaattcgcttaggtgcattaatgaacttaccagtattttatgtttatacccatgactcttatcaagtagggggtgatggtcctactcatcaaccctatgatcaactaccaatgttaagagcaattgaaaatgtttgtgtatttcgtccttgtgatgaaaaggaaacttgtgctggatttaactatggtcttttaagtcaagatcagacaactgttttggttttaacacgtcaacccttaaaatccattgataacactgatagtttaaaaacactgaagggtggttatatccttttggatagaaaacaacctgatttaattattgctgctagtggtagtgaagtgcaacttgcaatagagtttgaaaaagttttaactaaacaaaatgtaaaggtaagaattctgtcagttcccaatataactttacttttaaaacaagatgaaaaatatctaaagagtttatttgatgctaacagttcacttatcaccatagaagctagtagtagctatgagtggttttgctttaagaagtatgttaaaaaccatgctcatttaggagcttttagttttggtgaatctgatgatggagataaagtttatcagcaaaaagggtttaatctggaaaggttaatgaaaatatttacttccctaagaaattaa

SEQ ID NO: 27246 - DNA, 2727 bp, Mycoplasma genitalium
atgcagattagtttagttaaaatccgcaataagtttaaacaaagaaaccgtggttcttttcgtcagtgagttggtaagctttccaacggtttgatgatccctattgcagttttgcctttagcaggtatttttttaggaatcggtgatgccatttcttccaattcatctggcattgttggtgtgaaattttttggtgaatttattaaacaaggtggtaatgtagtttttgctaacttacctattttgtttgcagttgcaattgcgatcaccttttctcaagatgcaggggttgctggattttctgcttttgttttttgggccacaatgaacgcgtttatgagttcattaattattcctgttgatgcaaataatactgcttcaggttataacatcctttattgaaaagcagtacctcagtcagcaattgcttctactttaggattaaattcactttcaacttcagtttttggtgggattatagtaggggctttaactgcatatttatataacaagttttatgcaattagattgcctgatgtaattgggttttttagtggtactaggtttgttcctattatttgtatgactattgctattccagtagcattacttttattgatggtttgacctggtgtttctatcttattaaatttaataggaactgggcttggaatcttaggtggaagaggatatggtgctaacagtttaatctttggatatatagaaagagcactaattccttttggagtacatcatgccttttatgcaccattatgatatacaagtgcaggcggtagtttgcaagaaattgcaaatcaacaagtttggattagagctcctggtagtgattatgtaaccagagtgataggttgagaagattttaatactccaggaaaatgagttattcctgctgctttagctaatggaacaagtggaatgatgaatggagctactacaacaggacaagatagtacatctgcactttcaaaatacatgagtaaagaatcaacaaactttctaagttgaaaagaacttgttgatggtcttacacgtaaaggtaactttgatgaattggctaaaaacggtttattagatggttctaacaagatttgaattggtttaaaccagtcagggatcttaggtaaaaaagtactgttaagtgatggtaaggactacactattacctttaaaacttttgctaacaccacgccaacattctgaagccatggtgctcatgcacttttaccaattagtggaactccaagtgcaataactaatggagttactgttaatggtactgctaattctaaaacctataatgtcagtcagttcactgttgcagttccttctttaaacccagcacaatattcccaaggtaaattcccattcatgctaattggaattccagcagctggacttgcaatgatcttagctgctcctaagggtagaagaaaagaagctagttctattattggtagtgctgcattcactagttttctaacagggatcaccgaaccttttgaatttacctttcttttcttagcaccatggttattctatggtatccacgctgtattagctgcagtaagcttttgattaatgaacttattgagtgctaacgttggacaaaccttctcaggttctttcattgactttatcttgtatggggctttacctgatggtaggggttgattagcaaactcttacttagtacctattattggtatctttttagcattgatttatttccctaccttctatttcttgacaattcgctttaacttagcaactcctggtagaggtggtaagttaattactaaaaaggaatatttagcagcaaaagcagctcaaaaaactgatcaaactactaacactaactttaatcaaacccaaattgaagctggtatgttactaagagcttatggtggaagtgaaaacattgctgaattaggggcttgcattactaaattaagagtaacagttaaaaaccctgaacttgttaatgaaactattattaaagacttgggagcagctggggtaatgcgtaccactccaacattctttgtagcagtgtttggtactcgagctgctgtttataaatcagcaatgcaagatattatccaaggcaaagtaaattgaacagagttgcaaaaagtcttagataaaaatgatagtactgttgaaaaaccagaaataaaaccaaccccagttttaaaagttcaagatgaaattgtgatcctctcaccagttaatggcaccttaaaaccgctcacccaagttcctgatgataccttcaaaaatcgtttggtaggagatggaattgctatcttacctagcgatgggcacttcaaagcaccaggtgatgtgggtgtgaaaactgaacttgctttccctactggtcatgcctttatctttgatgttgatggtgtgaaagtaatgcttcacattgggattgatacagtaaaaattaatgctgataaaaaaccaggggaacaacttgaagtgtttgatgtaaaaacaaaacaaggagaatacactaaattaaagagtgaaagtgttgttgaagttgatttaaagaaacttaaacgaaagtatgatccaatcactcctttcattgtgatgcaagaatcacttgataacttcaagttggtgccaattcgccaacgtggtgaaattaaagttggccaacctttatttaaactaatttataaagataagaagagttaa

SEQ ID NO: 27247 - DNA, 855 bp, Mycoplasma genitalium
atgtcagatacaaatactgaaaaacctgagttagtttcccttaataagttaagtgagatgcgcactaacatcgggatggttaaacgttattgaaacccaaagatgggattctttatcgaacctgaacgtaagcataataacgatttattgaagcttgatctacagtaccaagcgttaaaaactgcttataacttcattaaggatgttgttaaaaatcacggacaaatcctttttgttggaacaaagaatgattatgttaaaaaactggtaattgatattgctaaaagagttaatgttgcatatattacccagcgctgattaggtggtactttaactaactttaaaaccctttctatctcaattaacaaactcaataaattagttgaacagcaaaagcaaaatgcaaatgatctaaccaagaaagaaaacctgttactttcaagagagattgaaagacttgaaaagttctttggtggggtcaaaaatttaaaaagacttcctaatctaatagttatagatgatcctgtttatgaaaaaaatgcagttttagaagcaaacagcttaaaaatccctgttgtggcactatgcaacaccaacaccaatccagagctagttgactttattattccagctaataaccaccaaccccaaagtacttgtttattgatgaatttactagcagatgcgatagcagaagcgaagggttttgaaaccttgtatgcttacaaaccagatgaacagatccaaattgaaattcctcccaaacaagaacgccaagttattaaccgttccaataccagaaacatcactaaccagcgcttaaacattaaccgtcaacaacaagaaactttatag

SEQ ID NO: 27248 - DNA, 2625 bp, Mycoplasma genitalium
gtgaacagttgaacaggacttagtgaacaagcggcaattaaaagtcgtcaagaacatggtgctaattttcttcctgagaaaaaagctacccctttttggttgttatttcttcaacaatttaaaagtttagttgttattcttttactgctagctagcttgttatcgtttgtagttgctattgtcagtggtttgagaagtaactgaaactttaaccatgatctgattattgaatgggttcaaccttttattatcttattaactgtttttgccaattcactaattggttctatccaggaatttaaagcccagaaatctgctagtgctttaaagtccttgacaaagtctttcacaagggtttttaggaatggtgaattaattagcattaatgttagtgaagttgttgtaggagatattatttttgttgatgcaggagatattatccctgctgatggcaaattactacaggttaataacttacgttgtttggaaagctttttaactggtgaatcaactccagttgataagactattgatagcaatgaaaaagctactattcttgaacagacaaacttagttttttcaggggcacaagtagtttatggtagtggcgtttttcaagtggaagcagttgggattaaaacccaagttggaaaaattgctaaaactgttgatgatagtgtaactaaactctcacccttacaacaaaaactagagaagataggaaagtgatttagttggtttgggcttggtctttttgctgtagtttttcttgtccaaactgctttattaggatttgataatttcactaataactgatcaatagctttaattggtgctattgcgcttgttgttgcaattatccctgaagggcttgttacttttattaatgtgatctttgcattaagtgtgcagaaactaactaagcaaaaagccattattaagtatttatcagtaattgaaacacttggatcagtacaaattatctgtactgataaaactggtactttaacccaaaaccagatgaaagttgtcgatcacttctgttttaattcaacaacccaaactgatctagcaagagcattgtgcttgtgtaataatgcttctatttccaaagatgctaataaaacaggtgatcctactgaaattgctctcttggaatgaaaagatcgcagtcaattagatttaaaaacctattacagggtttatgaaaaagcctttgattcaatcagaaaacttatgacagttgttgttcaaaaagacaaccgcttcattgtgattgttaaaggtgctcctgatgtgttattaccattatgtaataacgttcaaaatgaagtaaagaacattgaaaacttacttgatcaaagtgctggtcaaggcttgcgtaccttagcagttgctttaaaggttttatataagtttgatcaaaacgatcagaagcaaattgatgaacttgaaaacaaccttgaattccttgggtttgttagtttacaagacccaccaagaaaagaaagtaaggaagcgattttagcgtgcaagaaagctaatataaccccaataatgattacaggggatcatcttaaaactgcaactgtaattgctaaagagttaggcattttaactttagataatcaagcagttttaggtagcgaactagatgaaaagaagatcttggattacagggtatttgctagagtaactccccaacaaaaattagccattgttagtgcttgaaaagaagcgggatttacagttagtgttactggtgatggggtgaatgacgcacctgcattaatcaagagtgatgtagggtgttgtatggggattactggggttgatattgcaaaagatgctagtgatctgattattagtgatgataatttcgctactatagtaaatggtattgaggagggtagaaaaacttttttaacttgtaaacgagttttattaaacctgtttttaacttcaattgcaggaacagttgtagttttattaggactattcatcttaggacaagtttttaaaactaatttattacaacaaggtcatgactttcaggtgtttagtcctacccaactgctaattattaacttgtttgttcatggttttcctgctgttgcattagcagtacaacctgttaaagaaaaattgatggtaggtagtttttctactaaaaatctgttttacaaccgccagggatttgatttaatctgacaatcactattcttaagctttttaactttattgttctatagcttaggaattatatatgcaattaataaccgtgatttacaaactagcggggatctaattaatcgtgctggatcaacgtgcggtttttttattttgggtgctagtgctgctttaaactcattaaacctaatggtagataaaccattgcttatgacaaacccttggttttttaagttagtttgaataggttcacttgcttctatactggtatttttattgatcatctttatcaaccctttagggttagtgtttaatgtcttgcaagatttaactaatcacccagttttaataagctatagttttgggggagttattttgtatatggggatgaatgaagttgttaaacttattagattaggttatggcaatatttaa

SEQ ID NO: 27249 - DNA, 2421 bp, Mycoplasma genitalium
atggcaatatttaacttccttaagttaatttcacccaaaaacagaattctcagtaaggcaaataggattgccagtgaggttgagagttataaaaactactaccgtaacttaactgatcaacagttatttgaagagtcaaataaactagttgatcttgtcactaagcaaaattacaccattctagatgtttgtgttgctgcacttgctttaattagagaagtggtttaccgtgagactggtgaatttgcatatagggtgcagatcataggagcttttattgttttaagtggtgattttgctgagatgatgactggtgaaggtaagaccttaaccattgttttagcagcatacgtttctgcacttgaaaagcgtggtgtgcatgttgttactgttaatgaatatctagctcaaagggatgctaataatgcaatgaagatcttaaaacgggttgggatgagtgtcggttgtaactttgctaatctctcccctcagctaaaacaagctgcatttaattgcgatgttacctacaccactaacagtgaactggggtttgattatcttagagataacatggtccacagttatcaagataagaagatcagagagttgcactttgcaatagttgatgaaggtgattcagttttaattgatgaggcgcgaacgcctttaattatttcaggtcctagtaaaaatgagtttgggttatatgttgcagttgatcgatttgttaaatcattaactgaacaggagtttaagattgaccctgaatcacgtgctgcttctttaactgaacttgggattaaaaaagcagagcaaacatttaaaaaagaaaacctttttgctttggaaaacagtgatctttttcacaagatcatgaatggtttgactgctgtgaaagtttttgaacagggcaaagagtacattgttcgtgatggcaaggttttaattgttgatcactttacaggtaggatattggaagggagaagttacagtaatggcttacaacaagctgtacaagccaaagaatatgttgagatagaacctgaaaatgtgatagtagctaccattacctaccaatccttctttaggctatacaaccgcttagcagcagtatcaggtactgctttaactgaatcagaggagtttctcaagatttataacatggttgtagtaccagtgccaactaaccgtcctaacatcagaaaagaccgttctgatagtgtatttggtaccccacaaattaagtgaatggcagttgttaaagagataaaaaagatccatgaaacttctcgacctattctgattggaactgctaacatagatgattctgaactcttacataatctgttactagaagctaatattccccatgaggttttaaatgctaaaaaccattcaagagaagcggagatagtaactaaagcaggacagaagaatgcagttactatttcaactaacatggctggaagaggaactgatatccgtttaggtgaaggggttgctgaaatgggtggtctttatgtattgggaactgaaagaaatgagtcaagaaggattgataaccaactaagagggagagctgctagacaaggtgataaaggggaaactaagttctttatctcactaggtgattcattgtttaaacgttttgctcatgacaagattgaaagagcgattagcaaattaggtaatgaaacatttgacagtgccttcttttccaaaatgttaagtagaacccaaaaacgggtggaagcaattaactttgacactagaaaaaacctgattgattatgaccatgttcttgcaagtcaaagggaattgatttacaaacaacgtgataagtttttattagcaaacgatttaagtgaaatgatcgacaaaatgctagaaaagtttgtacaacagttttgtgatcaatatagaaaccaaaagaaccaaaacttaattaatcacattgcactagcagaagctttaaatcttgagatgaacatgcaaaacaccattaatccaaaggtgtttgaaaacatgacttttgatgttgctgttgataaaacccgtaacttagtagctaaaaagattagtgataaagttaatgttttgaccaaaccaattgctttaaacaggtttcgtgacattatcataacttcgatggataaacattgaactgaacacttggatagtgtttttaagttaagagaaggggttgtacttcgttctatggaacatacgagtcctttaaatgtttacattaaagaaacagatatcctttttaaaacaatgttgcaaaagattgctcaagatgtcattgtgcaaattgctaacctcacaactccagatgaatttgatcatagcttaatgcaagccaatgctttaaagaaactagcagcaattaaagcagatgaaaaatcaaaccaagagtaa

SEQ ID NO: 27250 - DNA, 1209 bp, Mycoplasma genitalium
atggcacttaaaagaagtaatttctttgttgataaagaccaacaactaaaggataatttgatcttagacatcactgatttacatgttaactttaaggttaaagatgggatcttacatgctgttagagggattgatcttaaggtagagaggggtagtattgtagggattgtaggtgaatcaggcagcggtaaatcagtgagtgttaaatcaattattggttttaatgacaatgcacaaactaaagccaaactgatgaactttaaaaacgttgatattaccaaactaaagaaacaccagtggaagtattatagagggacatatgtctcttatatttcccaagacccattgttttctctaaacccaacaatgacgataggaaaacaagtaaaagaagcgatttatgtggcttcaaaaagaaggtatttccaagctaaatcagacttaaaatttgctttatcaaataaggagattgacaaaaaaacttataaaagtaaactaaaagagatcaaacaaacctaccaacaaaaaataaaacctatcaatgtagagaaaaaaaccttagagatcctgcagttcattggtattaatgatgccaagaaacgtttaaaggcattcccaagtgagttttcaggagggatgagacagagaattgtgattgctattgcagtagcaactgaacctgatttaattattgctgatgaacctactactgcacttgatgtaactattcaagctaaggtattaactttaattaaacaactccgtgatctacttaatatcactattatctttattagtcacaatatctctttaattgctaatttctgtgactttgtttatgttatgtatgcagggaaaattgtagaacagggtctggttgaagagatctttacaaatccactccatccctatacatgggcattgatttcttcaattcctgaacagaaagataaaaacaaaccactaacttctatccctggagttattcctaacatgttaaccccaccaaagggtgatgctttcgctagtagaaaccaatatgctctagcaattgactttgaataccatccacccttttttgaagttactaaaacccataaagcagcaacttgattgctgcatccccaagcccctaaagttgaaccacctcaagcggttattgataacattaccttaaccaaaaaagcactgcaatttaaagatcaataa

SEQ ID NO: 27251 - DNA, 414 bp, Mycoplasma genitalium
atggctaaaaaaacagttacaagaatcgctaagattaacctaattggcggacaagcaaaacctggccctgcgcttgcttctgtagggattaatatgggtgagtttaccaaacaatttaatgaaaaaaccaaggatagacaaggtgaaacgatcccttgtataatcactgcttttaacgataaatcatttacttttgtcttaaaaactacccctgttagtaacttaattaaacaagctgctaaactagaaaaaggtgctaaaaatgcaaaaactattgttggaaaaatctccttacaacaagctaaggagattgcgcaatacaagttagttgatcttaatgctaacacagttgaagcagcattaaaaatggtgttaggtacagctaaacagatgggaatagaggtaactgattaa

SEQ ID NO: 27252 - DNA, 681 bp, Mycoplasma genitalium
atgaaaaaactatcaaaaaggatgcaagctgttaccaagctcattgataaaaacaaactttatcctatccaagaagcatttgaattaattaaaaaaacagcaattactaagtttgtcagttcagttgatattgctgttagtttaaaccttgatactactaaagctgaacaacagttaagaggtgcaattgcttttccttttagtattggtaaatctatcagaattttagctatcactgatgatgagaaaaaagctagtgaagcaggtgctgattttgttggtgggcttgataagatagaagcgataaaaaatggctgattagattttgatctaattatcacttctcccaagttcatgggagcattaggtaaactaggaaaactattaggaaccaggggattgatgccaaacccaaaaactgaaacagttactgatgatgtagttagtgctattaaagcttataaaaagggtaagaaagaatatcgaactgattcatttggcaacatccacctctctttaggtaaaacagataccaaaactgagcacttggttgctaatgccatggctttaatagatttaattaagtctaaacgtcctagcacagtcaaaggtacttacattaaaaatattgctttgacaacaacaatgggaccaagtttaaaagtaaagctacctgattaa

SEQ ID NO: 27253 - DNA, 873 bp, Mycoplasma genitalium
atggctagtgaaaaacaatatatagcaggggtttcaggtggatctgattcaatgctaatgcttaaactttaccaaaagaagattgcttgtgttgttcatgtcaattacaacaccagatcaacctcattacgtgatcaaaagttagtagaacaatattgtcaaaaattaaatattccactggttgttcacactgttgatcctgatctagtttgaaagaagaactttcaaaatcaggcacggaaaatccgctttgatcagtttaaaaagactgcaaagctataccagaccaacaagttattattagctcatcaccgtgatgatttcattgagcaggccaaaatgcaactagatgcaaaaaaacgtgctgtttactatgggattaaaaccaggtgtgaattgtatggtttgaaaatctaccgtcccctaatgaaatactgaaaagatgaaatcattgccctctgtagacaagaccatatcccttatgagattgatgaaactaacaagttacctatttataagcgcaatgaagtgaggttagagatagaaaaatggtctaaaatcgaaaaagaacagttttatattgctatctgtgcaatgaacaaaacaattgctcaaaaactgtttgtattaatgaaaaaagctaaaaaatggttattacaacctgatgttagggaattgaaacggttttcaattattgatcaaaaacagttaatttatagctatcttatttatcacaagattaatgttaatggtgagaaaattgatgctatccttgattttatccaacctagtcaacaaaaacaataccgcttgcaaaacgatatctttttgatggtgaaaaaccagtgtttagcacttttatacaaaagctaa

SEQ ID NO: 27254 - DNA, 936 bp, Mycoplasma genitalium
atgaaacatttaactgtcaaagcattagttttgcaatttaatgattgtatccaactcattgatggtaaaaacaacatagataatgtgattactatccctgggttaaaaaggagtgtttttgaactattaggactattttgtaagccaattggttcagttgctattttaggtaaacgtgaatttatttttttaaatcaaaagccagttgagcaacagaaaaagattattgcaaacctcttgaaactcaaaccacctgcagttattctaaccaagtcatttcttgattgtggtgttttgttagctgttaatcaaacttatcaagttcctattttaaaaactaacttgttttcaactgaactctcttttactgttgaaacctatattaacgagcaatttgctactgttcaaaagttacatggggttttacttgaaatctttggtgttggggtatttttagaaggaaagagtgggattggtaaatctgaaagtgctttagatttaattaataaaaaccaccttctaataggtgatgatgctattgagatctacagattaggcaataggttatttggtagagcacaagcactggcaaaaggctttatggagattagaggtcttggcatcattaatattgaacgtgcttatgggttacagattacaaaagaacaaactgaaatccaactagcaattagtttgttgagtttagaggagaaaaacaacgctagttttgagcgcttaggcagtgatttaaaactaaaaaatctgcttggggttaagattagttactatcagatccctatctcttcaggtagaaaaacaagcgaaattattgaaagtgcagtaatcgattttaaacttaagaaaagtggttacaattcagcaaacgagtttatcttaaagcaacgtgccatgttagaagaacaaactgatgaatag

SEQ ID NO: 27255 - DNA, 420 bp, Mycoplasma genitalium
atggctacaatagcgcaattaattagaaaaccacgccaaaaaaagaaggttaaatcaaagtcacctgcactccattataacctcaaccttttaaacaaaaaaactaccaatgtttactcaccactaaagcgtggtgtttgcaccagggttggcaccatgacccccagaaaacctaattctgcactaagaaagtatgctaaggttagacttacaaatggctttgaagtacttgcttatatcccaggagaaggtcataacctacaagaacacagtgttactttattaagggggggtagagtaaaagatctccctggagttagataccatattgttcgtggtactttagatacagttggtgttgacaaaagaagacaacaacgttctgcatatggcgctaaaaaaccaaaaccaaaatcttaa

SEQ ID NO: 27256 - DNA, 468 bp, Mycoplasma genitalium
atgagaaaaaatcgtgctttaaaaagaactgttttacccgatcctgtttttaacaacacactggttacaaggattattaatgtcatcatgaaagatggcaagaagggtttagcacaacgcatcttgtatggtgcttttgagatcattgaaaaacgcaccaaccaacaacctttaactgtctttgaaaaagcagttgataatgttatgccccgcttagagttaaaagtgagaagaattgctggttctaactaccaagtaccaactgaagttccccctgacagaaggattgctttagcactaagatggattgtgatctttgctaacaaaagaaatgaaaaaacaatgcttgaacgtgttgctaatgaaattattgatgcttttaataacacgggtgctagtgttaaaaagaaggatgatactcacaagatggcagaagctaacaaagcctttgcccacatgcgttggtag

SEQ ID NO: 27257 - DNA, 2067 bp, Mycoplasma genitalium
atgtcaagaacagttgatttaaaaaacttccgtaactttggcattatggcccatattgatgctgggaaaaccaccacatcagaacgtattttgttccattcaggtagaattcacaagattggtgaaacccatgatggtgaatcagtgatggactggatggaacaagaaaaagaaaggggtattactatcacctctgcagccacttcagtgagctgaaaaaactgcagcttaaacttgattgacactcctggccatgttgactttacagttgaagtggagcgtagcttaagggttttggatggagcaattgcggtattggatgctcaaatgggagtagaaccacaaactgaaacagtatgaagacaagcttcacgctatgaagtaccacgggtaatctttgttaataagatggataaaaccggtgctaactttgagcgctctgttttatcaattcaacaacgcttgggagtgaaagctgttcctattcaatttcccataggtgctgaaaatgatttcaatggcatcattgatatcatcactaaaaaagcttatttttttgatggtaataaagaggaaaatgctattgaaaaaccaattcctgaacagtatgttgatcaagttgaaaaactttacaacaacttagttgaagaagttgctagtttagatgatcaactcatggctgattatctagatggtaaaccaattgaaattgatgcaattaaaaatgcaattagaaacggggtaattcactgtaagtttttcccggtattgtgtggttcagcatttaaaaacaagggaattaaactcttacttgatgcagtggttgattttctcccttcacctgttgatgtcccacctgctaaagcaattgatgcaaacaacaaagagatatctattaaagctagtgatgatgctaactttattggcttagcatttaaagttgctactgatccttttgttggtagattaacttttattagggtttatgcaggagttttaaaatctggttcttatgttaagaatgttagaaaaaacaaaaaggaaagggtatcacgtttagtgaaaatgcacgcacaaaatcgcaatgaaattgatgaaattagagcaggggatatctgtgcagtaattggcttgaaagatactactactggagaaactttaactgatgataagcttgatgtgcaactagaagcaatgcaatttgctgaaccagtgatctctttagcagtagaacctaaaactaaagcagatcaggaaaagatgtcaattgctttatcaaaactagcagaagaagatcctacttttaaaacctttagtgatcctgaaacagggcaaactattattgctggaatgggtgagttacaccttgatatcttagttgataggatgaaacgtgaatttaaggtagaagttaacattggtgcacctcaagttagctttcgtgaaacctttaaatcaactagtgaagttgagggtaaatacatcaaacaatcaggtggtagaggtcaatatggacatgttaaaatccgttttgaacctaataaagataagggctttgaatttgttgataagattgtgggcggaaggattccaagggaatatattaaaccagttcaaactggtcttgaaaatgcaatgaattcaggtcctttagcaggttacccaatgattgatattaaagctaccttatttgatggttctttccatgaagttgactcaagtgaaatggcttttaaaattgctgcatccttagctttaaaagaagcaggtaaacaatgtaacccagttttacttgaacctattatggcaatagaagttactgtacctgaacagtactttggggatacaatgggtgatatcagttcaagaagagggatcattgaaggtactgaacaacgtgataatgttcaactaataaaagcaaaagtacctttaaaagagatgtttggttatgccactgatttacgctctttttcccaaggtaggggtaattatgtaatgcaatttagccattatgctgaaactcctaaaagcgttgttaatgagataattgctaataaaaaatag

SEQ ID NO: 27258 - DNA, 627 bp, Mycoplasma genitalium
atgcactacaatatcattcttttagttgatggtacgcttagtttagaacaagctaaccaagttgaacaaaaacaccaaaaattgcttgaaaaggcaactgaatttaaaagtgaatacttaggtttaaaagagttggcttaccccattaaaaagcaactttctgctcactattacagatggagttttcatggtgaaagcaattgtactaaggagtttaaaagagctgctaacatcaataagcagataataagagagttaattattaacagagaaaaagactatggttatttaggttcagttaaccctaaaaaacaacaactgtctttgcagaagctaaccaagtataatgagattattgctagtgaaaataatcctgataacccagatgcgcctgtcacttctggtctagcttctgttaaaccacggctatcaagagttgaaaaacaaaaggaacgtgaacttgaaaagtgaacggttgttcaccaatcaggtaactttgatactgtacagatcaatccttatcgtcctaggataaaacgctttttacaaaacaaccaacaaacctcccaagctaataataaccaacctcgttttcaaaatcaatttaaaaaaggagcaaaaccttag

SEQ ID NO: 27259 - DNA, 483 bp, Mycoplasma genitalium
atgaaccgggtcttcttgtttggtaaactcagttttactcccaaccgtttacagacaaaaaatggtacgttaggagctactttttccatggaatgtcttgattccagtggttttaataatgccaaatcattcattagagtaactgcttgaggtaaagttgctagttttattgttgctcaaaatcctggggtgatgctttttgtagaaggaagattaactacatataaaattactaacagtgaaaataaaaacacctatgctttacaagtaactgctgataagatctttcatcctgatgaaaaaactaccaatgaagaacctattaaatcaactgtagttgattcaccctttatgaatcccaaagcaagtgttacagaagctgagtttgaacaagcattcccccatcaagatgaaactgattttaacaacattacccctatatttgaaaatgatgtccaactagaggaggaaagtgatgattaa

SEQ ID NO: 27260 - DNA, 318 bp, Mycoplasma genitalium
gtgatgattaataaagaacaggatttaaaccaattagaaaccaaccaagaacagagtgttgaacaaaaccaaactgatgaaaagcgcaagccaaaaccaaactttaaaagagcaaaaaaatattgtcgattttgcgccataggtcaactaaggattgattttattgatgatttggaagcaatcaaacgctttctcagtccctatgcaaagattaatcctagaagaattacaggtaattgcaacatgcaccaacgtcatgtagctaatgctctaaaacgagcacgttacctagctttagtgccatttattaaagattaa

SEQ ID NO: 27261 - DNA, 453 bp, Mycoplasma genitalium
atgaagataattttgaagcaagatgttgctaaattaggcaagcggtttgatgttgttgaagttaaagatgggtttgctatccattttttatttcccaaaaaactagctgcacctttaacaaagaaagcaattgctaaccgtgatttgtttttaaaacaacaacaagaacaataccaaaaaaatcgtgccttagctgaaaaattgaaactagtaattgaacaaacaccattaacttttcaactcaaacaacacgatggcaagccatatggttcaatcatcaccaaacaaataattaatttagcaaaacaacaaagacttgatttacagcgctttatgtttaaagataatgtgcgcttacagtttggtgaacacaaactaattttgcacctttttgaggagataactgcaactttaactgttatagtgaaccctgaaaatgggacaacaaactag

SEQ ID NO: 27262 - DNA, 1341 bp, Mycoplasma genitalium
atgcaagcagttgctcaaaacagtgagggcattgatctaattttcaataaacttgaaccaattgatttttttgcaacccctttcaaactcatttttcaaactgcaaaagaaaactaccaattaaataaccctattattggttctggtttactagaagcggttaagtttaaacttgatgctaatgatcaatccactaaaagtgaacttgaaattttattcacaaagatcttattaatccgtttaccacctaaccaaacagagattaaaacactggttgatgttgttaaaaaagcttctatttttcgcaggttacaacagtttgctaagcgtgtttacaacgaggaatttaagttaaaagaagatcgttttgaaggctatttacaagctattcaagatgattttgtcaagattatccacagtgcttttagtaacatctttgcttttagctatgatgagattgccaatcaagaggaagcattaattaaaaaggttcaccgtggggaattgatcatcagtggactttcaagtggatttttaaaattagatcaacttacatcaggttgaaaaccaggagagttaatagtaatagcagctcgcccaggtagaggtaaaactgcccttttgattaattttatggctagtgcagctaaacaaattgatcctaaaactgatgtggtcctcttctttagtttagagatgcgtaaccgggaaatttaccaaaggcacttaatgcatgaaagtcaaactagttacacactaaccaaccggcaaaggattaataatgtctttgaagagttaatggaagcatcttcaaggatcaaaaacttacctattaaactctttgattacagtagtttaacactccaagagatcagaaaccaaattactgaagtgagtaaaaccagtaatgttaggttagtaattattgactatttacaacttgttaatgctttaaaaaataactatggtttgacaagacaacaagaagtgacaatgatctctcaatcacttaaagcattcgctaaggagtttaatacccctattattgctgcagctcaactttctagaaggattgaagaaaggaaagattccagaccaattctttctgatttaagagaatcaggttcaattgaacaggatgcggatatggttttatttatccatagaactaatgatgataaaaaagaacaggaagaggagaacacaaacttgtttgaagtggagcttatcttagaaaagaacagaaatggtcccaatggcaaagttaaactaaactttcgcagtgacacttcttcttttattagtcaatattcccctagttttgatgaccaatacagttaa

SEQ ID NO: 27263 - DNA, 1434 bp, Mycoplasma genitalium
gtgcgatcaaatattttaagtctcagggcgatacttgataaaaaacctagtgccattaacgatgttttaacatcaattaatgcaaagatagaactgaataaatcaagtaattttttattgaaaaatactgttgaaatttattcaaaaaaaattaataaaagtgatgaaaagattctgctaaataacatcccttatgttttgaaagataacatcgctactaaagatattgtcaccactggtggttctttgtttttaaaaaactatcttccccctttttcagcaactgtgtttgaactgttagaaatgaatggcgcgttgcttgttggtaaagctaatatggatgaatttggcttaggtggaacaggtagttattctgcttttggtgttgttcatcaccctgaaaattccagtttaattgcaggtggttcttcctcaggttcagcttacgcagttgctaaagacattgttcctttttccattgcaactgacactggtgattcgattagaagacctgctagtatctgtaatgttgttggctttaaaccaacttatggtttgatatcacgtaatggggtatttccatatgccccaagtatggaccatgtggggatatttgctaagtttgttagtgatattgccattgttagtgatgttgttattaaacatgataaaactgatttttcttcccaaaaatcacctgatgaaaaccagtttttcaatgagttggccattccctttacaagatcaattcgcttcggttatttaaaaccactagaaaaactgtttaacaaacacctccaaaaaaaatgaaataatctcaaaaaaaccttagaacaaaaaaactaccagttgattccacttgattttgatgtggaacttctcaaagtaattgattctatttacaaaataattagttatagcgaagcagttagttgttatagtaatttaactggcattgtctttggtcaaaaggtgtttgaacctaattcaccaagtaattttgatcaaactattaccagaaacagagatcagtttttaggtaaacaactaaaaagaagatttgtaataggggcatttgcaactgatgagaagaattttgaaaagtactttgaaaaagctcagaaaataagaagagtcttagtggataactttctgaatctctttagtgatgttgattttgtattatcaccaagcgcttcttgttttgctagtaccattgaagatattcaagctaataagccatatacaaacattattgatgactttttacaattagctaattttgctggtagcccttctataactatcccttggttagttcaaacaaaagaccaaacaattggtttaagtattagtgctaactgttttgaagataaaaaactcttacaaattgcttattgatttgaacaactttttgatttaaaccatgattaa

SEQ ID NO: 27264 - DNA, 1434 bp, Mycoplasma genitalium
atgattaattttgaagcgattattggaattgaagtccatgtagttttaaatactgctagcaagatgttttcaaaagcacctaaccgcgttgataatcaaaaaatcaatcattttattgacccaatagatttaggtttaccaggcactttgcctcaagttaatgagttagcagtttacaaggcattattattagctgatgcattaaaaatgaagacagtaacaaataaacttgtttttgatcgaaagcactatttttatcaggacttacctaagggttttcaaatcacccaacaaaattatccttttgctaaaaatggtgtagttaccattaatgttgatgctattgaaaaaccaatttatattgaccggtttcatttggaggaagatactgccaaacaacactttaaccatgaccaaattctgcttgattttaataggtgtggtgcacctttaattgaagttgttactcttcctgttatcaacactgcaaaagaagcgaaagcctacctacagaagttgagacaaattctgattgttaacaatatctccaatgccaaattggaagatggttcaatgcggagcgattgcaatgtttcagtacgtttaaaaggtcaaaggcaactaggaactaaaattgaaattaaaaacatcaactcacttaataatgttgaaaaagcgattgatcttgagattaaccgccaagttaaagcacttattaatggtgaaaccttgagtcaagcaactttaagctttgatgataaaaccaacaacaatgtttttatgagaaaaaaagacaatacgattgactataggtactttattgaacctaacatcatgactagtaatattgatgatttattattagaaaaacctgttgcttttcagttagaacagtttcaaaaagaactaattgatagtaatgtcaatcctcaattagtccaattagtagttgatgatgcaactatctttagtgcttttcaaactattaatagtgtgattaaaaacccccaagaaaccatcaggtggttatgtattgaactaataggtcaactcaataaaaccaacagttcattaacagctaatttaattcaagatctaattaccctaattgaaatgctaaaagcagcaaaggttaaccaaaaacaagctaagcagttaattactttaatgattgaaactaaaaaagatccaaaatcgctagctaagctccataatttagagcaaattactgatccaaaagagttacaaaagatcattaaaaaaatctttcaggaaaatgaaaaagagatcctgaaaaacattgatagaattgaacggattcaaaagttaattattggtcaagttatgcataagaccaataatcgagcaaacccccaacaagtttttataattgttgaaaatatgcttcatgaagttcgggaaagagatagctaa

SEQ ID NO: 27265 - DNA, 843 bp, Mycoplasma genitalium
atgacatttagtacacagattaaagctgaactggtccaaaacaaattaattgataaacactgaaatgtctttttagcaggtttttttcaaaacaacttaaagctactttacaaccgtaactgaagttttaaagtgcaatctgaagcattaaaggaacaatttgttcaaaatcttaagtttgactttaagacaaaagctagtaagaaatactttctttttgagtttaatgcagatattaacgtaattaacactcttttaaaacttgatgtgacaactagtgaattggtagttaaacaagtttatctcattgctgcttttttaagtggaggtagtgttagtgatttaataaactccaataactttcacttgcaaatcagttccaacaatgagtttcaaattcaacaacttttaaaattgtttagtttttttaaaaaaacagttaaacaaaaccagttagttgtttatcttaaaagttatgaaaagatctgtaattttttaaaactgattcaagcctttgatggttatcttgcttttgaaaataagcaactagagaaaagttttactttaaaccagttaagaaaaagtaatttggaagttgctaacttaatgaagacaatcagatctaataatcaaactaatcaactccaactaaaatcatttattaaaagtagtagttttgcaaaaagaccgcttaattttcagcgttattgcttaattaaaagtgatcatcctgattgatctttagaacagatagcaaacttttttttcacaaaatataacataaagattagccgcagtggaatccaacattttagtgttaatctaaaaaaactatgccagtag

SEQ ID NO: 27266 - DNA, 1089 bp, Mycoplasma genitalium
atggattcctatctttttttagcaaaaaatttgaacttaaaaaactatggaccagttcaaaaaaaacagtatggacacttagttttaaaggtggttcaaaaaaatcctaagattaatgaaaataattggaaaaagttccttgatgaaatggtaaccacaactagagtgcaccattctaacctagtgaaaagttttgatgtggtgaacccttttttgaaaatagttcgtggtaataaaacaattgctctcaatcagatagtgatgattgcaatggagtatgttgatggcccttctttaagacaattgcttaacagaaaaggctactttagtgttagcgaagtagtttattactttacaaagatagtaaaagccattgattatctccacagtttcaagcaccaaattatccaccgtgatcttaaacctgaaaacatcttatttactagtgatttaactgatattaaactattagattttggcattgcttcaacagtagttaaagttgctgaaaaaaccgaagttttaactgatgaaaattcactgtttggcacagttagttatatgattcctgatgttttggaaagcacagttaataaagctggtaaaaaggttagaaaaccacccaatgcccagtatgatatctactcgttaggaattattctatttgagatgttagttggtagagttccatttaacaagtcaattaaccccaacaaggaaagagaaacaatccaaaaagcacgcaattttgacttacctttaatgcaagcaactagaagtgatatcccaaatagcttagaaaatattgcttttcgttgtactgctgtgaaaagagaaaacaataagtgactttacagttccacaaaagaacttttagaagatttggcgaattgagaaaatgaacaagcgatgattaaacctgctaatgaaagggttttagaagggcaggtggaaattagagaaatgatgcttgaaaagcccttagcttggtatttcaaaacttgagccttatcaatctttactatcgtttttatagggttaattattgctgcaatagttcttttattaatttttaatgccagattctaa

SEQ ID NO: 27267 - DNA, 1302 bp, Mycoplasma genitalium
gtgtttatgagtgataaattattaacaattgacttaagtcatgtttatggatttgataaagaaattatttttaagaaataccaaaaaaaagtagatcaaattcaccaagattttctagctcataaacttgctgatggtcacatgactgggtggtatgaccaacctgatcaaaaccaccaattccttttaaaaaccattaatcaaattgacaaaaagtttaaaagtttaaaagtaactgacattgtttatgttggtattggtggttcttttactggtattaaaacagttttagatttcttaaaaccaaaacaaagaacaggattaaaaatccactttgtccctgacctttctgcttttcaagctgcaagtgttattaaggaaattaaaaataaatcatgggctctaattaccacttctaagtctggtagaaccctagaaccagcactgaatttccgcatttttagaaacttattaaacaagcgttatggcaacaaacactaccaaagagtagttgttattactgatgaaaaaaagggattactaaccaaaatggcatcaaatcatggttaccaaaagttagttattgattcaaatatcggtgggcgtttttcaactctatctcctgctggtttgttactagccaaactttttggtcatgatcctaaggccatcttaaaaggaacattacaagccaaaaaggatttgcaaacaacttcacttgaaaacaattctgcatacctttatgcagtagttagacattgactatacaccacaaaaaaattcaaaattgaagtttgcattgcttatcacagtttgtatgaatatttgttattacagcatcgacaactttttggtgaatcagaaggtaagaacgataaatctttatttcctactttttcgatttttactgttgacttacactcaatgggacaactctatcaagaaggggaaaaagtgttttttgaaacagtaattgatgttaaaaatccacttgttaatattaatttacctccatctgattttgacaatgatgatgaacttgatttcttgttagataaaagcttaaatgagatttcagatgttgcaattgattcagttattaaagcgcactaccaagcaaatgtaagcattattaaattaactttaaaagaacaatctgcatttatgtttggttatttttacttttgactctctgttgctacagtgatgagtggatcattattagggcataatgtctttaatcaacctggcgttgaagtttataaaaagttaatgtttgaaaaactaagaagtggccactaa

SEQ ID NO: 27268 - DNA, 1371 bp, Mycoplasma genitalium
atgaaatcagttacagtcaagcagttactacaaaccccacgaaaatttaataacaagcagattaaactatcaggttgggttaaaaataaacgtgctagtgctaacatcatctttctagcaattagtgatggctctagtattaataccctacaagcagtagtaaaacaagaagataacccccaggttttctcactgttacaaactgttaatttagcaagtgctgttatggtttgaggggaaattatcttaaccccaaaagctaaacaaccactggagttgaaattaaagcaggtgagtttattagcacaagcagagtctgattatccactgcaaaaaaaagaacatagtcaagagttttttagaagtaatgcgcatctaagagtaagagcaaaaacttactttgcagtgatgaaaataaggagtgttttgtcacacgcaatctttgaatacttctttaaaaatgattttatcttagtgcaaagccctattttaactagtaatgattgtgagggagcgggggaaacatttgtaattaaagatagtgaaactttttttaataaaacgacttttttaacagtaagtggccagtttggagcagaagcttttgcgcaagcatttaaaaaggttttcacctttggtcctactttcagagctgaaaaatcccatactaatcgtcatcttagtgagttttggatgatcgaacctgaaattgcatttgctaacttaaaagatttaatgcagttaatacaaaacctaattaaattcttaattaaaaaagtgatggaaaatgctagtgatgaactaaatgttttagcaaagcaatttagcaatgacattattagcaacttaaagacaatcattagtactaaaaaatttccaatcattgaatacagcaaagcattagcgattctaaaggaatctagtgatacaaaaaaaactaattttgaactaaacgactttagttttggtattgacttaaaaacagaacatgaacgctttttgtgcgaacaatattttcaaaatcaaccgctttttgttattaactatccaaaggagttaaaggcattttacatgaaaacaaatactgacaataaaactgttgctgcagttgatcttttattaccaaagattggtgagatttgtgggggaagtgaaagggaaagtgatttaaaccaacttaagaataggtgtcaatctttaaacattgacacaaaaagtttgaactgatatcttgatatgaggaaatggggttattttgctagtgcaggttttggtttgggctttgatagattattagcttatatatgtggattggaaaacatcagagatgctattccctttccccgtgtacatggcaccattaacttctaa

SEQ ID NO: 27269 - DNA, 711 bp, Mycoplasma genitalium
gtggattggaaaacatcagagatgctattccctttccccgtgtacatggcaccattaacttctaaattcgctgcttataaaaaaaagattgcaaactggttaacagtttacagaatttttattgctttacctactattatttttattgctttagataatcaactaggagttttagctaacttttctgttggtgcaattagcattagtttacagatcagtttattgattggaggatttttgtttttaactgcagttatatcagattatttagatggatatttagcaagaaaatggctagcagtttctaactttggtaaattatgagaccccattgctgataaagtgattatcaatggtgttcttattgcactagcgattaatggatattttcactttagcttattaattgtttttatagtccgtgatcttgtgttggatggaatgcggatttatgcttatgagaaaaaggtggttattgctgctaactgacttggaaaatgaaaaactatcatgcagatggttggtattgtttttagttgttttgtttggagttttaaacaaagtgaaatagcttctttgaatagtggactgttcttttgattactaactcaactgccatattatttagcagcagttttttcaatttggtctttcattgtttataacatccaaatatatcagcaactaaaggcttataactccaagttataa

SEQ ID NO: 27270 - DNA, 921 bp, Mycoplasma genitalium
atgttaagtttagcacaattagaaagttggttttttatcgctccagcactgcttttagcagtattgagtggttatctcgctgaacgcgttgggatcattaatattgctattaatggtggaatggtgtttggtgggttatttatggcactcttatcgtatggatttacaaataacttaaatcaatccgctccctcctgatcactatttatcaccattcccttatcagttttatttagtagtgttataggttgtttatttgcactagcagcagttaagttaagagcagatcatgttattgtgggaactgggattaacttgttggctagcggaattaccctttttattagtcagaatgctgctagtttgttttccgatactaccttaagagtaaggtacttatttcccatccaaactactgttagtatagaagcaattggtgtgtttgtttttagtttacttctgattgggtttgtatggtacttgatgagttttactaaaactgggttgagataccgtgcggtaggtgagaatcctaatgtaattgatacccaagggattagtgtttacaaataccaatggataggcgcaatttgttcaatgatggtagctggattgagtggtagtttgtttgttttaagtgtttctaactttccctttaacagcggagatgtaaatggcttgggttttattgctattgccattatgattatctcaatgtgaagaattatccctagcatctttattgggttaatctttgcatatgcctatgtttttaccaatagtcaaataggatctaatagtaattcctacttgttaagaacgatccctttcatcatctcattactagtaatgttgttatttggttttcttaatgttgccccaaaaaatataggtaaacattttgacaagggtttaagataa

SEQ ID NO: 27271 - DNA, 2130 bp, Mycoplasma genitalium
atgattaaaaacctggtggtgattgaatcacccaataaagttaaaacattaaaacaatatcttcctagtgatgaatttgagatagtctcaaccgttggtcacatcagagaaatggtgtataaaaactttggttttgatgaaaatacctatacccctatctgagaagattgaactaaaaataaacagaaaaatcccaaacagaaacacctgctcagtaagtttgagatcatcaaatcaatcaaagctaaagctagtgatgcacaaaacatttttttagcttctgaccctgatagagaaggggaagccatctcttggcatgtctatgatttattggatcaaaaagataaagctaagtgcaaacgaatcactttcaatgagatcactaaaaaagcagtagtagatgcattaaaacaaccgcgtaacatcgatcttaactgggttgaaagtcagtttgcccgccaaatccttgacaggatgataggttttagattatcaagattattaaatagttatctgcaagcaaagtctgcaggtagagttcaatcagtggctttgcgctttcttgaggaaagagaaaaggagatagctaagtttgttccgcgtttttggtggacagttgatgttttattaaacaaagaaaataaccaaaaagtagtttgtgcaaacaagtctattcctttggttttaagagaaattaaccctgaattaagtgctagtttaaaactggattttgaagctgctgaaaacgtatcaggaattgactttttaaatgaagcttcagcaaccagatttgccaaccaactgactggcgaatatgaagtttattttattgatgaacctaagatttactattcatctccaaacccagtttataccaccgcttcacttcaaaaggatgcaattaataagttaggatggtcttccaaaaaagtaacaatggtggcccaaagactgtatgaagggattagtgttaatgggaaacaaactgcattaattagttatccaagaactgattcaattaggatttcaaaccaatttcaatcagagtgtgaaaagtacattgaaaaggagtttggaagtcattatttagctgataaaaataagttaaaaagacataaaaaggatgagaaaatcatccaagatgcccatgaagggatccatcctacttacattactattacccccaatgatctgaaaaacggggtgaaacgcgatgagtttctcctttatcgtttaatatggattagaacagttgctagtttaatggcagatgctaaaacatcaagaactattgttcgttttataaaccaaaaaaacaagttttatacctcttcaaaatcacttttatttgatggttatcaaaggttatatgaagagattaaacctaatactaaagatgaactttacattgatcttagtaagcttaaaattggtgataaatttagttttgaaaagatcagcgttaatgagcataaaaccaacccaccaccacgttacacccaagctagtttaattgaagagcttgaaaaatctaacatcggtcgtccctctacttataacactatggccagtgttaatctagaaaggggctatgctaacttagtgaaccgatttttttatatcactgagcttggtgaaaaagttaataatgaactttccaagcattttgggaatgtaattaataaagaatttaccaagaagatggaaaaatctttggatgaaattgctgaaaacaaagtaaactatcaagaatttcttaagcagttttgaacaaattttaaatctgatgttaaactagctgaaaattcaattcaaaaagtgaaaaaggaaaaagaattggttgaaagagattgtcctaaatgtaatcaaccgttggtatatcgttacaccaaaagaggtaatgagaagtttgttggttgtagtgattttcctaagtgtaaatacagtgagtttagtaatcctaaaccaaaactaaccttggaaacacttgatgaattgtgtcctgagtgtaacaataaactggttaagaggagaactaaatttaacgctaaaaagacctttataggttgcagtaatttccctaactgccgttttatcaaaaaggataatgctgctgaatttaaacaataa

SEQ ID NO: 27272 - DNA, 1044 bp, Mycoplasma genitalium
atgataaagcgcgcaattacagggattcaagcttctggaagacaacacctaggtaactttcttggcgtaatgcaaggtttaaaacaactccaaagtcaataccaactgtttttatttgttgctgatcttcatgctattactgttgattttgaaccaacaatgctcaaagataacaacttgcaacttgttaaaactttattagcactaggacttgattatggaaaagtgaacttatttttacaaagtgatctgatggaacataccatgttaggttatctaatgctgacacaaagtaatctaggtgaattacaaagaatgacccaatttaaaacaaagaaattagcgcaaaaaagaaatagtaataacaccattactatcccaactggtttgttaacttacccagtgttaatggctgctgatatcttgctttatcaacctgatattgttccagttggtaatgatcagaagcagcacttggaattaaccaatgatttagctaaacgtgtagcaaaaaaatttaagttaaaactgaaattacctgtatttatagaaaacaaagataccaacaggatcatggatctatcaaatcctttaaaaaagatgtccaaatcaaatcctgatcaaaatggtgttatctatctggatgatagtaaagaaacaatcatcaaaaaagtgcgcaaagccacaactgatagttttaataagattcgttttgctaaaaaaacccaacctggtgttactaatttacttgttattttaactgcacttttaaaagaagaagttaaccataatttaagtaaaaaaatcggctctgatcttgttaaatattatcagaataaaagttatttagatttaaagaatgacctcagtagtgctgttattaatgtcatagaatcacttaaatttaaaaaagcacaaattactgatgaaatggtattaaaagtcctaaatgatggtaaaaaccaagctaaaaaagttgctgatgaaacattaaaaatgttttataaagcatttggtttaacatctaatcagctttttgattaa

SEQ ID NO: 27273 - DNA, 780 bp, Mycoplasma genitalium
atgaaatacaaaatttttgcttccacaacgccccaaactgaacctgttctcaataagttaagagcagttttaaaaacttggcaagcggttgagaatggttatgaatatgtgtttgttttaggtggggatggtttttttgtttccacacttgctaactataactgtgatagttgtaaggtagttggtatcaatactggccacattggtttttacacttcttttaatggagatgatcttgatgaaaatttcatttcaaaactaactagctttgagtttaaaaagattaatttactggaagtgaaaactaaaaaccacagtttcttagttttaaatgaacttgcagtttacaccaacactgcatatccaattaacatctttattgatgataaccactgggaatcataccgcggttcagggttgctaattggcccaagaacaggttcaactgccctagcaaaatctgctaagggagcggttatctttccaaatgttgatgttgttcaaattattgaactaaaccccttattacatcccaaccaaatcacaattcaatctccgattattctgccaatgcaaaccaaggttgaatttaggatcaaaaaagcttttaaagcagagcaatttcccaatttttatgcagatggaatcaagcttgatttaaaaaatgaagataccagtattagctttcagttggttttatcaagatcaatgtttcacgcttctttaaaaactaaggattttattgataaactaaaatcaacttttattaagcaaagctaa

SEQ ID NO: 27274 - DNA, 1455 bp, Mycoplasma genitalium
atgaacaataacattactaacagtattgcccaattgtttttcaacacttctttctttgcttttctgtttttaatcattattgcgtttaatttatgcttgtttgcctatctttattttcagtaccgaatttataagaaaaaccctaaaaaagctaacaactttaaagcgaatgaatatgaaaaaattaagctattaaaaaaccaaaatttcactgaaagtaataaattaattgcaacaactaatgagttaaatgaacttactagtcagctagataatatcttggttaggattatcaacaaaccactagcaaagttagttaatgattttttagatgaacagattaaacagatagttaagctagataaaaacagttctgattttcactcagaaagtgataacctccctttttataccaaactctttaatgattttcactttggtgttgataaattaataaacattaacataaaaaaccctctttataactgggtttatagccccagttttttaattagtgaaagtgattttcgcaagcttaatggtattagtggtatcaataaaaagcttttggttgaaaaacttagaattgaagacattgtgtttacagatctaaacaaaaagtatgaagttaatgtcttgacagaaagtcctattaaagcacaaaaaacagtgttaactgtgcgcaatatcctgatgaacgattatgttgataatgaaaggattgaatcatatgtccaacaagctaacttcttttttactgagcactgtaaaaagatcggtaaagagatcttagaatcacttaatatttttatctcaagtagttcactacaccgtcattttggctttttagcatttcgctattcatttggacaaaatgtcttatcccatagccttgaaactgcatttttaactgcccacttagcagctttaatagaacttgatagtgaactgagtttaaagtgtggattgctccatgatattggtaaatctaatgatgataatggtaaagagagccatacgattacaggcgctaaactcgctgagcaatttcaactacctgatgacattaaatacacaattgctaaccaccacaataaacatattgacaatacctattgtcgtttaacacaaattgctgataaactatctgctgctagaattggtgctagaagtgatagttcgcttctttttaaacaactaaaagatgagttgaaaaagattgttgataaaactattaataattttcatacaacgatcttactaggtcaaagtggtagaaggttaatgatttgacttgaaactaaaaaccaaaatcaactgttaagtaatgagcaaattattgaaatggttgaaaagattaaagctgaaattgctaagaatccaattacaaatcacttccctattaaagttgtaattagatataactttgaacacagttttaacaccaaaagctaa

SEQ ID NO: 27275 - DNA, 303 bp, Mycoplasma genitalium
atgagttttaaaaagattgctgaaatgatgcgtcaagcagaacgagaaactaagaaaaaaacattagcgtttgaacaacaagcctttgaatacaactataaaaatggtgcgattaagatcactattttaggtgatcttacacttaaatcaattaacatcgatcctgttttgattgatgcaagtgacaaagttattctagaggagatgattatagaagctactaatgaagcggttagtgatgtgaaaaccaagtatgataacttagttgagaaaactatgccaaaagttccaggtcttttctaa

SEQ ID NO: 27276 - DNA, 1473 bp, Mycoplasma genitalium
atgagtgatcgtttaaatgatcaagcccaacatcgcttgcagaaacttttaaggttaaaacaaactaataatgacccttatttagtaacaaaaactagtctaacccattcttcaaaaagctttcaagttgaatttgaaaaatgttcagaagaagagttgaagaaaaaagcaactgtctcactagctggaaggatcattgctattagacaaacctttttaattattcaagattttgatggtcaagtccaactttacatcaataaaaaaatccatcctaagttatttgattactttaatgaatttgttgatattggtgatcaaattgttgttagtggtaagccaatgttaactaaaacaaaggtattaactttagctgttgaagagatgaaaatcattgctaagtgtttattggttccacctgaaaagtgacatggacttactgatattgaaacccgcgctcgcaagcgctttcttgatcttacctataacttagcaatgcgtgatgtttttctgaaacgcactaagattattaaatcaatccgtagctttcttgatcaaaatggttttattgaagttgaaacccccactttacaagctgttttaggaggagctaatgctaaaccctttaaaacccattacaatgctttaaaagcggatttttatctcagaattgctaatgaaatagcattaaaaaaactcattattggtggatttaacaaggtttatgaaatgggtaaaatgttccgtaatgaaggggttgatactacccacaatcctgagtttaccagtattgaaatatatcaagcttatgcagattttgaagtcatgcttgtgcttgttgaaaagctgattcaatcactttgtgaaagcttaaaccaatttagctttaactgaaataacaaaacgattaatctaaaaacaccatttcataagataacaatggttgaacttattaagaaagttacagggatcgattttaattcagtaaaagatgatcaatctgccattttattagcagaaaaacatcatgttaaactagcaaaacaccaacaaaataagcaacacatcattaatttgttttttgaacagttttgtgaacaaacattaattgaacctacctttgtaacccattatccaaaagcagtttctcctttagcaaaacaagatccttcaaatcctgaattcacccaacgatttgaactttttattaatggtaaagagattgctaatgcttacagtgagctaaacgatcctttagaacaaagaaaaaggtttgaacaacaacttgaagaaaaacagcttggtaatgatgagacaagtgaacttgatgaatcgtttttagaagcattaagttttgggatggtaaacactgctgggcttgggataggtattgatcgtttggtaatgttgttatgtgaatgtaattctatccgtgatgttgttttcttcccccagttgcgtgaacataaatag

SEQ ID NO: 27277 - DNA, 1215 bp, Mycoplasma genitalium
gtgaatgtaattctatccgtgatgttgttttcttcccccagttgcgtgaacataaatagttttgatattttaattgttggtgctggtattagtggaatagtactagctaacatcttagctaatcacaataaaagggttttaattgttgaaaaaagagatcatattggtggtaactgttatgataaagttgatagtaaaactcaactcttgtttcaccagtatggaccccatattttccatactaacaaccaaactgttattaactttatctcacccttctttgaactaaataactaccaccatcgggttggtttaaaattgaaaaataacctagatttaaccttaccctttgattttcaacagatctataaactaatgggaaaagatggtagaaaactcgttagtttttttaaagaaaatttcagtttaaatactcatctatcattagcagaattacaactaattgataatcctttagcacaaaaactctatcagtttttaattagtaatgtttataaaccatacagtgtcaaaatgtggggtttaccatttgcaatgattaatgagaatgttattaacagggtcaagatagttttaagtgaacaaagcagttattttcctgatgcaattatccagggattacctaaatcaggttatacaaacagttttcttaagatgttagccaatcccttaattgatgtgcagttaaactgcaaagataaccttttagtttatcaagatgaaaaactgttttttaacaataacttaatagaaaaaccagttgtttactgtggcttaattgacaagctatttaacttttgctttggtcatttgcaataccgttctcttgcctttagttgaaaaagatttaaccaaaaaaaataccaaacctaccctgttgttaatatgcctttagctaaatcaatcacaaggagtgtggaatacaaacaactaacaaaccaaggttctttcaaaccgcaaaccatcgttagttttgaaacccctggcagctatgcaattaacgatcctaggtttaatgaaccttattacccaattaacaatacactaaatgatactctttttaaaaagtactgaaaaaaagcaagtaagttaaagaatctacaccttttgggaagattagcaacctaccaatacattgatatggataaagcaatcctacttagtattaaaaaagcccaacaactgttaagttaa

SEQ ID NO: 27278 - DNA, 1710 bp, Mycoplasma genitalium
atgataaaggattttaatcctggtgattttattggtaaaaaaccaactaaaatctatgcttttggtggtatccaagaagttggtaaaaacatgtatgggattgaatatgatgatgaaatcatcattattgactgtggcattaaatttgctagtgatgatctacttggcatcaatgggattatccctagttttgaacacttaattgaaaaccaaagtaaggttaaagcattgtttattacccatggtcatgaagaccatattgggggtgtaccataccttttaaagcaggttgatattcctgttatctacgcaccaaggatcgcagcatcattaatcttgaaaaaggttaatgagcacaaggatgctaagctcaataagatagttacttttgatgattttagtgagtttcaaaccaaacacttcaaaattgatttttaccgggtaaaccactcgattcccgatgcttttggaatctgtgtgcaaacccctaatggcaacattgttcaaagcggtgactaccggtttgattttgctgctgggagtgagatgttagatgttcataaagtagtgaaaattgccgagcgcaatgtccatgtttttatgagtgaatctactaatgctgaagtaccaggtttttcccaaagtgaaaagttaatttacagaaacatccaaaagatcttaaaagaagcaaggggtagggttattttaactacttttgcatctaacatcacacggattaatgaaattattgagattgctttaaacaacaaacgcaagatctgtttattgggtaaatcaatggatgttaatgttaatatttcacgcaaaattggattgatggcaattgatagtaatgatattgtggaagttcgtgatatcaaaaactatcctgatcgtaatatcttaatcttgtgcactggttcacaaggtgaggaggctgctgctttaaacacaatggcacgtggtaagcataattgggtgagcttaaaatcaactgacaccattattatgtcttcaaatccaattccaggtaattatgctgcagttgaaaacttgcttaatgaactctctaagtttggtgttgctatttatgaaaattcatcccaactaaaactacatgcctcaggtcatgccactcaacaagagttacagttgatgctaaatttaatgtttcctaaatacttaattcctatccatggtgaatttaagatgatgcgaaccataaaaaacattgctaatgaatgtggcattaaaagcgaggatgtggcgcttttaagtaatggccaagtaatgtatttaattgatgaagaactttattattccaatgaaattattaatgctgatcctatttatatagagagtcataactcttctcctgatcttgcaagaataattaagcaaagacaaatccttagtcgtgatgggatgtttgctgttattgttgtttttgataagaataataacatcattgggattccaaccttaataacaaggggttgtttctttgcacttgattccaatcctttaatgacaaagatagcccattctgttaaaagaactttagaaagtgttatccaaagtaagaagtttaatagtcatgaacaactaacaaaggaattgaaacgagtttgtaaggaaactgtttcttactttatctgaaaaaataaaaaccgtaatcccttaatttcaactgtgctttcctggatctaa

SEQ ID NO: 27279 - DNA, 1596 bp, Mycoplasma genitalium
atgaagataactttcatttctggacaagaagtgtcgttaggcacttcttttttattgttttcaaaaaaaatagttatgaatgaattaaaccaacccttacttgctattattaaaaatgttgctaaaaccaaaaacctttctatagaagaggtggttttttgtttgaaaacagctttagaacaagcctataaaaaacaccttaactttgttaatgttgaagttaacattaactttgataaggggattattaatgttgaacaactctttaatgttgttagtgatgaaaatgaagattatgatgactttcttgaaatccctttacaagcagctaacaaaataaacagttcattgcaattaggtgatgtgttgcgaaaaccaatccccttaaaaaacattagtagtgatcttatcaataagatgattgctatctttaaccaaaagattagtgaaacaaactttaaagcagtaatgagtgagtttagtagtgaggttggggaagtgattgaagcgaaagttgaagatattgatactaacaaagaaggtggtttaaagggttatattattaaccttgaaactacaaagggttatatctccaagcgggaattgtcaaaaggggagcgcttagagataggtaaaaaatacctctttgttatcaaagaaatccaacggcaagcatcgttatgaccaattactttatcaagaagtgatacccgcttactacagtttttgttaacttcaaatactccagaaattgaaaatggtacgattgtaatcaaaaagattgaacgttccccaggagtgaaatcaaagatagcagttatctccaatgatcctgcagttgacccagttgctgctatcttaggacctaagggtgagaagattagggggattagtgaggaatttaatggtgagattattgacattgtcttttggaatgaagacaagttaaagttcttaattaatgccattttacctgcagaagtcattggttataacatcttgcaggatgatgagcgtgatactagtattgaagttgttgtacctgcaaaccaaattgctaatgtttttggttttaaaggtgtaaacattaggttaattagtaatttaacaggttgaaatagtgttgatgtttacagtgaaaaagatgcaagtgaagccaacattaaattcacgaggttaagctttgaacctgaagggttgtttggcatcaaaaaaagaagggaaaagatcattagtaatgatgctactgataaagtcttttacacctctaaagacaatgtgatagatgatgagattattgttgatttagctaaagatctaatggttgataataaacaaaaacaacctgagcaagttgcaaagcaagttgttgaaaaatcacaattagaaaaacaagttactccaaaagaaaaagagaaagttcaaccaaaagctaaggttcattctaatagccattccaaaaaaccagctaaacctaatcagattttttctatcactgttgatgctagtgataagaatcttaaaaaagatcaagttgataataaccaaacaaacccccaaacaaaacaaacatttgatagctttgatgatctttaa

SEQ ID NO: 27280 - DNA, 1860 bp, Mycoplasma genitalium
atgaaaaaaaatagagctttcaatcaggttaaaaaaacaaagtttgacggtaggattaaaaccagtgccaaacaccagttacgtaatgttaaaaccggggttaaagatggtgtttttatctataaaggtcctttaactgttagtgagtttgcaagtaaaactaatatcgctgttgctaacattatcaaacacttttttttaaatggtttggcactaacagttaattcagttttaacaaatgaacagttagcagatgcatgtgttaactttgggtttgactttaagatggaaactgaagttacccatgaaaatattgtagctaacatccagtttgaagatagtgatgatttattgcaaccaagaccacctattgttactatcatgggtcatgttgaccatggtaaaacttcgcttttagacacaattagaaaaactaatgtaactgctaaggagtttggcggaattacccaaaaaattggtgcttatcaggtgaaaaatcaccaaaataaaacgattacttttattgatactcctgggcatgaagcatttactttaatgcgtgcaaggggtgcaaaagtaactgatattgtggtgttggttgtggcagcggatgatgggattaaaaagcaaacagaggaagcaattagccatgctaagagtgctaacactcctatcattgtttttattaacaagatggataaaccaactgctaaccctgatctggtgatccaacaactcaataagtttgatttagttcctgaggcttggggtgggaaaactatctttgtaatgggtagtgctttaactggtcaagggattaatgagttgcttgataatatcttgttgctaggggaagtggagggttatcaagctaactataatgcccattcatctggttatgcaattgaagtacaaacttcaaagggacttggccctattgccaatgtcattgtaaaaaggggtactttaaagttaggtgacattgtggtgttagggcctgcatatggaagagttagaacgatgcatgatgaaaatggtaatagcttaaaacaagcaaccccttcaaaacctgtgcagatctcagggtttgacattatgcctgttgctggggaaaagttcattgtttttgatgatgagaaggatgcaaagttaattgctaacaagtttaaagaacaacaaaaacaaaaagctaacaacttaacagttaatcaaaccttaaaagaacagattaaaaacaaggaaattaagatattaaatttgatctttaaagcagatagtgatggttcattgcaagctattaaacaagcagttgaaaacattaatgttgctaagatctcacttagtatcatccatgctgcagtggggcagatatcagagagtgatattatgctagcaaaagcatcaggggctttattgtttagtttaaacttaggtttgagtcaaactgtaaaaaacattgctagtttacaaggggtaaaattagaagttcactaccatatccctaaactagcagaggagattgaaaacatcttaaaaggtcaattagatcctgtttatgaagagattgaaataggtaaagcggaagttttacaactctggttccactctaaaatcggtaatattgcaggaaccattgttaaatcaggaaagataaaaagagggaatttatgtaagttattcagagataaagagattatctttgaaggcagaattgactctttaaaaaatgaaaaaacgcctgttaatttaatagaaacagggaagaattgtgggatagttattaatggttgcaatgatattaagattggtgatatcattgttgcttatgaaaagcagatagttaaagatggcaagctatag

SEQ ID NO: 27281 - DNA, 810 bp, Mycoplasma genitalium
atgaaatcactctttattggttattttgatggattacatcaaggtcatctatttttaaagcagaacagtaagtttgaaccaatggtgttattaattgataacccacctttaaaacaaaccaactggctttatgatttacaacaacgggttgcacaaataaaaacttacttgaaagcaactgtagaagtatttgatgttgccaaacataacatgaatgcacttagtttttttgaacaacagattaaaagattgaattgtgatgaaattattgttggtacagattggcattttggtaatgatcataaggatgggatctggttaaagaaactgtttaaaaatactgttattgttaataaaacaaacctatcaagtagtgttatccgtaactatctaactaataatgaacttgaaaaagctaaccaacttttagtggaaccttattatagagtgggcacagtagtacatggtttaaaaaaggcaaggttgcttggttttccaactgctaacattgttatggataaccacttattgactttaaataaggggagttatatagtaagagttttattaaataaccaaactttttatgggattggttttattagccaaaaggatcaggatttggtgtgtgaaacccatatctttaactttaataatgagatttatggttcactggtcaaatttacactgttaaagttcattagaacaattagtaagttttccagtcaagcagctttgcaaaaagcaattcaaagtgatgctaactttgctttaaagtggttggaaaaccaaaatttagataaaatttaa

SEQ ID NO: 27282 - DNA, 1275 bp, Mycoplasma genitalium
atggacagtgcccccagtggtttaactttaactgttattatccttagcatcattctgcttgcttttatcagcacagttgtatcagcttatgaaacagcaatcacttctttaaccccttacaggtgaaagaactatatcaagactaacaacaagcaagataaactatcaactaagataataaaccactttcaaaaccactattcaagttgtttaattactatcctaattactaacaacatagtggccattatggtttctaacatcctttttttagcactagaacaaacaattaaaaatgagcttttatcaagtgttttaaatttggtagttagtggggttttaatcgtctctttttgtgaaattctacccaaaactttgggcagaattaatgtgattagaaccctggttctatttgcttatttggtttattttttttatctgatcttttgaccaattactaagctaaccagtttaattctcaaaaagtatgaaaaccccttacctgtttcaaggaaagatgtttattattttattgatgaaattgaacaaaacggtttattttccaaagaagatagtttactgattaaaaaaaccttaatctttgaccaagtactagttaaaaaggtaatgatcaagtgaaaaaaagtggcttattgttatcttaatgacagtattaacttgattgccaagcagtttttacaaaggcagttttccagaatgccagtagtagataaaactactaataagatagttggttttatccatttaaaggatttttttacagctaaagaagcaaaccctaagtcacttgatttaaaccagttgctttatccagttgttttagttcaagattccacccccatcaaacaagcactaagacagatgcgtttaaacagagcacatttagcagttgttaatgataaacatgaaaaaacaatagggattgtttctatggaggatattattgaagagttggtgggtgaaatctatgatgaacatgatgatatccaaccgatccaagtattggatgaaaatgtttgacttgttttacctaatgtaaaagcagcctacttttttaataagtgaattaagccagatttggtaaaatcaaaaaatattactatccagcattatctcgcttcactagataatgatagttttgcttgccaaaataagcttgacactcccttatttagtgttgaagtgatagctgatagcgaagataaaaccaaaattctttacgaaattagaaagaagagtgatgttattgcttag

SEQ ID NO: 27283 - DNA, 846 bp, Mycoplasma genitalium
atgaaattataccgatctttaaaagcagccctgttaccagggatatgcactagcattttacttgctagttgtgcttcaacaaatacttatcaagaccaaaggaatgccttgattagtttggcttctaatcgtgatactttaattgcgaatgctaaaaaatccaaagaagaagtgcaaaaagaagttaccaaaatgaatagtagtacttcatcaatgatgacagctacccaaagtgttgcaattacaacacatcaaactactgaaaaaacaaataattctaagtatgatctagacaagctttttaaggattacatcctttatgttgttgataatttttcaggacttgtttttaaaagaactggcggtcataggatccagttaatcgataaggataaagagattttggatggtggtaatctaactaaacatacccaccacgatcataaccatatgcataatcatgaacatgaacatgaagaacaccatgatgaggaagagacagaagtagttggcagagcactatcttttactaatggcatctttctagtgattgactataaaaaagactctgaaagaaaaaatatgagtggttcaactactatgatgcaccaacaccaccatgaagctgaagaacataaagaggaacgtaagctctctttaaacttaaaagcatacaaatttaataccccttttaacattagtgagtttattagtgcttgacatcataaagaatctcataatagtgacacagagttcaataaccttcacaataagtatgacaaggaagaattggatattattgactataactttgaagaaaaagctgttgatgaaacaattgcttaa

SEQ ID NO: 27284 - DNA, 321 bp, Mycoplasma genitalium
atgaatagcgctgtaaaatatcctgagctgaagatcaaacttgagtcttatgatagcacccttttagatctcactattaaaaagatagttgaggttgtaaagggtgtgaacattaagattaaaggtcctttacctttgcctactaaaaaggaagtgatcaccattatccgctctccccatgttgataaagcatccagagagcagtttgaaaaaaatacccacaagcgcttaatgattcttgttgatgttaatcaaggagggattgatagtttaaaaaagattaagatcccagttggggttacactgcgtttttcaaaatag

SEQ ID NO: 27285 - DNA, 774 bp, Mycoplasma genitalium
atggatgtaaggggaatatttggtgttaaagtagggatgagtcagatctttactgagcaaaatgagtgcttacctatcaccattgtttattgtgaagctaatcaggtggctgggattaaaacgattgctaaagataattacaacgccactctattaagctttcaaactgttgatgaaaaacaacttaacaaacctaaacaagggttcttttccaaacttaaactagaacctcataaatatctgagggaaatcagaaagatgcaagggtttgagttaggtaagaagatcaccccccaggagttgtttaagataggtgaatatgttgatgtcacttcactcaccaaaggtaggggttttacaggagcgattaaaaggtgaaactttaagataggtcctttgggtcatggggcgggttatccccaccgctttcagggttctgtgcaagcaggtagaggtggtagtagtgcgcagcgtgtttttaagggtaagaagatgtctgggcattatggtcatgaacaagttacgatccaaaacctctttattgttggctttgatgaaatcaataagttagtgttagtttcaggcgcaattgctggtcctgagggtgggattgttttaattaaaactgcaaaaaagaaaactggcaagataaaagatataaagttagcagtacaaactgttaaagccccacaactaaaagcaccaaaaaagcagaaaactaaggttgaaaccaaccaggttaacccaaaaattgaagaagagaaaactaagtaa

SEQ ID NO: 27286 - DNA, 636 bp, Mycoplasma genitalium
atggctaaacttaaagtaatccagtttgatggtagttttaaaggtgagatccaacctgctaaccacctccttttaaaaaaagcagtgatccaaccagtgtttgatgctatcttattagaacaagcagcatgtagacaaggcactcactctactttaactaagggtgaagttagtggtgggggtaaaaaaccatataaacaaaagcacactggtaaagctagacagggttcaataagaaacccccattatgtggggggtggtgttgtttttggtcctaaacccaaccgtaactacaaactaaaactaaacaaaaaggcttatcaacttgctttaactagtgcctttgcacaaaagcttaacaacaaccaagtgatagttgctgaagccaagttgtttgaacaaaccaatgccaaaactaaaaagatgctgacgtttctcaagaatgccaaactaactgagcaaaaactcttgtttgtgattgatactatctcaaaaccactgttgttgagtactaacaacctaaagcagatagtagtcaaacagtttaataaagtatcagtaagagatctacttttagctaaaactatcatcattgaaaaagctgcttttacaaaactggaggaacgacttaaatag

SEQ ID NO: 27287 - DNA, 321 bp, Mycoplasma genitalium
atggatgtaaccaacatactcttaaaaccagtcttaactgaaaagagttatctcaaccagatgggggaattgaaaaaatatgtctttgcaattaaccctaaagctactaaaaccaaagtaaaactagcgtttgaaattatctatggggttaaacctttaaagattaacacgctaattagaaaaccagtgaccattagaaatggcactaaataccctgggtttagtaagctagcaaaactagcagtaatcaccttacctaagggaatggatattgccattactggtgagaaaacaaccaagaaagaaacaaaggatcaataa

SEQ ID NO: 27288 - DNA, 858 bp, Mycoplasma genitalium
atggcaattaaaaagattattagtcgttctaacagtgggattcacaacgccactgtcattgactttaaaaaactccttaccaattccaaacccgaaaagtcgcttttagttactttaaaaaaacatgcaggaagaaacaaccagggcaagatcactgttcgccaccacggtgggagacataaacgtaagtaccgtttaattgattttaagcgttaccactatgacaatttaaaagcaactgttaaatcgattgaatatgatcctaaccgcagttgttttatctcccttttacactatcagaatggggttaaaacttacatcattagtcctgatgggattaaggttggtgatcaagtttattcatctgatcatgccattgatatcaaactaggttattgtatgccccttgcttttatccctgaaggaacccaagttcataacattgaacttaaccctaagggtgggggtaagatagcaagaagtgctggaagttatgcgaggatcttgggtcaagatgagactggtaaatacatcattctccagttaatctcaggggaaactaggaagtttttaaaggagtgtagagctacagttggtgttgtctctaacttagatcataaccttgttgtaattggtaaagcagggagaagtcgtcataagggaatcagaccaacggttagaggttcagcaatgaaccctaatgaccacccgcatgggggtggggaagggagaagcccagttggcagagatgcaccaagaaccccttggggcaaacgccatatgggtgtgaaaacacgtaacatgaaaaaacattcaactaacctgattattagaaacagaaaaggagaacaatactaa

SEQ ID NO: 27289 - DNA, 264 bp, Mycoplasma genitalium
atgtcaagaagtagtaaaaagggcgcatttgttgatgctcacctcttaaaaaaagtgattgaaatgaacaaacaagccaagaaaaaaccaattaagacttggtcaagaagaagtactatcttccctgagtttgtgggtaacaccttcagtgtgcataacggtaaaacctttattaatgtttatgttactgatgatatggtaggtcataagttgggtgagttttccccaactagaaactttaaacaacacactgctaaccgttag

SEQ ID NO: 27290 - DNA, 435 bp, Mycoplasma genitalium
atgattgcttttgctaaacaatacagagttcacatctccccccaaaaagcacggttagtgtgccagttaattgtgggtaagaagattaatgatgcgcaaaacatccttttaaatacgccaaagaaagctgcttactttttaactaagttactaaatagtgcgattagtaatgccactaataaccacgggatgagcggggatcttttgtatgtatttgaatgtgttgctaaccaaggacctagcatgaaaagaacaatcgctagagccaaaggttcagggagtgttttaaccaagcgttcttcaaacctagttattaagttatctgataatcccaatgaaagaaaattactcttaacccaacaaaaggaactggtgaaaaaaagaacaatgggtcataaaaaagagaaagcaaagcaaaagcaaaaacaacaataa

SEQ ID NO: 27291 - DNA, 807 bp, Mycoplasma genitalium
atgggacaaaaagtaaattcaaacggcttaaggtttggcattaataagaactggatctcacggtgaactgccagttccaaccaacaaacagcaacctgattagtacaagatgagaagatccgtaacctcttttttatcaactatcgcaacgctcaggtgtctaatgttgagatagaaagaacccaaacgactgttgatgtttatgtctatgcagctcaacctgctttattgataggcagtgaaaacaaaaacatccaaaagattaccaaaatgatccaaatcattgtgggcagaaagattaaacttgatcttactatcaatgagatcggctctccgatgttatcaagtaggatcattgcccgtgatattgctaatgcgattgaaaacagagtaccactccgttcagcaatgcgccaagctctaaccaaggttttaaaagcaggtgctaatgggattaaggtattggtatcaggcagattaaatggggcggaaattgcccgtgacaagatgtatattgagggcaatatgcctctttcaactttaagagcagatattgactatgcctttgaaaaagcaaaaaccacctatggcattattggggtgaaagtatggattaacagggggatgatctatgcaaagggtttaaacagaaccccagcacacatcctccatccccaaaagaaacagctaaaaaccccaactatcaaaaaaaccaattcagtaatagcaaaacaaaaactcactggtagtgatattgaaactgctagtttaaaagcacttactgataataatcaaaaccacgaatag

SEQ ID NO: 27292 - DNA, 417 bp, Mycoplasma genitalium
atgttacaaccaaaaagaaccaaatacagaaaaccacataacgtcagttatgaaggacacactaagggcaatggttatgttgcttttggtgagtatggaattgttgctactaagggtaattggatcgatgcgagagcaattgaatcagcgcgggttgctatctcaaagtgcttgggtaaaactggaaagatgtgaatcaggatcttcccccacatgtcaaaaaccaaaaaacccttagaagtgaggatgggttcagggaaaggtaaccctgaattttgggttgctgttgttaaaaaggggacagtgatgtttgaagttgctaacatccctgaacaacagatgatcaaagccttaacaagagcaggccataaactccctgttacctgaaaactaatgaaaagagaggagaacagttaa

SEQ ID NO: 27293 - DNA, 603 bp, Mycoplasma genitalium
atgacaatcgctaaggagctgaagcaaaagagcaacgaagagttagtgaaactagtaattaagcttaagggtgaactcttagaataccgctttaaacttgcccatggtgaacttgacaaaccccatctgattgccaaggtgagaaagttattagcagttgtacttactattctcactgaacgcaaactcaactgacaagttgaaaaagataagtacaagttactttcaagaaaaaccaatgaacttattgttaacagttgaaagcaaaaactatcaactaaacctgaatccaaacaagaaactaaaaaggctgaagttaaacctaaggttgaatcaaagcctgaatccaaacaagaaactaaaaaggctgaagttaaacctttaaaacaagaaactaaaaaagttgaagttaaacctaaagttgaaccaaaacctttaaaacaagaaactaaaaaggttgaagctaggattgaaactaagactaaagttgaatcaaaacctttaaaacaagaagttaaaaaggttgaagctaaaaaatctgtttcaaaaccccaaaaaccagttaaagccaaaatgattaaaacaaaggagaaaaaacaataa

SEQ ID NO: 27294 - DNA, 258 bp, Mycoplasma genitalium
atgaagcgcaaccaacgtaagcagttaattggcacagttgttagcaccaaaaatgctaaaacagcaactgtcaaagtaacatcacgctttaaacatcctttgtatcacaaatcagttattcgccataaaaagtaccatgtccataactttggtgaacttgttgctaatgatggtgatagggtacaaattattgaaacaagacccctttccgctttaaagcggtgaaggattgtcaaaatcattgaaagagcaaaatag

SEQ ID NO: 27295 - DNA, 369 bp, Mycoplasma genitalium
atggttagttttatgacaagattaaatgtagctgataatacaggcgctaagcaagtaggtattatcaaagttttaggtgctacatacaaacgttatgcattccttggtgatgttgttgttgtatcagttaaagatgcaatccctaatggcatggttaaaaagggtcaagtgttaagagcagtcattgttagaaccaaaaagggacaacaacgccaagatggtacccacctaaagttccatgacaatgcttgtgtgcttatcaaagaagataaatccccaaggggaacaagaatctttggaccagttgctagagagttgagagaaaaaggttacaacaagattttaagcttggcggtggaggttgtttaa

SEQ ID NO: 27296 - DNA, 327 bp, Mycoplasma genitalium
atgcaaaggattagaaaaggtgataaggtagttgtgatcactggtaaaaacaagggtggtagtgggatagtgcttaaggtattaaccaagcaaaacaaagcgattgttgaggggatcaataaggttactgttcacaaaaaagaacaagtcaacaagcgcagcaaacaaacaaacccaactactaaagaagcccctttaccattaaataaacttgctttatttgatcagaaggccaaacagcaaacaattggcaagatcaaataccaaattgatcctaaaaccaaacaaaaaacaagagtctttaagaagactaataatgccatttaa

SEQ ID NO: 27297 - DNA, 543 bp, Mycoplasma genitalium
atgaataaccttgaaaaaacctataaaactgagttagttaatcaactccaacaacagttgggcttttcttccattatgcaagtccctaagttaacaaaaatcgttgttaacatgggagttggggatgcaattagagacaacaagttccttgaatcagcactaaatgaactgcacctgattactggtcaaaaacccgttgctactaaagctaagaatgctatctcaacttacaagttacgtgctggccaattaattggttgtaaagttactctaagaaataaaaagatgtgatcctttctggaaaaattaatctatattgctctgcccagagtaagggactttcgcggtttatcactgcgctcttttgatgggaaaggtaactatacgattggcattaaagaacagattatcttccctgaaattgtctatgatgatatcaaaagaattaggggttttgacatcactattgtcacttccaccaacaaagatagtgaagcacttgctttactgagagcactaaagatgccgtttgtaaaagaatag

SEQ ID NO: 27298 - DNA, 186 bp, Mycoplasma genitalium
atggctaaaaaatcattaaaagtaaaacaatcccgtcccaataagtttagtgtacgcgactacaccaggtgtttaaggtgtgggcgtgctagagcagtgttaagccactttggtgtgtgtaggttgtgtttccgtgaacttgcttatgcaggagcaatcccaggagttaaaaaagcatcatgataa

SEQ ID NO: 27299 - DNA, 426 bp, Mycoplasma genitalium
atgataatcaataaagttcccaaagcccattttgatccagtttctgatcttttcactaagatcaacaatgctagaaaagctaagcttttaactgttaccaccatcgcttctaagttaaagatagctatcttagagattttgattaaagagggctatttagctaactatcaggtgttggaaaataaaactaaaaccaaaaaactagttagtttcacattaaaatacacccaaagaaggatatgttctattaatggggtgaaacagatctcaaaaccaggattaagaatctatcgttcctttgaaaaacttccccttgttttaaatggtcttggtattgcaattatctccactagtgatggagtgatgactgataaagtagcaaggttaaagaagattggtggggagattttagcttacgtttggtaa

SEQ ID NO: 27300 - DNA, 555 bp, Mycoplasma genitalium
atgtcaaaaataggaaatagatcaatcaaaattgatcctagtaaagtgagtttaatgcaaacaacaacactgcttactattaaaggaccattaggggaaaacaccattaaactacccaaaaacttacccttaaagtttgttgttgaaaatgacactattaaagtaactaataacaacaacttaaaacaaactaagatcttacacggtactttcaatgcgttagttaacaacgcagttattggggttaccaagggttttgaaaagaaactcatcctagttggggttggttatcgtgctaatgtggaagggcaatttctcaacttacaattgggctattcccatcctattaaggagttgatcccaaaccaacttactgttaaagtagagaagaacactgaaatcaccattagtggaataaaaaaagagttagtaggtcagtttgccactgaaatcagaaagtgaagaaaacctgagccttataagggtaaaggggtactttactttaacgaagtaattgttagaaaacaaggtaaaactgcagagggcaagaaataa

SEQ ID NO: 27301 - DNA, 348 bp, Mycoplasma genitalium
atgacaagaaacgataaaagaaggattagacacaaacggattgtcaaaaagattaggttaactaaccttaacaacagggttgtactaattgttatcaagagtttaaaaaacatctcggttcaagcttgggactttagtaagaacgttgttttaacatcaagttcctcacttcaactaaaattaaaaaatggcaacaaggagaatgctaaactagtgggaatggatattgcaaccaaactcatcaaactaaaccaaaaggatgtggtttttgatactgggggtagtaagtaccatggtaggattgctgctttagcagaaggagcgcgagctaagggtttaaatttttaa

SEQ ID NO: 27302 - DNA, 636 bp, Mycoplasma genitalium
atgaatgatcaaaaaactactaacactggcttgttaacttccactcttaaaaccaagcccaaacacaaccttaaaccttccagtgaagccattaaaaaagcagtgtccaaaaaggaaggtcattacaaaaacaagcgctttcaaaaacataactttaataacaaaagtgagtttgaagagaggattgtcaaactcaaacggatctccaaaaccacaaaaggtgggagaaacatgcgctttagtgtccttgttgttgttggtaacaaaaagggcaaggttggttatgggattgctaaggcattggaagtaccacttgccattaaaaaagcgattaaaaaagcccataactccattcatacagtagagatccataagggttcaatctaccacgaagtgattggtagaaaaggtgcatctaaggtgttgttaaaacctgcacctttaggaactgggatcattgctgggggagcgatccgtgcaattgtagagttagctggttttagtgatatctataccaagaacttgggaagaaacacccccattaacatgatccatgccactatggatgggatcttaaagcaactctcacccaaaaaagtggcattattaagaaataaaccaattagtgatctataa

SEQ ID NO: 27303 - DNA, 453 bp, Mycoplasma genitalium
atggaactacaccaattaaaaagtgtctctaaaagccgtaaccacaagtccaaagtggtaggtaggggccatggctcgggattaggtaaaacatcatcacgtggtcaaaagggacaaaaagcaagaaaatcaggtttaactaggttaggttttgaagggggacaaacacccctttaccgccggttgcctaagtatggggttgctaacaaagggatcttaaaaaaaaggtgggttgttttaaatttgaacaaagttgctaaactcaatctcaaaacagttactagagcaactttgattgaaaaaaaggtaattagtaaaaaaaataacctccctttgaagttaattgggaacacaaaactcactactcccatccactttgaagtgcaaaaaatctccaaaaatgctttaaatgcagtgcaaactagcaaaggtagtgtgaaaattatcacctaa

SEQ ID NO: 27304 - DNA, 1428 bp, Mycoplasma genitalium
atgcaaactgtttcttcacccaaacaaaaacttaactttggtcaaaggttactaactctattacagaaccgtgactttatggtgtcgctggttttaacagtggtacttttaatcttgtttagggtgttagcaattatccccttaccagggattaggattaatgagagtgtcttggatagaaattccaatgactttttttcactttttaacttacttgggggtgggggattaaaccagctatcgttgtttgcagttgggatcagtccttatatctcagcccaaatcatcatgcaactgctttcaactgatctaattcctccactttcaaagctagttaacagtggggaagtggggcgaagaaagattgagatgatcacaagaattatcaccttaccctttgctttagtgcaagcatttgctgtgatccaaattgctactaatgcaggcactggttcaagtccgattagtttagctaatagtggcagtgagtttattgctttttatattattgctatgactgcagggacttatatggcagtgtttttgggtgatactatctccaaaaaaggggttggtaatgggattactttgttaattctctcagggattttatcccaactcccccagggctttattgctgcttacaatgttttgagtgggatagtaattactctaaccccacagttaactgcagcaattagcttctttatctatttcttagcattcttagttttactgtttgccactacctttatcacccaagcgaccagaaagattcccatccaacaatcaggacaagggttggttagtgaagtcaaaaccttaccttatttgcctattaaggtgaatgctgctggggtgatccctgtcatctttgcatccagtattatgtctatccctgtgaccattgcccagtttcaaccccaaactgagtcacggtggtttgtggaggattacctatcactttcaacacccgtagggatctttttatatgcagttttggttatccttttttcctttttttacagttacatccagattaacccagaacggttagctaagaactttgaaaaatctggcagatttatcccagggattcgaccgggcaatgatacagagaaacacattgcgcgggtgttaataaggattaactttataggtgctccttttttaactgttattgctattatcccttacattgtttcttatttcattaggttacctaactccttgagtttaggggggacggggattattattattgttactgctgtagttgaatttatcagtgcactgcgttcagctgctactgctactaactaccaacaactaaggagaaacttagcaattgaagtgcaacaaacagctaaacaagatagtctagagcagcttcaaaaagaagcaccagggattggtaacctatggtag

SEQ ID NO: 27305 - DNA, 645 bp, Mycoplasma genitalium
atggtagcacagtttaataagttcattatcttaggacccccaggggcaggaaaaggtacagtttgtaaactgcttagcaaaacaactaagttagtccatattgctagtggtgatctgtttagagaagccattaaaaaccagagtgttattggtagaaagattgcagcaattatcagtcagggtggttatgttgatgatgccactactaaccagcttgtttatgaatatatcactaccaatccattaccaaatggttttatcttagatggttatccaagaacagagaaccagcttgattttctaaatattaaactaaccattgacatggtctttgaactagttgttagtgatctgaataaactgattacacggattgataacagggttatttgtaacaactgtaacagtgtttataacttgctttttcaaaaaccactagttgaaaatagttgtgatcagtgttcagctaaactagtgaaaaggagtgatgataacaaagcagtggtcaaagcaagaatggagttatatcaacaaacaattcaaccaatccacacttactttttcaacaaacaacttttagtacaaattgattgctttttaccactagaagaacaactcaagacaatcaaacaatttattagataa

SEQ ID NO: 27306 - DNA, 213 bp, Mycoplasma genitalium
atgaaaaacgataaactctttctaacaggtaagatactggaaattatccatggtgataagtaccgggtgatgcttgaaaacaatgttgaggttgatgcacatctagcaggtaaaatgaagatgaaaagaaccaagattctccctggggatgttgttgaggtggaattttctccctatgatttgaaactaggtaggataacccaaagaaaataa

SEQ ID NO: 27307 - DNA, 114 bp, Mycoplasma genitalium
atgaaggttagagcaagcgtaaaaccaatttgtaaagattgtaagatcatcaaacgtcaccgcatcttaagggtgatctgcaaaaccaaaaaacacaagcaaaggcaaggataa

SEQ ID NO: 27308 - DNA, 375 bp, Mycoplasma genitalium
atggcacgaatcttagggattgatatccccaaccaaaaacggatcgagatagctttaacatacatctttgggattggtttgtcaagtgcaaaaacaatcttaaaaaaagcaaagattaaccctgataaacgcgttaaagatctgagtgaagaggaacttgttgcgattagaaacgcagcaagcggttacaagattgagggtgatttgagaagagagattgctttaaacatcaaacacctaacagagatcggttcttgaaaagggattagacacagaaaaaacctgccagtaagaggacaacgcactagaaccaacgcaagaaccagaaaaggccctagaaaaacagtggctaacaagaaaattgaaagtaagtaa

SEQ ID NO: 27309 - DNA, 396 bp, Mycoplasma genitalium
atggctaagaaaaaaaagattaatgttcccagtggtttgatccatgtctcctgttcacctaacaataccatagtatcagccactgatcccagtggtaatgtcttgtgctgagcgagcagtggtacagtaggattcaaaggttttagaaagaaaaccccttactcagcaggggtagcagctgataaggtggctaaaactgtgaaagagatgggaatggggagtgttaagatgtatctgaagggaacaggtagaggaaaagacaccacgattagaagctttgctaatgctgggattacgatcacagaaatcaatgaaaaaacccctattccccacaatggctgcaagctcctaagcgtccgcgctaatcaaaacaacaacttatggaaaaatttttaa

SEQ ID NO: 27310 - DNA, 987 bp, Mycoplasma genitalium
atggaaaaatttttaaagtacgaaattaaggttaacaacaaccaaccaaccaacactaaccctaactatgggatctttgaagtagcaccgttagaatcaggatttgggattaccattggtaatgcgatgcgccgagtgttacttagttgtatcccaggcgctagtgtgtttgccattgccattagtggggtaaaacaagagtttagtaatgtggagggtgtgttggaagatgtgactgaaatggtgttaaacttcaagcaactagtggtgagaatctctgatcttttgtttgaagatggggagatgatcgaaccacccttagaaaggtgaccagttttaaaagttactgctgaaaaaaagggtgcagtatatgcaaaggatcttgagtgtccagctggttttgaagtgattaataaggacctttatctcttctctttacaaaaggacatgaaactaacagtcagtgtttatgttaaacagggtaggggctttactagctttcttgaaaacagagaattgatcaattcgcttggcattattgctacagatgctaacttttccccggttttacactgtggttatgaagttcaagaggtgaaaacttccaaacaaaagttaactgaccatctcacctttaagattgctactaacggtgcaattaaagcagtggatgcgtttgctatggcagcaaagatcctaattgaacacttaaacccaattgtaagtgtcaatgagtcaattaagaatttaacaattatccaagagaaagcagaggaaagaaaggtgaaatcatttgccaagcaaattgaagaacttgactttactgttagaacctttaactgtttgaaaagaagtgggatccacacactccaagagttactatcaaagtcattaactgacattagagagattagaaacctaggtaagaaatcagaacgggagattatcaaaaaggtgcaagagttaggtttaaaattccgttcttaa

SEQ ID NO: 27311 - DNA, 372 bp, Mycoplasma genitalium
atgtcatacattaataaagaggggaaaaccacagcttgaagagtgatgacagtgcgtcagcaagtgagtgcagtgttaagttatggaaagattcaaaccactttaaaaaaagctaagaacacccaaaaaaggttagagaagattattaccattgctaaagttgataactttaacaaccgcagggctgttaaaaagtggttattaaataccaattcattagatgtagatcaactcacaaaccacctttttaaaaaagtagcaccacgttttttaaagcgtaatggtggttatagtagagtgttaaagttgggagttagaaggggtgatagtactgaaatggcgatcttacagctgatagatgctaccaactaa

SEQ ID NO: 27312 - DNA, 825 bp, Mycoplasma genitalium
atgctaccaactaaacaagctgcttgtagttttattaatgttgctttttcctataatgaactgccattaattagggaactatcttttagtgtttatgagggggaatatgtttgtattgttggtcataatggcagtggtaaatcaaccatttccaaactgttaacagggttattaaagccccaggcaggtgagattaagatctttggtaaaacagttgattttgataatgttagttacttgagaaataacattgggatcatctttcaaaaccctgataaccagtttattgggatcactgttgaagatgacattgcctttgggcttgaaaacaagtgtttttcaagacagaagataaaagccattattgatgaagttaccctacaaacccaaactgatgggtttattaaacaagaaccccataacctatcagggggacaaaaacaacgggtagcaattgcatctgttttagcactaaatcctgctattatcatctttgatgaatcaactgcgatgttagatcctaaagctaaaaaaacgattaagcagtttatggttaaactagccaaacagggcaagtgtgtgatctcaattacccatgatatggaagaagttactaaagctgataaggtgttagtaatgaatgagggcaaactgatcaaacaaggtaaacctgttgaagttttcactagtgaacaagagttacaaaaaatccgtttagacatccctttttcactcagtctttcaaccaagataagagggatcactagtacaattgattaccaaaccctgattaaatcaattgccaagctgtgaaaaaaaagatag

SEQ ID NO: 27313 - DNA, 915 bp, Mycoplasma genitalium
gtgaaaaaaaagatagtcccaattaaccctttaaaagcagatgagattttagcagttagtcacttatcatgtgtttttaacagtaaaactaacaatcccattaaggtgattgatgatttttcctatacctttcaaaagaaccaaatttactgtattattggtgatagtggcagtggtaaatcaacccttgttaaccacttcaatgggttgataaaacccaaccaaggtgatatttgggttaaagatatctatattggtgctaaacaacgcaagattaagaactttaaaaaactgcgaaaaactatctcaattgttttccagtttcctgagtaccaattgtttaaagataccgtggaaaaagacattatgtttggtccagtagcattaggtcaatccaagtatgatgcgcgccaaaaagcggcttattatctggagatgatggggttaaaatacccttttttagaacgtaatccctttgaattgagtggggggcagaaaagaagggtagcgattgctggtatacttgcaattgaaccagaaattctaatctttgatgaaccaactgctgggcttgatcctgaaggggaaagggagatgatgcagttaattaaaactgccaaacaacaacaaagaacggtatttatgatcacccaccagatggaaaatgtccttgaggtggctgatgtggttttggttttagctaagggtaaactagtaaaagctgctagtccatatgaagtgtttatggaccaaactttccttgaaaaaacaacgattgttctcccccctgtgatccaagtgatcaaagatctaattgcgattaatgctcactttaataagttaattgagttgcaaccaaagaacctagaacagcttgcatcagcaattaacaagactatagcaaaccatggataa

SEQ ID NO: 27314 - DNA, 1263 bp, Mycoplasma genitalium
atggataactttattaatggctatatcccaagaaacagctttgttcacaagctgcatccaactactaaactagtaatctttttactgttagttatcttggtatttgtaccaattggctttgtttttcaaagtgttatctttctttttgttacctttgttttttttattgctaaactcccggggcggttttacagttcagcaattaagtcaattacgctgttatttctcttgttgttatttgtaaactggtttacctttcgtgatccagggttttatcttactagtgatcaacttaacagtttaccagccattgataacagcaagtttagcttttgaaacattagtttgtttaactatcaagataatgttttttcccaggtttttgcttttaacaggggtaatttaaccaacttaaatcaacttgattttttctataaagctaacaatgctgatagttacaccaaagtaaagggcattgatagtttagcaagtatgctagcaaacaatggcaatggtttaagcaaagacaaaattctgagtgcttttttagatcacaatttaaacctttatttagcgagaagttggggggcaaattttgctgggtttgttgttgattttaacccaacaacccaactctttaaactcaccccttttctagcaaatgctagttatgttttaacgttaagagcagttatcttagcattctatgtcacccaaaagatcctaattatgatcttatttgcaactgtactcacttccacttcaagttcagttgaactagcatatgggattgaaaggttattatgacctttaaaactcattaaaatacctgttaatgtctttgcaatgaccattgccattgccattaggtttgtcccttccttgttactagaatcacaacggatcttaaatgcccaagcctccaggggtttagactttcgaaatgggggatttttagtgaagatgcgttcactctcttcgttagtagtgccaatggtttccattgcctttcgcaatgcctctgaacttgctagtgcaatggaagcaaggggttatcaccctgcaaagaagcgcagtagttatagacaatacaaaatcacttggattgatattttagcgttatttttggtttttgcttggtttgttgtgattatctttttaactattagaggagcggtctttttggatctaggtacaccagaatggttattaacaggaaagattaatgaacaggtaatcagggatctgaaggtaagtggctag

SEQ ID NO: 27315 - DNA, 735 bp, Mycoplasma genitalium
gtggctaggtacttggggattgttagttatgatggcagttactttaaagggtgagcgattcaaccaaacctagctactatccaaggtttattggagcaaagtttttcattaatcattggcagaaagataaaggtaattggttcaggtagaactgataaaggggtacatgccatcaaccaaacctttcatgttgatattaatggtgaaattaatctcaatttgttaattagaaaaattaaccagttgattaagccccactgtatagttaaaaccttggtattggttaacgatagctttcatgcgcggtttcaagttaaaaccaaggtgtatgaatatctgattaactgtgggaatttaaatccgttgcaatttaactatgtttggcagttaaaccagcaattggatcttgaaaaactcaaagctgatgccactttatttttaggtaagaaaaactttcttagcttcagtagttcgattcacactgattcaattcgcacaattagtaaaattaccatacaaaaagaaactaaccaactagttagactaactttttttggcagtggttttctcaggagtcaagtgaggatgatagttgcttgtttagtgaatttaaacactaataaaatggcacttgaaacagttgcaaaattgtttgaacaccccaagaaagggagttgtgttgttaaagcccctagttgtggtttgtatctgaaaacagtggtatatgaaaaatag

SEQ ID NO: 27316 - DNA, 3159 bp, Mycoplasma genitalium
atgaaaacaatgagaaaacagatttataaaaaagcatactggttactattaccctttctaccattagcactagccaataccttccttgtcaaagaggatagtaagaatgttactgcttacacccccttcgccacccccatcaccgattctaaaagtgatctggttagtttggcacaacttgattcttcttatcaaatcgctgaccaaaccatccataacaccaacctgtttgtgttgttcaagtctagggatgtaaaagttaagtatgagtcaagtggcagtaacaacattagttttgattcaactagtcaaggtgaaaaaccctcctatgtggtcgagtttactaactctaccaacattggcatcaagtgaacgatggtgaaaaagtatcagttagatgtaccgaatgtaagtagtgacatgaaccaagtactgaaaaatttaattcttgaacaacctttgactaagtataccttaaacagtagtttggccaaagagaagggcaaaacgcaaagggaggtacatctgggtagtgggcaagcaaatcagtgaaccagtcaacgcaaccaacatgacctaaacaacaatcccagtcccaatgcttcaactgggtttaaactcactaccggcaatgcatatagaaaactaagtgagtcctgaccaatttatgaaccaattgatgggaccaagcagggcaaagggaaggatagtagtgggtggagttcaactgaagaaaacgaagctaaaaatgatgcgcccagtgtttctggagggggatcatcttctggaacatttaataaatacctcaacaccaagcaagcgttagagagcatcggtatcttgtttgatgatcaaaccccaagaaatgttatcacccaactctattatgcttctactagcaagctagcagtcaccaacaaccacattgtcgtgatgggtaacagctttctacccagcatgtggtactgggtggtggagcggagtgcacaggaaaatgcaagtaacaaacccacctggtttgctaataccaatttagactgaggagaagacaaacaaaaacaatttgttgagaaccagttggggtataaggaaactaccagtaccaattcccacaacttccattccaaatctttcacccaacctgcatatctgatcagtggcattgacagtgtcaatgatcaaatcatcttcagtggctttaaagcggggagtgtggggtatgatagtagtagtagtagtagtagtagtagtagtagtaccaaagaccaagcacttgcttgatcaacaacaactagcttagatagtaaaacggggtataaggatctagtgaccaacgacacggggctaaatggtccgatcaatgggagtttttcaatccaagacaccttcagctttgttgttccttattcggggaatcatacaaataatggaacaactggacccattaaaactgcttatccagtgaaaaaagatcaaaaatcaactgtcaagatcaattctttgattaacgctacgcccttgaatagttatggggatgaggggattggggtgtttgatgcgttaggtttaaactataactttaaatctaaccaagaacgtttaccttccagaactgatcagatctttgtttatgggattgtctcccctaatgaattgcgaagtgctaaaagttctgctgattcaactggtagtgatacaaaggtaaactgatcaaacacccaatcacgttacctccctgttccctataactattcagaagggatcattgatgcagatggatttaagcgtcctgaaaacaggggtgctagtgtaactaccttctcagggcttaaatcaattgcccctgatggttttgctaactcaatagctaacttctcagttgggttaaaagcaggaattgatcctaacccagtgatgagtggtaagaaagctaactatggagcggttgtgttaacacgggggggtgttgttagattaaactttaaccctggtaatgattcattgctttcaacaactgataacaatatagcacctatctccttctcatttactccgttcacagctgctgagagtgcggtggatctcactaccttcaaagaagttacctataaccaagaatcagggttatggagttatatctttgacagctccttaaaaccaagccatgatggtaaacaaactcctgtcactgataacatgggctttagtgttatcactgtctcaagaactggcattgaactaaaccaagaccaagctactacaactcttgatgtagcacctagtgcactagcagtgcaatcagggatccaatctaccacccaaaccctaactggagtactcccacttagtgaggaattcagtgcagttattgctaaagatagtgatcaaaataagattgatatctataaaaacaacaacgggttgtttgaaattgatacccaactaagtaatagtgttgccaccaacaacggtgggttagcacctagttacacagaaaacagggttgatgcatggggtaaagttgagtttgctgataacagtgtattgcaagcaagaaacctagttgataaaactgttgatgagatcatcaatacccctgaaatcttaaactccttctttagattcacccctgcttttgaagatcaaaaagctacccttgttgctactaagcaaagtgatacatcacttagtgtctcaccaaggatccagttcttagatggtaatttctatgatcttaactctaccatcgctggggtacctttaaacattggtttcccttcaagagtgtttgctgggtttgcagcactccctgcatgggtgatccctgtatcagtaggttcttcagttgggatcttgtttatcttgttagtcttaggacttgggattgggatcccaatgtacagggtaagaaaactccaagatgcatcgtttgttaatgtctttaaaaaggttgatacactcacaactgctgtcggtagtgtgtacaaaaagattattacccaaactggtgtggtgaaaaaagcacctagtgcattgaaagctgctaatcctagtgttaaaaaacctgctgcttttttaaaaccacctgttcaaccaccaagtaaacctgaaggggaacaaaaagctgttgaagttaagtcagaagaaaccaaaagttag

SEQ ID NO: 27317 - DNA, 1026 bp, Mycoplasma genitalium
atgattgatcaaaacaagttaattactaagtgaaaaaaagcatttgcaaaagctaagaatttaactactttagttaatcttaagaacactttacacaacagtgatttaaagccattactccaaaagattaaaaccgctacaaaactaagtgaaaaaagtagtttaggtaagctttatcaatcacttgatattcaactaactgatctgttaactagttacaaaaaaacctttgaaataaataaccaagttagtcaaaaaccttcacttgatgtgatgctaccagcaacagagtttaccaatggttctaataacgcactatatcaggttattgataatttagttgaatactttaaaagctttttattcacaattaattttgatagtgaactgaccagtattagtgactgttttgatcttttaaatatccctaaagatcattccagtaggaatgaatctgattctttttatatcgataaaaccagtttattgagaacccattgtactgctaccacgctaaaagcagtcagaacttctaaaaaaactaataatcctgatatcagggttgtctctttaggagcggtttttcgtaatgatagtgatgatgccacccactcccatcagtttacccaacttgattttatgtggattaaaaaagggctttcattagctaatttaaagtggtttattaacaatatgatcacccatttctttggggaaaatacttttactaggtttagactatcccacttcccattcactgaaccctcgtttgaaattgacattaggtgttggttatgtcaaaatggttgttctatttgtaagcaaaccaagtgaattgagatcttaggggcggggatcatccatccccaggtgatgaataacatgggaattggggatactgaaaatattactgggatagcagcaggaattgggattgaacgcttagcaatgttaaagtatgggattgatgatatccgtgatttttatgataacaactttaagtttttaacccagtttactgactaa

SEQ ID NO: 27318 - DNA, 2421 bp, Mycoplasma genitalium
atgttgatatcaaaaaaaacacttggcgttttaatccctgacatctttagtttttctaatgatcaaattgcccaaaagttagaacaaatggggattgaagtggaatcaattaagcagtttaacagccctgattacctccaacttgcaaaggttgtatcaatccaaccccatccccatgacaacaagctttttatctgtgaattacaaattgataaaaacaagtttattaatgttgtttccaatgctaataacattaacaatcctgataatatcaacaagtttgtcattgttgcaaaaaaaggaactgagttactcaacgggttaattgttaaaacccaaaatattaaagggatcatttcagaagggattttatgtagctatattgacattaaccccttcagtagacagatcattgaaaaaacagaagttgctgatgcgattatcattgatcatgttagcaatgatcatgactgaaaccaatacctctcgtttttaagtttggatgatgtgatctttgatgttaaaaccccaactaacagagcagatcttcatagcttaatctttttagcaaaagaacttggggtacttttgaaaaccaaaacctttttaaaacaaaaaagtagtgttgttaaccatgacttttttaagtttcccctaaatttaaaaaacaagttaaaagcgaattattttggcggtttgttcttaagacaaattaaccaacatagttcaccttgaacagttaaaggactgttaattaaccaaatgatcaaaccagttaactattatgttgataaagctaacttagtaacagtgttcaccgctcagccaatccattgtcatgatgcagatagaattgttggtaacattgaacttaaacaagcaacccataatgaaacttttgttggacttgatgacaagcaatatgagattgaaccaggggatattgttgtttgtgatgagaagggcattattgcactggtagggatcattggttcaaagcgcacaatggtccaacctacaacaactaacatcttttttgaagttgttaactgtaacagtgaaaccattaaacaaactgccaagcgctttttgatcaataactttgccagtaagtttatggttaaaccgattagcttattagctactgataactgtttaaactacttacaaaacagtttactaaccactgataacattggcaaaattagccacttttcaagttcgcttaaagttgaaccatttagtaaaaagctcacagtgaatttccataagatacgccaactaattggcattgaaaaaaaggaactaactgatcaaaccattaaaaaaagcctcagtcaactagggtttaaagttgacaaccaacttctcaaaatccccagttacagacaagacattaatacctgacaagacattagtgaagagattgtgaagttaattgatatcaataagttaaaaccaattgggatcactagtagttttaactttgaaaagtccagttactttaacacttttaatgctttaacaaaactaagaaaaaagctacaaacacttggttttcacaacgttattacctaccagttaactgatcaaaaaagtgcaaaaacttttaatttgtttaacttagaaaatttcatcaccattaaaaacccagtgtcccaaaaccattctgtaatgcgtgttagcttaattgattcactgttaaaagtgctaaaaaccaataacaactataagaatgaactggtgaacatctttgagttttcctttattaaaacccaaaacaatagtgaactgcacctggcagtattatgagttgaaaaactgtttacttctagtttcaatcctatgcaagggataagcaatgatgtttttactatgaagggattagcaaaactcattgttgctaacttagggtttagttgtgactttgaaccacttgatgatagtgactattttgttaataatcaaagtttaaaaatagtagtttttaacgaacagatcggttttattgggctaattaaagaatcattgttaaataactatgatctgaacaataaacccatttattgtcttgaaatcaacttagataggatgctctcttctctaaacaggattgaaaaaaactaccttggttacagtaaactacaacctgtttgcaaggatcttacctttagttttaccaaccctgctagtcactttgatcagtttgctaacatgatcaaaaggataactggcattgaaagttgaaagttaattagtgtctttgaaactatgcaaaacaaccaactgatcactaagtacaccgttcgttattttctgaaaaatgatgctaacaaaccactaactaaccaaacaattgaacttatcactaataacttaaaactccagtgtgaaaaactaaaaattaaattagatatttag

SEQ ID NO: 27319 - DNA, 546 bp, Mycoplasma genitalium
ttggcacaaaacgcaaaacacccttctaaaaaagaacaaaaaccactcgttaatgaacagattgctttcaatcagttcactttaattgatgaaaacagtactaatttagggatagttaagatggaaaacgctttaaagttagcacaagaaaaacagttagatctagttctaattgctccaaacccaaccaaaccgatcgttaagttgttggactttggcagatatacctatgatttaaagcgtaagaaaagacaagccaagaaaaaccaaacaatcatccaaaccaaagaagttgttgtcaaaccaacgattgctaaacatgatttagaatttagagcaaaacagagtaagaattggatagaaaaaggtcatcatgtcaagtttatagtccgtgcctttggcagggttagcaccaggatagagttaattgaaaaggtgtttgatgacttttaccagttagttaaagatgtagttgagatccaaaaacctttaaccgcttcttccaaaacgatgtacgctgctctattagtacctttaaaaagatag

SEQ ID NO: 27320 - DNA, 180 bp, Mycoplasma genitalium
atgaaaaccaaaagtgctgcagtaaaacgctttaaactcaccaaatcaggacaaattaagcgcaaacacgcttatacttcccacctcgcgccccacaaatcaaccaaacaaaagcgccatttgcgcaagcaagctactgtgagcaacagtgaattgaaaagaattggtattttaatttag

SEQ ID NO: 27321 - DNA, 375 bp, Mycoplasma genitalium
atgcgtgttaagggaacaaatacaaccaggattagaagaaaaaaatggttaaaacaagctagtggtagctttgggacaagaaaagcttcttttaaggcagctaaacaaactgttatccaagcaagcaagtatgcttaccgtgataggagacagaaaaaacgtgagtttcgttcgttgtggatcttaaggttaaatgctgcactgcgtgcacaagggatgacttattcagtgtttatcaatgaattgaaaaaagccaagatagtcattaacagaaaggtactttctgaactagcaattaaagaacctaataagttaaatctgattatcaataccatcaaaaaaccaactaataaaccaactgttgcaaaaacttag

SEQ ID NO: 27322 - DNA, 1902 bp, Mycoplasma genitalium
atgaaaagtaactacagtgcaactaacatcaagatcttaaagggtttggatgcagttaaaaagcgtccggggatgtacattggttctactgatagtaagggtctgcaccacatgctatgggaaattcttgctaacagtgttgatgaagttttagctggttatgcaaccaatattactgttactttagatctcaacaacaccattactgttagtgatgatggcaggggtattccctatgagatccaccaagacagtaacatctctacgatcgatacagttttcacctttctccatgcaggggggaagtttgatgatcagtcatacaaactagcagggggattacatggggttggtgcatcagtggtcaatgccttaagtgatcatttagaagtaacagtgaaaagaaatggtcagatctaccaatcagtttatcaagctgggggtaagatcatccaaaaagccaaaaagattggtgatacaactagccatggtaccactgttagtttccatgctgaccctaaggtctttaaaaaggctcaatttgatagcaacattattaaaagcaggttaaaagagctaagctttctgtttgctaaactaaagctcacttttactgatcaaaaaactaataaaaccactgttttttttagtacctcaggactagttcagttccttgatgaaattaataatactgtagaaacacttggccaaaaaacactgattaaaggtgagaaggatgggattgaagtggaagtggttttccagtttaaccaatcagatcaagagacaatcttatcatttgctaactcgattaaaacctttgaaggagggagtcatgaaaatgggttttgtcttgccattagtgatgtgatcaacagctattgcagaaagtacaacttactaaaagaaaaagataaaaactttcaacttagtgagatcagacaagggttgaatgctattatcaaagttaacttacctgaaaaaaacatcgcttttgaaggacaaactaagagtaagttgttttcaaaggaagtgaaaaacgttgtttatgaattggtccaacaacactatttccagtttctggaaagaaacaacaatgatgctaaattgatcattgataaactactcaatgctagaaagattaaagagcaaatcaaacaacaacgtgagttgaaaaaaagtttatcaagtccccaaaaagagaagatcttatttgggaagttagcaccttgtcaaaccaaaaaaaccagtgaaaaagagttgtttattgttgaaggtgatagtgctggtggcactgctaaaatgggccgtgatagaatttttcaagctatcttacctttgcgcggcaaggtgttaaatgttgaaaaaattaacaataagaaggaagcgatcactaacgaagagatcctcactttaatcttttgtattggtacagggattttaactaacttcaacatcaaggacttaaagtacggaaagatcatcattatgactgatgcagataatgatggcgcacacatccaaatcctcttacttaccttcttttataggtacatgcaacccttaattgaactgggccatgtctatctagctcttcctcctttatataaactggaaaccaaagatagaaaaacagttaaatacctctggagtgatttggagttggaatcagtcaaactaaagcttaataacttcactttacaacgatacaaaggacttggagagatgaatgctgatcagttgtgagatactactatgaatccaactaccagaaagctagtgcaagtaaagcttgatgatctaattaacgctgaaaagcaaatcaacatctttatgggtgaaaagagtgatttgcgcaaacactggattgaagccaacattaactttagtgtggaaaactaa

SEQ ID NO: 27323 - DNA, 2346 bp, Mycoplasma genitalium
atggatcaaaaaaacaacaacctctttcaaaaggcaattgaagaagtctttgcagttagctttagtaagtatgctaaatacatcatccaagatagagctttacctgatctaagagatgggttaaaaccagtacaaagacggatcttatatgggatgtttcaaatgggcttaaaacccaccactccctataaaaaatcagcccgtgctgttggggagatcatggggaaataccacccccatggtgatagttccatttatgatgcaattatcagaatgtcccaaagctgaaagaacaactgaacaactgtttctatccatggtaacaatggttcagtggatggggataatgctgcagcaatgcgttacacagaaacccgcttaagcttgtatggatttgaactattaaaagacattgataaaaagttagttagttttatcaataactttgatgatagtgaaaaagaaccaacggttttaccaaccttactgcctaacctctttatcaatggtgcgagtgggatagctgctggatatgcaactaatattgctccccataacactaatgaactattagatagtctttgcttgcgaatagaccaacctaattgtgaacttaaacaaattttaaaaattgttaaaggtcctgattttccaacagggggtaatgtttattttgaaaagagtttaagtgatatttatcaagcaggcaaaggtaaatttattatccaagctaagtatgaagttaacaagaacttaaaccagattgaaattacccaaatcccttatgaaacactgaaagctaacattgtcaaacaaattgaagagattatctttgacaataaactatctgctattgaaagtgtcattgatagttcagatcgcaacggcattaggatcattattaaacacaaggactttttgcctgctgagaagatcatggcctttttgtttaaacacacccaactccaagtgaactttaaccttaataacaccgtgattgctaaccgctttcccatccaaattggtttactaagttacctcgatcattttttaaagttttgtcatgaactaattattaataaagctaagtatgaacttgagcttgcaagcaagcgcttggaaattattttaggactaattaaagcgattagtatcattgataaaatcatcaaattaattagatcagcagttgacaaaagtgatgcaagagaaaagttaattgataactttaaatttacttttaaccaagcagaggcaattgttagtttgcgactttaccaactaactaacactgatatttttgaacttaaccaagaacaaaatgaacttgaaaaaactgtgattagttcagagcaactaattgctagtgaaaaagcaagaaacaaactcctaaaaaaacagtttgaaggttataaaaagcagtttcaccagcaacgaaggtcacaaatatgtggctttattaaccaaaaaaaggtggaggaaagtgagctaattgaaaacaaaacttatggggttttaatcactaaagctggtaactaccataagtttgaatctaaccaactattaaaaagcaccactgattttaaaagtgagagtgacacaattatctttgcacaaactattgctaataccgaccaaatttttattgtcacttcactaggtaacattattaatatccctgtttataaattagctttcaattccaaaaataaactagcaagtttagttagtaaaaaaccaatccttttggagtatgaaacgattgtttttgttggaacaatgaacagtgtaaaccaaccaatccttgttttaacttccaaactaggaatggttaaacggattgatttaaccaaacttaacattaagccacttaaagctactttgtgtatctcactccgtgataaagaccatttagtaagtgcatttttacaacaagatgataaactgatctgtttagtgtctgatcacaactattacactgtttttcacaccaatgagatcccattaattagtagtaaggggatgggagtgaaggggatgaagttaaaactagaggatcaaattaagtttgttgttgcttttgaagctaatgaaccgttagtgatgatatgtagtgatggtagtgtcattaacttaaaacaaactgaactagttgtagttagcaggatggcaactgcaaaaaaactgcctgttaagaaagcaattaactattgttttagtgatgcaactaacacccagttaattaattttcagggtaagaacggtagtaaattaattacaactagtgaactgaaccagatgagtaaaactgcaattagtcaaaccaggtttaacaaacttaattag

SEQ ID NO: 27324 - DNA, 345 bp, Mycoplasma genitalium
atggttgttgggatagggattgatgttgtgcaattaaagcgcttcttaactttagttgaaactagtgattgttttgctaaacgattgttaactagcaatgaactaaacagttattgaaagctaaacaataaccaaagagctaattttctagcagtgcattgaactttaaaagaagcgatttataaagctaccagtcacatcaaaccacttttcactaaacttgaaatttataaacttaacaaccagtaccggtgtgaatttatccaaaacatcaacctgttgttatcagttagttacactaattgccatgttagtgctatctgtttagcacaacaaaatggataa

SEQ ID NO: 27325 - DNA, 807 bp, Mycoplasma genitalium
atggataaactatttaaaacaagttttagattcataataaggtttttacaaatcctgagtttaccagttgtttttccttactttttattaagctttttagcttgtttaattactagtaaaaactatgaatcactcccttataactatccccctgaaatccgattcaaaaaggtgtatagattggtatcaatgtgactttacattaagggaattaaagtagtgacagtaaatgacaagattatccctaaaaaaccagttttagtggtagctaaccacaaatctaaccttgatcctttagtattaattaaggcctttggcaggttgaaaaatagtccaccattaacctttgttgctaagattgaactgaaagatacagtcctttttaaactgatgaaattaattgattgtgtttttattgatcgaaaaaacatcagacaaattgccaatgcattggaaacccaacaacaactaattcgccagggcactgctattgctgtttttgctgaagggactaggattttaagtaatgacattggggaatttaaaccaggagcactaaaggttgcttacaatgcttttgtacctatcttaccagttagtattgtgggtagcttaggaaagatggaatcaaacaaaaggctaaaagaacatggtgttaagaaaagttcaaactatgaggttaaagtaatctttaacaagctaattaacccaattagttttaaccagattgattctaataaccttgctaataacattagaagcattattagtgatgcatacactagtgaaaaaccaagcaatgattag

SEQ ID NO: 27326 - DNA, 1416 bp, Mycoplasma genitalium
atgattagtttaatttttgataaaagcaacagttttaacccccaactttgtgttgaacttctcaaccactttaaagtggttatgctaactaaaaccatcgttgttgactatcccagctttcaagcatgaaaagcacaactcaaaccgtttaaattagcagtttttagtgataatttgcaaaccgaattaaccccaaattcaaaactcacagtttttaacaactaccagcaacttttagttgataataatgacctaattatctttgcaacccccactttagttcagctttttgataatgagattgaccagttaatagttatcaatcccactagtaaatctaaagatcagtttaactgtaattgaaacgactttgttttaattaaacaaactaatttcaagaaccatcaagttggttattttgataaaaaaagtagttatgaaccacctttcactgttgttacagaccacttctttgggaacctaactgatttatttagtcttttagttgataaaaaggtaagtgtaaatgatgtggatattggcttgatttccttacaatatctcaatatcattgcaaattacaccaataaaaaagccattgaaaagatcactgattatctggtgattacaagcaaaattctcgctaaaaaagcagataatctgctcaatgatcatcaggaagagagtgtgttggaatatgatttagctactaataactttcgtgataagatgatcgctaacttagtggaacacaaacgctattgtgattcactgggtgaatttgaaaaactcagggttaaccgcttagcttacttttccaaagctaatgagatggagcaatttatcaaaacagctaatgatcaacttgttacagttgaagatcaactccctaactatattagtgtcttaaaactctttcatgctatgaacaagttactggagatgagactcagctctcttctaacaaataaaaacatcaccattaaagagttatcagttgaacaggttcaaaaggagttggttttagcaatcaaacagtttaactaccaaacagtttctttaaagcgggtgttattaaaacttaaccatcctatctctttaatgtattttgttactgcttttgtggcacttttagtgctattaaacaaccaggtaataggtttggaacaaaaagattatcacagtgaactttacatctttttactagatgaaaaccaactgaaaaccttccaagaatcaccagatgaaatggtaaaaagaatccaagctcaacaacagcaaaacgaactgataattgctaaaaacaagcaactaagagctatcaaaaacaaacaaaagcgagctgattatctaaaaaagaaatatggtgaaaattacttagataaaactaacttaaaagatgaaaacaacaattaa

SEQ ID NO: 27327 - DNA, 972 bp, Mycoplasma genitalium
atggataaaatagctattttaacttcgggtggtgatgctagtgggatgaatgccaccatcgcttatctaaccaaatatgcaattgcaaagcaattggaagttttttatgtaaaaaacggttattatggcttgtatcacaaccattttatcaccagtaaggaacttgatttaactgactttttctttatggggggaacagtaataggatcaagtcgtttcaaacagtttcaagatcctagcttacgaaaacaagcagttttaaacctcaaaaaacgtggtattaacaaccttgttgttattggtggggatgggagttatatgggtgctaaagcactcagtgaattaggattaaactgcttttgtttacctggtacgatcgacaatgatgtcaattccagtgaatttaccattggtttttgaactgctttagaagcaattcgggttaatgttgaagcaatttatcacaccaccaaatcccataaccgcttagcaatcatagaagtgatggggcgtgattgtagtgatctgaccatctttggggggttagctactaatgctagttttgttgttactagcaaaaatagcttggatctcaatggctttgaaaaagcagtgagaaaggtgttgcaattccagaactattgtgttgttttggttagtgaaaacatctatggtaagaacggtttacctagtttagaaatggttaaagagcactttgaaaacaacgcaattaagtgtaacctagtttcactaggacacacccaaaggggctttagtcctaatagtatcgaactctttcagattagtttaatggctaaacacacgattgatctggttgtaaataatgccaacagtcaagtaatagggatgaaaaacaaccaagcagttaactatgattttaacactgcttttaatttaccaaaagctgatagaaccaagttacttaaccaagttaacactgcaattatttaa

SEQ ID NO: 27328 - DNA, 1527 bp, Mycoplasma genitalium
atgattgaccatttaaaaagaacaaagataatcgctacctgtggcccagctttaacaaaaagcttggttagcttaaagatgcttgatgataatgagtatgcagctattaaaaaggttgcttatgccaacattgaagcaattattaaaagtggggttagtgtgattaggcttaacttctctcatggtacccatgaagaacaacaagtgaggatcaagatagtaagggatgtagcgaaagcaatgaacatccctgtttctattatgttagatacaaatggtcctgagatcaggatagtagaaactaaaaaagagggtttgaaaatcaccaaagatagtgaagtgattatcaacaccatgagtaaaatgatcgctagtgacaaccagtttgctgtcagtgatgctagtggcaaatacaacatggttaatgatgtgaatataggtcagaaaatccttgttgatgatggtaagttaaccctggttgtcacaagggttgacaaacaacataaccaggttatctgtgttgcaaaaaacgaccacacagttttcactaaaaaaagacttaacctacccaacgcacagtactctatcccttttctcagtgaaaaggatctgaaggatattgactttggtttaagccaaggtattgactatattgctgcctcttttgttaatactgttgcagatattaaacaactgagagattatctgaaattaaagaatgctagtggggtgaagatcatcgctaagattgaatctaatcatgctttaaataacattgataagatcattaaagctagcgatgggattatggttgctaggggtgatttgggccttgaaatcccttattaccaagtcccttactgacaaaggtacatgattaaagcttgtcgcttttttaacaagcgttctattactgcaacccaaatgcttgattcactagaaaaaaacatccaaccaacccgagctgaagtgactgatgtttactttgcagttgatcggggtaatgatgcaactatgttaagtggggaaactgctagtgggctttaccctttaaatgcagtagcggtgatgcaaaagattgataaacaatcagaaaccttctttgattaccagtataacgttaactattatttgaaaaactccacggcaaataaaagtaggttttgacacaacgttgttttacctttaacaaaaaagactgttcctaaaagaaaacttgttaacagtgcctttaagtatgactttattgtctatcctactaataacattaacaggatctatgcattatcaaacgcacgcttagcagcagcagttattattttaaccaacaacaaacgggtttacactggccatggtgttgattatgggatcttctgttatttaattgataaaaaccccaaccagctaaccaaagctgaactgattgaacttgcttgaaaagcaattaaccactatcaggcttatggtgatttagaaaaactcaaacagtgtttagctgtctataatgaaacaattatcaatctttag

SEQ ID NO: 27329 - DNA, 5418 bp, Mycoplasma genitalium
atgaaaccatttgataaaaaaccttcgctgcaaccaatttatgacattggttttgatgatggttatctccaaagtgagtatgaaaaaaatcgttctaaaaccgatgttgataagatcgaaaaccagcttttaaaagagattaaaagcctggaagatgaacttaaaaaccttaagggcttgaagaatcaagcagaagataatcctgaacttgataaaaagattaaccacttggaagttgatctaaaccgtttggttaatgaatataaaaacttccagttccaaaagaaccacatggttgataaggttagtgaacttgataacttaacccgtttttataagaatgaactaacccgcttacaacaagaaaacgctgattttctcaactccaagtatgctaatttagctaacttccaagctaactaccacaataaactaaatgattttcaccgcttaatagaaaatcaaaaccaaaccattaaccgcttaaaccaaaagattaatggtaaccaaaatctgattgataataacgttgctttactgcaaaaccccaacatcacagttgaaaaaaagaactacttactaaatgttattgatcaactttacaatgagcttgatcaacttgagaatcaaaaaagattattaagtattgagtatgaaaatacctatagagagttagttagtgcagataatgaactgcaaaatgtttatgaaaacatcgatcaaaatcagatccagtttaaacaccaataccaaacttatagagatgagttaagtcaacttgagcgcaagatccagctcaccaaacaagagttagttgataaagaatcagcactaagagtaaagatagatgatgctgatttttacattaatgcccgtttagctgaacttgatgatgtagctaaacaacttagctttcaagatggtattaccaagcaaaatgctcaacatgttgaggataagttagttgctttaaacaaagaaaaagaccgtttaaatacccaaaaagaggccttttttaacttaagacaatctgctttaattgatatcaataaactccagcaggaaaatgaactgtttgctaagcacttagaacaccagcaaaatgagtttgaacaaaaacagtctgatagcctcttaaagcttgaaactgaatataaggctttacaacacaagattaatgaatttaaaaatgaaagtgccactaagagcgaggaacttttaaaccaagaacgggaactatttgaaaaacgcagggaaattgacacgcttttaacccaagcatctttggaatatgaacaccaacgtgagtcaagtcaactactcaaagataagcagaatgaagtaaaacaacacttccaaaacttagagtatgctaaaaaggagctagacaaagaaagaaacctcttagatcaacaaaaaaaagttgatagtgaagcaatctttcaactcaaagaaaaggttgctcaagaacgtaaggagcttgaagaactataccttgttaaaaaacaaaaacaagatcagaaggaaaatgaactgttgttttttgaaaagcagttaaaacaacaccaagcagattttgaaaatgaattggaagctaaacaacaggagttgtttgaagctaaacatgcattggaacgttcctttatcaaacttgaagataaagaaaaagatcttaacactaaagcacaacagattgccaatgagttttcccaactaaaaactgataagtcaaagagtgctgattttgaactaatgttgcaaaatgagtatgaaaacttgcaacaagaaaaacaaaagttattccaagaacgtacttactttgaaaggaatgctgcggttttatcaaaccggttacaacaaaaacgtgaggagttattacaacaaaaagaaacgcttgatcagcttacaaaaagctttgagcaagaacggttaatcaaccaaagggaacacaaggagttggttgcatcagttgaaaaacaaaaggagatattgggcaaaaaactccaagatttttcccaaacttcactgaacgcttctaaaaatttagctgaacgggagatggcaatcaagtttaaagaaaaggagatagaagcaactgaaaagcaactgttaaatgatgttaataatgctgaagttatccaagcagacttagcacaactcaaccaatcacttaaccaagaacgcagtgaattgcaaaacgccaaacaaaggattgctgattttcacaatgattcactaaaaaaactcaatgagtatgaacttagcttacaaaaacggttgcaagaattacaaacccttgaggctaaccaaaaacaacattcatatcaaaatcaagcttactttgaaggtgaacttgataaacttaacagagaaaaacaagcttttttgaacttacgtaagaaacaaactatggaggttgatgctattaaacaaaggttgagtgataaacatcaagctttaaatatgcaacaagcagagctagatagaaaaacccatgagttaaataatgcttttttaaaccatgatgcggatcaaaagagtctacaggaccaactagcaactgttaaagagacccaaaaactaattgatttagaacgtagtgcactgcttgaaaagcaacgtgagtttgctgaaaatgttgctggttttaagcgccattggtctaataaaactagtcaactccaaaagatttatgaactgaccaaaaaacaggaaagtgagcaaacccaaaaggaaacagaactaaagattgcttttagtgatctacaaaaagactatcaggtttttgaactccaaaaggaccaagaatttagacaaattgaagctaagcaacgtgaacttgacaagttagctgaaaaaaataatcaggtcaaactagaacttgataacaggtttcaagcgctgcaaaaccaaaagcaagacacagtacaagctcagctagaactggaacgtgaacaacaccagttaaaccttgagcaaactgctttcaaccaagctaatgaatcacttttaaaacaacgtgaacaactcaccaaaaagatccaagctttccactatgagttgaaaaagcgtaaccaattcttagctttaaaagggaaaaggttgtttgcaaaagagcaagatcaacaacgcaaagatcaggagatcaactgacgctttaaacagtttgaaaaggaatatactgattttgatgaagctaagaaaagggaacttgaagagcttgaaaagatcagaagaagtttaagtcaaagcaacgttgaattagagagaaaaagagaaaaactggctactgatttcactaatttaaataaggttcaacacaacacccaaattaaccgtgatcaacttaacagtcagatcagacagttcttattagaacgcaaaaacttccaacgctttagtaatgaagctaatgctaaaaaagcctttttaattaagcgcttaagaagctttgcatccaatctaaaactccaaaaagaagcgttagcaatccaaaaactagagtttgataagcgtgatgaacaacagaaaaaagagttacagcaagctactttacaactagaacagttcaagtttgaaaagcaaaactttgacattgaaaaacaacgccaactagttgctattaaaactcagtgtgaaaaacttagtgatgaaaaaaaggcactaaaccaaaagctagttgaactaaaaaacttatcccaaacctatcttgctaataagaataaggctgaatactcccagcaacaactccaacagaaatacaccaatttacttgatctgaaggaaaacttagagagaaccaaagatcaattagataaaaaacatcgttctatcttcgctagattaactaagtttgcaaatgacttacgttttgaaaaaaagcaactgttaaaagcacagcgcatagttgatgataaaaaccgtcttttgaaagaaaatgaacgtaacctccatttcctttccaatgaaacagaacgaaaacgagcagttctcgaagatcaaatttcttactttgaaaaacaacgtaaacaagctactgatgcgatcctagcatcacataaagaagttaaaaagaaggaaggtgaactgcaaaagttactggttgaattagaaacaagaaaaaccaaactcaacaatgattttgcaaaattctcaagacaacgtgaagagtttgaaaaccaacgcttaaagctcttggaactgcaaaaaaccctgcaaacccaaactaattccaacaactttaaaaccaaagcaatccaagagattgaaaacagttataaaagggggatggaagaacttaacttccaaaagaaggagtttgataagaataaatcacgcttatatgaatactttagaaagatgcgtgatgagattgaaagaaaggaaagtcaggttaagttagttttaaaagagacccaaaggaaagccaacctcttagaagcacaagccaacaaacttaacattgaaaaaaacactattgactttaaagaaaaagagttaaaagcctttaaagataaggttgatcaagacattgattcaaccaataaacaacgcaaggagttaaatgagcttttaaatgaaaacaagttattacaacaatcactaatcgaaagagaaagggctattaattccaaagattcacttctaaataagaagatagaaacgattaaacgccaactccatgataaggagatgcgggtgttgcgcttggttgatagaatgaaattagcagaacagaaataccaaacagaaatcaaccgcttaagaacccaaactttcgattctgaaaaacaagacattaaaaacttcttcccaccgttatttaaaattaacggtaatgatatggcctttccttacttgtacccctgactatatcctcaacaaaagcaagatgataatactctgcaaattcgtcagctttttgaacagcagctgcagttcatgcaacaacgctatgaaaatgagttaaatgaattgcgtagacaacgtaatttacttgagaaaaaacttgatcaaatccaactagaatcccaacttaataataagcaaagtgagtttagtaaggtggaatcaatgatggaaaaactacttgaaaaaactgagagtaggttaaatgattttgatcagaaaattaactatctcaccaagaaagttaaccaacacaacacctatcaaccaagttcctatcaaccaactccttcttatcaagacagtgataaacaacagttgttatttagaatccaagaactggaaaaacaaaacttattccaacaacaatttcaacctgcaccagctgttgtccaacaacctactagttttgcagcccctaacatcaccaaacaacagcaaattgcccaacttaatgctgaaattaacaacattaaaaggttgattgcccaaaaagcagcaagtaaataa

SEQ ID NO: 27330 - DNA, 465 bp, Mycoplasma genitalium
gtgtttaaaagtgtcgcaaagtgtgacaaagtggaaaaaatgctgctaggtacctttaatcttacccttgataacaagaacagaattagcttgccagctaagctccgtagtttctttgatagcagcatagttattaaccgcggctttgaaaactgtttggaaattagaaaacctgcagactttgagagttattttcaaacctttaataacttccctaacacccaaaaagacacaagaacattaaaacgcttaatctttgctaatgctaatctagttgaacttgatagtgcaaacagaatcctaatccctaataacctaattagtgatgctaagttagataaagagatcgtgttaattggtcaatttgaccatcttgaagtttgggataaagtgcaatatgaacaatatctagctagttcagaatcactagagacagtagctgaaaggatgaaagatgctaaataa

SEQ ID NO: 27331 - DNA, 930 bp, Mycoplasma genitalium
atgctaaataaccaacagatccaccagagtgtactgatcaatgaagtgatccataacctcaatattaacccttgtggtaactatttagatctaactgcagggtttgcaggacacagtcaaaagatcttagaaaaactaacaacaggaactttaacaattaatgatgttgataaagaaagtattaatttttgccaaaagcttttttttaaaaacaacaacgttgttattattcacgataactttgctaacttcccagttcatcttaaacaactatcaataaccaagtttgatgggatcttaatggaccttggtgtatcaagccatcaactcaaccaacctaatcgcggttttagttttaagaatgatggaccgattgacatgcgtatggaccaatccaatcagaaaaataccgcactaacagttttaaaaaacttaactgaacaaaagttaagtctaatccttaaaaagtatggtgatattaaacaccctaaaccaattgctattggattgaaaaaagcagttcaaactgaaaaaaatcttaccacaactcaactagcaaaagtggtaaaagaatgtgctactggatttgaaaaataccaatcaagaaactatcttgccaaagtttttcaagcaattaggatctatcttaatgatgagattactaatctgaaaactgcgttaacttttatccctaatcttttaaaaaacaacagcaggtttcttgtgattgtttttcactccattgaagaaaaaattgtaaggaatttcattgcaaaactaaccagctttatccaacctgaagctctacccattaaactcactcctgcttaccagttaattacaaaaaaaccaatcctaccttcccaaaaagaacttgaattaaacccgcgttcgcgtagtgccaaactctttgttatccaaaaaaactag

SEQ ID NO: 27332 - DNA, 1110 bp, Mycoplasma genitalium
atggatgaaaatgaaactcaattcaacaagttaaaccaagttaaaaacaagctgaaaattggtgtttttgggattggaggtgctggtaataacattgttgatgcatcactttatcactatcctaatttagcaagtgaaaacatccacttttatgctataaattcagatttacaacaccttgcatttaaaacgaatgttaaaaataaactcttaattcaagaccatactaacaagggctttggagcggggggtgatccagctaaaggagctagtttagcaataagctttcaagaacagtttaatacacttacagatgggtatgatttttgtatcttagttgctggatttggtaagggtactggtacaggtgctaccccagtttttagcaagatcttaaaaactaagaagatcttaaatgttgctattgttacctatccatctttaaacgagggattaacagtgagaaacaaagccactaaggggcttgaaattctcaacaaagcaactgatagttacatgctattttgtaatgaaaaatgtacaaatggtatctaccaactagcaaacacagagatagtcagtgccattaaaaacctaatagaactaattactattcctttgcagcaaaacattgattttgaagatgtacgtgccttttttcaaaccaaaaaaactaaccaagatcaacagctttttactgttactcacccctttagttttagctttgatagtaaagatagtatagaacagtttgctaaacagtttaagaactttgaaaaagttagttattttgaccactctatagtaggagctaaaaaagtgttattgaaagctaacattaaccaaaagatagtcaagcttaacttcaagcagatccaagatattatctgaactaaaattgacaactaccaacttgagattaggttaggggttgattttgtgacaaccatccctaatatccaaatttttatcctcagtgaacacaaaaatccagtttcgcttcccattgataataaatcaactgaaaacaaccaaaataagttgaaacttttagatgagctgaaagaacttggcatgaaatatgttaagcaccaaaaccaaatctactaa

SEQ ID NO: 27333 - DNA, 1380 bp, Mycoplasma genitalium
atgaccatgtttgatgttgggccattttcctatcttgttttagggttaacttcgtttgctattttaggagttgtgctttctttttctcgcctttcagttctctgtggtaatagtgcttatggagggagttatttaattgctaaaaaagcagttggtactaacagtaaaacaaaaaggttttttgtttttttaagtgggtggaatgtatcgttaacaggatcttttaacggtgttgttattccagcagtattaatcttttcctttgcagatattccagtagttaaagcgaataataacatcattattggccttttagtaggtgggtttttgttgtttggcttacttacttttatctcgttatttggtttaaaaattaacaagaaagcaatcttttattttgctgttattaagtggatagtagtaataggtgggtttatcttagggatctatttaattggtactaccaatggtaaaggttttgttgaaaacaatttaattgggactagggaaaacattgattttttcaagattatctttattagtctggctttaaccattgcttttgcagggacagaggatttagcttcgattactcctgatgtcaagtcaaataacttaagaaagtgttttttaattgcctttgggtgtgttgtgttactttacctagttgggtttgttattatcagtggacttgatgggattagaggttatggattagcattaggtaataaagatcccaaggcaattaataactatggatctatctaccgtttggtaggaggagttcctttacttgttatctatggacttgggttacttgtcaattccttagcatcacgcctatcaatgacaattacaacagctagaaaatatgtagctttagctcaagatgggtttttaccctcttttttagcaaaaactaataaacataatgagtatcatcatgcagttttaattagtaatctaatgactttattagtgatgctaattatggtaataatcccctttttaccagaccataacaacaataacaatagtttgtttaatgctattgaacagttggttacagttaccattgaaatggctgcagccatttctttgatccaatactttattacctttatcttcttttttatgatctttgctaaaaaggaaaaccagaagttaattcccttgtgagaaaaggttagttatgtaattagctttgctttggtaagtgtgttgttgtttgtaccacttttcccttttaatcagtgaacagtgtttaacacctttaagatagttgttctaatttgtttttatctacttggtgttggtttttttggttatgctgaatggaaaaataaaaacaaataccaattaatgaataacaatagctaa

SEQ ID NO: 27334 - DNA, 864 bp, Mycoplasma genitalium
atgaaacagtatttagatttagctagttatgttttagcaaatggtaaaaaaagaaaaaaccgtacagatacagatactttaagtgtctttggttaccagatgaaatttgaccttactaatagttttcctttattgacaactaaaaaggttaattggaaggcaattgtccatgaattgttgtgatttattaagggtgataccaacattaagtacttagttgataatggggtgaacatctgaaatgaatgaccatatgaaaactttaaaaaatcaccaagttttcaaaacgaaacactccaagaatttatcttaaaggttaaaactgataatgagtttgctaaacaatttgctgatttgggtcctgtttatggcaagcaatgacgtaattttaatggtgttgatcaactcaaaaaagtcatccaagagattaaagaaaatcccaactcaagaaggctaattgtctcaagctgaaaccctagtgaattggaaaaaatggcattggctccttgtcattcactctttcagttctatgttgaagaagataaactaagcttacagctttaccagcgcagcggtgatatctttcttggtgtcccatttaacattgcatcttacgccttacttgtgtatttagttgctcatgaaactaagttaaaacctggttattttatccatacactaggagatgcacatatctatgaaaaccacattgaacaaattaaattacaactaacaagaacaaccctagacccccctcaagtggttttgaaaagtgataaatcaatctttgcttatagttttgatgatattgagttagttggttataattaccatccatttatctatgggagggttgcagtttaa

SEQ ID NO: 27335 - DNA, 483 bp, Mycoplasma genitalium
atgctaattgctatctgagcgatgacacaagaaggactaataggtaataacaacactttaccttggatgattaaacaagagctagctcactttaaaaaaactacgttatttcaagctttgttaatggggagaaaaacttacgaatcactccccaaggtatttgaaaaaagaacaatatttctcctttcaaaagatcaaaactaccgttttgaagaaaagggaagtgaagtgaaagttattaatgatttttgaccactaattaaaagttaccaagcaaataaagaaaaggatttgtttatttgtggtggaaaaagtgtgtatgaacagaccattaatgaatgtgatcagttaattgtttcaatcattaaaaagaagtataagggtgatcagtttttgaaggttgatctcagtaaatttgtacttaatgaagttgtagagtttgaggaatttaatgttaattattatagaaagaaacaacaataa

SEQ ID NO: 27336 - DNA, 1023 bp, Mycoplasma genitalium
atggcagctaacaataaaaagtactttttagaatcattttccccacttgggtatgtaaagaataattttcagggcaacttacgttctgtaaactggaatttggttgatgatgagaaggatttggaagtgtgaaacaggattgttcagaacttttggttacctgaaaagatccctgtatccaatgacatcccctcatgaaagaaactctcaaaggattgacaggatctgatcactaagacctttactggtttaacactacttgatactatccaagctaccattggtgacatctgtcaaattgatcatgctctaactgatcatgagcaggttatttatgcaaactttgcttttatggtaggggtacatgcccgttcctatggaacgatcttctcaactttatgtacatcagaacagattaacgctgctcatgagtgggttgtaaacactgaaagtctccagaaaagagcaaaggcattaatcccttactatacgggcaatgacccgttaaaatcaaaggtagcagcagctttaatgcctgggtttttactgtatggtgggttttatttgcctttttacttgtcatcaagaaaacaactaccaaatacatctgatattatccgcttaatccttcgtgataaagtgatccataactattacagtggttataaataccaacgtaaactagaaaaactccctttagcaaaacaaaaggagatgaaagcatttgtttttgaactaatgtatcggttaattgaacttgaaaaggactatttaaaagagctttatgaagggtttggaattgttgatgatgccattaagttcagtgtttacaatgctggtaagtttttacagaacttaggttatgactccccgtttactgcagcagaaaccaggattaaaccagagatttttgcccaactatcagcacgtgctgatgaaaaccatgactttttctcaggaaacggttcgtcgtatgtgatgggagttagtgaagagacaaatgatgatgattggaacttttaa

SEQ ID NO: 27337 - DNA, 462 bp, Mycoplasma genitalium
atgcataaagatatcaaactagttaaggaaactgaaattagaaaaccaattggttctccttttattgtctatttttcatctatctccaacaacacccaccgttttattgaaaaactgggttttcaacacaaaagaatcccagttgatataacccaaagcattactgtaagtaatgagtatgttttaatctgtccaacttatagtggtgggggtaaccaggttgaaggagcggtacccaagcaagttatccagtttttaaataacaagcataacagggagttatgcagaggagttattgcatctggtaacactaattttggagatactttttgtcttgcaggaactgttatttccaaaaaactaaacgtccctttgttgtatcagtttgaacttttgggaacaaaaaatgatgtagaacaaacccaaaaaataattgccaatttctttcaaaacagcaactag

SEQ ID NO: 27338 - DNA, 2166 bp, Mycoplasma genitalium
atgacatccaaagaaaaaatccctacttttaatactgaagaagatgttgaaagttacatttcttttaatgcccaagccaaaatctatgatgattttgcaatcgatttacaagcagttgaaagctatattcaagagcatgtaaaacccaaaactaaggtctttcattccaccaaagaacgccttgattttctgattaagaacgattattatgatgagaagatcatcaacatgtacagttttgaacagtttgaagagatcacccataaagcatattcataccgctttcgttatgctaacttcatgggagcatttaagttctataatgcctatgctttaaagacatttgatggtaagtactacttggaaaactatgaggatagggtggtgatgaatgtattgatgttagctaatggtaacttcaataaggcattaaaactcttaaaacagattatccttaaccgttttcaaccagcaacccctacctttcttaatgctggtagaaagaaacgtggtgaatttgtttcatgttacctgttaaggattgaagataacatggaatcaataggtagagcgataacaactacactacaactatcaaaacgtgatgggggagtagcacttttgctttccaacttacgtgaagcgggagcgcccatcaaaaagatagaaaaccaatcatcagggattatcccaattatgaaattgttagaggactctttttcctattccaaccaacttggacaaagacaaggagcgggagcggtgtatctccattgtcaccatcctgatgttatgcagtttttagatactaaaagggaaaatgctgatgagaagatcagaattaaatcactctccttaggacttgtgattccagatatcaccttccaattagcaaaaaataacgagatgatggcacttttcagtccatatgatatctatcaggagtatggtaaggctttatctgatatctcagtaactgagatgtattatgaattgcttgaaaaccaacgcattaaaaagacctttattagtgctagaaagttctttcaaacaattgctgaactccactttgaaagtggttatccctacatcttgtttgatgatacagttaacaggagaaatgcccacaaaaacaggatagtaatgtctaacctttgcagtgaaattgtccaaccatctttaccttctgaattctattcagaccttacttttaaaaaggtaggtagtgatattagctgtaacttggggagtttaaatattgctagagcaatggaaagtggtagtgagttagctgaattgattcaactagcaattgaatcactggatttagtgtcaaggatcagtagtttagaaaccgctccttccattaaaaaaggtaattcagaaaaccatgcgttgggattaggagcgatgaacttacatggatttttagcaacaaatgctatctattatgattcaaaggaagcggttgattttactaacatctttttttatacagtagcataccatgcgtttagtgcttccaataaattagcattggaactaggtaaatttaaagactttgaaaatactaaatttgctgatggtagttactttgataagtacactaaggtagctagtgacttttgaacatgtaaaacagaaaaagttcaagccctttttgataaataccaagtaaaaattccaactcaggaaaattggaagcaattggtagcaagtatccaaaaagatggacttgcaaactcccatttaatggctattgccccaactggatctatctcatatctctcttcatgtaccccttcacttcaaccagtagtatctcctgttgaagtgagaaaagaagggaagttaggacggatttatgtccctgcttataagcttgataatgataactatcagtactttaaagatggtgcttatgaactgggctttgaacctattattaacatagtagcagcagcccaacaacatgttgatcaagcaatctctttaaccttgtttatgactgataaagctaccaccagagatctcaataaagcttatatttatgcttttaaaaagggttgtagttctatctattatgtcagagtaagacaagatgttttaaaagatagtgaagatcacactattaaaatcaaggattgtgaggtttgttctatctaa

SEQ ID NO: 27339 - DNA, 303 bp, Mycoplasma genitalium
atgcatgctattgtggtttgtggtgctaagcagtatttagtccatgaaaacgagtctatttttgttgaaaaattagctggtaaagttggtcaggagatccaacttgataaggtattgatgcttgatgaaaagataggcaaaccttaccttgaaaaagctaaggttgtttgtgtgattgaaaaacacggtttaaaatcgaaaattaaactaattaaacacatctcccaaaaacaccacctcaagcgttatggccaccgtcaaccctacaccaaactaaaagtggtacgctttatccatgattaa

SEQ ID NO: 27340 - DNA, 300 bp, Mycoplasma genitalium
atgattaagattaatatctcccaaaactttctagttgcaaaaggtcatgctttgtttgctgagaagggtaaggacatagtttgtgctgcaattagtggaattatctttgggggggtggcttggtttgaacctgataagattgaatttactgaaaataaattagtacctagtatagcactgaaactcattgacccaacccctaatgtagcagttgcttttagtgttattacagtacaattaaaagcaatagccaattcctatcctaatcacatagttatcaatgaagagagttatgagtaa

SEQ ID NO: 27341 - DNA, 315 bp, Mycoplasma genitalium
atgagtaaaaacagttactgctaccaaattaacttacagtttttcgcttccaaaaaaggggttggttccactaagaatggacgtgattcacattctaagcgcttgggcgctaagaaggcagatggtcagatgattagagttggtcagattatctatagacaaaggggaactaagatctttgcaggacaaaatgttgcaatgggtagtgataacaccctctttgctttgagcgatggcattgtccgctttcaaaagtttggtagtaaacaaagcaaaacccgggttaacatcatcaaacaccaactaaatgcctaa

SEQ ID NO: 27342 - DNA, 876 bp, Mycoplasma genitalium
atgcctaagctactgggtagctttattagctttaaagcccccaattactttgttcaaagtgctcaggatgcaattgctattgatgcaactgctctaatggtatttttaggtccaccccattctgcttaccgtgttccttttaacaagatgcagtttagtttgggctatgagttgttaaaaacaaagaatattaatagtaatggtttggttgttcatgctccatatatcattaactgtgcatcaaaagacccactaaaacagcagaatgctatcagtgttttaaccaatgagattcagctttgtaacttggctggtgctcactatttagttttgcatccaggttctgcagtagcccaaacaaccaacgaagcattagataacctggttaaagtactcaatcaagttatcaataaaaccaaaacaacagttatttgccttgaaacaatggctggtaagggtaatgagataggcagagacttaactgagttgaaatatgttattgacaggatcgttgataaagataggatcggggtttgtcttgatacctgtcacttccatgatagtgggattgactttagtgatctaactggtgtttttaacaccattacaactaaacttggttttgagtttctcaaagtaatccatttaaatgaatctaaaaataattgtggttctaaaaaagataggcatgctaatatcaatgctgggatgattggttttgagaacttaatgaagttcattagtcacccccaaattaaggatttacctattatcttagaaaccccttcaactagtttaaactacccaactatttaccgtgaagagattagtcaaatccgcagctgatttaaaacttaccaaccagatgctaactag

SEQ ID NO: 27343 - DNA, 2388 bp, Mycoplasma genitalium
atgcccgttacgaagaaaagtcagatcttagtagttagaggtcaagtcatttttccttttgttccctttagtttggatgttggcaggccccgttcgcgtaagatcatcaaagcgcttaaaactctgaaaaccaaacgtttggttttagtaacccaaaagtttactggtgaacaaaaccctgagtttaatgacatctatcatgtcggtacactctgtgagattgatgagatagttgatgttccaggggttgatagtaaaacagtagactaccgtattaaaggcagaggtttacaacgggttttaattgaaaaattctcagatgcagatattaatgaagttagttaccaattacttaactccacagttaaagatgaagctaatgttgacaggttcttacagcgaatctttcctgaaaaagaagaaattgaacagttaatggaaggagctgagaagtttttagaacttgaaaacatcagcaaaacagttaatgttcctaagggtttaaagcaacttgatattatcacctttaaactggctaatcttgtccctaacactgaaagtattaaacaagctatcttagaggaaaatgagatagcaaaccgattggaaaagattatccaagcagggattgaagatttacagaagatccaagattatggtagatctaaaaacaaggaaactgagtttgataaacttgacagtaaaattacccgcaaaattaacgaacaactctcaagacaacaacgtgatttctatcttcgtgaaaagctaagaattatccgtgaagagatagggattagttccaaaaaagaggatgaagttgctagtattagaaagaaactggatgaaaacccttaccctgaagccattaaaaaacggattttaagtgaacttgaacactatgaaaactcttcctcctcttcccaagaatcaaccttaaccaaaacttacattgatacgcttttaaacctgccttgatgacaaaagagcaaagataacagtgatgttaaaaacttaattaagacgttagataaaaaccacactggtttagataaggttaaagaaaggattgttgagtatttagcagtacaactaagaacccaaaaaaacaaaggtcctattatgtgtttagtaggtcctcctggggttggtaaatcaagtctagctaagtctattgcagaagcattagataagaagtttgtcaagatctcattagggggagtacatgatgaatcggaaatcagaggtcaccgtaaaacttacttaggttctatgccaggaaggattttgaaagggatgacccgtgctaaggtaattaatcccctctttttacttgatgaaattgataagatgacctcctccaaccaaggttatccttcaggtgctttacttgaagtattagatccagagttaaataataagtttagtgataactatgttgaagaagattatgatctttctaaagtaatgtttatcgctactgcaaactacatagaagatatccctgaagctttacttgataggatggagataattgaactcacttcctatacagaacaagagaagattgagatagcaaaaaaccacttaattaagcgttgccttgaggatgctgatcttaacagtgaagaattgaagttcactgatgaagcaatcagctacatcattaagttttacacaagagaagcgggggttagacaattagaacgattaatccaacaagttgtaagaaagtacatagtagcaatgcaaaaagatggcatcaaacaagaaacgattgatgtaaacgctgttaaaaaataccttaagaaggagatctttgatcacactatgcgtgatgaagtgtctctacctggaattgtcaacgggatggcatacaccccaactggaggggacttacttcccatagaagttacccatgttgctggtaaaggagagttgatcttaactggtaatttaaagcaaacaatgcgagaaagcgctaatgttgctttaggctatgtaaaagctaatgcagagcgttttaacattaatcctagtttgtttaaaaagattgatattaacatccatgttccaggtgggggaattcctaaggatggacctagtgctggtgctgctttggtaactgcaatcatctcatcattaactggtaagaaagtagatcctacagtggctatgacaggagagatcactttaagaggcaaagtgttggttattggtggggtgaaagaaaaaactatctcagcttaccgcggtggggttacaactatctttatgcctgagaaaaacgagcgctatttagatgaagtacccaaagagatagtagataaacttaacattatctttgttaaggaatacagtgatatctacaacaagcttttcagttag

SEQ ID NO: 27344 - DNA, 879 bp, Mycoplasma genitalium
atgttaaagctagcaattaaatcagtcaacaatgctttagtttccaattttgatattaaaactaaaaacgctttttcaattaatactgttaaccactttaaaagttgttatccaactagtgaaatctattttttaatagggagtgataaattaaatgaacttgagaagtgagatcacatccaacagttaaaagatttgtgcacgtttgtttgttatgaacgaaaaccttatccttttaataaaaaaatagcaaaccaatttaatgttaaatacttggctaaatgcccacttgaaatcgcttcaagtaaacttttaaatcaacctagaaaaaaactgataccactggcagttttaaattacatcaataccaatcacctctatctaattcccactttaaaagcaatggttgatgataagaggtttcaacactgtttaagggttggtaaactagcaaaacaactagcaattgcaaacaaactagatgctaaaagagcatttgttgctggggcttatcatgacttggccaaacaactaccagttgatcagttagttaacattgcaactagtgaactgaagataactaactacccaagttgaaaagtattacatagctatgtgggggcttatatcttaaaaaactgatttggtgttaaagataaaatgattattaatgccatcaaaaaccacaccatcccaccaaaacaagttagcaagctagatatgattgtttatttagcagataaactagaacctaaccgtaaacaggaacagtggagtgggggaattgagattgatcaactagtaaaactagctaaaagcaacttaaaacaggcctatttaattaccttaaaatatgtccaaaacctagttaaagactaa

SEQ ID NO: 27345 - DNA, 2112 bp, Mycoplasma genitalium
atgaatgaacaacaaaaacaagcaattagttgtggaaaaggggttaatgttgtttattctggagcaggtactggtaaaacaacaattattactaatcgctttgcatacttggttaataaagaaaaagttgatcctagcagaattttagcaatcacctttactaagaaagctgctaaggagatgcagtttagaatcttgaaactaatagatagttctttagctgagaaaacaaatatctatacatttcacagcttttgcaataagtttttaattcaaacattaaaaaagcgctttatcatcgatgatgatattagctatttcctaaaggaatttttagctgattcaaaactcgatatcaacctagcgaaacaaattattgataactttaaaaatacttttgctgattttgaaataaataagttggatcaagatgaaaggttaattagtttatgtgagcattcacttctaaataaagatgaagaatattccactttaaaaacccaactgattaatgcattcattagctatgaaaagaataagatattaaacaataaacttgattttcatgatcttttaattaaaacttgtaatttattgagtaatgataatgatttacttaatcagtggagtgaacagtttcagcatattttagttgatgaatttcaagataccaaccaaatccaatatgaactgatcaagatgttagtaactaaaaataaaaacttgtttttggtaggtgataataaccagatgatttaccgctgaagaggggcggtaaacgggatcataactgctttaaagcatgactttaatgttccgaaaagcaatgaattctttattaatcaaaattaccgttgcgatcagaatattttagcagttgctaaccaaattcttttaaaaattatggcctatgaaaaacaagttaaaactgaaaaaaatctcttgttttcaactttaaattctgataaaaaacctgtttattttcaagctgaatcagttgaaaatcaagccaattggatcttcaataaaatcaaagcactaaaccaaacagaaaagattaattttaaggatatggccatcttgtttagaaagaacagagatattactactatggttgaattgattgaagcggatggaacaattcccttacctaaacaaaagagttattttaaccaactagtaaaactccagcgggttttaattgcgatttcaaccagaacaaatcttgatattaaaagagctttgcaagccctaaaaatttgatcaaatgatttaaaggaattgtgaaaacagagtgataaaacaaacctatttgattttcttaaatgatcagaattaaatcaaaaaaaccatagttcaaaacttaaagctactggttattttaatctgctgattaagttagcagaggatcagcaaattaaccttttgtttactgaactgtttaaaaaactcaaagtggatcaaactattgaaaatctgctttgaaaaaaactaactgaatttcaaaaagataaaactgaatttagcttatcagagtttattactagcttagcattggaatttgactcaattattgaaaacagcagtgatacaatcaatttgctaaccgttcatgcagcaaaaggacttgagtttgaagctgtatttatttatggcatgaatcaaggggattttcccttatttttaagtcaaaatcaaaatgacgaacaacatttaattgatgaattaaaactgttttatgttgctatcacaagagcaaaacgttttttgtttatcactgcggttttacaaataaataacaattctataaaaccatctagttttttaaattacatcaataaaagtgagtatttagacattgctactattaactatgtattagagcaggatgatgatttttttgattcaactaaaaaaacagactatacaaagaaactaagaaaagaaagtttagacattatagtgggtgatttagttactagtagatactttggaaaaggagttgtagttgaagtgagagacaaagaggttttagtagcttttaaagacacacgctatgggatgaaatggatcttaaaaaaccataaatcactaacaaaagctttatattaa

SEQ ID NO: 27346 - DNA, 498 bp, Mycoplasma genitalium
atggttgataaaaacagtttaagaaaattaatgcttctaaaaagagcagaactaaatgatcttgaaaaatcgcatttagatcaaaagattaaccaaaaattaatggcttttttaataacaagaccaacaattaaaaatttagcactttacattcccattaaaaacgaagtggcttttttagataactttctagattttcttaagttaaataaaattacaagctgttttcctagtattgttgatcaatttaacatgaagtttattgatcaaaataataatgaaattaaccctaatgatattgattgtttttttatccctttattagcttttaataaggcaaaccacaggattggttttggtaagggttattatgaccgttatttatcattaactagcaaaaaacaactaaaaatagggatagcatatgactttcaatatgcagaattcactaatgatccttgggattatcaattagatttaattatttgcaatggataa

SEQ ID NO: 27347 - DNA, 846 bp, Mycoplasma genitalium
atggataacataaaggttctttttttaggtgatgtttatggcaaagctggtagaaagattattagtgatcatcttcccataattaaaaaaaagtatcagttaaatctaattattgcaaatgctgaaaacactactaatggtaagggtttaagttgaaaccactaccaaatactaaaacaagcaggaattgattacatcactatgggtaaccatacctggtttcaaaagcaagatttagaacttgttttaaaccaagttgatgttattcgcccacttaacttaatgcaagattttaactattttcagcttggcaaagggagttatttatttagcttaaatggtttgaaaataaggattactaacttgttaggaacaagtattaacttaccatttgcaataacaaacccatttgtggaattaaaaaagttagttttaactaaagattgtgatcttcatatcgttgattttcatgctgaaacaactagcgaaaaaaatgctttttgcatggtttttgatggttatgttactgctatcttaggaacccacacccatgttcctagtaatgatttaagaatcactcctaaaggaagtgtttacattactgatgtagggatgtgtggtcctggatttggtagtgttattggtgctaatcccaagcaatcaattaagttattttgtacaggtgaaagacagttttttgaggtttctaattgtggtgcacaactcaatggcgtcttctttgaagtttgttcaaaaaccaatcaagttgtgaaaatagaacagattagaatagttttagatgatgaaaagtatttagctaatgactactttaatttagttgagtaa

SEQ ID NO: 27348 - DNA, 720 bp, Mycoplasma genitalium
atgaatcaagctagtgcaattgccattttggtcatttttagcctagcttctggttatctgttaggttcaattatttttgctgatattttcagcaaaatactcaagaaaaacgtcagggaatttggttcaaaaaacccaggagctactaactcaatgcgtgtttttggcttaaaaattggttttttggtggctatttttgatgcatttaaaggtttttttgcttttttattaacctgaattttattccgttttggtttacaaggttatttaacagaaaaagtgtatcaaagcacctattttttaagttatttaagttgttttgcagctacaataggtcatatctttccgctgtattttaagtttaagggtggtaaggcaattgctactactggtggatctttacttgcaatatctttatgatgatttttaatctgtcttttaatttggataatgattactttaataactaagtatgtttctttagcaagtcttattacattctttgtgttagctgtaatcatcttaataccctgacttgattatttatacttctttaacagtgatcctctaaagtcgattacttatcaaaatgaatggtatatcattttatttttttgcttgtgatattgacctttaactgtggttgttttctgattacaccgtgcaaacataatcagaattttacatggtaaggaaagcaagattactcaactaaattaa

SEQ ID NO: 27349 - DNA, 1494 bp, Mycoplasma genitalium
atgtccactgacaaaaaaacgctaggcgaaaaacccaattcaaccaaaccagaactatctgaagaattaattgctgaacttaaaaaacagcgtattcttgaaaagaatcgtccttacaaaaagatgatttatgttgacaataaagtgcaacgcaaacaccgtcatgaaaacatcgcttttctcaaaacccttcatgaaaataaggagagtgatgttcctaaaaaaagaaggggtagaaaacctaaacacgctcctttaaaagaaaaaaataatctgaagttatttgatatcttagaaggatcgttaaaaagccacattgaaaatgatgacaccaacacagtcatcaaccttctaacagaagcttgagaaaagaaaagcaaaaagaaacaaaaaaacatcacgctttcaaataaggaaattattagtgttctcgctaagtttgaactacctgaagatgaaattatctatgttttggatgaactacgtgataaggggattcaactccaacacgatgttgaagagcacatccatgaatttcgtgctaaccaagacctttcaattattgatgaagatattgaagagttaacaagtaagaacatctctaaccgtgataaggttgatgataatgttaggttctttttaggatcacttgacttttctaaaatgttagattttgaatctgaacagcggattgccaaggttttaaatagtactgatgaagagtcacgtaagtatgcaattaatcagttggttacttcaaacttaagactagttgtttctattgccaaaaaacacctagaaagagggttggattttaatgatttaattcaagagggtaatttggggcttttaaaagctatttccaaatttaactgatctttagggaataagttttcaacttatgctacttgatggattaaacaagcaattacaagagcaatagctgatcaagcaagaacagtaaggatccctgttcatatggtagaaaccattaaccgcttagctaaagcagaacgggctttgtatcaagagttagggcgagaacctactgatgaggagttagctgaaaagatgggaggacaagctgaaggatttaatgttaaaaagattgctgaaattaaacggttaagtttagatccagtttcgcttgataaaacagttggacatgatgaagagtcccagtttggtgattttgttaaagacacagacgctcaaactcctgacgagtttaccgaaagccgttcaaattcagaaaaaattgatgaattgttgaacaataatctttctgaacaagaagagttaattgttagaatgcggattggcatgcccccttacaatgaacctaaaacacttgatgaagtaggtcaaaagattttgatccctagagagaagatcagacaaattgaaaacaaagcaattagaaaattgagacatgcagttagaaacaatcctattagtatgtcatttctaagaattaatgaaaaaaaggattag

SEQ ID NO: 27350 - DNA, 1824 bp, Mycoplasma genitalium
atggtcaataaaagcaacagtttagatgaacttttaaagcagattaaaattactgaaattattcaacactacggggttaaaatccaaactaagggtaatagtctacttgctttatgtccttttcatgatgataaaaatccttctatgtccatttccagttctaaaaacatctttaagtgttgggcttgtaatgcagctggcaacggaatagcgtttatccaaaagcatgaccagttagattgaaaaactgcacttaaaaaagcaattgaaatttgtggaattaagttagaaaattggaacagtaatttactaacaaaagttgatccaaaacaaaaacgatattgggagataaacaatgctttaattacttattatcaaaccagattaaaaagagaaacaaacccaaatgggatgaattatttagttgaaaaaagaaagcttaataaaacattaattgaacagtttcagctaggacttgcttttcacaatgaagataagtatctatgtgaaagtatggaaagataccccttcattaatccaaagataaaaccgagtgaattgtatcttttttcaaaaactaaccagcaaggtcttggcttttttgactttaataccaaaaaagctacctttcaaaaccagattatgatccctatccatgactttaatggtaacccggttggtttttcagcaagaagtgttgataacatcaacaaactgaaatataaaaatagtgctgatcacgaattttttaaaaaaggggagctgttatttaactttcacaggttaaataaaaacctcaatcaactctttattgtggaaggttattttgatgtttttacactaacaaactccaagtttgaagctgttgcattaatgggattagcattaaatgatgtgcaaattaaagccattaaagctcactttaaggagttacaaaccttagttttagcacttgataatgatgctagtggtcaaaatgctgtgtttagcttaattgaaaaacttaataacaacaattttattgtggaaattgttcagtgagaacacaactataaagattgggatgaactgtatttaaacaagggtagtgagcaagttatattacaagcaaacaaaagacaaaatctaattgaatatcttgttagtttttttaaaaagcaacaacttgatcaaagggttattactaataaaatcattgcttttttaacaaaaaaccaaacaattttaaacgaccatagttttttaatttttctcattaaaaatttggttaaactacttgaatatagtgatgaaaaaactctgtatgaaacagttttaaaacacaaagaaaaacttgtatctaagtttgataacaaccgtttttacataaatacttcaggccatgctcaaccaccacaagaattgcaaaaaaccactgcagcactagtgcaaacagcttttgaagaagcagttaatgagttgtgaaaacctgaaatctttgcgtttgctttaattgataaacgctttttggttgaattaaaacaatcccatctagatgaagtttttaaggaatgtaactttaatttgtttgatgttgaactttttattgaaaaagcaaggatctattggagtgaaaatcaaactgctaactgagttggttttgaaagtgttttagatcaaaattaccttttaaacaataaagcaaggttattggaaattaaagatatttttttagatgaattaacttgttatcaagctaatgattttcaaaactatctaaagacctttcaaacgttattaaaacaacaaaagcagcgcttaaaaaatttaaagttaacgctataa

SEQ ID NO: 27351 - DNA, 1341 bp, Mycoplasma genitalium
atggctaaagtttacaaccaagaagtttatgttcagtttctcaaacaacatggttttgtatttcagagtagtgaaatttacaacggtttaaacaatagttgggattttggtccattaggtgcagttttaaaacaacaaatcaaacaagctttatataacttttttattaaaaataaagctgatgttcttttagttgaaacccctattattctcagcgaattggtttgaaaagcatcaggacatttagctaactttgttgatactttagttgattgtaagagttgtaaataccgctttcgtgttgatcaaattaatgctgaaataaaagctaaaaaggattggaatagttttaaagttaactgtcctaattgtcataaccaaaattgatcagaagtgagggattttaacttactttttcaaactgaaatcggggttgtaaacaacgataaacgccttgtttttctccgtcctgagactgctcaaggtagctttattaactttaaaaatatcttgcaagctaagaagcgtaatttaccttttgctattgcccagtttggtaaaagctttcgtaatgaaatcaccccaggtaacttcttgtttagaactagagagtttgaacagtttgaaattgagtggttttgtaaacctgatgatgcaaattcgctgtttgaaaaacaattaataatggtagaacagtttctacaaacagtgttaaaaattaacccagaattgttaaaaaaacatgaatatgatcaatcagaattggctcattatgccaaaaaaactactgactttttgtttaattttccccacggattaaaggagttatgaggcttggctaacaggggtgattttgatctaaaacaacaccaagagttttcaaaaaagagcatgagtttttttgatagcgaattaaaccaacatttcttacctttcataatcgaacctgcggttggcattgaacggttattttatgcactaattgtcagtagttataggagagaaattattaatgaggaagaacgggaagtattgagtttaccatttgacttatgtcctgaacaaattattgttttaccacttgtaaataaacttaaaaaagaagcattttctgtatttgaaacgctagcaaaaacaaggtgaagagtgtgctttgagacaactggtagtattggtaaaaggtatcgaaaagcagatgcaattggaataaagtatgcagtcacttttgactttgaaagtttagaagataatgcagttaccatcagagatagagatactttagttcaacagcgaattgctatcaaagaattaccacaatgattcatgaaaaatggtcaataa

SEQ ID NO: 27352 - DNA, 1287 bp, Mycoplasma genitalium
atgattgttgacagtgttagtcaaaaaccaacaacactagttcaaaaaaccattaacatttatctctgtggacccacagtttataacgatttgcacttaggcaacaccagaccattaattgtttttgatgttttaaatagagttttaaaaaaggctaaatataccgttaattttgttcaaaacatcactgatattgacgataagatcatcaagattgctcaacaacaagaagtaagcgaatcagttgttacaaaacaacaaatcactgcttacaaatcacttttaaaaaaactaaatattctgcctattaaacatattcaaatcactgaaaaaatcgataaaatccctgactatattgatcaattagtaaatcaaaaccatgcttatgtttcaactcaaaacaacgtttattttgcagttaattcactaaagcaatatggttatctagctaaccgaatggtgcatttagaagaaactgatactgataaaaagaacaaattggattttgtactttgaaagattactactgcagggattaaatgaaatagtaagtggggacttggcagaccaggttgacatgttgaatgtgccttcttaattgattattgtttcaaaaatgaactcacgatccacggaggaggagttgatttaaagttcccccaccatgaaaatgaaaatgccttacacatggctttatataaccagcccattaccaaacattggatgcatattggtcatttgatgattgaaaaccaaaagatgtcaaagtcattgcagaacttcttgttagcagttgattttcttaactttcatgattttcgtgttttgcgttggatcttttaccaaaaacactatttgcatcctattgatctaaaccaatcattgattgaaaaagctaataatgatattcaaaggattgcaaaaacacttaatgttgctagaacctgattagtttattcagaacaatctgagttgattagtcccaagcaatatgatccagttttttcagctttacttgataatctcaactttgccaatgcagttgctgctatctgaaaactaataaaaaaaattaatacaagtattaaaactaaggactttagtgtgctgagagaacaacttagtttcttggaatgatcaattgatttattaggaattagctttaaatctatccatactaaacttaatgtgcgtttaattaaagagtgatcaatattacacaaacaaaaagcaatggataaagctgatcaaattagaaaaaaactaattaaaaaaatgttgctgtaa

SEQ ID NO: 27353 - DNA, 1980 bp, Mycoplasma genitalium
gtgatggatgtgaaattgaagattcaacagctggttaacttaataaaaaactatgactatcactactatgttttaagcgaacctttaattgatgattttgagtatgatatgttgtataagtcactccaacaattagaaaaagatcatcctgatttaatccaaattgattcccctacccaaagggtgggaggagaagctgtgaagggttttaaaaagttaaaccataacagtccaatgctctctttggaaaatgctttttcaactaaagaaattgctaattttattgataatattaactttcaaacaaactcaaaaaatgaatttgtagttgaacctaaaattgatggagttagtatctctctaacttataaaaatggtgttttagttcatgctttaaccagaggagatggaagtgttggggaagatgttttaaataatgttaaaaccattaaatctatccctttaacaatccctttcacaaaaacaattgagattaggggtgagatttttgttgataaaaaaacttttttagcaattaacaatcaacttgaaaaaccatttgctaatgcaaggaatctagcagcaggtacaatacgtaatttaaacagtgaaatcactgcacagcgcaaattaagggcattattttattacatccctaatggtttggaagagtcaatcactactcaaactatggttttagaacagcttaagcagtgaaaattcccagttagtgataccatcagggtttttcaaaacaaatttcaattaattaattacttggaagcgtttgacaaaaaacgagaacagttaacttttaatcttgatggtttagttattaaactaaacagcttgcttttttatcaacaattaggtgctacaagtaaatcaccacgttgggcaatagcatttaaatttagtcctaaatttgttcaaactaaattaacagcagttcttataacgattggtagaactggtagagtgaactatactgctaaattagaaagtgttaatttagatggaacaaaagtaacagctgctactttacataactttgattacattaaaactaaagacattaggatcaatgacactgttgttatctataaagctggggaaattatccctaaagtactaaaggtaaatcttgaaaaaagaaaaaatgacactatcataattcaagagcaaaaatattgtccttcatgtaattcaaaactagtcaaaatagttgatgaagttgatcagtattgtaccaatgaaacttgtaaggagcgaaacatccagttaattaactattttgtttctaaaactgctatggacattaacgggttgaatattaatactattaccaaactttatgaacacaatttggttagatctatagttgatctttatgatttaaaagacaagaaaaaccaagttttaaaattagatctgaagattggtgataaacttttcaacaagttagttgataacattgaaaattcaaaacaaaaaggaatggctagattactaacaggacttggtattaagcatgttggtaatgtattagctaagaatttagctaatcattttaaaaatatcaaagcattacagcatgctagcttagagaacttaattagtttaaatgatgtaggaataacagtagctgaatcattgtataactggtttcatgaccctaaccatttgcagttaattgaacaacttgaattaagacaagtaaaaacagatcaattaccactgaaaattaactttgaaactaacagtatttattttcaaaaacgctttcttattaccggtagctttaacattagtcgtgaccaaattaaggatttattatcagctaagtttgattgccagtttgcaagtgaagtcaaaccaacagttgactttgttattgcaggaaacaaaccaactttaagaaaaatcaatcacgccaaagaactgaacattcctatcattaatgaagcaatttgaacatag

SEQ ID NO: 27354 - DNA, 294 bp, Mycoplasma genitalium
atgaaaaaggcaatccactttcagagtcaaccagttgtttttaactgtgcttcatgcaatagcaactttaccattgactccactgccaaacaaaaggatcttgccattgacatttgtggaaaatgtcatcctttttacatagggcaattaaccaaacaaaccgtgcatggacgggctgaaaaactttctcaaaagttcaacgctggaaaggcttttttagaaaataaaactaaaaagagtaaccaagctaaagttgaaaaacaaactaggcaccgttctattaacgagctttag

SEQ ID NO: 27355 - DNA, 1080 bp, Mycoplasma genitalium
gtggattttgacaaacaactctttttcaatgttgaaaagattgttgaacttactgaacaacttgaaaaagatctcaataaacctaaccttagctttgagcagattaaagttattaacaaagagttaaaacataaacaacctttaatagttaaattcaaggagttgcaaaagctggttgaaaatgctaatgaagctgaacaaattcttaacaattccagcttaaaagaattgcatgaagaagctaaaaaagaacttgaaaaaatcaaagctagtttacctagtttagaagaggaaattaagttccttttactaccggtagatgaaaataaccaaaagaatgttattgtagagatccgtccagctgctggtggggatgaatcttgcatcttcttaagtgatctttttaatatgtacaaaaactattgtactagtaaaaattgaacggttgaacttaatgaaattatccctgcaagtgtggggattaactttgtttcttttgcggtaaatggtactgatgtttttgctaaactcaagtttgaatcaggagtacatagggtgcaacgtgttcctttaacagaagctaaaggtagagtgcatacctcaacagttactgttgctgttttacctcaattagaagaggtagagatcaccattaatcctagtgatttgagaatcgatacttaccgtgcttcaggagcgggtggacaacatgttaacagaactgaaagtgcagttagaattacccatctacctacgggaattgttgtggcttgccaagagggtaaatcccagttttctaaccgtgataaagcaatgaaaatgctacgtgctaagttatgggaaaatgctcaaaataaacaactctcaacccaagcggatttaagaaaaagtcaagttggtagtggagagagagctgaaaaaattcgtacctacaactatcctcaaaacagaattacagaccacaggattaaattaactattaataagcttaatactgttattttgggagatcttgatgagatcattgaagctttacaagctgatgaaaagaaacaacagttggaaaagtttattagttag

SEQ ID NO: 27356 - DNA, 2625 bp, Mycoplasma genitalium
atgtttgttaatttacatacaaattcatactataactttctcaattctgccctttctcctaaaaagctagttaatctagcaattaatgatcagcaaaaagctgttgctattacagatcctaatctttttggcgctgttgaattttttataacttgtaagcaaaataatattaaaccaattattggtttaaacttaactgttgaataccaaaaaaatgatgttaagttattactaattgctaaatcaaataaaggctttcaaacgttgaacaaaatagcattaattcaacaaaaacttgaaattaattctttagttgatcaactaacagatattgcagtaattatctgttctttaacaacatgaaaatctacttataaggatgtttatcaagcaaaaggaattgaaataaatcaaaccccgattgccattcttgcaaatgctgttaactgtgaaaaaactaatagcgatcaagtagttttaacagttttgaaacaaatgaaacaaaaccaaacgggaaaaataactacatttgattgggatcttaaacaaaaattaaatcaaatttcaattaatgaaaatttaaaagtaaagagtgaaattcaaccttttttagatcaaaaaactgcacaacaattattcagtgaaacagaacttaataatctgaatgatctagttaatagatgtgaattagatttggagcacctaaaagctgcttcactttctttaactgataatgatgcagcagttttagaaagtttgtgccaaaccaatttaaaacagtttttagataaaaatcaagatctaaataaaaaagcctatcagctacgtttagagaaggaattaaatgttatcaataaacttaattttgctagctattttttagttgtcaatgatcttgttaattatgcttttaaaaaggacatcttaattggttctggtagaggttctgcagtaggatcattagtggcttttttattaaacattaccaagatagacccagtccaacaccagcttattttcgaacgttttatctcaacccaccgtcaagatctacctgatattgatattgatatcatggagaataaaagagcagaaatgataaattatctgtttgaaaaatatggcaaagaaaactgtgcacaaattgttacttttcaacgttttaaaacccgttctgctgttaaagaagttgctaaattatttaatgattatggcattagtgacatgatcctaggagtgttacctaaagatcaaactataacattcactgatcttaaagctactgaagatagtgctttacaactttgtttacaacagtttggtttaattgttgaattagcactagcaatagttgattttccaagacaatcaagtatccatgcttcaggcatagttatcgcttcaaattctttgattaaaaccattcccttgttacagcttgacaataatcactttttaactcaagtttcaatggaatggttaagtttttttaatctcaataagtttgatctgcttggtttaattaaccttactatgattagcgatgtaattacccaaattaaaccatctaaccagaccgttaaccagtttttaaataccatttcttgaactgatcaaaacacctttataaacttagtaaatgaagatacactaggaatctttcaacttgaatcgtttggcatgaaaaaattactggttcagattaaacctaaaaccattaatcaactagcaattgttctagcgctttacagaccaggtgcacaggataacattaacctttttattaaccgcttgcacaatggttatgatcaatctgacattgatcctaggattttacccattgtgaaaaatacctatggagttttaatttttcaagagcagatcattaacatcgttaaagttgtggctaactactctttagaagaagcagatagcttccgtagagccatttctaaaaaggatgttaaattgatccaaaaaaataagcgtaacttctttgaaagagcagttcaaaataactttgatttaaagactactaccaaaatttttagctacatagaacgctttgctaactatgggtttaacctttctcatgcgttgggttatgcactgctttcatactgaacagcttgacttaaaactaactatcctgtttatttttatttatggttattaaaccattttcaatctagtaaagacaaacaaaaactaattattagaactttagaaaaaagtggtattgaaatttatccacctcttttaaataaagctcaaccaaatagtgttatagaaaataaaaaaatttatttaggtctaaacctaattaagggaattaatgacaggtacatccaaaacttacaaaaagtgcaacatttaattcaaactcaaaataacttacaactaactgatgtagtaagttggtgtttggataaaaccattggtgatatccctttaaaagatttacttttattaaaaactatgggctgttttgatttttttgaatacacttatgactttaatgatgcaaaggatttttgaattaaaagcgatcacctattgtttaccagaatgcctttagaaaaaaaggatagtaatttttgaattaaacaattttttaccaattag

SEQ ID NO: 27357 - DNA, 876 bp, Mycoplasma genitalium
atgaaaaaagcaatcctgattgatggcaattccttagcataccgtgcttattttgcaacgtgaaaacaagttgaatatgctaagcaaaataatttacctttcaataatgcaataagaacaatgttactaatgtgttggaatttaattaaagccaatgtttatcaatatggaattgtaagttttgacactaaagcgccaactttccgtgatcaaatctatgaaggatataaacaaaaaagggttaaaactccagttgaacttttagtacaaattcctctaattaaacaagcgcttgtttatttagggtttttagtttgtgaaaaagatggctttgaagcagatgatttgattggtagttatgccaatttatttacaaagcaagaaataacagttgatatttacagttcagatcgagatatgttgcaattagtaaacgcctttactaatgtgtttctctgtattaaaggtacaaaggagatggttatgtacaacaatgaaaatttcaaatcacttttttatggtttggcgccctatcaagttgttgaatataaggggttagttggtgataacagcgataatttagcagggattaaagggataggtcccatcaaagggatagaattactccaacaatatggaaccattgataacatctacactaacttcaataatctccccaaccaacttcaaaaacttttaaataaccaaaaggaaatagctaaaacctttagttttctagctaaaattaaaactgatattgaacttgatcaaaacatagatcttactggtttaaaaccaatccaaaaacaagcgttaattcaacttctaagtgaaaacaaaattaatactttagttgaaaaattttcaaaaatataa

SEQ ID NO: 27358 - DNA, 855 bp, Mycoplasma genitalium
atgcctgaacttcctgaagtaactactgttattaatgaacttaaagaaactgttttaaataaacctttagatcaagttcaagttaacctaagaaaggttttgaaaaatattgatcctcaattgctgaataaacaattaaaaaatcagttttttactgatattaagcgtaagggtaaatatatcatttttcttttaagtaatggtttgtatttagtttcgcatttacgtatggaaggtaaatacttttttgaagaaagaggtagtaaatttaatcaaaagcatgttttagtagaatttcattttgatgatggtagtcaactcaattatcatgacaccagacaatttggaacgttccatttgtatgaaaagttagaacaagcagcacaattaaataaacttgcatttgatcctctagaagctggttttgactataggaaaatcttccaaaaagcacaaaattcaaaacgtaaagttaaaacttttattttagaccaaacagtgattagtggaattggcaatatttatgcagatgaaatcttatttgcaagcaaaattaatcctgaaacaatggttgatcaactaacaattaaagagatagagattttatgtaaaaatgctaccaaaattttagctaaagcaatagttatgaaaggtactaccatcagcagctttagttttaaaaaagatcatactggaggctatcaaaactttttaaaagttcacactaaaaaagatcaaccttgctcagtttgtaaccaattaattgttaaaaagaagattaatggaagggggagctatttttgtttaaactgtcaaaaaatcacaaccaaagtttctacaaaactcaatccataa

SEQ ID NO: 27359 - DNA, 837 bp, Mycoplasma genitalium
atggaactgaaaaacattatttttgaccttgatggtaccttgctttcaagcaaccaaattccattagaacaaacagttgagtttttaaaggatttacagaaaaaagggattagaatcacttttgctagtggtagaagccatattttaattagaaacacagctacctttattacaccaaatctacctgtaatttcttccaatggtgcacttgtttatgattttgctagtgaaaaaccagttcatatcaaacctattgataataaagtaatacctgcaattatgcaaatgttgttggaatttcaagaaacattttatttctatacagataaaaaggtttttgcttttacacatgagcttgattcagctaaaattctttcaactagaagtcaaatagtaggaattgatctcattgaaaataactacatagttaacaagtttgaaaaagctttggattttgattttaagcaacatactattacaaagatcttactggtaactaaaaacagagaaaaagttccttttctagcaaaacaactagatcaaattcaagatattaactatgtgagttcaatgacatttgctcttgatatcatgcaaaaagatgttaataaggcttatggattgaaagtattagttgataattataatcttgatcctgaaaagactatggtctttggtgatgctgataatgatgttgaaatatttcaaagtgttaaatggccagttgctttggttaatggcactgatttagctaaaaaaaatgctaagtttattactgaatatgacaacaatcacaacggcatttatttctttctaaaaaagtttctagcaacttaa

SEQ ID NO: 27360 - DNA, 2379 bp, Mycoplasma genitalium
atgtacaatcacaatttaattgaagaaaagtggttaaaaaaatgaaaaaacaaagatgttaaccgctttgaaagcgatagtaacaaaaagaaatattatgtccttgacatgttcccttatccctcagcagcaggattacatttaggacatgttagagcttatactatcactgatgtaataagtaggtattacaaagctaaaggatttaatgtgatccatccgattggttttgatgcttttggtttacctgctgaacagtatgctattaactctaatcaaaaccctggcagttgaacagatcaaaacattaataactttattaatcaattaactagttttggttttgattatgactatcatttaagtctcaaaacaactgatccacgttattacaaatacacacaatggatcttcagtgagctgtttaaagcaaacctagcggaattagttgatattgatgttaattggtgtgaacagctaggtactgtattggctaatgaagaagttttaattgatagtaatggcaacgcagttagtgaaaggggttcattttcagttgaaaaacgcaagatgaaacagtgagttttgaaaatcactacttttgctgatgcacttcttgaaggcttagatacacttgattgacctgaaccaattaaagagatgcaacggaactgaattggtaaaagtaaaggtgttactattaactttcaactaaaagatcataaggaagctattgcaatttttacaactaaaccacaaacaatttttggggttagttttcttgcagtttcaaccaaccattggttagcaaaaaagatagcagaaacaaataaaaaagtagctagttttttaaaaaaacaactccagaaaaccacaactttaaagcaaaaagcaactttatatgatgggatagatttattaacaaatgctattcaccctcttacaaatgaattgatccctgtctatgttgctaactatgtaattgaaggatatggaacagatgctattatgggtgttggagcacacaatgaaaatgataacttcttcgcacgtaaacaaaagttgaaaattatcaacgtcattgataaaaaagaacggctgcaaaattcatttgcatataacggattaacaactaaagaagcacaagtagctattactaatgagttaatttcacaaaataaagcgaaattaacaactgtatataaactgcgtgattggatcttcagtagacagcgttattggggcgaaccttttccaattatttttgatgaaaataacactcctcatttggtagaacaactccctgttgaattacccttacttgagaattacaaaccagatggaagtggtaattctccactaatgagaaatcaagcttgggtaaacatagtcaaagataacatccattaccaaagggaaactaataccatgccccaatgagctggttcttgttggtattatctgggttatttaatgttgattaaaaaccctaatttttgaccaattgattcaaaagaagcgaagaaattatttgatcaataccttccagttgatctttatgttgggggtgcggaacatgcagttttacaccttttgtatgcccgtttttgacacaaatttttgtttgacaagaagctagtatcaacaaaagaaccatttcaaaaattaattaatcagggtatggtgttaggtcctgatggtaaaaagatgtccaaatccaaaggtaataccattaaccccacaccacttgttgattcacatggagcagatgctttaaggttgtacttaatgtttatgggcccaattagtgctagtttaacttgaaatgatgaagggttaaacgggatgagaaggtgattggatcgagtttataacttcttttttaatcatgctgttgttactgatcaagttagtcaagagacaatctttgcttacaatttgtttttaaaaaacagttattgtcatcttgacaaacatgaactaaatctggtgattagtgaaatgatgatctttttaaactttctctataaaaccaaaaaaattagcttaaattatgcaaagggatttttaacagtactgtcgttttttgcgccctttcttgctgaagaattgaatgaaaaatgtggacttgaaccatttgttgttaaacaagcgatttctttagttgattatcaactttttgagactgctaaaactaaggttattctttcaattaatggcaaatttaaagcagctaaagaatttactaaaggtagtttagagatagatgttttagaatcatttaaacaggataaagagataaatgacattctcaaccaaccgattgagagggtagtttatgttcaggatcgaattattaatgttcttttaaaaaaatag

SEQ ID NO: 27361 - DNA, 1374 bp, Mycoplasma genitalium
atggattatgatctaattattttgggtgctggccctgctggttatattgctgcggagtatgctggcaaacataaacttaaaaccctagtgattgaaaagcaatactttggtggggtgtgtttaaatgttgggtgtatcccaactaaaacgttgttaaaaagagcaaagattattgattatttagttcatgccaaagattatggtatcactattaatggtcaagctaaacttgattgaaaacaactgttaaaacaaaaacaggaagtagttgataaattagttgcaggggtaaaaacaattattaagggtgctaaggtagaaagtattgaaggtgaagctactgttatagataaaaacaaggtgcaagtaaacaacacaacttacaccactaacaacattattgttgcaaccggatcaagaccaagatacttaactttaccagggtttgaaaaagcacaacaagctgggtttatcattgactcaacccaagctttggctttagagggagtacctaagaagtttgttgtagttgggggaggtgtgattggggttgagtttgcttttttatttgcttcattagggagtgaagtgaccattatccaaggtgttgataggattttggaggtttgtgatagtgatgtttctgaactgataagtaaaaccttaaaaaacaaaggagttcagattattaccaatgctcatgttgttagagctgaaaacaaccaactgttttacacagttaatggagttgaacagtctgtaattggtgataaaatcttagtttctataggaagaattgctaacacagagtgtttagatcaacttgatttaaaacgtgaccataacaacaaaattgttttaaatgaaaaactacaaacatcaactacaaacatctatctaataggtgatgttaacacgcaaatgatgttggcacactacgcttaccaacagggcagatatgctgttgatcaaattttgaaccaaaaccaggtaaagcctgctgaaaaaaacaagtgtcctgcttgtatttacacaaatcctgaagttgcttttgtaggttatagtgagatggaattgcaaaaagaaaagattgattatgtcaaatcttccttgccatttatttatagtggtaaagcaattgcagatcatgaaaccaatgggtttgtcaagatgatgtttaatcctaaaactggtgctatcttaggtggatgtattattgctagcactgctagtgatattatcgctgagcttgctttggtgatggaaaacaacctcactgtgtttgatattgccaattctatctcaccccatcctaccatgaatgaaatggtaactgatgtttgtaaaaaagcgatctttgattactttagttaa

SEQ ID NO: 27362 - DNA, 1155 bp, Mycoplasma genitalium
atggcaaatgagtttaaattcactgatgttggtgagggtttacatgaaggaaaagtaactgaaatcttaaaacaagttggtgatcagatcaagatagatgaagctttatttgttgttgaaactgataaagttacaactgaactaccttctccttttgcaggtacaattagtgctattaatgttaaagttggtgatgttgttagcattggtcaggtgatggcagttattggtgaaaagactagtacaccacttgttgaaccaaaacctcaaccaactgaagaagtagctaaggtaaaagaagcgggggcttcagtagtaggggaaattaaggtttctgataacctctttcctatctttggagtaaaacctcatgcaactccagctgttaaagacactaaagttgcaagtagtactaacattactgtagaaacaacccaaaaaccagaaagtaaaactgaacagaaaaccattgctatctcaacaatgcgtaaagcgattgcagaagcaatgacaaagtcgcacgcaattatcccaaccactgtattaactttttatgttaatgcaaccaagttaaaacaatatcgtgaaagtgttaatggttatgctttaagtaagtattccatgaaaatttcttactttgctttctttgttaaagcaattgttaatgcgcttaagaagttccctgtttttaacgctagttatgatcctgatcaaaacgaaattgttttaaatgatgacattaatgtaggaattgctgttgatactgaagaaggtttaattgtccctaacattaagcaagcccaaaccaaatctgtggttgaaattgcccaagcaattgttgatttagctaacaaagctagaacaaaaaagattaagttgactgatttgaataaaggtactatttcagttactaacttcggttcattaggagcagctgtaggtacacctattattaagtaccctgagatgtgtattgttgctactggtaatttagaagaacgcattgttaaagtggaaaatggaattgcagttcataccatcttacctttaacaatagctgcagaccaccgctgggttgatggggcggatgttggtaggtttggtaaggagattgcaaaacaaattgaggaattaattgatcttacagtagcttaa

SEQ ID NO: 27363 - DNA, 981 bp, Mycoplasma genitalium
atgtcaaaaatccaagtaaataacattgaagcgttaaacaacgcaatggatcttgcactggaaagagatcaaaacgttgtactctatggccaggacgctggttttgaagggggtgtgttccgtgcaactaaaggcttacaacaaaagtatgggagtgaaagggtatgggattgtcctatagcagaaaactctatggctggtattggggttggggctgctataggtggtcttaaacctattgtagagatccagttttcaggcttttcattcccagctatgtttcaaatctttgtccatgctgctaggattagaaaccgttctcgtggtgtatataccgctccactagtagtgaggatgccaatgggtggggggattaaagcattggaacaccacagtgaaacattggaagcaatttatgcacagattgctgggcttaaaacagtgatgccatcaaatccttatgataccaaaggactttttctagctgctattgaatcacctgatcctgttatcttttttgaaccaaagaagctttatcgtgcttttcgtcaggagattcctagtgattattacactgtccctattggtgaagccaacttgattagtgaaggtagtgaacttacaatagttagctatggtcctacaatgtttgatttaattaacttagtttacagcggggaattgaaagataagggaattgagttaattgacttgcgtactatctccccttgagataaacaaacagtatttaactcagtgaagaaaacaggaagactacttgtagtgactgaagcggtgaaaagtttcactacaagtgcagagattatcacttcagtaactgaagaactattcacttatctcaaaaaagccccacaacgggtaactgggtttgatattgttgtgcctttagctagaggtgaaaaataccagtttgaaattaatgcacgggttattgatgcagttaatcaacttttaaaataa

SEQ ID NO: 27364 - DNA, 1077 bp, Mycoplasma genitalium
atggcaatcttgattaaaaataaagttccaactaccctttatcaggtttatgataatgagggtaaattaattgatcctaaccacaaaattaccctaactgatgaacagttaaaacacgcttattacttaatgaacttgagtagaatgatggacaaaaagatgttagtttgacagcgtgctggtaagatgttaaacttcgctcctaatttgggagaggaagctttacaggttggaatgggattaggtttaaatgaaaatgattgggtttgtcctacgtttcgtagtggggctttaatgttgtatcgtggggtaaaaccagaacaacttttactctactgaaatggtaatgaaaaaggtagtcagatagatgctaaatacaaaactttacctattaacatcaccattggtgctcagtattcccatgctgctggattaggttacatgttgcactataaaaagcaacctaatgttgctgttactatgattggtgatggaggtacagctgaaggggaattttatgaagcgatgaacattgcaagcatccacaagtgaaacactgttttttgtattaacaacaatcagtttgctatctcaacaagaactaaacttgaatctgctgttagtgatctaagcgttaaagcaatagcatgtgggatcccaagggtaagggttgatggtaatgatctaattgctagttatgaagcgatgcaagatgctgctaattacgctagaggtggtaatggaccagtcttaattgagttcttcagctaccggcaaggtcctcacaccacttcagatgacccttctatctacagaaccaaacaagaagaggaggagggaatgaagagtgatccagtgaagcggttgcgaaacttcttgtttgatagatcaattcttaaccaagctcaagaagaagagatgttcagcaaaattgaacaggaaatccaagctgcttatgaaaagatggtactagatactcctgtatcagtagatgaggtgtttgattacaactatcaagaattaacccctgaactagttgaacagaaacagattgcaaaaaaatactttaaagactaa

SEQ ID NO: 27365 - DNA, 2163 bp, Mycoplasma genitalium
atggcaaccattcaggaaatcgagtgtgattttttagctaaaatagcacaaaaatttactaatgcagagattgaattaattaacaaagcattctatcacgctaaaacttggcatgaaaaccagaaacggcttagcggtgaacctttttttatccatcctttaagaacggcattatcactagttgaatggaacatggatcctatcactatttgtgctggtttgttacatgacatcattgaagatacagaccaaaccgaagctaatatagcaatgatttttagcaaagaaattgctgagcttgtcactaaggttacaaagattaccaatgaatctaaaaagcaacgtcatctcaaaaataaaaaggagaatcttaacttaaaaagctttgttaacattgcaatcaattctcaacaagagataaatgtaatggtactaaaactagcagatcgacttgataacatcgcttccattgagtttctccccattgaaaagcaaaaggtaattgcaaaagaaactttagaactttatgcaaagattgctgggaggattgggatgtatcctgttaaaacaaaattagcagatctttcatttaaggtgttggatttaaaaaactatgataacaccctgtcaaagattaacaagcaaaaggtcttttatgacaatgagtgggataacttcaaacaacaattaaaaaaaatcttagcgcaaaatcagatagaataccaacttgaaagtcggattaaaggcatttactctacatataaaaaactaactgttcatgaacagaacatcagtaagatccatgatctttttgctatccgcttaattactaaatcagaacttgattgttatcacatccttggtttaattcaccttaattttttaattgacagtaaatacttcaaagactatattgcctcacctaaacaaaacctttaccaatcaattcataccactgttcgtttaaaagggttaaatgttgagatccaaattagaacccaacagatggacaatgttagtaagtttggcttagctagtcactggatctacaaagaacagaaagagggattgttagcacctgctttgcaacttaattacctagtgacaaaacaaaaacactcacatgattttctaaaaaggatttttgggactgatattatcaagattaatgttagtgctagtcatgaacctaatgtaattaagcaaattaatgttgatagcaacaataaactccttgatattgcttttgaaaactatcccaagcaatttgctaaattaaccaaaattgaaattgatggggttgagatcaattcttttgatactagtgttgaaaatgagatgctgattgaattttactttggcaagaataacaatttgaaatcaaagtgaattaggtatatgaataaccctatataccgtgaaaaggtaaaaaagagcttggctaaactagctaaatctggtagatacagtgagttagctttttatgaaaaagaactgggtgaaaaacagttaaaacttgctagtgaaactgaaatccaaaaacgcttaaacaccctaagaattaaaaaaatgagtgattacttagcgttaattgagtgtactaactttactaatgatgaacatttgttgtttctagctaaaaacaacgacaagtgaaataaactaacaaaaccacttaagtttgctttttcaaaagtagtttttcacaactcttactttgaacaaattgaaggtatttttatcaccaaaatagtgattgaaccatgttgtagtaagatccctgatatgcctgaacaagtaactggtatcttaactaaaaacattttaagtgttcaccgttatggttgtaagaatttacaaaataaaaagcagttaaaaattatcccgttatattgaaatatccagcagttaaaactaaaaccacgtaagtttcgcagttacattaacattaacggagtgtggagtgaaaaaaccattaataaaatctgtcaaacaattattaatggtgatggttatattgaaaaaataattcccaagatcaacaaacaaaaagatgaatttgatttaaacatcaccctttttgttaataactaccaacaacttctcaccttaatggaccaaattaccactaagaatatcagctttagttgaaaatacctttag

SEQ ID NO: 27366 - DNA, 747 bp, Mycoplasma genitalium
atgttggtttttgtatttctgttagggtttggtattactgctttgtattttcgtagtacagcagctaacctttatgttcaagctcgtaattccattgatagttctttcaattctgctaaagcctttgctaatgctttagcaaatagtgctaaccaatttagcaaaagttccattactaacaatttagatcaagttaaaaaagacttagagcaatctttacaaaaagtggatgaatacaaaaagaacttagagagtcagaacaatctaggtaatattagtcaagaaaagattagggaacttgatgcaaccaaaaaagacttggaaaacagtaaaacacaattagacaactttaaaaataatcttgataaaaatggtactgctagttcatctccatctgtaaaaaaacaagcaacagctgatggtgtaattagtgcagttagtgagttttctacacaagcacaaagcattgttagtagctatgaaaagatcaaaaacaacatcccttcttctgaacagttcaataattattatgatgtcacaatgataaccattgttgctgtatcaggtgggatgttagcaattttgattacaaccattgtcttttcctttttaacttctaaaaaaagaggattgatcaggttttcaagatttattagtactgaacagttagctgatcatgttaatgatatcttagatcgttatcctgatttggaagaggaagtgataacagcattagaccatgattag

SEQ ID NO: 27367 - DNA, 1452 bp, Mycoplasma genitalium
atgacaaaaaaaacacaagatctcactagttggtatgaccaactgctagttaaagcaaagttaatttgtcatggtgaagttaaaggtacagtttgttttttaaataacagttgaggcttatggatggaaatccaacagctttacaatgatgcaattgcaaataaaaatcaattgtctgcaattgctctaactaaattccaaccaactactagtttttgttatcaagtattccaagtacaactccctaccctttctttttacagtgaatatcaaaaggaaaaaacccatatcaaaggttttaatcctgagctttttttaattaatcaagttggtcaaaaacaactcaatgatcctttggttttacgacctactagtgagattgctttttgcaacttatggaaaaaacaagagttatcttaccatgatctacctttaatttataaccagtgaactcaggtttttcgtgcagaaaaaaacaccagaccttttttgagaaacagtgagttttactgacaagaaactcatgggctttttgtggatcagagccaatctgaacaagctgctattagcttttgaaatttatatcaggatttaattattaacaaactttgtatccctgcttttgttggtttgaaaagtgaaagtgaaaaatttgcaggtgctaaaaacacatggacaatagaagcaattatgcctgatggacaaagtttacaatgtgccactagccatgatttaggtgacacttttacaaagagttttactatcagctatcagagtaaaactaaccaaaaaatgactccaagtagttttagttgtgggatgtcaactaggatcttaggagcaatttttttaacccacagcgatgattatggtttggttttaccttggtatctagcaagtaaacaagtcaagttatacctgtttgataaaaacaataaccctaaaacaagagctttagcttttttagtgaaggattttttagaaaaactcaaaattcgctttagttttatagaaattaacaatcaactaggtaaacaacttttaaaaggagaaatagaaggtattccattacagatgattgttgataatgaaaaaactattaacatcttcaaccgcttaacacgtttaaaaaccagcttaacatttgcaaatctccaaactgaatttgttaatttagttaacaactaccatacagagatgtatagaaaagcaaatgatttagttgaacaaaaactagcaagagtacaaactttaaaggaaattgaacaagcattcaaaaataaaaaggctgttttatgtaccgtgaagttaactggtgaacttgaacaacacttaaagacaaaataccaagttagtgttaggtgtgtttttaaaaagtcagatgtaacacaaaactgtccttttacaaatcaaccttgttttgattcagttttaattgcacgtgcttactaa

SEQ ID NO: 27368 - DNA, 255 bp, Mycoplasma genitalium
atgcaaacgcatgaaattcttttaaaaattaaagaaattgctaaatcaaaaaactttaatcttaatttagatgaaaagacaataaatcaaccacttcgtgagttgaaaatcgattcacttgatatgtttagtattgttgttagtctagaaaatgaatttgggattagttttgatgatgaaaagttaatgaatctaaaaaatcttgctgacttggttttagaagttaaaaaccttttagcaaaaaaaggggtatag

SEQ ID NO: 27369 - DNA, 2703 bp, Mycoplasma genitalium
atgaattgaacaactgataaagtaaggcaaacctgattagattattttgcaaagaaagaccatctggttttagcttcaaaatcactaattccgatcaacgacccatcattattatgaatcaattcaggagttgctactttaaaagattatttcagtgctagaaaaacaccaccatctaaacgccttgttaatgcacagatatgtttaagggtaaatgatattgaaaatgtgggttttacttcaagacatcaaactttgtttgagatgcttggaaatttttcaatcggtgattattttaaaacagaagcaattgattttgcttttgatcttttagttaattattatcagctagatcctaagcgtttttatatcactgtttatgaagatgatgaaactacttataaaagatgaattaagcataaaattgataaaaatcacattattaagtgtgacaaaagtcgtaacttttgagacttaggtttaggaccttgtggaccttgcactgaaatctattatgatcgtggtgagaaatttgatcctaaaaaaattggtgaaaaacttttctttgaggacattgaaaatgatcgttatgttgagatatgaaacattgtttttagtcaatttaataatgatggtaatggcaactatacagaacttgctcaaaaaaatattgatacaggtgctggaatagaaagacttgtttcagtattacaaaatagtccaaccaattttgatactgacatctttttaaagctaatcaaaataattgaagctttttgtccatttaaatatgatcccaactcttactttacattcgatcctcaaaaagtgaaagaacagagttattttcggattattgctgatcactttaaagcaatcacttttaccatttcagaaggagttttacctggtcctaatgagagaaattatgtagtaagaagacttttaagacgtgctttaatagcttgtaagaaattgcaattaaacttagcatttattgaaaagataatagatgaaatcatcgcttcatatgagaattattatcaacatttaaaagctaaaaatgaaactgttaaacaggtagttttaaaagagattaatgcatttaataaaacgattgatttaggtttagtgctgtttgaaaaaagtgttaaaaacaatactctaactccccaattaacatttcaattgaacgaaacatacggttttcctgttgaaataataagagaactagttaatcaaaaaggtttaactattgattgaacagtatttgatcagttaatggccaaacatcgttctatctctaagcaaaataaccaaactataaattttgaaaaacaaaatattaatttagttaatttcaaaactaaaagtacttttttttatcacaaaaataaaattaatgctaaggtaattggtctttttgatgaaaattatttaccagttaaagaacttaataatcaaagtggttatgtagtttttgaccaaacagttttatatgctacttctggaggacagagatatgatgaaggaagttgcattaatcattctaataataatgatcaaaaaatcagttttcaaggtgtatttaaaggacctaataaacaacacttccactactttttagtaggtagttttaaactcaatgatcaagtaactttatcacatgatgaaacttgaagaaaacttgctgctaacaaccatagtttagaacaccttttacatgcagctttacaaaaagaaattgatccacttattaaacaaagtggtgcttttaaatctgcgcaaaaagcaactattgactttaatttgaatcgtcatttaacaagaaatgaacttgagaaagtagaaaataaaattcgctctttgattaaacaaaaaataagctcaaaagagatttttactgattttgaagggagtcaaaaactaaatgcaattgcttattttgaagaggaatattctcaacatgaaatattaagagtgatccgctttggtgattatagtgttgagttgtgtggtggcactcatgtagctaacactgcttcaattgaagattgttttattactgatttctattctttaggagctggaagatgaaggattgaaatcattagcagtaatgaaactattaacaactatttaaaagcagaaaatcaaaaattaatccaattaaaatcagaacttgaaaaagttctatctttgattgatagttcaatttttaaagttgagttaaaagaattgcaacaaaggctagataaatttatcttacctgaaaaaattacccaattaagagatgcatctgatactttattagctttaaaaaatgatattaaccagttaaaaacaaaaaactataaagtatcacagcaagctttagctttatcaattaaaaagcaattattatccttagtagatgaaaataaaagttatgtaattgccacttttaatgacgtagaacctaaactattgctacaaacactacatgatgttttcaatcaaaatcaaactaaaaatttcttgataattaatcaattcaatgaaagtaattcatttattgttataggaaataaaactaccaccattattgaaaaattaagaaatagttttaatttaaagggcggaggcaatgataagttatttagaggttcttttcaggataatgttacccctcaaaagcttaatgaattgtttcaaaataaatag

SEQ ID NO: 27370 - DNA, 735 bp, Mycoplasma genitalium
atgcataacaagcaattgcttttagcacataggggttattcattcattgctccagaaaacaccaaactagcatttgatttagcttttgaatattgttttgatggaatagagcttgatgttcatttaactaaagatgaacagttagttatcattcatgatgagacaacattgagaaccgcattagttaataaggaggttgagtttgaatcattagttagtttaaaaagagatgatcatagtgctttttttcaccttaaaattcaatttcaatcgatcctaactttaaaagagttcttagatctttatttagataaatttaagttaatcaatattgagattaaaactgatcaaaaaccatatttaggaattgaaaagaagcttgttgacctagttaaaggttatggtaaaaaagcaatagataagatcttgttttcatcctttaactttgaatctttgcaaaaagtttatgatttagataatagttacaaaaaaggttttttattttggactaaaaaacagtttgaaacaattagtacagctagaatccaaaagatttgtcaattcctccacccatgaaccaaaatatatgaaaagtatccccaaatgatcaaaaaacttaacttacctttaaatttatgaacagtaaacagtcaaaataagtttcagcagttcttagctgataatcatgtttatgcacaaattgctaacaaaaagtttgaaataaaaataaattag

SEQ ID NO: 27371 - DNA, 1425 bp, Mycoplasma genitalium
gtgatagtgacaacaaaaaaaggatttaaaaaacgcttaaaggatttttcaaaacaacaaattcttgccttaattattttgggagcaattgatgtatttgtaattgctgcaccctattatgttaagaatgttgttcctaacctccacttgtacttaggaattacagaggatgaagttgctactgttacttctatcattggttatgtaacacttgccactcaactaccaggagggtttttaacaaatcgcttcagttctagaaaattgttatttctatcagcaattactactggagcaattactttttgattagcagccaacatcttaactaaaaaccaacaaagccatgatgctttatttattcagtattgtgtaatatgagggttatgagggataacaagtactttaatcttttgaacaccattatgaaaactagctagtcaacaagcaacaaaagaaaaccaagcacttggttttggaattcagggagctgctaatggaatatgaggtttaatatttatctttctaattgcattgataattaccagcattttctatccatcaggaggtagtgagaatgctgattcaaaaccatttgctgcatacgcttttatcattgccataatgctagtaattactggatttacagttttgttttttgttaaggaaaaaccaattgaaaaacaaagtcaaaccactttagtaagttttaaacgcaatttaaaccagattttagtgaccttaaaaaactgaaagttatggttactatccttctttttaatggggatgtatgtgtttcaaagcacttttgcttattaccttttacagatgttgcaaaatgcatttttagcgcctgtagtattagtaactgtaattgggggaattagaacttatgcactgagaagtgctgttagtgtttatctttgtagattagcagataagtgtaaaagctatatcttgtttttaatgatatgtactgttcttggtattgtatttgttctagcatttattctacttggttttgtacaaacaaattctgctaacatcactttaattactttctcttccattctctatatctttactggtatcttatcatggggaatggttacagtcagatataaccaaataggtgaaattgatattggtaaaaataactatgcatctagtgttggtttacttagttttattggtttttctactgatggatgactttacactgtgactgctgaagttggtaagaaatatacagttgcaggacaaagtaatactagtaacactggttatcaaattatcgctgctatttgtttatccattgctttgtttggtttgatatgtggatcaattgtttttatctcaaatagcatggaaattaaacgattaaataaagcttcataccgttgaagagatcttgataatgcataa

SEQ ID NO: 27372 - DNA, 1104 bp, Mycoplasma genitalium
atgtcaattattgcaaaaacagtttttataggtttaagcggtggtgttgattctgctgttagtgctttacttttaaaaaagcaataccaagaagttattggtgtttttatggaatgttgggatgagacacttaataatgatttttatggtcataagaaaataaataataacaaatcaggttgttcatcttttcaagacttccaacaggctaaaaaaatcgctaattctttaggaattaagttaataaaaaaaaacttaattgaagcttattgaaacaaagtttttttacctatgattcaaagtttcaaaaaagggttaaccccaaatccagacatctggtgtaatcgttttattaagtttggtttattgcatgatttttgtaagcaaattaaccctaattctctttttgcaactggtcattatgccaaaataaacatgatagaaaatcagcctttgctttctattcctaaagataccaataaagatcaaacttattttttagcaaatgttaaaaaagaacaatttcagaatgttatttttcctttagcagatttaaaaaaaataacagtgagaaatattgctagagaaaataattgagaagttgcagataaaaaagattcaactggaatttgttttattggtgaaagacatttcagtgattttttaaaaaactatttacctgtaaaaaaaggattaattaaggattgaaaaaccaaacaaactattagtgaacatgatggtgtttggttttatacgattggtcaacgcagtggattaaatttaggggggttaaaacaacgtcattttgttgttgctaaggatattgaaactaatgaattatttgtttcttgtgacaaagaagaattattgaaaacaacaattttattggatcaatttaactggttgtatacaccaaagcaacttcctagtcaagttctggtaagaattagacatgctcaaaaaccagaaattgcaaagttgaaattattatcagataataaactggaaataacatttaaaaatcctgttataagtgttgcatctggacagtttggtgtattatatacacttgatcaaatttgtttaggagcaggattaatttaa

SEQ ID NO: 27373 - DNA, 1041 bp, Mycoplasma genitalium
atgggctttttaagcaagttaattgccaaactaaaaccaaaaaaatcagttgctaaacagcttaaagaagaagttgaaaaacaaagcctttttcaaaccaataataaaacttactatcagggtttgaaaaaatctgctacaactttcgctaaaactattaatgaactgtcaaaacgatatgttaatgttgacgaacagtttaaagaaaatctatttgaagggctagttttgcttgatgttggttatcatgctgcaaacaaaatttgtgatgctattattgaacagatcaagctaaacagaattacagattttcagctcattaaagagctaattattgaccaaattattgtttattacatccaagataaactctttgatactgatttaatagttaaacctaactttacaaatgtttatctctttgttggtgttaatggagttggtaaaacaactactttagctaagatagcggattttttcataaaacaaaataaacgtgttctacttgttgcaggtgatacttttagagcaggagccattgaacaacttaatcagtgagcaaagctgttaaactgtgacattgtacttccaaaccctaaagaacaaactccagctgttatctttcgtggcgtaaagaaagggattgatgataaatatgactttgttttatgtgatacatcaggaagattgcaaaacaagcttaacttaatgaatgaattgcaaaaaatttatcaaattattcaaaaggtaagtggaagtgaacctagtgaaacacttttagttttagatggtacagtaggtcaaacaggactatcacaagcaaaggtatttaatgaattttccaaactaacagggattgttttaactaaaatggatggttctgctaagggtggaattattttagctattaaagatatgtttaacctgcctgttaaactgataggttttggtgaaaaaactagtgatttagctatctttgatctggaaaaatatgttttaggtttacttaataacttaaacttagataataaagaaaattag

SEQ ID NO: 27374 - DNA, 2949 bp, Mycoplasma genitalium
atggtttttctaaaacgttttcgcgcatatggttttaaatcatatgctgatgaaatcacaattgattttacccattcaatgactggtattgttggtcctaatggatcgggcaaatccaatgttgttgatgcattaaagtgggttttaggggagagaagtatgaaacatctccgtagtaaatcaggtgatgatatgatcttttttggctctaaagacaaacctgctagtaagttagctgaaatagagctaacctttgataattccaaccgtttattacatgattcaagaaaagagataagcgtgatgcgtagggtttatagagggagtggccagagtgaatattttattaactccaatccagcaactttaaaagaaattagcggtatttttgctgatattggtcttgaaaaaggttcacttggaattatttcacaagggagtgtctcttgatttgtagaagctaagccagaagaacgcagaaagatctttgaagatgcgtcgggaattggtagatataccaagcgtaaagaagaagttgttaaccagttaaatcgaaccttaattaacttaaaacaagttagcgttgttttaaatgaactgaaaaaagatttaaaaaagcttacattacaagctgaaaaagcacaacaattcattagggttaaaaacgaattgaaagagttggaacttgctgttttggttggggaatatctccaagcacaaactgaacttgataagtttaattttcagattaacagtagtgaacatgactttaaaatacacgaaccccaactagagttgttagaagaacagattgttatctttaatagtcgctttcatagtgctgatatgcaatctaatgaattgcaaaaagagttacaagatatttaccaaaagatcaatgaattggaacaacgtaaagtcattattgatgtgcagttaagacaaggtttttcacaaaaagatgaaaagcaaaaagctgcagctttaaaaaaactaattttagttgatcaaacccagcttgatggttttgaaaaccaactatcaaattccaaaacaaccatcactgatcttgaaaaactaattaacgaacaaaaatcacttgttgatcagataaagttacagattgaaaaaaatactgctgatttaatttaccaacgttccttaaaaacaattattgaactccaaactaatgagcttaaaaaaactaacaatgccaatatcttagttaaaaatgctaatgctttaacaggaattttaaatacactaggaacatttcttaaatttgataagcagtatgaaaaagctatcttaaaagcacttggaaaatcaattggttacctagttgttaacaacaataatgctgccatccaagcaatagattttttagtcaaaaatgagataggtaaagtaacttttttacctttagatgatgttgctagtgatactaaaatcacaaacgaacacatggaaattttaaagcagcttgatggttttcttggtgtttgtagtgatcatgttaagtgtgatccattgtttcaaccagttgtaaatactcttttagcacaagttattattgctaaagatttaaatagtgccattaacctttctaactatacttacaagttatataggatcgttactttagatggtgagacagtttatgcagggggaattatcaatggtggatttgaaaaaacaaatcttagtgatgggtatttatcatcagcttcacttgataatgaacagaacattaacaaactagaaaacaacgaacgagagttaaaaaaggagcttacagaactagaagtaaagctagatgaaatgaacagaaaactcaagtatgaagagttgttacaagccaagtttatagagcgtattgttcaaattaaaaaaattattttagagctcaaaatggaatatgaacaacttactaacacaacttttgatggtaaaaaagctgttgctagtgaagctgaattaatccattcattaaatagtgcttgagctaaacgtgatgaaattaactctaagttaaagcttaatcaagaacttaagttacaactagcaaaaacaattaaacaaagtgaagagaagatagttgatcttagggcattgttagatgaacaacgtgctaaattagtttcagcgcgggaaggaaaaattaggtttgaaaatacaatccaaaatatcactgaaaagattaacagtgtttacaaaatgacaatggagtttgctattgctaatcacaacaaaccagttaaactctcttctatgcaagcccataacaagattgctaaactacaaaatcaattgaatgaaatgggggtaattaacatggaatcaattgctgagataagtgaaaagcaaaagcgctttgatgatattaacgctgaatatgaatcagctcaacaagcagttgaaaatttgcaaaaagctattactgaaattgatgaaattgctagcaatgagtttgatcaactgatccaaaaattaaatcaagagttgccaaaaactttcaaatatctatttggtggtggttcttgccaaattcgttacactgatcctagtaatgtattggtttcagggatagatgtctttgcaaatcctcctggtaaaaatattgccaacttaatgttgttatcaggcggggaaaaaactttagttgcactttctgttttatttagtattttgaaagtaagtgcttttccacttgttattttagatgaagcggaaagtgcacttgatcctgctaatgtggagcgctttgctaacatcattaaaactgctagcaaaaacacccaatttttaattattacccatcgtcaaggtacaatgatgaaatgtgacatgttattgggtgctgcaatgcaaactaaaggtgtaactaaaacctttgcagttgaacttgaaaatgctgaaaaatatgtatctgaaaatgattctaattaa

SEQ ID NO: 27375 - DNA, 963 bp, Mycoplasma genitalium
atgagtgttattgatatttttaaaaaacgattacaagctgttagtaaaaaacctgtaattatctttccagaaggttgatcagcaagtgttttaaaagcagttgaaatgcttaatgaatctaagctgatccaacctgcagttatctttcataatcgtcaggaaatccctgcaaattttgataaaaaaataactcattatgtgattgatgagatggatttaactagctatgctaactttgtctatgaaaaacgtaagcataaggggatggatttaaaagaagcacaaaagtttgtacgtgatcctagttctttagctgctaccttagttgctctaaaggttgttgatggtgaggtttgtggtaaagaatatgctacaaaagatactttaagaccagctttacagttactagcaactggtaattttgtttctagtgttttcatcatggaaaaaggtgaagaacgtttgtacttcactgattgtgcttttgctgtttatcctaactcccaagagttagcaacaattgctgaaaacaccttcaattttgccaaaagtttaaatgaggatgagataaaaatggcttttttaagctattcaacgcttggcagtggtaagggtgaaatggtggataaagttgttttagcaactaaactatttttagaaaaacaccctgaattgcatcaaagtgtttgtggtgagctccagtttgatgctgcttttgttgaaaaggttaggttacaaaaagcacctcaactaacttgaaaaaatagtgctaatatctatgtttttcctaatttagatgctggtaacattgcttataaaatcgcccaaagacttggagggtatgatgcaattggtcctattgttcttggactttcaagtccagtgaatgatctttcaaggggagctagtgtcagtgacatttttaatgttggaattatcactgccgctcaagcaattaaataa

SEQ ID NO: 27376 - DNA, 1251 bp, Mycoplasma genitalium
gtgctaagctctaatatgcttaatttcaaaacactccaagcaattgattttcaaaacaaaaccgttgttttaagaagtgattttaatgtcccaatgatcaatggggttattagtgatagtgaaagaattttagctggtttggatactattaagttcttagttaaaaagaactgcaagatagtgctactatcacacctttcaaggattaagagtttagaagataaactaaacaacaaaaaatctttaaagccggttgctgaattactccaacaactcttaccaactgtaaaggttcaattttcttgtaaaaacactggtgctgaagttaaacaaaaagtgcaagcattagcattcggtgaaatccttctccttgaaaacactcgctattgtgatgtaaacgataaaggagaaattgttaaattagaaagtaaaaatgatcctgaactagcgaaattctgggctagtttaggggaaatttttgttaatgatgcatttggtactgcccatagaaaacatgcttctaatgcaggaattgcaaagtatgttgcaaaatcctgtattgggtttttaatggaaaaagaactaaagaacctctcttacctaattcaaagcccacaaaaaccctttgttgttgttttgggtggtgcgaaagtatcagataaactaaaggtagttgaaaacttactaaaacttgctgataatatcttaattggcggagggatggtaaatacctttcttaaagcaaaaggcaaagctactgctaattccctagttgaaaaagagttaattgatgttgctaagcaaatcttggataaagatactcataataagattgtgctggcaattgatcaggtaatgggttctgaatttaaagatcaaactggcattactttagatgttagtgacaaaattcaagaacaatatcaatcctatatgtctctagatgttggatctaaaacaattgctttatttgaaagttatttaaaaacagccaaaactatcttttgaaacggtccccttggagtttttgaatttactaactttgctaaaggaacttcaaaaatcggtgagattattgctaaaaataaaactgcttttagcgttattggtggtggggattcagctgcagcagttaagcaaatgcaactatctgatcagtttagttttatctccactggtggtggtgcttctttagcactaattggtggggaagagttagtaggtattagcgatattcaaaaaaattcttaa

SEQ ID NO: 27377 - DNA, 1014 bp, Mycoplasma genitalium
atggcagcaaagaatagaaccattaaggttgcaatcaatggttttggaagaattggaagacttgtttttcgttctcttctcagtaaggcaaatgttgaagttgtagcaattaatgatttgacccaacctgaagttttagcgcacctgttgaaatatgattcagctcatggtgaattgaaaagaaagattactgttaaacaaaacatcttgcaaattgatagaaaaaaggtttatgtttttagtgaaaaagatccccaaaatttaccttgggatgaacatgatattgatgtagtaattgaatcaactggtaggtttgtaagtgaagagggtgcttctctccatttaaaagcaggtgctaaaagagtaattatttccgcacccgctaaagaaaaaactatcaggacagttgtttacaatgttaatcacaaaaccattagtagcgatgataagatcatctcagcagctagctgtactactaactgtttagcaccattagttcatgtacttgaaaagaactttgggattgtttatggaacgatgctaacagttcatgcatatactgcagatcaacgcttacaagatgctcctcataatgacttacgtcgtgctcgtgctgcagctgttaacattgtgccaacaacaacaggagcagctaaagcaattgggcttgttgttccagaagcaaatggcaaacttaatgggatgtcactccgtgttccagtgttaactggttctattgtagagttaagtgttgtacttgaaaaaagtccatctgttgaacaagtaaatcaagccatgaagcgatttgcttccgcttcttttaaatattgtgaagatcctattgtatctagcgatgtggtaagttctgaatatggttcaattttcgattctaaactaaccaatattgttgaagttgatggcatgaaactttataaggtgtatgcatggtatgataatgaatcttcctatgtacaccaactagtgagagtagttagctattgtgctaagctctaa

SEQ ID NO: 27378 - DNA, 1788 bp, Mycoplasma genitalium
atgagtgcagacaatggtttaattattggcattgaccttggaactaccaattcttgtgtttctgtaatggaaggtgggagacctgttgtattagaaaatcctgaaggtaaaagaacaacaccttccattgtttcctataaaaacaatgaaattatagtaggtgatgctgctaaaagacagatggttacaaacccaaataccattgtctccatcaagaggttgatgggtacctcaaataaagtaaaagtccaaaatgctgatggtacaactaaggaattaagtcctgaacaagtttcagcgcaaatccttagttatcttaaggactttgctgaaaaaaagattggtaaaaagatttcaagagcagttattactgttcctgcatactttaatgatgcggaaagaaacgctactaaaaccgcaggtaagattgctggtttaaatgttgaaaggatcattaacgaaccaactgctgctgctttagcttatgggattgataaagcatcaagagagatgaaagtcttggtttatgacttgggtggtggaacttttgatgtatctttacttgacattgcagaaggtacttttgaagtacttgcaactgctggggacaaccgtttgggaggtgatgattgggataacaagatcattgaatatatctcagcctacattgccaaagaacaccagggtttaaacttatcaaaagataagatggcaatgcaacggcttaaagaagcagctgaacgtgctaagattgaactttccgctcaacttgaaacgattatttctctaccatttttaactgttacccaaaaaggtcctgttaacgttgagttaaaactaacccgtgctaagtttgaggagttaacaaaaccactacttgaaagaacaagaaaccctatttcagatgttatcaaggaagctaagattaaacctgaagagattaatgaaattcttttagttggtggttctacaaggatgcctgcagttcaaaagctagttgaatcaatggtaccaggtaaaaaaccaaaccgttctattaatcctgatgaagttgttgctattggcgctgctattcaaggtggggttttacgtggtgatgttaaggatgttttacttttagatgtaactccattaaccctttctattgaaactttaggtggtgtggctactcctttaattaagagaaatacaactatcccagtaagtaaaagtcaaatcttttcaactgctcaagataaccaagaatcagttgatgtggttgtatgtcaaggggaaagaccaatgtctagagataataagtcattaggaagatttaacttaggtggtattcaaccagcacctaaaggtaaaccccaaattgagattacctttagtttggatgccaatgggatcttaaatgttaaagctaaggatttaaccacgcaaaaggaaaacagtattaccattagtgacaacggtaatctttctgaggaggagatccaaaagatgatccgtgatgctgaagctaacaaggaacgggataacatcatccgtgaacgtattgaattacgtaatgaaggggaaggtattgttaataccatcaaagagatattagcaagtcctgatgctaagaatttccctaaagaagaaaaagagaagttagaaaagctaacaggtaacattgatgctgctattaaagctaatgactatgccaaactcaaagtggaaattgaaaactttaagaagtgaagagaagagatggcaaaaaaatataacccaactggtgaacaaggtccacaagcaaaataa

SEQ ID NO: 27379 - DNA, 618 bp, Mycoplasma genitalium
atgaaatatactggtagtattttcaaacgatcaagacgtttaggtttttctttacttgaaaacaacaaagagttttccaaaggaaaaaaacgtaaatctattcccggtcaacatggaaataggtttcgttcctcaactttatcaggttatgcccaacaactccaagaaaaacaaaggatgcaatacatgtatggtattactgataaacaatttcgtaggttatttcgctttgttttaaaacaaaaaggtaacttaacagttaatttatttagagttttagaatcacgtttggataacatagtttacagaatgggttttgcaccaacaagaaagagtgcaagacaaatggtaaaccacggtcatgtgattttaaatgatcaaactgttgacaccccttcaatcatcattaatcccggggataaagtccgtttaaaagcaagaataactaaatccccattagttaaaaattttattgaaaacagtgttatctcatcatttgtggaaaccaacaaaaaggcatttgaaggtacttatataagattcccagagcgtagcgaactacctgctggaataaatgaatcttacgttgttgagtgatacaagcgtttagttaaataa

SEQ ID NO: 27380 - DNA, 3420 bp, Mycoplasma genitalium
atggctaaaaacaagcaatcggtttttgaagaaaaaaactatacccaaaccgaacctgaaaacatttttggtgatctttatgatggtaaatccactgttgaagaagaccctaatattaaggtagcatatgatgctgatggtaatggctattatatagcttttaacaaagaaacaggggtttactatgatccttatggagatactgaatatgatatctcccaactctttgatgaaaatgggaatccgtttgtttttgatgaaaagcaagaagagaatgattatttaaagtatgttggtaaccctgactatggttcttatgatgaaaatggtgagtgggtttgatctggttactttgaaaatgaccagtggatctccactaaagaatctcaaccaactgatgaaaactatggttttgacagtgatttaccaccagaagtaaaacaacctgaatcagttgaagataactatggttttgataacgatttaccaccagaagtaaaacaacctgaatcagttgaagataactatggttttgataacgacctaccaccagaagtaaaacaacctgaatcagttgttgaccagccttcttcagatgattattttgcaaaacaaccaactgatgaaaactatggttttgataacgacctaccaccagaagtaaaacaacctgaatcagttgttgaccaaccttcttcagatgatcattttgcaaaacaacctgaatcaacaactgatagctacagctttgacagtgatttacctcaaccaacccttgaccaaccttctttagatgatcatgttcagtacaactttgatcaccatgaagagctcaaaccagttgctgaagaacaaaataattatcaagttggatttgatcaagttcaagctaatcttgataataatgaggaaatacaaccaactgctgaaaaaaaagtaactactgattttgaaagtaaacaagcccaagtagttgatagttaccaattaccaattgatacagatcaacaagaccaaacaactttttcttcttcatttgaaactcaaccaacagttgagcagtttgatcaagtaaatagcgaagttaacgatcaattcaaacctgaaataactaaggagccagttttagaaagtagtttcaataaacaagatgtagttgaaactagtgacttaaattctgaatctaatctttactctgaaaacaacaaagatgcaactaacaatgattcattaaattctgaattcattcaacttaatagtaatagtgaaactgcatctgatgatgtgcattatgaaagtaaatctgaaccaattcatgactataaatttgggagtgatttatctcaatcaaacagcaataattcgttagagtctgaacctgttaagtttaatagtgaaactgcacctgatgcacactttgaaagtcaatctgaaccagttgatcaagttcaatacgacatttatcaaaatgaagagctaaaaccaactcttgaccagccttcttcagatgattattttgcaaaacaaccaactgatgaaaactatggttttgataacgacctaccaccagaagtaaaacaacctgaatcagttgttgaccagccttcttcagatgatcattttgcaaaacaacctgaatcaacaactgatagctacagctttgacagtgatttacctcaaccaacccttgaccaaccttctttagatgatcatgttcagtacaactttgatcaccatgaagagctcaaaccagttgctgaagaacaaaataattatcaagttggatttgatcaagttcaagctaatcttgataataatgaggaaatacaaccaactgctgaaaaagaagtaactactgattttgaaagtaaacaagcccaagtagttgatagttaccaattaccaattgatacagatcaacaagaccaaacaactttttcttcttcatttgaaactcaaccaacagttgagcagtttgatcaagtaaatagcgaagttaacgatcaattcaaacctgaaataactaaggagccagttttagaaagtagtttcaataaacaagatgtagttgaaactagtaactacactaataatttacagaaatttgatattcagtctgataataagataactatcactaccaaaaaaagttcaccccaaatccctacaactttacctattagttttgtatccaaccgtattgaatataaaccagttgaaactttagctttagataataaagaaagtcagcaagaacaaattaccattaattccataactgaagattccaaaacacttgcaaaaacattatctgtccaattgcaacaaattaatagcttaaataatcaatcaattgttactagtgaatcagtaagactcgataaaaaagatgatcaactaactatcaatactgttaatagcgaagaccaacaacctaaaattgaagtttttgtcaaagcaaaagaacctgttgaagaacactcaattactcaaaataagcaatcggttgaagataaaagtgaacttgataatttcaataaaaaatcagatctttacaagattattagtgaattgaaacgtggtgaattaaaccctacaattaactttgatgcaatctttcaaatgaatgattatcagatgtctgttaaacaatcatttatccatctcaatgattttgttaccaactataagaaccaaattagtgaacgttacttaataattaaaaaggaattacaaagtgaactttcccgtttaattgatcaaaatgagaaccttaacgttcaatttaataacgctaagaatctaacaacacttcaaaaagaagaaatgatcagatcattagctagtgattttgctattgcttacaaaccaagtaatagttatgaacaactgcaaaaatctggagaaattatgcgtcatgttcaacgtgctatcactgaaaatgaaaagaagatagaaagcattcaaggtagtttaaaacaacttaaaactgtttataactcttgttgtgaaactattatgaacaacattaataagcttgataatacgctccgctttgcaaagaaagaaaaagatcctttacttttaagcaattttgatagtgtaacagataatgggttagtagaacctaatcagttaatggatgatttaatagatttttccaacacttttgataacatctccaatgaacagttagatgattttatctatgaaaacatggatcgtaacatcgattttgaatttgaaggttttaacaatgattttgttgacattgatgccaaagtaatggattcaatgagtgcttttagtgttaatgatttggatatagaaacactagttcctgatcgtacttccaatttcagttcattattagatgaagacttatttgaaagcagtggtgattttagccttgattattaa

SEQ ID NO: 27381 - DNA, 864 bp, Mycoplasma genitalium
ttgtttccttactatccgttgagacttttaaagagtttacaactgttagtttgagctagtgttttattagcactaacctttatcttttctatcttttcaattagtgttactaatgtattaagcattagttttctaaggattccctttgcattgttcggatggatctttggtcctatttggggttttatttttggatttttatctgatactattgattggttaacaaagggttatgtgtggttttggatgtttgcattgcaaaagccactctttgcttttcttgctggcatagttaaagggatttatctagttagaaaaaatgccagtaattacaaggttgatttttgggtgttacaaacactattagtaactttttttgttgttagtgtaacactgcttttactttatctaactaataatgagtttcagcaaattggaacaaaaaattttcaaactgctgatcttagtgttaatgttgttgttttacaaatcataactttagttagctttgttattttctttttagtaacagaaggatttttagggtttgtttatgtaaaaaagagaaataaagaacaagcacttttaactatttatagcttggttctaatggttttaatgtcagtagttgtttctatccttttggggacaattgctgccattgagtttattacttttattaataatggcagaccaagtaataactttgttttgtatggggtttatttctttcttttaccaagagtattggtgcaagcgttattattacctatctatgtagctttgttttaccctttaatagggattgtggaaaataatttaaaaaattatttattactatttacgctttcatggaagagttag

SEQ ID NO: 27382 - DNA, 1110 bp, Mycoplasma genitalium
atgcaaacaaagctgttttatttttttgttttactcagttttatcccaggcttctttttagtacaacaagaacagtttgttgcactgtcaatttggatcattttgataacgctttttagtctttggtatgactgaaagttttgtttattgaacttaacaattgttggtttttttattgctttttgttattttgttccagcagtcaagataaatcaaattgttaaaaataactttattcgtacccctttcattaattgaattgatcagaccactaaaggtgagttaaatcagtatttaaaactatttttaattaatgaaaccactaaaaacaatttgtaccaaaatgctttaaaactaaacattgtccatttgtttgttatcagtggttttcacttaagtttcttgtttaatttaatggaacggtttttatgaaaaagatggtacttaaacaaacttagtggttttgctgttttattgatttacctgtttttagtaggatttgccttttcagcactaagagtttttatctcaacactgttaaaacaggtttttaaaaaacagttaccagaagataacttaagtttaactgcacttttaatcattcttattagtaaccatgctttaaataactttggttttaatttttcttttctagcttgttttgtattgttatttgtcaacaaactaaagttattaaaagctttaaaaccgcttgtcagttctagtttaatcttgattgttatcagccccttaagcttgtatttaaattcaagactaaatgcttttagtgtcttgtttaaccttttgtttagcccaattgccttattttatttttgtgttagttgaattattttaccctttattggtgtttttggtcaagctagttttggtatttatctcccacttaaaatgctaagtgaatgatcattaaaagtaacagtttttctacaaatacctaaacctaatctgattttcttttttgtttattatggcttattgggacttttatatactatttttacagtagcttattatgacaataatttatggtcaagatattgggctaattcaccaaaaattaagtcaaatcaaaagcaattctccatataa

SEQ ID NO: 27383 - DNA, 1800 bp, Mycoplasma genitalium
atgaacgataaacagaaagctaaaataaacaaagcctataacaagcttttaaaaaagattaacaaaagatatcctgatgttagtgttgtttatgcccgtgatcataaaaataaggttcatgctctataccaagatcctgaatcaggtaatatcttctctttagaaaaaagaaagcagttagctagtaactatcctttgtttgaattaacttcagataaccctattagctttacaaataacattgttagcttaaatgcttatgatgataagaacaacttggtaactgttcaatatgatcaggataacaacactttctatgaccaaaatggtaatgttttggatgtttctagctatactgatgagaaaaaggtccctttaattaactatttaagcagtactcaaacttctcaagaacaaccaacccaacaagattatcctagtattgatgcaggtcttcctaagatagaagttgatgaccaaccaaaagcagctcaacacactactctagaaactgaaagtgaacctgatgtctttgaattaaatgacagtttaaatcaaccccaacaacctacagaaaacttgggtgatgaccagtttgttgaaaaagaagtgccacctactcaacagctccatcaggatttagtccaccaacaacccgttcaagttgatagtggatctcaaaaccatagttttaataattccccttctttaaaaccaccactagttaataaaccagcaaagttagttcaacctgaagtaaaacatattcctcaagttgaagttcaaccgaaacctcaaatagttgaacccaaaattgaaccaaaaccagaagtgaaacatgtatcacatgttgaaattcaaccaaaaccagaagtgaaacctgttgttgattcagtaccagaagttaaacaacctgaagtaaaacatgtaccacatgttgaagttcaaccaaaacctgttgttgatttaaaacctcaaaggattgaaccaagaattgaatcaaaaccagaagtaataaaacatattcctcaagttgaagttcaaccgaaagctcaaatggttgaaccaagaattgaaccaaaacctgaaacaaaatacatccctcaagtagaatcaactcctcaagttgaagttcaccactgaaaaccagaagtaaaaactgaatatcaaccccaacaaccattgccaacttcaggtttacaaattaaagttgtaccaagatcagcagctttacttcaatcaaaattagacactggttttcaacctagacaagttgaacgcacaactgattcagatatcactgttagtgtctcttcccacgcttctcttctagagaaaattaatgctttaaaccaccaaaggataatgagtgatattgctctaaagagtgataacactataaaaagtagcaatttcagccgtttttatcctgaaaatgagtatgttgcaactaaatacagtgatccactttacagcgataccaatcaaagtttaactagtgatcgtttttctcttgattttgactacacaccaaaatctagagtcaacaattacacaccattaagatcaactaatttccaaaataatgctatttctaactatcgttttagcagaacaccaagtagttattatcccttaacaagaagaccatgaagattaactaatatcagttcataccgttcatcattccattcaccaacaagactatcaagttttagaagaactagtttaccatttagttctagctatgatggacttagacgttatccatcaagatcatattgatctaaggacttttaa

SEQ ID NO: 27384 - DNA, 2805 bp, Mycoplasma genitalium
atgaaattaaaaaaaagatacttgttgctcggttctacactgacagttagtgcagcactaatcctaagtgcttgtgcatcctcacagttaaacaaaggggtgtttttcacctcttcttcagcagatttgttaaagaacaactctgttccattgagcatgtttaacgtttcacccacttcatctttttttggtaatgcttatgcagggttaactaactatgttgctactggtacaaaccgtgatgatggggttaatgttactgaccaaattaaagaaaaattagtgttagaacttgctttatcagttactggctataaaaagacaacacacagtggccttaaaggtagagcacaaaaaaacggttcaacagattcttctgatggatctagtaagaatgattacactaagttcaatgagtgggatgcaataggcacaatttatcgtgatagttcaaagtctattactgaagatcctaactatcacaagataacccaagaagcaaccagatatgaatttaccattaacactagtttgagctgggttgataatgctggtagagaagtcaaacaaaacaaccaaccagttaaactctcctctaaagactttgaaaggggttttgagacctatattctctcttctaacttaggttttaaccggaatggttatttcattgacctaatgggtcttgatgttgaaaaaaccgttggtatggataaaaccaacggttctagtgatggcaatggtaaaggtattgagatcactgatgaaaattatgatgttgaaaactatagaagtgtagatgataacaagtttaatgtttatctaacttctccttttcctttctttctatcaatgatgtcaaaggaattcttctttccaattcctcacacccatcctaaggtaaaagcccttaaactaggtaaagattcaccgcttaaatataaccaaaataacaacagaaagattttagatcaagcaaatactaactttgatggtatctatggagggggtgttaatgcttgaaaagacacttgatcagttggcccttactatgttgagagttttaaccaagcacaaattgtctttaaacgcaaccagatttatgatgcaattatcacccctaatcttcctaaaacaagacaagaaaacgaaaaacctatccctgctatagttagttatttccaaccaggagctactcctgaagtgttctattctagttatatcgctgggggcttatcagcttcagctgttccctattcccaacaacaagatgcaagatcaaggtttaatggtacaggggatctgaggtgattaaaaatccaaaaaactgcgcaaagtgctcaagtaacttattcaggtaaaccttatgttgctaatgacagtactgttcaactaaatgcaaacatcactgagacagaagctaagttcttatataacagtgaatctgaagaagcgttgactatccgtgctggaattaatggtttgatcaactgaaagaacttagcaatcattgatctgcccaactcaggagatgttaactattctactgttccttttgggatctttaaagaaaaaccagcaaatggaactagtagtggtacaaatacagatggaattgagaatgattattattacaagattaacaacaaccaaagacttggtttaatccctgaacaaactggaacttttcaaaaggataagaatgttcttgatactgcaactgttaagttaagttactatagctctacaaaaactaatggtgctcaagtaagaacagcttctactagtggcagcagtagtcaaactagtcaagtttcttcaaaacaagtaagtgttaccaagcaaagttttatcagtgcattaaaaaaagttgggtttactggtaacaatccattacacttcaacattaaactaggaaatgcatcactctcctctaaccaagttgattactataacgctttaaaacaagctttaactgaacttggtaatgataatggtgaaaatttaattatccctgagattatcttaggagatgcacaaggtccaacaagaaacgaatgatacataggtttatcaagtgtacttggtttttcttattggagtcctgattatgatggggttggtacctgacttgatgctgctacacagcttaacagtgagggtattggtgaagtaattacttacaattcaggtagtcatattgtcagaactttattgttagctgcatcccaaaacaatgtctttaatcaaattgaaaataaacttcaaaataacacaacaactaacggaaaagactggtgtagttgcataacaagtgctgatctttttaaagatgatccctatgtcattaagaactttggtactaatggtaataacggtacatccgcttcattagcattcactaaaaaagcattaagcttactgaaatttttagttgataataaggtattgaaagctgataaagttaaagaagcaattaaagatcctgataaatatctatcaaaaagaagcaagatagatgacaacaaaccagcaaatgtatcagatatccacattggttatgaattgaaagatctttatgacaacgctgctcaacttaaccgatttaacagcatttgagctgaacaggacactgataatgctaagttcttaattactgtagtagatagttactttcctgttctaccagtctccgctcctgggttaaatgaaactattccttcgcttttaaaaccatgattttcactccgtaatgccccttcagggattgctacaatgcgtgattcaggttacattgatgagtaa

SEQ ID NO: 27385 - DNA, 162 bp, Mycoplasma genitalium
atggctgttaaaagaagcacacgactaggttgtaatgaatgttctgagattaattatttaacctttaaaaacgtcaagaaaaatccagaaaaactagcacttaataagttttgttcacgttgtcgtaaggtagtattgcacaaagaggtaaaacgtaaataa

SEQ ID NO: 27386 - DNA, 807 bp, Mycoplasma genitalium
atgctaacgagtaataaaaatactctttttaactcaatatttgcctttaaacctaaaaaaagaaaaaacgtttttatttttttacatggatttggaagcgaatatgccagttttagtcgtatttttagcttgtttaaaaagaaaaagtggcctttctttacttttaattttcccggtcatggagacaatgaatcaacagatacagatcaattaaaactaaaccactttgttgatttggtttgtgattttattgttcaaaaaaaactaaataacgtcattttaataggtcatagtatgggaggtgctgtggctgttttagttaacaaagttataccactaaaaattaaggctttaatattagtagctcctatgaatcaaacttctttctcagttaataaaaagcggattttagatactttttttaagcgtaataacagcaaccataaggattttgttgaacatgaagaaaaacgtaaatcacttttgaaaatagctatcaatgcatttaaaaaaagaactacctttaaaacactttacagtgatatggttcaaaacgctaaatatggtaatgactcacttgaaagggcttatgaaatgattggtaataaacctaccttagttattttaggagctaatgatattgtcacgccaaccaaagcttctgtagactatctagctaataaaagtgacaagattatttttaaggttattgatggtgttggtcattcaccacacgactcagcgcctaaacttttttttgattatgtgctagagtttctagataatttaaagaaacaaaggtactaa

SEQ ID NO: 27387 - DNA, 1347 bp, Mycoplasma genitalium
gtgtttactgttgcaataataggtcgtacaaacgttggtaaatcaactttatttaatcgcttaattcaaaagccaatggctattgtttcagatactcctaacacgacaagagataggatctttggaattggtgaatggttaaaaagaaagatagcttttattgacacaggtggattaattgcaaaacaaactcccttgcaacaactaattgcattacaagtacaagcagcacttagtcaagccaaagctattatttttttagtgtcactacaagaacaactaaatagcgatgatttttatgtagctaaggttcttaaaaaaaataaggataaaccagtaatactagtggtaaataaagctgaaaattttaaccctaaaactgctgaagaaacattaaaagattattacagcttagggtttggaagaccagttgttattagtgctgctcatggaattggaattggtgatttaatggatctcttagttaaacaaaatcaattactccctaatgaaaataatgatgatttagcaaaaataaggttttgtgtaattggcaaaccaaatgttggtaaaagctcacttattaatcaacttgtaaaacaaaatcgtgttttagtttcaaatgagagtggtacaactagagatgctattgatgttcctttaaaagttaatggtgaaaaatttcttttgattgatactgctggtattaaaagaaaaggcaaaattaacatgggaattgaaaccgcatcttacatcaaaacaaagctagctattgcccgtagtaacgttatccttttgatggtagatggatcaaaacctattagtgaacaagatgaagtgattggtggattggcacaagctgcacttatccctgttattattcttgtgaataaatgggatctagttttaaaaaacaataacaccacaaatgcatataaaaaaatgctgaaattgcattttaaacacctcgattttgcgcctgttttgtttattagtgttttgaaaaatcagcgcttaaatactatttttgaacaacttaaaattattcaaagccaacttgaaactaaggttgcaacaccacttttaaatgatgttattcagcaagcacaactttacaatcaacctccactttttaaaggcaagcgtttgcagataacttacgcagtacaaaccaaaagtcaaattccccattttgttttattttgcaatgaccctaagtatcttcatttttcttatgcacgttttttagagaataagattagagaaaactttggttttaattctgtacctattagcctttactttaaatcaaaaaacgcacggataagaacaaagccagaagtttaa

SEQ ID NO: 27388 - DNA, 654 bp, Mycoplasma genitalium
atgaattgacaaatagcaattgatggtccaagtagttctggaaagtccagtgttgctaaaaaaatagctgaagaacttgattttttttatttttctagtggaaaaatgtatcgtgcctttgcctatgtaatgcaagtgaatagattaaatattgatctttttttaaaaatcattaatcaaattaactgacgctttgagaaagatgctgtgtattataacaatgctgatattacaacagttattacaacccaatcagttgctaacattgctagtaaaatagctgttgatcctaacattagaaaaattgcagttattaaacaacagaaactagcagaaaataaaaacatagtgatggatggtagagacataggaacagtagttttaaaaaatgctcaattgaagttttttttagatgctaaagttgaaattagagcgcagcgaagattacaagatatgggaatttctctatcaaatgaaaaaaaactaaaggaactaattcaagaattaaagcaacgtgatcaaattgatagttctagaactgcagacccattaaaaaaagcccaggacgctatttatcttgacacttctgaactaagttttgatgcagtagtaaaacaaaccctcaaagaagcaaagaaggtttttaaactttaa

SEQ ID NO: 27389 - DNA, 2514 bp, Mycoplasma genitalium
atgaaagataaatttagttttcaaaaaaactatgatttcaacttagttagtgatgggctttatgaaatttgaaataatgctggtttttttaaacctaaagataaaaacaattcttttacagcaattcttccccctccaaatctaacaggtactcttcatattggtcatgcttttgaggttagtattactgatcaaatcatgcgttttaaaaagatgcagggatttagtattaactgaattcctggctttgatcatgctggcattgctactcaaacgaaatatgaaaaaatagcattaaaagaaaatcaaaaatattttgatgcagatgatgataaaaaatctgaaatgatcatgaattgggcattaaatcaaagcgaaataattaaaaatcaactaaagagtttaggagtttgcttaaattgatctgaaactaaattcacgctttcagaacaagctaataaaattgttaacaattgttttaaaaacctttatgaaaacggttttatttatcaagcatacacgcttgttaattgagatacaaaattgaatactgctatatcaaatattgaagttatcaataaacctgttaatcaacatcttcattatgttgtttataaactagcgaatgatagtaaacaagaactaatagttgcaacaacaagaccagaaactatctttgctgatgtttgtctattggtaaacccaaaagataagcgctatactaatttctgaaataaattagtagttaaccctttaacaggaaaacaaattcctgttgtaacagatagctatgttgacattaaatttggtacaggaatattgaaatgtactcctgcacacgactttaatgactatgaaatcaacactaaatataaatttgattttctaagctgcattgacagtaacggtattctcaatcaaaatgcaagtaaatttcaaggccttagtgttttacaagcaagaaataaaattgttaaatgattagaaaaaaataaattacttgttaaatcaataccattaactagtaatgttggtttttctgaacgcagtggcactgttgtagaacccatgctttcaaaacagtgatttgttgatttaccaaagttaaaagatcacttatatttaaaaaaatatcctgattttattcccaaacgctttaataagcaagtgtcaaattggttgaataaactcaaaccatggtgtatttcaagacagttaatttggggtcataaaattcctgtttgatttgaaaacaatacaggtgaaatagttgttggtgaaaaaccttcaaaaaatttacaaaactacactagatcaaaagatgtacttgatacttgattttcttcttcgctttgacctttaatttgtttgaattgagaacaggatgactcttttcatgaaactgagcttttagttacaggttatgatattctatttttctgagttttaagaatgttatttaactccttttttgaaactaaaaaactgccatttaaaactgttttaatccacggtttagtacgcgatgaacaaaatcgtaagatgtcaaaatcactgaataatggcattgatcctgttgatcttattagaaattatggagcggatgcagtgcgcttatttttgtgttcaaatcacactccaggagatgatctaattttcagcgaacaaaaaataaaaagtgcatgaaattttttaaataaattgtggaatgttactaagtttgttatccaactagaaaatgatcaagaaattagttatgacttggacaaactttcattaagtgaaacttgaatcttagctaaattagataaagtaattcaaaaaataactaagctactagataaattccagttagcattagcaaaccaaattcttgttaaatttgtttgggatgatttttgcaatactttcattgaagcaattaaaaaagaaccaaatcaactaaaaccacagcttttttatactgctaaatcagttttatctaatattgctattttgcttagtatcactgttccttttttatctgagcgtatttatcagcaatttaacaataaaagtgttatgcaagcaacatgacctcttgcaactaaaattaaaattcccaaactttttgatcttgttttagctgctattaatgacttacgcaattacagaaaacagtacatgcttaattcacaacaaaaactagttgttatcttatctggtaaaaatgctgttgatgttaaacaatactttaactttagttgaattgaactgaaaattgaaactaataaaaaagttagttttaaataccaaattgttgatgatacaacccaaagacttaaatctctacagaagcaacaagctttttttgaaagtgaagtaaaacgtagccaagctattgttaaaaataaaagctttctagaaaaagcacccaaagaaaaggtaaaaagtgaatttttaaaattggaagaatatcaaaaaaaacttactgaaaccaaccaattaattgctaaattaactaaagctcattag

SEQ ID NO: 27390 - DNA, 417 bp, Mycoplasma genitalium
atggatattagagcaagaacaaaaattattgatatttattcaaatttaaaatacaaaaaacctctcaaaagttttcaaaaaattttaacaacaagtgatagtgataattgtgaagacttttttaatataggtttaaatattgataaaaataaaattactgcaattggttttgatggtgatggttgtattatctctacaattgcaactgaattaagtattaaagcaattgaaaataaaactattaaccaagcaaaaaaaatattatcagatttaattgcaacttataaagataaaaattcagcaaaccaagttgttgaagaattaaagcttttaattgaaatgaatgtaactgaaaaaaggttacagtgtttgcttttaacaccaagcaacttattgcaatggtttaaaaatttttag

SEQ ID NO: 27391 - DNA, 3816 bp, Mycoplasma genitalium
atggctcatcgttttaagcgctgatcattaattgctttagcatttagtggagtgggtgcaacagcaataattacagcctgttccacaataaacactgctaatctttttcctactctcaatcgatcccaaaaactaattggttttagtgatcaaaatatcataaacccagatgtagttttaaagtctgctttaaatgatggtagtggtgttgattctatcttacgtgttagttttggatcagcattacaaaaatgataccaagcaaatgcagatagaaacatctctaatcgattaaagatatttgaagaaaatgttgaagatgaacatgataacttgatagatgaaaagaaacgtgctgatagagtaaagtgacctattgaagtacaaaaagaatatgatcagttcggtggtaatcaagaaagttgaaaaaaacttaaactctatgatagattaattactgattttcaatctttaatattcaataacattagtgcaaatgttagtttagtgaattcaagtgatacaagcgttgcaacaactaaagaaaacattgaaaaaacagaaaataaacttaagtttattaacagcaatttaaatgatgtaaatggtgatttttttactaatcttcaagcttatttattttcacagtgattaatagaagaaaacccatttttattaaatcaagcttctttcaattaccaatctccaattgctggacttggcagtatttatgatgaaaatgcaattggagcttccaatctaaatctttcttataactttcctgcttttcaagatcctagtgaaagtggtggtcaaacaaactctgcaaaattatttgaagagtttgataaacaattacaaactgctaattctagtggttcatcacaaagttcagctgctactaataccagaaatgatttacttgactttgaaaacaagtatagtgcaagcaaagttttaattagtaaaaataacattctctctgttttaaaaactgttaacttatctgctgcagttattgatcaataccattacttactgaataataaaacagaattaacaacaacaacaacaacaacaacaacaacaacaggtggaactagtagcaatttaaatcctcttgataaatttattaaaagttcaagtgcaacaacagttatgatgaagagtgctatgacaaaaagtcaagaagttacttcagacaataatggttttaatgttaaaagtgaatttttaaaaattaatccctcgctttcttcttctggtagtgataatagtagtaacacgcagtctttttgaaaacaagtacaagctttaaataatagtagtcaaactgcaactatttttgatgcagttagaatggaatcaaattcatctcaagcacaagtagtaacaagtaatttattagttagtctaagttcaaagacaactcaaaaacagcaacagaaacctgtttatgttagaggtgatgatgccatatatgcatttcatattgatggaggtaattattttttagagaattcatcacctaacaaacgtaattttgaaaaacaagcagaagttttattaatgcgatttttacaaggacaaactaataatttctctaaagataatgtcagtttttcagttgatttatttggttctaacagcgaatttagaagttgagcaaatagaaatacaacactaaaactttacacagctttaacaactatgttagaaaatggaacttctaataataacggtcaaaaagatgtatgtgatttagctaaaaaacttttaaaaaacaataccaatttatctgaaactattaaaaaacaacaagattttaataattcactttcacaaataaaatcaagttatgagtcttatattaaagctgctaataaacttaataactttagaacagatttagctaatatagaaaaactagaacaagcaattgttgatcgtgctaacaactacattaaacttcaaaaggaagctaaagaaagttcaattggttggggtcaacctcttccatataaaagagcaaatgatggtagttatccttcattagcaaaattttttaataacaactctgatcaaagtagtgctcaaactttaactttgaaaaccactgctgcagctattacttctgataatgaaccaactcgtgaaaaaaataatcaaactttaaagactttaacaactgaagtagaaaataaagccaaagaattagttgaaaaatgaaaagctacaacttattcttctagtcaatattcagagattattaccctaaaatcatcacaattaaatgacttggatcttgatcttatattatcacttttaactgattcaggaattagaacaggtactgttgcaaacatctttaaaaattggtactttaaaaacactaattcattcactaataattttgatacttcaaataaagaattaaaaggtgaattttctgattttaatgatcttgttaaacaggcactttatatccgttcttgacaaaatttaactagtaaagaacgctttggttactataaggatttgggtagtgtaaattcaacttcaactatgttgcaaatgcaaaataaagctgcccaatctcatacttctagtagtgttaatcaaaccctattagatttagcaaagaaagcatttgaaaaggaattggaagatcctaatcaggatgctgagtacaaatacatgcgctttttgcaagcgttaatgtgacttgttaaaaatggtgctcaaaactataagaatcttttacaacaagcaattccaattggcactagagcatttgtttcatgaacagtaggatatgataaaaaccctagcgctactgttagtcaaaaaacaaaatccagtacttcatcagctaatgaaaacccttttaataggtttttacaaaatcctaactatactcaaggttctgaaataaactgattcaatgataaacaaacaccaattcaacccgattcattgcttgaaagtgaaaacacttatagatttactgatgaaccgtttaataattctgtagctttatctaataaatcacaaggatcaagtgataaaaaatatttttatggatttaatggtttaacaattaattccaatcaaagtatttcaacagctagtgctggtttaacacaacagctttttaataattacggacagttaattacagcaactgataaagcaggcgctttaagtcaatataaggataagtttaccttgtgaagcttgattaataaaaccagttctgatgctgaacttaatgcttttggtgagttattacatcgctcagttaatgttgatacaaataatttaagtcgctttaactctagaggtgaacctttaataagttttgataataaaaaaaagtttttattaaatgtagttgatagactagatgatctttattttcataaatttgaaggttatgttggtttatctaaagctgcaaatacagatggttccaatacagaaggatataaaactgtgcaaacagttccattaacaaatgactctagtatccagactcttagttatgttattcagataacaaatgatgatgtaaataagatttctagtaattgaaaaaataataaagctaattcattaggtttaaagaaagagatctttatgtctttacttattgaacaagctttagatgaaggcactcaagagttggcatttttagatttaattcgtgaaaatcaaaagcaacaccaaagagaacatcaacagattttagttggtgataaacgcttatatgatatcctaggacaaacgttagctattaatgctaaaaatttttaa

SEQ ID NO: 27392 - DNA, 1023 bp, Mycoplasma genitalium
atggctcaaaaagaaataattaataagaaaaatactcaaaaaaatagtagttttattgaaagtaataatttgacaagttttgatttttttgatgcaaagaaaaacagtgaaattgaaacaatttcaactggaagtttaaatttagatgaagcattagggtctggtggtctacctttaggtaggatagtagaactatatggaaatgaatcatctggaaaaacaactattgcactaaatgcagtcgctagttttcagaaagcaggtaaaacagcatgttatattgatgctgaaggtgcacttgatttagcatatgctaaatcaattggtattgatctaaataaacttttgattgctcatcctaggcatggtgaaaacgcttttgctcttatcgaatcattaattaaaacaaacaagatatctttaattgttattgactctgtagcagcgttaattcctaaacaagagttagaaggcacaattgaagaacaaactattggcttgcatgcaagaatgatgtcaaaaggtttgcgaagaatacaatcgatattaccagattctaaaacttgtgttttattcattaatcagttacgcgaaaaaccaggagtgatgtttggaaataacgaagttacaacaggaggaaaagctctaagattttatagttcattaagaatggaagctaagcgtgttgaattacttaaggataaattcaacaattatgttggcataaaaacaaaagtaatggtatctaaaaataagattgctaaaccttttggtgttgctatattagaaatcatgtttaaccgtggttttgtacatgaacatgaagttattgacttagcacttaaatttaatgttgttgtaagagctggaaattcttattcttttaacaatgaaagcattgctgttggtaaagaaaaattattaaatgttttatcagaaaagccagcattatttgaacaaataaaagaactaactgttcaacaattggctaataaaaattcatttcaacaaacagctagctaa

SEQ ID NO: 27393 - DNA, 3879 bp, Mycoplasma genitalium
atgacaacaacaagacgtaataaaagaaataacaagctttataaaaacattaaagcaattaaactttccatcgcttccaatgacaccattttgaactgatctgaaggggaagttacaaaagctgaaaccattaactataaatcattaaaaccagaacctggaggcttgtttgatgaagcaatctttggacctgttaaggactatgaatgtgcttgtggcaagttcaaaaagattaaataccgtggtgtgaggtgtgatcgctgtggggtgtgagttactgaatctattgtacgtagagaaaggatgggacatattgcacttgtgagtcctgtagctcacatttggatgtcaaaagaattaccatctccttccaaaatatcattagttttaaacatctcttacaaagaggttgaacaggttttgtactttgttaactacatagtacttgatacaggtaagatcaaagatgataaaatcatgccttttaagttcaaagaagttttggacttaactggtaagggttcactttcaacacgacaaaaaatgcgtcgtgtgataggttatatcttcagaaatctcattaaaagtaagagtagtgaagattaccgtaagggaaaaatcttttatgaaagtttaaaaaacagctctctccccttttctctaaatgatgcttttaattacattaagaagtacactggttttagggttggaataggggctgaagcaattttggaattgcttaataaaatcgatcttaacttggaatttagcaggttaaatgatgctttaagaaaagccaagaaagatagtgttgaagatgctaaagttaagaagatcttaagacaactggaaactattagttggtttagaaattctaagcttcatcctaaaaacatgatcttacatactgttccagttatcccccctgatatcagacctattatccaacttgatggtgctaagtttaccaccagtgacatcaacaatttttaccgcagggtaatcattagaaatgaccgattaagaaggattttggaagatggtactgtaccttctattgttgttaacaatgaaaaaagacttttacaagagtctgttgatgctttatttgataactcttcacgtcataaaccatcactttccaaagacaaacggtcattgaaatctttaacagatcgtttaaaaggaaaacaaggtttatttagacacaacttacttggtaaaagagttgattattcaggtagaagtgtaattgtggttggccctgaattgaagatgtatgaagttgggatcccagcactaatgatcttaaagctgtttaaaccctttattatccatggattgatcaataagtttgatgaaaatggtaatgagattagaccaattgccgcttccatcagacaagctgaagatatgattaaaaaccaggatgatcttatctggggaatagtttatgatgttatcaaagatcgtcccgttttactaaatcgtgctccaaccctacataggttagggatccaagcatttgaaccaagaattgttgatggtaaagcaattagattacacccattagtaactactgcatttaatgctgattttgatggtgatcagatggcagttcatgttcctttaagtgagaatgcagttaatgaagcaagagctgttctgcttgcatcaaaacatatcttaggtttgaaagatggaagacctattgtaactcctactcaggacatggttttaggtaactattatctaaccacagagagaaaaggacagttgggagaggggattatcttcagcacagtttatgaagcacgtgctgcttatgaaagtcaaaaggttcatttacatgctattgtagggataagtactaaagcatttcccaacaagaagtttgcatgccaaggaactttaataacaacagttggtaagattatctttaatgatgttttaggcaataatgttccttatattaatgacggggaatttgatgaaaatgcatgtcccgaaaagttcattgtgaaacagggagaagatgtaagacaatcaattttaaagcatcaaattatccctgcattttccaaaaaggttatttccaagttaatcgatctactctatcttttattggaatttaaagaccttcctaaaacacttgataatatcaaagcacttggctttaagtactctactttttcttcaactactgtttcagtatttgatatccctaagtacaccaataaacaaaattactttgatagtgctgatcaacaggtgctgaaatacaaacagttttataacaagggtttgttaaccgatgatgaacgttataaacgcgttgtgaagttatgaaacaatgtgaaagaaaaagtatctgatgagatccaaaacttaattaaacaagaacagtaccgtgataattccattgtggtaatggctgattcaggtgctagaggtaacatttctaactttacccagttatttgggatgcgaggcttaatgtctaaaagctttaactatgaaagaaataaccaatctaagatcattaaagatacgatagaagttcctattaaacactccttttttgaaggtttgaccattaatgaatacttcaactcttcttatggagcgagaaaagggatgacagatactgcaatgaaaacagcaaagtctggttatatgacaagaaagctagtagatgctactcatgaattaattattaaccatgatgattgtggaacaagaaaaggaattgttgttgaagcaattgttgaaaccaaaaccaaatccttgattgaatcattatttgacaggattgttaatcgctactcaattactcctatagttgatcctgaaacacaaaaaactattgtagaagctaacagtcttattacaacgcaattagctaaacagatttgtgcaacatctattaaagaagttttagttagatctgttatctattgtgaaagggaaaatggtatctgtcaatactgctttggcattgacttgtcaactggtaagttggtggaattgggaactgctgttggggtgattgctgctcaatcaattggtgaacctgggacccaattgacaatgcgtactttccatactgggggagtttcaactgaaaacaacttagcacaaggctttgaacgtttaaaacagatctttgaagtagttactcctaaagattttgaaaaagcagttatctctgaagtgaaaggaacagttaaatcaattactactgttcaaaacgctcaggaagtagtgattaaatcaaacgttgatgagaggatttatactatccctttcagtgctcaaatacgtgttcatgttggtgatcaagtttcaccaggttctaagattacagaaggttctgttgatattaaacaacttttgcgaattgcaggtatccaaagggtaagacaatacatgattgtagagatccaaaaagtgtataggattcaagggatagatattgctgataagtatgtagaaattattatcagacaactaactaatttgttgcaagtaacagatgcaggtaacagcaatttatttgttggtcagttagtgcatagccattatctcaatgaactaaataagagcttacttttagctggaaagatgcctgttattgcaattaatcaggtgtttggaattgatgaagcggcaagtaaatctaactcctttttaagtgctgcatccttccaagataccaaaaaaatcctaactgatgctgctgttaagaaccaagtagactatcttttaggtttaaaagagaatgttattattggtggaaaaattccagcaggaacaggatttttaactgatgaagagttaactttcttaggtagcaaaacagttgctgaagagtattaa

SEQ ID NO: 27394 - DNA, 4173 bp, Mycoplasma genitalium
atgtcacaaaaatctaatttctttcaaaaacgttattcccctacagctaccagaaggtattatggcaaaattgagaccaattttatccaaccaaatttagctgatattcagattaaaagctaccaaaaattcttagatcatgatcttgaaaaattaattgcctcatattttccaatcaaatcccctaatgatcgctacactatcaattttaggggattacacagaactgaaccagaacgtgatgaagcacaatcacgtgctcaatctaaaacttatgaagttggtatttatgctgatcttgaattagttgataatgataaaggaacagttaaaaaagcacggaaatcaaagaaaaatattgctagcaatacaaatggtgtatttttagctagcatgcctttaataacccatgatggggtttttattatcaatgggatagaaaagtttgttatttcccaaataacccgttctccagggatatacatgctaacaaaatcccaactaaaactatccaactcccgtaaaagagtacaggaaggttatgtttgtgaggttttacctgctaatggttcagtgatgcttatatacatctccaataaaaaaaagattgaagatgcttttgtacaaattcttttaagagatgcggtaagagaaggtgctaagattttccctattacaacacttttaaaagcgtttggtttaaataatcgtgagatccttaaaatctttaaaaacaatgaatttatcaaacgttcattggaagcggaaatttacaatgctaaggattttttaagcaatgttgatcctgaaatcaaaaaccttttaaaagaatttagagatggtaaaactgatttaagaagaaaagggatcgcttctgatcagaaattaagatcacttgttaatgaatatgtaacgcttgagaaacaatataatgcgctaaaacaaacaagtccaaatgattctagtttaactgcacttgaactggaaatggaaaacaaaatggatagtgttattactgaaagagctgctaaacacattgtcaatgaactttctatttcactgcgtgatattgaaaacactgaagagtgtcatgaagtgagtttccatgcacttttatgtgcgcgtttttttagaaacaagaggtacaacctctctaatgcagggagatacaaagtatctagaaagttacgtttaacagaacgtatttatcaaaaaactctggcatgtgatttgttcttaaaagatggcaagctacttttaaaaaaaggtactttacttttaaaagaagagattgacaaaatcaaacaagctgctaagaacaatgaaattagttttgttaataaaatgcaacttacaactgatggtaaggctgttgatttagcaaaagaatcactcttttatgaaacgatagatgtatatatcactaatgataatcttagtgtttcagtaccagttatagggatccataacgaaaatgatctgaacaaagcaatgactctcagtgatttcatcgcttcaattagttatgtgattaatttaccttatggaattggtaaatatgatgatattgatcaccttggtaataagcgggttaagttaattaatgaattaattactgctaaattagaaagcggcttcactagaatggagcgctttttaaaagaaaagttaactattgctgatggagttaaccgtggccagcaaattaatgaagagggtcaggttattgaacaaggtgaaaaaaaggaattaactattaaatctttaatcaactcaaaaccaattcaaattgtgattaaagacttcttcaatacccaccaattaacccaatttttagaccaccaaaaccctttatcagaattgagtaataaaagaaggatttcagcaatgggacctgggggaatatcaagagaggaccctaatttagatatccgtgatgtgcattattctcagtacggtagaatttgccctattgaaacacctgaagggatgaacatagggttgatcatgtctttagctagctttgctaagattgatgaaaacggatttttaatggcaccttatcgcaaaatcaaagctggggtaattactgatgaggtggaatatttaactgcgcttagagaagatgaacatattattgctgagatctcttcacttgtcaatattagtaacgataacaagatcttagataaggaaattattggtaggtatcgatctatgcaaggactttatgatcctttaaagattgattacattgatgtagcaccacaccaagttgtttccattggttcttctttaatcccctttttggaaaatgatgattcagctagagcattaatgggaaccaacatgcaacgtcaggcctatcctttaataaagccatatgctcctgcagtaggtactggtcaagaacacaaaattgctagtgattcaggtttaacaatgtcctctccttgctcaggtgttgttagttatgttgataacagtaagattattattacaagtgatagttctaaaaaagagacagttaacctagttaaatttgaacgttccaaccaaaatacttgttataaccacaaaccaattgttgaaataggccaaagggttaataaggatgaaatcattgttgatggccctgctgttaataagagtgagttggcattaggacagaatgttttagttgcttttacaacttgaaatggttataactatgaagatgcaattgtcatttcagaacgattagttaaggaagatattctcacttcattaaccattaatgagtatgttgctcaatgtttgtctactaaaaatggtgatgaacaaattacccgtgatatccctaatgttagtgatgcaaacaaacgctatcttgatgagaatggcatcattatggtgggtgctgaagttaaagaaggggatgttttggttggtaaagtttcccctaaaggtcaagtcgaagtctctcctgaagaaaagctatttaaagccatcttccctgaaagtgttcaaaacgtgagagactcttcacttaaagtttcccatggtggggatggtattgtttcagctgtaaaacgtttttcaattgctaatggtgatgaacttaatgatggtgtgattgaaatgatcaaggtttatgtggttcaaaaacgtaagattcaaattggtgataaattagctggtagacacggaaataaaggagttatttctaaagtggtgcctattgaagatatgccccatttagaagatggaaccccagttgatattctgctcaacccccttggtgttcctagtcggatgaacataggacaaatttttgaaacccacttgggttatgcagcacacaagctagcagttcgttctttaattagtagttgttttgatcaaaataaagctaaggagtttgccattgaaatcaatcaacctcaagcaagggttgaaagattaattaaaggtttaaaaaaccaaatcaatgatcgcaatattaaaagtgaaaaagaagcacttgaaaaactcgataacagtgacattagtttagttttgaaagagatagggatgtcttttgatgatcttatttacaaaattgcaacccctattttccaaggagtgaacttcttagatctccaagatgttatgcaagaagcaggattagatccccaaaaaaatcagggtaagtttaaactcattgatggtaggagtggaatgccatttgaaagacctatttcacttggaattatgtacatgatgaagctgaatcacatggttgatgataagatccatgctcgtgctgttggcccttattctaagatcactcaacaaccattaggtggtaaatcgcaaaatggtggacagcggtttggtgagatggaagtgtgagcattagaagcttatggagctgcttataacttgcaagaacttttaaccattaaatctgatgatgtacaaggaagaaatagggcttatgctgctattgttaaaggtgcagctttcccagagcctggtatccctgaatcatttaaattattgacaaaagaattacagggcttggctttatctgtttcatttatctatgatgacaacacccaacaagactccaataatgtttccatcttgcaaagtgatggggaacaagatgaatttttcaatgattttgaatttgacactgagggttattag

SEQ ID NO: 27395 - DNA, 2688 bp, Mycoplasma genitalium
atggacttaaaaaagacattgttaatgcctaaaacatcctttgcgatgcaggcaaatttatctactagtgaaaagaattttcatgatttttgaaaagataaaaaagtctttcaaaaattaaaaaaacagaataaaggaaaacagataaaaatactgcatgatggaccaccttatgcaaatggtagtattcatgtgggacatgctcttaacaagattttaaaagacttcattttacgtagttggttatatgaaggatatgatgttgtttttattcctggttgggattgtcatggactaccaatagaacatgcagttagtaagaaaaaccctagtagttatagcaatctttcaactgttgaaaaaagaaaattatgtcatcagtttgcactttcacaaattgcagttcaaaaagaacaatttcaaagactgggacttttaaatgattttcaaaactgttattacacaatagatgagagttttcaatttaaggaacttgaactatttttacaagcaattaaaaaagggctcatttttcaagatttaaaaccaacttattgatcaccaatttcaagaacttcacttgctgaagcggaaattgaatataaagaagttaattcaattgcactttatttaacttttaaagtttctaaaagtgattttttagatgaaaatgctaatttattagtttgaacaacaactccttgaacactaccaactaatcaagcaattgccattcatcctgattttgattatcttctttttgaatataaccaacaaaaatttgttatcttggaaaaattatttgaagtttttacaaataagttaaattgaacaaatgcaattaaactaaaaaaattcaagggttcaaatttaaaaaattcaagctattctcattgtttttataacaaggttttaccagttctaatgggaatacatgttgttgataatgagggaacaggtattgttcacagctcccctgcatttggaattgatgatttttatctttgtcaaaaaaacaagattaaagaagttttgatttctattgatgagaaaggtgtatttaataacttacttaatgataaagaacttgagaattgtttttatcttaaagcaaatgatctaattattaatcgtttaaaacaaaacaatagctttattttttctgaagttatttcccaccgcgaaccacatgattgacgctcaaaaactccagttatataccgtgcttccaaacaattattcattaaaactaaatcaataaaaaagcagttaaaaaaacaaattaatcaagttaattttttaaattcaaaaaatcaattgagattaaaagagatgcttttacaacgtgatgaatgatgtatctcacgtcaaagagtatggggcttgcctataccaattgtttatgcaaataacaaaccattgttagatttttcaacaattcaatacacaattaaacaattgaaaaagcatggtattgatagttgatttgaaaaagatgtaacttgttttttaaaacctgataaaaccaaaaaatgagttaagtatcacaaggagattgatacattagatgtttgatttgactcaggttcttcctataatgttttggaaataaataaatatggttcaatagctgatctttatattgaaggttctgatcaatatcggggttggttcaactcttcttcaaattgcggaattattcaaaatgatttaatcccttttaaatcacttgtttcacatggttttacacttgatgaaaatggcaataaaatgtcaaagtcattaggaaacatagttgatcctttaaaaatttgtgatcaatatggagcggatatattaaggttgtgagttgctaatactgattgacaaattgataacaaaataggtgttaatattcttaaacaagttgctgaacaataccgcagaattagaaatagtttactacgttttattttgggtaatattaatggatttaactttacatcaatggatgattataagttttcactagaagacaaaatagttatccataaaactaattcactagtagaacaaattgagaaatttttagagaaatataattttttaggttgcctaaaagtgattaataagtttgttttatgactatcaagctgatactttgaaataattaaagacaccttatattgtgatgctaaaaataatcctaatcgtttagctaaacaagctgttttaaactatatttttacacaactaatcagttttttaaatatctttattccccacactgcagaagatgcttgaaaaaactattcattcaataaaaaaccaataagtgtgaacctctttacaaaaccgactgtttttaaagttgctaactctaagaatttaggaaatatctataaaacttttactagtattaaaaatgctgctttcaaagaaattgaaaagctaagaaaagaagggttgatttctaaaaataatcaaattgaattaaccgttggaattaataaaaaaatacccaaaaaattaaaggataatctcgcactttgacttaatgtaaacagtgttaatttaacaaataatgaaaatgaaattaaagttaaaaaaactaaaaaaacaatgtgtgaaagatgctgaaattttcaaacaatcattaagcaaaaattagatcataatttgtgctcacgttgttttaaagtgtgttaa

SEQ ID NO: 27396 - DNA, 501 bp, Mycoplasma genitalium
atgtataaatcagtaataaacatagttttattttgtccagaaattcctaataacactggcaacatcgtacgtagttgcactgcttttaaagctaatctacacttaattaaaccttatggctttttcttaaatgataaaaggatggttagagctggtttaaattgttgagataaaattcaattatttgaacacaaatcatgagaacatttcttacaagcaaccactgaaaataaaactatttggcttttaactaaaagtggtgataaaactcctgatcaaatttgcatgacaaataaattaccaaacgaactttactttgtttttggtcaggaaacaaagggattacctaaaacaatcatggataactttaaacaaaaccaaattagaattcccatttgaaatagtgttagaagtattaatcttgctaatgcagttgtctgtattttgtatgaatattcaaagcaaaatcaatactctaatttagataaacagtgcgcttaa

SEQ ID NO: 27397 - DNA, 2145 bp, Mycoplasma genitalium
atgaatattaatttcacacctgctggtgaaaatcgtaattttttgcaagaaattggtcgtaatattaacgatgaagtattaaaaaataaggtcgatcctattattggaagagataacgaaattcgtcgtttaattgagatattaagtcgtaaaagcaaaaacaatcctgttttaattggtgaacctggagttggtaaaaccgcaatagtagaaggttttgttagaagagttgttagtaatgatgtacctttaaatttaagggatgtagaaatttatgaactatctctttctggattaattgctggcactaaattccaaggtgaatttgaaaaaagaattaataccattcttaagcaagtaaaagaatcaaatggcaggattattctttttattgatgaaattcaccaaatagttggattaggacgtaattctagcagtggtgcaatggatattgccaatatattaaagccgatgctagctcgaggagaaataaaagtaattggcgctactactctaaaagaataccgggaatacattgaaaaagatggcgctttagaacgtagatttcaaaaaattcttattaacgagcctagtagtcaagaggcactaacaattatgcgtggtttaaaaacacgttgagaactctttcataacatcactatttttgatagtgctttagtagctgctgttgaaatgtcaactcgttatattaatgaacgtaatttacctgataaagccattgatcttattgatgaggctgctgctaagatcaaaacagaaatgtcatctgaaccagttgcaatagatagtcttaaacgtgaaataatcaatcttgagacagagtatgcagctcttaaacaagataaggaaaatgataacaaacaatcaaagaaagaatatttagagaaactaaaaaaacaattagatgctcttaaacaaaagcgtgattcacttataaatgaatgaaaaaaggaaaaggctgattttgaaaacattaataagctcaaaaaagagattgaagaatttcaaaccaaactagagacataccaaagtgaaggaaattatgaaagtgcatctaaaattctgtactctgatatcccaagacttaaaaaagaactggaaagtgcacaacaaaaatatgcaacttctaagcacgatttatttaaaactgaagtttctgaaaatgaaattgctgaagttatttcacaaacaacaggaattccacttaaaaaactattagaaagtgaaaaggataaacttttgcacttaggtgatgaaatcaaaaaaagagttaaaggacaagatgaagccatcgatgctgttgttaacactgtaattagaggtagagtaaatataaatgacccaaacaaacctattggttctttcatctttttaggttctactggtgttggtaaaactgaacttgccaaatcattagcagaagttctttttgacaatgaaaaagctctgattcgttttgatatgagtgaatatatggaaaaacattcagtagctaaattaattggtgcacccccagggtacataggttatgaacaatcaggtttgctaactgaagcggttagaagaaaaccttatagcgtcttgttatttgatgaaattgaaaaggcacatcctgatgtaactaatgttttattacaagttttagatgatggtactttaaaagattcacaaggaagggttgttaatttcaaaaatactttgataattatgacttctaacctaggttcaaattttcttttagaaggaaaaaaagatttggccattcaaagtctaaagaaacatttccgtcctgaatttataaatcgtattgatgagatagtatttttcaatgttcttgagaaagatacagttttatcgataatcaacagcttgttggcacaactttcaaaacgcttgaataaacaaaatttattttttaattttgattcaaatctaacagagtttatctataaaagtagttttgatcaacagtttggtgcaagaccaattaagcgctttattgatcatagtgttgcaactttaatagctaaatatatccttcagggaaagataaaaaaaggtgttggatacaacattgcagttgttaaagacaatattaccattacacaaaataataagtcttaa

SEQ ID NO: 27398 - DNA, 843 bp, Mycoplasma genitalium
atggatttaaaaaaagcggttgcttttctttgtgaaaaacttcaagttgtagaaacagatattttcaagatagagcaaattcattctggttttactaatttttcttttttttgtgaattgaaagatcatagtaaatttcaaataagactttcaagaaaagatgttattttagacagaagaaatgaacaaattattttgcaactagtagaaccttttttttcaaacccatttgtttattttgatgtaacaacaggtaatgctataaaaaggtggatagaaggcactcaacctaaaagagcaactgatctatttttatgcagattggttgaatctttaaaaaaagttcattcagttgactgaaaaccatttgctaatgaacttttaatatttgatcctttggtttattttgaaaaaactaagctttccgctttttataaacggttatatcttaatttaactaagaagcatattgacataccaaaaactctctgtcatcatgatgctacttttgataatttggtttgaacacctaaaaagcaagtaatccttattgattttgaatgatcttgtgttgataatccttattatgaaatagctaatattattcgtgaagaactaaccatagaaacagcaaataaacttattgatatttatggtggacttaagcgtaagcttgtttttgaaacagttatttatgttttattatttgcttttcaatgaactgagattatgccccaaacagaagcaattttaaactatcgaaaatgagttgaaaaacgattagaatactttttaaaagcattatttccctcaatttgaaaacaagcacaaaaaaatagttaa

SEQ ID NO: 27399 - DNA, 489 bp, Mycoplasma genitalium
atggtagatagtaagaaaaataaaaaacagcaggttacggatttttctaatttactctctcaaagtaaaggatttgttatttttgactattcaggaatgtctgctgttgatgcaactttaatgagaaaaaagttgtttaataagggtagtaagataaaaattgttaaaaacaatatcttaagacgtgctttaaaaactagtaattttgaaggtgttgatgaatcggtcatcaaaggaaaaattgcagttgctgttggtattaacgagatcttagaaaccttaaaagttgttgatagtgtagttaaagaaaaagagttaatgaaatttgtttgtggtcattttgataaccgtatttttaatagtgatgacttacaaaaaatagcaaaactccctggtagaaatgaactttatggaatgtttctttcagttctacaagcaccattacgaaaatttctctatgctcttcaggcagtaaggaatgctaagtaa

SEQ ID NO: 27400 - DNA, 369 bp, Mycoplasma genitalium
atgggaaaactagataaaaaacaattaattgaatctctaaaagagatgactatagttgaaattgatgaaataatcaaggctgttgaagaagcatttggtgtaactgcaactccaatagtagctgctggcgcagctggtgctacacaagaagctgctagcgaagttagtgtaaaggtaacaggatatgctgataatgctaagttagctgttttaaaactttatcgtgaaattactggagttggtttaatggaagctaaaactgcagttgaaaaattaccttgcgttgtaaaacaagatattaaaccagaagaagcagaagaacttaaaaagcgttttgttgaagttggtgcaactgttgaagttaaataa

SEQ ID NO: 27401 - DNA, 267 bp, Mycoplasma genitalium
atggctaatattaaatctaacgaaaaacgattacgtcaagacattaagagaaatttaaataataaaggacaaaaaactaaactaaaaactaatgttaaaaaatttaataaagagattaatttagataatctcagttctgtttattctcaagcagatcgtttagccagaaaagggattatttctttaaacagagctaagcgtttaaaatcaaaaaatgctgttattttgcataaaagtaatacaaattcaactgcaaaaaaacaataa

SEQ ID NO: 27402 - DNA, 1695 bp, Mycoplasma genitalium
atgcttgcaggagttcttttattacaaatatggttaaaatgcaaatatgctaatgttcagtttggtgaacatggttttaatggagatgaattttatttagatttttatataaatgagaatttttctacaaaacagtttgcaaaaatagaatctgatttaaactctctttctagtaaactagaagggatttctcaaaaatttgtttctttagatgaagcattaagtttttttgaaaatgatcagtttacaaaaaacttattaaaaaaaagcaacttaaacaaatttaaaatcaccttttttgaaaataaacatttttgaatagaagatttaactttaacttttattaaaaaaagttttattaagctattaaatgtaagcgtaaattattttttgggagatccttcacaattacaacttcagaggattaatggcatttttgctcaatcaaaaaaagaattagaacaattaataaaagaaaatgaagaacgcttgaagaaggatcacagatctttaggtaaacaattagagttatttagctttgacccactgatcggtgcaggtcttcctatttgattagcaaagggtacaacactaaggaatataatcggtaattttgtgcatcaccagcaactattgtttggttttaatactgtttgttctcctgtattagctaacatagagctttttaaaattagcggccactatcagcactataaggaagatatgtttcctgctattaaacttgatagtcaagcaatgatgcttcgtcctatgacatgtcctcatcactgtctgattttcaaacaaaaacgatattcatataaaaaaatgccacagcgcttttcagaagattctattttgcatcgttttgaagcctctggaggattaataggattagaaagagtgaggtgcatgactttacttgataatcacattttttgtcgtgcagatcaaattaaaagtgagattaaaaacgcatttaatttaattcaaaaagttaataaaaaatttggatttatatttgataggatagatctttctctacatgatcctaaaaatcaatcaaaatttattgataatcctggtttatgaagagaatctgaaagccaaatggagaatgttttaaaagatttaaatatccaatatcaaaaagagataggagctgctgctttttatggaccaaaaattgattttcagttcaaaacaatctttaaaaaaatgattactattgccaccattcaactagattttttactaccagaaaaatttgatctaacttatatagataaaaaaaatacactaaaaaaaccagttattatccatgttggaattattggaacttatgaaaggtttattgctgctttacttgaaaaaacaagtggtaattttcctttatggttagcacctgttcaagccgtaattattcctgttaatatccaaaagcatttaaaggcagcaaaaaaactttataacaaattgctaaaagaaaacatccgtgtaaatttagatgataatcaagatcgcttagctaaaaaagttagacaagcaatcattgaaaaaattcctttacaacttattgttggagataaagaaatagagaatttagagaagttgacatgccgtggttttaaaggtgaaaaaatcaccagaattagctttaataattttgttaaaagagttagaagagatggatag

SEQ ID NO: 27403 - DNA, 1614 bp, Mycoplasma genitalium
atgttttttatcatcaatgatttaaaagaatgcattagcgctttaaagcttaaatttgatgaccaaaaggaacttgttaaactagttaaaaataatagttttaatggtttttcttcaactattattttccaactaaaaagtgaaaatcataaaaaaattgcagatagtattgttgagtgatttttaaaaaataaaaaggataactaccaaaatgtttttattgctaacaataattttataaactttcaaattagctatcaaaagtacttagaatacttgataaaaacaccttgctttactaagaaaaatataaagattttaattgaatctgtatcagcaaatcctaccggaaggatccatttaggtcatgtgagaatagctttttttggtgatgttttaaacaatttagccaagctgttgggttatacaacagtctgtgaatattgggtaaatgattatggacaacaagcacgagtttttagctttagtgtttatcaaagtttgcagttaaaaaaaaatattgctatccagcaacatcctgatggatatagtggaatagtaatagataaaattgctagtgaaattgaaaattttccagttgataatttaaattttgaagagttttgtaaaacatcattcttagatcattttttagttaattgcacccaaaaagttttgtctttaattaaaagtgatttgaataaaatccatgtttttattgatagttgaaaatttgaaagcgaaattgttaaaaaaacaaattttaatgatcttttagaacaacttaaaccaaatagttatttttatcaagataatgcactctgactaaaaactacgctttatggagatgataaggatagagttttaattagaagtgataaaagagcttcttattttggaactgatgttgcttatcacttagaaaaattacaacgtggctttgacattctatttaatgtttgaggcactgatcatgaaggacatattaaaaggatgtattgtgcatttgatgctttaaaaaataccactaaaacttctttaaaaatttttgcattacaactggttactctctataaaaataaagagctagtacgtttgtcaaaacgtgctggaaatgtaatcacaattgaaacaatgctttcaatgattagtgaagatgctgctagatgatttatgttatctcaaaataatggcacaattatcaaaattgatttagatatagctaatttgcaaaactctgctaatccagtttattatgttcaatatgcgtttgcaagaatgaatagtattcttagaattgcaaattctgatcaattaaaagaaattactgattgcagtcttttgattaatgaaaaagagatatcacttttaaatcaacttgtctattatccttttatgttgcaaaaagctatggaaacaggcgaattgcacttattaactaactttttatatgaaactgctagtttatttcattcctggtataaagtttgcaaaattaatgatgataaaaattcacttttatcagcacaaagacttgctttattgagatcattacaatttatagttaaacaaatccttgatgttttgaagatttcaacaccacaacaaatgtaa

SEQ ID NO: 27404 - DNA, 1839 bp, Mycoplasma genitalium
atgtcttttatcataacagtaataggtgctgggcatgctggattggaagccgctttcattgtaagcaaattcaacatcaaagtaaaccttttagttcttgatataaatcatttaggttcttgtccatgtaatccttcaattggtggacctgctaagggaattgttactagggaaattgatgttttaggaggtatgcaagcaattgctgctgataacaatgccttacaatataaattactaaatagttcaaaaggacctgctgtgcaagctatcagagcacaaattgacaaaataggttataaaaactggtttcaaagtcaagttaaattaaataaaaacattaatctaattcaatctgaagcaatcaatttaattgttagaaatgaaaaaataaaaggcgttattttaaaagacggaagtgaacttttaagtgatgcggttattatcactaccggaacgtacctaagatcaaaaacatactgtggtaatacagttaaaaatcaaggacctgatcaatctaaaaatagtgaaaaattaagcacaaacttaattaacagaggttttaaaacaattcgtttaaaaacaggaactccgccaagaattttaaaaacttcacttgactataatcaaatggaattagaaattaataataatcaaaaccttgcttttagtactacaaataaaaatttcttaccacttgaaaaacaaataccttgttacttagttcataccaatcaaaaaattcacgatctaatccttaaaaacttaaaaaaatctgcaatgtttaatggtagtatttcagcacaaggaccactttattgtccaagcattgaagacaaagtttttaagttctctcaaaaacctcgtcaccaaatttttgtagaacctgaatcattgagtctagatactatttatttagcaggattatcaacttcttttacaccagaaattcaaaaagaaatcatccagcttttacctggttttcaaaatgcagaaattaaaaagtttggttacgctattgaatatgatgcttttctatctaatcaactaaaaccaacacttgaaacgaagttaatagaaaacttgtattttgctggacaaattaatggcactagcggttatgaagaagctgctggtcaaggtttgatggcaggaattaatgctgctttaaaattattaaaaaaaccaccatttattttgcaacgtaatgaggcttatattggggttatgattaatgatttagttactaaaacaatcagtgatccataccgtttgttaacatccagagcagaatatagactatgattgagaaatgacaatgttcaagaacggctcattaaaaaaagctttgaacttggtttaacagataaaaaaacatatgaattgttccttaaaaaggaaaagaaaaaacaggaattaatttcatttttaaaaaacactcaagtaggcaaggttaaagcattgaaattcactaataaaaataccgctcaatcactttatgacttcaacaaacgaagtgaaataaatttagataaattgatcaaagatcttcctgaaaaataccaattagattcagaaacacttaaacaaattgaaattgaaattaaatatgagggttacataaagaaaaatgaaaagtattttaagggtttagataaattaagcaaaattaaaattcctcatacttttgattaccataaggttaagaatttagctagtgaagctatttttaaactatctaactttaagcctagtaatttagcaattgcaagtcaaatagctggagtgaactttaatgacattatagccataaaacattttttaaaaacttatgaataa

SEQ ID NO: 27405 - DNA, 579 bp, Mycoplasma genitalium
atgaataatgctaattttgaaaaatatgttgatttagtttttgaagcaaacaaaaatttcaacttaacaggatttaaaacaaaagaagctatttatcagaatttagttatagaaatattgacattatttaaaggatatgaaaaattttttattgacaaaactgtagcagacttgggaagtggaaatggttcgcctgggataatattaaaactgttatttcaaaaaataaaaaagttagttttaattgatagtaaacacaaaaaaattagctttttaaataaattaactaagcaactaaatctggagaaaactgttgcaatttgtgaacgaattgaagtacataaaaatcactatgatgttatctgttctcgtggtctaagtacgattattaaagttaatgatttagcattttccttgcttaactcaaaaggtattatttttcatataaaacaaagcttagaccaatacattgaatttgaaaaatcaaatcagaagaatcaatttaacttgttatttataaagcactttactagtcagaataaaaaactaattttgatagctttacaaaaaaatgattaa

SEQ ID NO: 27406 - DNA, 747 bp, Mycoplasma genitalium
atgactaatttaattaaatatttaaaagaactccaaaactggctgtttgattatgtaaaaaaatctaaagctaaaggtgttatttttggcttatctggaggaattgattcagcagttgttgctgctattgctaaagaaacttttggttttgaaaaccatttagctttaataatgcatattaataattcaaaacttgattttcaagcaactagtgaacttgttaaaaaaatgcaatttaatagtattaacattgaactggaagagagtttcaatctgttagtaaaaacccttggaatagatccaaaaaaagattttttaacagctggtaacattaaagcacgtttacggatgataactttatatgcttatgctcaaaaacacaacttcttagttttaggtactggtaattttgtagagtatacacttggttatttcacaaaatgaggagatggagcttgtgatattgctcctttagcatggcttttaaaagaggacgtttacaaattagctaagcattttaatattcctgaaattgtaatcacaagagcgccaactgctagtctttttgaagggcaaactgatgagacagagatgggcattacttataaggaacttgatcaatatttaaaaggtgatttaatacttagttcagaaaagcaaaaaattgttttagatttgaaagcaaaagcagagcataaacataattcacctttgaaatttaaacatctctataatttccagaactaa

SEQ ID NO: 27407 - DNA, 1302 bp, Mycoplasma genitalium
atggctattacagattattgtgagtgtcgctttactgctggaaatggtggtaatggaatcatagcatgaaaaagagaagcacattatgataaaggtggtcctggtggtggtaatggtggtaatggtggtaatgttattttgcaagctgatcataactgcgattcactttttttcttgaagaataaaaaacacctgtttgcagaagatggacaaaatggtaaaccagatttagcacatggtaaaaatggttcagatcttttaattaaagtgccaataggaacaacagttaaaaacttagaaaataatagtgtattggtggattttgttcatgataaacagagttttattttgtgttttggcggaaaaggcggaaaaggaaatgctgcttttaaaagcccaattatgcgtgctcctaatctatatgaaaatggtgataaaggagagattttaaacgttagtttggaagttaaatatttagctaatgtaggaattgttggttttccaaattcaggtaaatcaacactaatctccaaactttcaaatgccaaacctaaaattgcaaactatcgctttactactttaatacccgtacttggtgtagttaaatatcaaaataatagtttagtttttgctgatattcctggtttgattgaaaatgctagtgaaggaagtgggttaggacatgattttttacggcatatagagaggtgtgaaatattaattcatttaatttcacttgatcctgtagataatgatgatccttgcaaagcatatttacaaataatggatgaactttcaaaatattctccccttctagttaaaaaaaagatgcttgttgtagctaataaaattgatgttaatgaaggtgagaaacggtttaaaaaattagaaaaatttcttcaaaaaaaatctatttctgtattaaaaatttctgctttaaagaaagaattaggcaatttacttgatagagtttttgaactttacaataaaacaatttcccaatttggagctaataagtttagtttgccaatggaacttgagaagcattatgtttttcaaaataccaatgaaaataataacgaccctttaaatattgaaaaagatagtttaaacagatgaattgttaattgtaaacgtctaagatattgatttgataaaattccacaaactacgcttgataacattcgtcgcttaggaaataaaattaaagaaatcggtattgaagatcaattaaaatccgttggtgctaaaaaaggtgatattattttctttgatggttgtgaatttgtaattaatgactaa

SEQ ID NO: 27408 - DNA, 450 bp, Mycoplasma genitalium
atgggtaaggaaatagagcccatttttgacttagttttgttgtgatttttatttgttcctttactaatttatctttttttagccttttttttatttgcttttactaaatacattatttgggaattaattcctttttgctattctactgcttttactttaatagttctttttttatcaggaataataccaatggcttgaaatagttgaattatcttacttcgattttttttagttctaataacattaatgctaagtttttttcttttgaataaaatgactaacttttttttaatcagatcaaaatatgcaataataattgctgaaaatctcttaaagacaggtaaatctaaaactaaaaatcgacaaaagttgcaacaaattcaaagtgatctagaaagaaaaaaatctgcagaaatcgtttttaaaataaagaaaaagaaaccaaaataa

SEQ ID NO: 27409 - DNA, 4851 bp, Mycoplasma genitalium
atgccaaaaacaacaaagaataaaaacaaaaacaccacccctaaatcaaaaaccaaaaagtatttagaatcagctaacaagaagagtgttactaaaccaaaaaaagaacaagataaagttgaaaatctttttgatcaaccttttttaggtgaaatcaaaaaaaacattctcaagaaaacaaagtcttttaatagtaagaaaaaggaaacagttaaatcaaagagcaaatcacctatagatttttttgatgaaaccaagcgcggtgtttttattgttccacctgaaacagatatcttaagtagaagagaacttaatcaaaaaactgttgttaatacagttccaaatcaaacaagcagttatccaaccattaatgaaaataagttggttgaattaaacaatcaaccagaaaccaaagttctagaaacaaaaaaagatagttttacaacaactattagagaaaaaaaattaaatccagaagattcacaagcgttctgatatatctttgttggtgatagaaaatatggtttttgaaaaaatcatacttgagtttgactaggttattttgaccaattacaaagatgaaactactttaaggtaattgaaacagttgaagttcctcaagaacatgcagctttcattaaacaaagaccagctgatattgatttttgaagaccacttgtaggcaaccctaactatggttttgttcaaaataatacatggatctgaaaaggattttttgacaagaaactaaattggatccctgatcctgttcgctttactgaagaagcacttggtcatactgatagcttagttgatgaaatagagaaaaagactatttctgaacaaccatactgagaacaggaaaatgacattgttgttacagtatttaataccaagagcttagcttcttctctagaaaacgaactattacttgaaaattcaagtgaagagcagccggtaattgaagaagttaaaccaagaagaaatgaagttatcttccgtaatccagtaactaaattacattttgaaaaagaaaaatttgaattcttaaatccagttaaagaaactaatgaaaccatccctttaattgaaatcgttaaagaggaagttaaggttgaatctgaagttgaggctcctgttgaaattgaacctgaagcagcttgtgaacctgaaactactattccagaagttgagactgtttttgtttacgaagatgatcttaagggcttagattccaatcaaactcaagcaggaaatgttccagaagttgagaccgtttttgtttacgaagatgatcttaaaggcttagattctattattaaagacgaccaacaacatgatgaaattgctaaacatgttgaacatttaagtcaagattattctaaagaaataaaagatagtgctaaagcagatttatctaatatttctgatgatattgattcagtttgaaaagaattcggttcttttactgatgaaacacaaaaaagtgtagaagaaaaatcacaagtagatgaaattattttagatgctaataatgatttcattaatgaatccctttttagagatgaagttgttaataatattgattctcaaataaatgaaacagtttcagaacaacaatttgaacctacttattctgttaatgaatttcaacaagaatttagcgaacctgttgtttcagatgaaaagataaaagaaacaaacagtgatgaaagtgttaatactgatttaactgctttatttagtgaaaaacttgttaatgaggtactcttaacaaatgaatatgttgatgttaatgctcctttttcaacagaaacagaagttaaggtttcaagtgaacttcccaaaagtgaactagttgatgaaataacttttattaataatgatccaaaacctcaagaaggattggaatataaagtagatttccttgaaactgaaccaaaatcattatttgatgaaaaaacaacaatagttgtagaaagtgaaccacctttcattcaacctgacctatcacttgaattagattctgtaaatgatgttgataaatcattagaaactaaaactacatctgttgaattaaatcatgaagaaattggtaatgaatttattaatttagatgtttctgaaaaagaagttcaagaacaaccaacaacacaactagaaactgatagtgagttcgtattaccaacatatcaaatagttgaagacagtttcactgaaagtgctgaaactcctaatgaattttcatctgaacaaaaagatacgcttgaattcattagtcaaactcaagaggttgagacttctgaatcaaatgtacccacagttgaacaagaaacaaaattatttgaacatcaagatgaaaataacttattcactcctctaccgcttgatttaactgaaatcattgaatcaaatgctttatttgattcaaaaccagacgaaaaagagagttctgattcagaactccaacctactttcaaagaaattaaattagattcaactgttgaagttcctcaagaatcatcacaagttgaagctacttttgatactgttcaaccagaagcagtttttgatgaaattaaaactcaagaactacagcctgaagctactactgaagttgtttttgatgatcattttcaaccagatgttcaacctgaacaaactcctcaagaagctaaatttgattcaccagtcgaaattccccaagaatcatcgcaagctgaatttcatgctgaacaaatctctgatgaaattaaattagaagaaaaaactgaagcagtttttgatcatcaacaattagaaaatcagtctgaagaaacagttgttacacctactgaagttactgcttttgaaccagaaacaattgaaacccaattagaacctagctctgaagatcaaccatctgaacctgcattagatcaaaatcatccagaaattgttactgctgaagttgaacaaatctttgatggaactaagttagaagatttaaaactagaggaagctaactttgataatgttgaaaataatgaagttcaacctaaagaaacagaagctgaaattacttttgatgaaactaaagaacttcaacaggaaacctcctctgaaccattatcaacagaagaattaaaatctgaagctacttttgataatgtatctgaagctgaatcagaagcagtttttgaaaaacctcaattagaaacacagactgaaaaaatattagaagaggaacctaaatctgaaccagttgatcaattaataactgaagctagctttgatactgttaaacatgaagcagtttttgataaaaatcaaactcaaactgagggattggaagaacctcaagtttctagtgaagctgaagtagttgatcaaacaactactgatactgttggagaacctgaagcagtttttgatgttcaacctgaaaaaactactgaagttaagtttgatgatgttgaaaatcaacaaaaagttatttctgaacctcaagtagaacaacaacctggagaagcagtttttgaaccatctgcagaagctaaatttgattcaccagttgaatcggttcaagattcacaacctgaacctgtccttgaagaagttcaaactcaaccagaaattcaacctgtagaatctcaaccagaagctacctttgatactgttcaacctgaacaaactcctcaagaagctaaatttgattcaccagttgaaactgttgaacaacctgaatttagtagtgaaccaactcaacaacatgttgaatcagaagctagttttgatgaacctaattatgactttgatgaacctaactatgattttgatcaacctagttatgattcagatctacaaccatcagaacctcaatatgatgtagatgaacctaattatgactttgatgaaccaaattatgaaattgaatcaaaaccatcagagccacaatttgaacctcaagtagaacaacaacctggagaagcagtttttgaaccatctgcagaagctaaatttgattcaccagttgaatcggttcaagattcacaacctgaacctctccttgaagaagttcaaactcaaccagaaattcaacctgtagaatctcaaccagaagctacttttgatactgttcaacctgaacaaactcctcaagaagctaaatttgattcaccagttgaaactattcaagaacctcaagtttctagtgaacctgaagtagttgttcaacctaactttgaagaacgaaaacctgaaacagtattggaagaacctcaagctgatgaaattcaaccagaagctagtgaagaagaatcacttgattgagaattattagttggtaacaatagttatggtcattatgaacctgatggagaatgagtttgagcaggattctttggtgatgatcaaaaatgaaataaggatgcaactgttaaatgagctagagaaagagattatttaccacttattggtgatgaagtttatggtaggtacaacaataaaggtgagtggatttgatatggtttctatgatgaatctggagactgagttcttgttgatgaacaatgaaagaatcgtcaaccacgaattaacgaggcacctaagttttgagagaaattaatcggaaatgaagaatatggttactatgaagacaatgaatgaaactgatatgatggggaatttgatagtgaaggtaactgattagtattccagtctgaggaaactgagaatttaaatgaagatataactaaggatattcctgctcttgaaggttatgatattgactctattgacgcagatgaatgacttagtcaattttcagcagatgatgctaaggatgtttttggcagtaatgataaaaaatag

SEQ ID NO: 27410 - DNA, 1344 bp, Mycoplasma genitalium
atgagaataaataaaccttttagtgatgatagcaacacagttgtttttgtgagttcaaaaacatatggtgtaaaagaagaagctgcacataatcctaatgttgaatttggtgttgttttaccaactgattttcctgctttcaaccgtgctttagttcaatttcttaaaagaaagaaaaccaaattaaacattaatcttgacagtcttatagaactttataagaaaaatgaaaatagtggttgttttcatactgcgataaaaactgttattacaagtgttactttttgtgaaactactcctttcacaatgaaaaccaaacctgaaaaaaatgttgaagttgctgttcaatgtgctgttgaatatcacaacttagttaaagaatatgaaacagtaggcgaatatgttaacctagcaagagaattacaagacactccttcagatctactttattcagaagtatttgttaaacattttgaaaaggctgcaagtaaattgcctgtaaaaataaaagttcttaaacaatcagatctaattaagaaaaaaatgggtttacttttaggggttaatcaaggctctgaaagagaagcacgtttacttgttattagttatcaagctaataaaaattccaaagaaaaacttgcttttgtagggaaaggaattacttatgattcaggcggaatgaacattaaaacaggtgattatatgcgtggcatgaaatatgacatgagtggtgcggctatagtatgttctactgttttggcattagctaaaaacaaggttaaaaccaatgttgttgcagtagcagctcttactgaaaatcttcctggtgctaaggcgcaacgtcctgatgacattaagatagcatacaatggtaaaagtgttgaaatagataacactgatgctgaaggaagattggttttagctgatgctattacatatgctgctaaggatttagctgctacacatattattgatgtagcaacccttactggtttaatgtcatacatattgagtactacctatacaggtattttcagtacttgtgatcaccagtgagaatcttttaaaaaagcagcatgtagtgcaggtgaacctgtatgaagattacctatgcaccctgattatttaaaacctttacagctaacaaaacttgctgatttgcaaaattctactagtgcaagaggtgctggatcttcaagagcagcttgtttccttgcagaatttagagaaggtgtatctttgatccattgtgatattgcatcaactgcttccattgagaaccttggacaaggtgttttagtgagaaccttgtacgaacgtgctagtcagcttgcaaataaataa

SEQ ID NO: 27411 - DNA, 1632 bp, Mycoplasma genitalium
atggcaaaggaattaatctttggtaaagatgcgagaacccgcttgttgcagggtattaataagatagcaaatgctgttaaagtaacagtaggtcctaaaggccaaaatgttattttagagagaaaatttgcaaacccattaattactaacgatggggttacaatcgcaaaagaaatagaacttagtgatccagttgaaaatattggtgctaaggttatttcagttgctgcagtgtcaactaatgacattgctggggatggtacaacaacagctaccatattagcacaagaaatgacaaaccgtggtattgaaattatcaataaaggtgctaatcctgttaacatccgcaggggtattgaagatgcaagcttacttattattaaagaacttgaaaagtactctaaaaaaattaatactaacgaagagatagaacaagttgcagctatctcttcaggttctaaagaaattggtaaactgatcgctcaagcaatggctttagttggtaaaaatggcgtgataacaactgatgatgcaaaaaccattaatacaacattagaaaccactgaaggaattgaatttaaaggaacatatgcatcaccttatatggttagtgatcaagaaaaaatggaagttgttttagaacaacctaaaatcttagtaagctctttaaaaattaacacaattaaagaaattcttccgcttttagaaggtagtgttgaaaatggtaatccattattaattgttgcacctgactttgcagaagaagttgttactactttagcagttaataaactcaggggcaccattaatgttgttgctgttaaatgtaatgaatatggtgaacgtcaaaaagcagctttagaagatttagcaattagtagtggaaccttagcatataataccgaaattaatagtggttttaaagatgttactgttgataatttaggtgatgctagaaaggttcaaatagctaaaggaaaaactactgttattggtggtaaaggcaataaggataaaatcaaaaagcatgttgaacttctaaacggaagattaaaacaaaccactgacaagtatgattctgatttaattaaagaaagaattgcttatttaagtcaaggtgttgctgttatccgtgttggtggtgcaactgaactcgcacaaaaagaattaaaactcagaatcgaagacgctttaaattccaccaaagctgcagttgaagaagggattatcgctggaggtggtgttggtttattaaatgcttcttgtgttttaactaacagtaaactaaaagaacgatatgaaaatgaaactagtgttgaaaacattaaagaaatcctacttggttttgaaattgtgcaaaagtctctagaagcaccagcgcgtcaaattattcaaaactcaggagttgacccagttaaaattctcagtgaattgaaaaatgaaaaaactggtgttggctttgatgctgagactaaaaagaaggttgatatgattgcaaatggaatcattgatcccaccaaagtaactaaaactgcacttgaaaaagctgcttctgtagctagttcattaattactactaatgttgctgtgtatgatgttaaagagagaaaagataactccttttcagaataa

SEQ ID NO: 27412 - DNA, 1221 bp, Mycoplasma genitalium
atgttttcaaaggtaagacttttacttaataaagagttacaacgtcaaagagaaaacatttgtttaattgcttcagaaaattacgttagccaagacatattagctgtaactggttcagtattaacaaataaatatgcagaaggctatcccagtaaacgtttttatcaaggctgtgaagttgttgatgaatctgaaaacttagccattgaaagttgcaaaactttatttggagcacaatgggctaatgtccaacctcattctggatcatctgctaactatgcagtttacttagcattgttaaaaccaggagatactatcttaggattagatcttaattgtggtggtcatttaacccatggtagccccgttaatttttcaggtaagcaatatcaagcagtaacttattcgttagattttgaaacagaaactcttgattatgatgcaattcttcaaattgctctcgaacacaaaccaaagttaattatttgtggtttttctaactattctaggactgttgactttaaaaaatttagtgcaattgcaaaacaagttaatgcgtatcttttagctgatattgcccatattgctggtttcatcgctgcaggtttgcaccaaaaccctttgccttttgtggatgttgtcacttcaacaactcataaaactttgcgtggtcctagggggggtatcattatgtctaacaaccaagcaattatcaaaaagcttgatagtggagtatttcctggatgtcagggtggacctttacaacatgtgatagcagctaaatatgtttgttttaaagaagctttgaatccaaagtttaagcagtatatgcaacaagttaaagataatgctttagcaatggcaaattgatttttaaagcagggttatcgtgttgtgtcaaaaggtactgaaacccacttattttcattagtggttggtaatggtaaagatgttgcgttgtggttacaaaaagctaacattgttttgaatatgaatacaatcccttttgaaacaaaatctgcttttagtccttcaggtattagacttggaactcctgcaatgacaaccagaggttttaaaactaatgactttatttttgttgccagtttgattgataaggttattaaaagtaatggtaatcaaaaggtaattagtcaaacaaaaacagctgttttaaatctcttaaaacgctttccgctctataagggtttagcttattaa

SEQ ID NO: 27413 - DNA, 459 bp, Mycoplasma genitalium
atgagttttaatatctttattgcttctgatcataccggtttaactcttaaaaaaattattagtgaacacctaaagactaagcagtttaatgtagttgatcttggccctaattattttgatgctaatgatgattatcctgactttgcttttttggtagctgataaggtcaagaaaaattctgataaagatcttgggatactaatttgcggtactggtgttggggtttgtatggcagcaaataaagtaaaaggagtattagcggctttggttgttagtgagaaaacagcagctttagctagacaacatgataatgccaatgttttatgtctttccagtcgttttgtaactgacagtgaaaacattaaaatagtggatgattttctcaaagctaattttgaaggtggtagacaccaaagacggatagataagattattcgatatgaaaaagaaactgaatag

SEQ ID NO: 27414 - DNA, 1557 bp, Mycoplasma genitalium
atggcagataaactaaatgaatacgtagcattaatcaaaactgaaattaaaaagtattccaaaaaaatatttaacagtgaaattggtcaagtcattagtgttgctgatggaattgccaaggttagtggacttgaaaatgctttattaaatgagttaattcaatttgaaaataatattcaaggaatagtattaaaccttgaacaaaatacagtcggaatagcactttttggtgactattcttcgttacgagaaggcagtaccgctaaaagaacccacagtgtaatgaaaactcctgttggtgatgttatgcttggtagaatcgtcaatgcacttggtgaagcaattgatggtagaggtgatattaaagctactgaatatgatcaaatagaaaaaattgctccaggtgtaatgaaaaggaaaagtgttaaccaaccacttgaaactggaatcttaacaattgatgctttatttcctataggtaaaggacaacgtgaattaattgttggtgatagacaaacaggtaaaactgctattgcgattgacactatcattaatcaaaaagataaagatgtttattgtgtttatgtagcaattggtcaaaaaaattcatcagtagcacaaattgtacaccaacttgaagttaatgattcaatgaaatacactacagtggtttgtgctacagctagtgactctgattccatggtttatttaagtccttttacaggaataactattgctgaatattgacttaaaaaaggaaaggatgttttgattgtatttgatgacctttctaagcatgctgttgcttacagaactctttcactcttgttaaaaagaccacctggtagagaagcttttccaggagatgttttttatttacattcaagacttttggaacgtgcatgcaagttaaatgatgaaaatggtggtggctcaattacagctttaccaattatagaaactcaagctggtgatatctctgcatatattcctacaaatgttatttcaattactgatggccaactgtttatggttagtagtctatttaacgctggacaacgccctgcaattcaaattggtttatcagtttcaagggttggtagtgcagcacaaacaaaagcgattaaacagcaaactggcagtttaaaactagaacttgctcagtatagtgaacttgatagttttagtcaatttggtagtgatcttgatgaaaatacaaaaaaggttttagagcatggtaaaagagtaatggaaatgattaaacaaccaaatggtaaaccttactctcaagtccatgaagcattatttttatttgctattaacaaagctttcattaagtttattccagttgatgaaattgctaaatttaaacaaaggataacagaagaatttaatggttcccatcctctgtttaaagagttatctaacaaaaaagaatttactgaggatttagaaagtaaaactaaaaccgcttttaaaatgcttgtgaaacgttttatcagtacattaacagattatgatattaccaaatttggtagtattgaggaacttaattaa

SEQ ID NO: 27415 - DNA, 531 bp, Mycoplasma genitalium
atgattaatgcacaagcatttggaactgcactttttcaattaagtgaagagcaaaaacaagtaaagaaaatttatgaagagtgccatttttttctgaaattaatgcgtaattttaaagatggttcattatcgttcttacttaattcttatacactaacaaaaccagataaaataagacttgttgataagttgtttaaaaatcatttttgtcaagtttttgttgattttttaaaagtaattattttaaagggttactttactttagttgaacaggcaattaagtatttttttgataatgttgaaagtcaaaaacacattcaatttatcaaaataattactgcttttgaattaagctcaaaacaacttaacaaaattattgcaataatggaaaaacgttttaaaacaaaggttgtttataaaactgagattgatcgcagtttaatttcaggaattaggatagaatcaagttcccatttatttgaaaaaaatgtgcgtgatgaattaaaacgcataatggcccattttatttaa

SEQ ID NO: 27416 - DNA, 627 bp, Mycoplasma genitalium
atggtaaaggcaaaaaaacttgtctttaaatgaagcttattagtttttagcttttttacactcagcttatttttggtttcttgtactgagaatgttagagaaattaagagtagttcagtaataaatgaactttttcctaacttttgggtatttattactcatttactagcatttttcatcttactaacactgatgattttcttgttttgaaaaccaactcaaaggtttttaaataaccgtaaaaatttactagaagcacaaatcaaacaagctaatgaattagaaaaacaagcaagaaatctacttgaagaatctaatcaaaggcatgaaaaagcactaatagtttctaaagaaattgttgatcaagctaactatgaagctttgcaattaaaaagtgaaatagaaaaaacagcaaatcgccaagctaacttaatgatttttcaagctcgtcaggaaattgaaaaagaaagacgttctcttaaagaacaatctattaaagagagtgtggaattggctatgttggctgcacaagaactaattctcaagaaaatagatcaaaaatcagatagagaatttattgataagtttattagagatttagaagctaacgaaacagaagatgattaa

SEQ ID NO: 27417 - DNA, 879 bp, Mycoplasma genitalium
atgtcgccacgggagatagttttaaaagaaactaatcaaatagatttcatttccaatcaaagtatttttgatatctcaccaattagcggttgaaaaccatttgcccctactgatcaaattcttggtatttttattgtttttgtactgcttctaactttttttattttttataagcttaagttaaaaaaagcagattctttaaaaaataattcatattttttgcttttatttcaaatgttgtttgtttgggtacaagatacaacagcagatcttttaggagaggaaaataagaaatttgctccctactttttaatgttgcttctgtacatagtatcaagcaacttagttagcttgcttggtggtatttcaccaccaacatcatctttaacatttactttttctttaggacttgcaacttttattgggattgttgttatggggattagataccaaagatgaaatttttttaaagagtttgcctttggaattactgttaaaggaaaaaagtattctactttcattccaaatccttttagtatattgagtggatttgcaccgcttttttctatttcattaaggttatggggaaacatattagcgggcacagttattttggcgcttttttataacttttgaatttttattttttcaagtattaataaccaaccattagcacttagcttaggaacagtttttgcaggtttaataaccccagtattacacatctattttgatgtaattgcaggtgtattgcagggttatgtttttgtaatgttgacttataattattgggctaaaatgcgcaatcaaggtttggaaaataataatgcaagtgaattacactttaaaggcataaaggtaattcaagaaaatatttag

SEQ ID NO: 27418 - DNA, 1377 bp, Mycoplasma genitalium
atgggaagttcaaatctaaacatcaattcaaaaataaccgatatttttgcttatcaagtttttgattctcggggtgttccaacagtagcttgtgttgttaaattggcatctggtcatgtaggtgaagcgatggttccatcaggtgcttctacaggtgagaaagaagcaattgaattacgtgataatgatccaaaaaattattttggtaaaggcgttaacgaagccgttgataacgttaataaagttattgcccctaagcttattggcttaaatgcatttgatcaattaacagtggatcaagcaatgattaaactagacaatactcccaacaaagcaaaattaggagcaaatgctatattatctgtttcacttgcagtatcaaaagcagcagcaaaagcacaaaacagctcattatttcaatacatttcaaataaattaattggattaaatacaacaaattttgttttacctgtgccaatgttaaatgtaattaatggtggtgctcatgctgataactatattgattttcaagagttcatgatcatgcctttaggtgctaaaaagatgcatgaagctttaaaaatggctagtgaaacttttcatgctttacaaaatcttttaaaaaagcgtggattaaacacaaataaaggagatgaaggtggatttgcgcctaacttaaaacttgcagaagatgcacttgacatcatggttgaagccattaaattagctggatataagccttgagatgatattgctattgccattgatgttgctgctagtgagttttatgacgaagataaaaaactttatgttttcaagaaaggaataaaagctaatatccttaatgcaaaggattggagtttaacaagcaaagaaatgattgcttacttagaaaaattaacaaaaaaatatccaattatttcaatagaagatggtttgagtgaaaatgattgagaagggatgaaccaattaactaaaaccataggtagccatattcaaattgttggtgatgacacttactgtactaatgcagaacttgctaaaaaaggtgttgcacaaaatacaacaaactcgatattgattaaattaaatcaaattggttctattagtgaaacgattcaaacaattgaagttgcaaaaaaagctaactggagtcaagtaatttcacatcgcagtggtgaaacagaagatacaactattgctgatttggcagttgctgcccaaactggtcaaattaaaaccggttcaatgtcacgctcagaaagaatagctaaatacaatcgtttgttgtacatagaaattgaacttggtgataaaggaaaatacttaggttgaaatacctttacaaacattaaacctaaaaactttaacatctaa

SEQ ID NO: 27419 - DNA, 990 bp, Mycoplasma genitalium
atggaaaagaacataaaagcactttgaaaaaattttcaattgaagcttgaaaaaattaagcattaccgaaagctttatgaacaacaaatcaaagaatataaaaagaaaattactggtttaaataatgaaacagatgcaaatgaaatctcccgtattaagaatgaaattgaaattttaaaccgtctaataaagattaaaaacaccaaagataatgtcattaaaaaggattttgatgaaaaaaatgtatttgaaattcgaaatttcaacttctgatataacaaaaacaaacaagtattatttgatatcaatcttgacattaaacgcaataaaataactgctttaataggtaaatcaggatgcggtaaatccacctttattaggtgcttaaataaattaaatgatttaaatgaaaacacacgttgaacaggtgacatatattttcttggtaagaatatcaattcaggaattattaatgatttaacattgcgcactagtgttggcatggtttttcaaaaattaactccttttaatttttctatttttgaaaacattgcttatggcataagagcacatggtattcacaataaaaatgctatcaatgaaatagtaagacaggcattgatatcagcagcattgtgagatgaagtgaaagataatttacataggaatgcaaacaccctttctggtggacaacaacaacgcttgtgtattgcgcgtgctattgctttacaaccagatgttcttttgatggatgaacctaccagtgctttagactcaattgccacaaactctattgaacttctaattcaacaactaaaagaaaaattcacaattgttattgttactcactctatggctcaaacaattagaataactgatgaaacgattttttttgctgatggaagagtaattgaacaaggcactacaaaacagatatttacaaagcctaagcaaaaagcaacaaatagttatataagtgggaaaaattag

SEQ ID NO: 27420 - DNA, 399 bp, Mycoplasma genitalium
atggataaaaaatctttttatggacttggtcgtcgtaaatcttctactgctaaagtttatttatatcaaagcaaagataagggtaaaataaccattaatcatcgtaatcctagcgattattttccaaataaattggtgattcaagatatggaacaacccttagagttaaccaaacttaaggataactttgatatcaatgttgttgttaaaggtggaggatttactgggcaggcaggagccattagattaggtattgttcgtgctttaataaaatttaatccagatcttaaaaagttattaaaaaccaaaaaattaacaacacgtgataagcgtgctaaggaacgcaaaaaatttggtttatatggtgctagacgtgcaccacaatttactaagcgttag

SEQ ID NO: 27421 - DNA, 441 bp, Mycoplasma genitalium
atgcaaaaaacatcgatgcttacaaaggaagaagccattaaaaacaggaagtggtatcttgttgacgctagtggtttggttttaggcaaattagcagttaaagctgcaaatttaattagaggaaaaaataaagctaattttactcctaatcaagattgtggagatcatctaataattattaacagtgatcaagtggttttaactggaaataaaaaagacaatgagttttgatatcatcactctcaatacatgggtggaattaaaaaaactagtggaagggatatgataaacaaaaattcagataaacttgttttcaatgctgttaagggaatgttacctgataatcgtttaagcagaagattaataactaaagtacatgtttttaagaatgataagcacaacatggaagcacaaaaaccaacattacttaattgaagttaa

SEQ ID NO: 27422 - DNA, 996 bp, Mycoplasma genitalium
ttgcttgatgattttgaaagtaatggtctaaatttcacttacttcttaagagagttgtttgcgctaacagttaatttatatgcgtatgcaaaactaaaaaatattaatgttttagattcaactgaaaaaacaatgatagaaacacttaattttgaaaagcagcattatgcgtttttaattaaggccattgaagaaaatactaattttggtttaagtcaattaactttaattgataggctaaaagctattgttattagctataatgaattttttaatcaaaaacctttaacaataagctcaccaagtaatgaaaaatctctacacttagaaactgaatatttggaaaagaaaaaaataaaaaaatcaaatcacaaacaagaccaaaagcacttttctttatttgaaaaatcttttatagataaatcagaaaagacacctaaaaatgatgaagttactaataacaaattcttagatacaagcaaactaaatcttgccaatattgctcttgcaattaatgcatttaatgacaataaatgaattaatcattttcaaaatcttttaagtgtttttcaaactaaatttaatgataaagataaacagaataatttaagttatttcaataactttatagacaaatatagtgctcgtgatatagtgaaagcaaccaaaatagtaaaagcttcttcatttgggatagttatcttatttgaagatcaaaaaattgctatgagactttgaaaagaggcaatagaagaaggtaatgtacaagcaactatatttcagatttttaaccaaaatttattcttagcatcttttagtgagcatcaatataaaacaacaattactgaagaaacaaaaaatcaaaagtatcaaactgaagtgttgaacttaacccaattggaaaacttagctaagccttttttaaaagaaaagaaacgctctttatcacaaaaaatggtggataaatactttaaaggactttttgaagaaaagtaa

SEQ ID NO: 27423 - DNA, 783 bp, Mycoplasma genitalium
atgcaccaagttttttatcaaaaatatcggccaatcaatttcaaacaaaccctaggacaagaatcgataagaaaaatcttggtgaatgctattaacagggataaactacctaatggttatatcttttcaggtgaaagaggaacaggtaaaactacttttgcaaagataatagcaaaagcgataaactgcttaaattgagatcaaattgatgtttgtaatagttgtgatgtgtgtaaaagtattaacactaatagtgccattgatatagttgagatagatgcagcttctaaaaatggtattaatgatattagagagttggtagaaaatgttttcaatcatcccttcacatttaaaaaaaaggtttatattttagatgaagcacacatgttaaccacccaatcatggggtggcttgttaaaaactttagaagaatcaccaccttatgttctttttatttttacaactactgaatttaacaagattccattaacaattttgtccagatgtcaaagcttcttttttaaaaaaataactagtgatttaatccttgaaagattaaatgatatagcaaaaaaagaaaagattaagatagagaaagatgcattaataaaaattgctgatttatcccaaggttcattgcgtgatgggcttagcttactagatcaattagcaatttctctgatagtgaaaaaattagtattactgatgttgaaaaaacatttaatatcgttgatagaaatgcaaaatttacttttattaaagcagttttatcaggagatataa

SEQ ID NO: 27424 - DNA, 2865 bp, Mycoplasma genitalium
ttgactttgaaaccggaatgaaaaaataatgattttataagggttaaaggtgctagagaaaataaccttaaaaacattaacattgatatccctaaaaatcaatttgttgttattactggtctatcaggatcaggtaaatcttccttagcatttaacacaatttatgctgaggggagaagaagatatttagagtctctatcttcttatgcacgccaatttttaggtaacagtgataaacctgatgttgatcttatagaaggattatcaccagcaatttccattgatcaaaaaaccacttcacataacccacgttcaactgtgggtacagtaactgagatctatgattatctaagacttttatgagctagaattgggaccccttattgtcctaatggtcatggttctattcaaacgcaaacaattaaccaaattgctaatcagatttttgatttacctaataaatcaaaggtgcaattattagcacctactgttaaaaatcagcgcggcatttttacaaatgaatttattaaatacaagcaattaggttttcttagagtcttagttgatggccagatttacaccttagatgatgaaattaaacttgataaaaatactaaacacaacattagtgtagtgatcgatagaattatcatcaataaagataatcaaacttattcaaggatagttgatagcattgaaaccattgataggttaactaatggcaagatagaagttcttaaggaagatggaacaatattaaatttcagcaaaaatcatggttgtgataaatgtggtttttctattagtgaattggaaccaagattattttcctttaactcccctttaggttcatgttcatattgcaaaggacttggttttagttatgaacctgatgtagacaagataattgctgattctaaactttctattaaccaaggagccattgatatttttaaaaatattgtgcatggaacttctttggattgacagcgctttttatctttagttaatcactataaaattccattagataaaccaattgaacagttagataagtcacaacttaatttaattttagaaggaagtgatgaacctattgaaataaaaacaatttccaattcaggtgctaagaatatccgctttgagcattatgaagggatagctaatttaattaaaagaagacacctagaaacaaacagccaagtaagtagagaatgatattctgcatacatgtctgaaataacatgtaaaaagtgtcatggaaaaaaattaataaaagacgctttaagtgttaagttaggaggaattgacattattagctttactgaactttccattgataaaagtattgattttctattaaaactagagttaaatgatgagcaaaagaagatcggtgaattagctttaaaagagattattaatcgtctttcttttcttaaaaatgttggtttagattatcttaatcttgcaagaagagcttctacgctgtcaggtggagaagcacaaagaattagattagctacccaaattggttctcaacttactggtgttttatatgtaatggatgaaccttctattggattgcatcaaaaagacaatatgcgtttaattaaaacaatgatggtaatgcgtgatttaggtaacaccttattagtagttgagcatgacagtgaaacaatgttagcggcagattatttaattgatattggtcctaaagcaggtaatgaaggtggtgaattagttgcttgcggtacacctttacaagtaatggaaaactcaaactcaattactggacaatatcttagtggtaaaaaacaaatctccattccaaaaaatagacatagtggtaatggtaaaacaattattatcaagggtgctaaagttaataatttgaaaaatattaatgtcaccattcctttaaataaattggttttgataacaggggtttcaggttctggaaaatcctctttaattaatcaaacattagttccagctttagaaagaattctttatcgtaaaggtgttaaaaaagatacatataaggaaataattggtgctaacaacattgataagataattgttgtctctcaagacccaattggtagaacaccacgttctaatcctgcaacctatattagtgtttttgatgatattcgtgatttatttgccaacacaaaagaagctaaagcaagaggatatacaaattcacgattttcttttaatgttccaggtggtaggtgtgataagtgttttggtgatggtgtgattcgcattgaaatgcattttttacctgatgtttatgtcaaatgtgaagtatgtaatggcaagaagtacaattcacaaacactggaaattaaatatttgggaaaatcaatttttgatgttttacaaatgtcttgtaaagaagcttatgaattttttaaagctatcccaaatatatcacgtaaactaaggttgttatgtgatgttggtttagaatatttgcaattaggtattaatgtcacttttctttcaggtggggaagcacagagaattaagttatctaagtttttacaaaaaaaatctactggtaaaactttgtttgttttagatgaaccctctactggcttacatttagaagatataaacaaactattaacaataattcaaagaatcattaagaatggtgatacagtagttgttatagaacataacttagatattattaaggttgctgactatatcattgatttaggtcctgaaggtggtgacaatggtggtcaaattgttgctcaaggaacacctgaacaacttataaaccaagttaataaatcttatactgcccaatatttgtccaaaattttaaaaccagattcaatttaa

SEQ ID NO: 27425 - DNA, 261 bp, Mycoplasma genitalium
atgaaaattgataaagaacaaatcattaaggctcatcaacttcacaaaaacgatgttggcagtgtgcaagtacaaatctctatattaacagatcagattaaaaaattaacagaccacctgttagcaaacaaaaaggattttatttctaagcgtggtttatatacaaaggtatcaaaaagaaaacggctacttaaatatctaaaagaacgtaatattgaaacctaccgtgatttgattaaaaatttaaacctccggggttaa

SEQ ID NO: 27426 - DNA, 1350 bp, Mycoplasma genitalium
atggactcaacctttcatgagcttgggatctctcaaactttaattgaaacgcttaatgcgcttcatattaataagccaacaaaaattcaacaaatctctatccctcagtttttatcagaaaaaaacttaatagttcactcgccaacaggaactggtaaaactgctgcttttgcaattcccataattgagaagctattaaaagaagatcaaacagcaaaaccaactttagtaattgctccaacaagagaattagtagaacagattaaaaccacattttcaaatattgctaaaaataaaaaactaagaattattagtttaattggtggtgtacctgcttgaaaacaaatcaaaaaaatcaaaacaaatccccaaataatagttggtactatgggtagaattatggatcttttagagcgtaaagcaattcattttagcgatttagaacacctaattattgatgaagttgatttaatgttagaccgtggttttaaaaaacaaatttttaatttactagaacaaatcaattcctttaaacaaattgctgtttattcagctagttacaaccaagaagctattaacattgccaagcaaattactaataatgggatctttattggatcacctgaatttaataaagacgcaaataccaataatgataaactaatcaaacaatttgtttgttatctattttcagatcaaaaaaagcaagctttatacagccttataaaaacagcacaagttaagtcaatcattgttttttgtgacactaaaaaactagttgatgatcttcatgtatttttaagaaaaaatgaattaagaacttttgcacttcatggtgataaaaaacaatttattagagagagaaatcttaaaatctttgccaatacaaaacaacccacgattctagtaactactgatcttattggtcgtggtatccatgttgaagcaatcgatatggttatcaattattcagcttgtttaaatctagaagcttatataaatagaatgggaaggactggcagaaacaatcataaagggacatgtgtaactttctgcacctcacaagaaaagaaagtctttctgaaaatggttgagaaaatcactgataatcgaatagctgaatgtaaacaaatggaaataaagttaattcctttaaaaaataaagctaaaactaaaaaaggtggtatttcacttgattgtgttcagaaaatatatgccaatgcaaaaccatatgaccgtaataaacgtgtccctttagcaagtgatcttttcaaaagtcgtatgcgccagcctgaaaaagctatgcaaaagcaaaaaattcatgacaatgactgacaaagtaatatgtaa

SEQ ID NO: 27427 - DNA, 195 bp, Mycoplasma genitalium
atggcaaaaaaagaccaacttaccttaagagggcctttgtatggcaataatcgttctcattccaaaactattacaagaagaaaatggaatgtaaaccttcagtcatgcaaaattaaagatactaatggtaaagtaacacggattctagtttcaactaaaacaattcgtacccttaaaaaacaaaatcgtttctaa

SEQ ID NO: 27428 - DNA, 1719 bp, Mycoplasma genitalium
atgaaaaaaataattgggattggtgtttcagatggcattgctgttgcaaaagctttcattattcaaacacctcaatttgacgttaaaaaatacacaaatgtcaaaatgacacccacccaagcaaaaaagcttttaagcagtgcttttcaaaaagcaaaaaaagaccttgaagagattaagacaattactgttaagaatattaatcaagaagcaggaatgatttttgatgcacacatccaaattcttaatgatcctactatcactgagcaattagaacaacaactaaataaaaacatccatcctgttattgctgttgataatgtttttcaacaaacagctttaatgtttagtgaaatggatgataagtattttaaagaacgtgccagtgatatattagatttacaccaaaggctcttaagttatttaactggagtaaaacttaatgatttaatcaggattaaaagtgatgtcattatagtagctaatgatttaacaccaagtcaaacagcaactcttaataaaaagtatgtcaagggttttttaactgagagtggtggtaaaacaagtcatgctgccattatggctcgttctatggaaattcctgccatagttggtttaaaaaatattaccagtaaagttgaagatggcaaaacagttggtatcaatggtagaaaaggtattgtgggttttgacttttcaagtaaagacataactcaatgaaaacaagaaaaagagttggaatccaactttcaaaatgaattaaaacaatataccaataaattagtaaaaaccttagatggatatgaagttattgtcgcttctaatattggtaatgtaaaagatatggatttagcagttgagtataacacgaatggaattggtctttttagaactgaatttctctatatgagtagtcaagattgacctgatgaatcagttcaatttgaagcttataaaactgttttacaaaaagctaaaaatgatttggtaataattagaacattagacattggtggagataaaaaactaaattattttcaatttcctcatgaagataaccctttcttaggttatcgtgctatccgtttaacattagataaacaagctgtttttaagacccaacttcgtgctttattaagagcttctgattatggaaatttaggaattatgtttccaatggttgcaactcttgatgaattagttcaagttaagcaacttttaacaaaagttcaacaagaatttaatgaaactaagaaatttaaattaggaataatgattgaaattccatcagcagcattagcagctgattgcttaggaaaacatgttgattttttctcaataggtagcaatgatttaatccaatatagttttgctgctgataggatgaataaaaacgttagttatctataccaaccattaaatccagcattactacgcttaattaaactagttgtagaaggtggtaaattaaataatgtttgaactggaatgtgtggtgaaatggccagtgatcaatatgcaataccgttgcttttaggtttagggttaacagagttatcaatgagtgcaagttcaatgtttaaagcaagaatggttattgctaaaataacaattaatgaatgtaaatcattagttgaaaaagcattgaaattaactagtgatagtgctgttagaaaactagtagaaaatttctttaaaaagaaaaatatctttatttaa

SEQ ID NO: 27429 - DNA, 897 bp, Mycoplasma genitalium
atggcaacgaaaatagagctaataaaagaattgcgtaaatcaacacaagcaagtgttatggattgtaaacaagctttggaaaaaaataatgatgattttgagaaagctgttaagtgattaagagaaaatggcattgttaaatcaaccaaaaaattaaataaggttgcaagtgaaggaattattgttttaaaaagcaatttacacaaggcaattatggttgagataaactcacaaactgattttgtagccaaaaatcaagagttaaaagaattttcagatttaatgcttgaaaaaatatttgaaaaagtaaatccaaaaacagaattagttgaaattgaaaaaattcaaattaataatgatgaaaaagttagtgaaaaactagcattaattgcttctaaaactgatgagaaaatagtacttagaagagtagttgtatttgaaactaaaactaatcaaattttcacctatttacatgccaataaaagaattggggtaattattgagattcaaggaaaactcaacgaagatgatggtaagcatttagcaatgcatattgctgctaattcaccacaatttattgatcaaagtgatgttaatcaaacatgacttcaaaatgaaagaaatattatccgttcccaagcagaattagaggttaaagaaaatcctaaaaaagcaatttttttagaaaaaactattgaaggtagagttaacaaattactaattgatacctgcttaattaaccaaaaatacttaattgatgaaactaaaacaattggtcaatttttaaaagaaaaacaagctaaggttcttaaatttattaggtatgaagtgggagaggggattataaaggaaactgttgattttgttagtgaagtaaatgcacaaatcaaacaataa

SEQ ID NO: 27430 - DNA, 732 bp, Mycoplasma genitalium
atgcacaaatcaaacaataaaatccgccaaagaataatcattaaacttagtggtgctgggctaaccaaagaaaattctcaacccttttctaatgatttttttgaaactattattaatcaattaaaagttttaaaagaaagctatcaagtaggaattgttattggtgggggtaacattatcagaggtaataattgccaagaatttaacattgctgaataccatggtcatcaacttggtattatagcaacagtagttaatggctattttttaaaagcaaagttagatgcacataatttgaaaagtgctttactaagtgcaattagttgtcctagtttagcagtgcaaattctttcacagcaaactattgataaagcttttgaagagaatgactttgtcattttttcaggtggcactggtaatccttatttttccactgacactgcattagctttaagagcagtgcaaacaaaagcagttgctattctgattggaaaaaatggtgttgatggtgtttatacagctgatcctaaaaaagataaaaatgcaacctttttaccaacactcaactatgaccatgccattaaaaatgatttgaaaattatggatattactgcttttactatgtgtaaggaaaataatctgaaaataattatttttaacattaatgctgagaatgcattattagatgcattaaacaaaaaaggtcgctttactataattgaaaataactaa

SEQ ID NO: 27431 - DNA, 552 bp, Mycoplasma genitalium
atgacaaaagcacattacattgatttttttaaacaagcagctgataaaaaaattcaatgattaaaagaagagttaacaaagattagaacaggtaggccaaatcctaaaatctttgataatcttttgattgaaagttatggacaaaaaatgcctttaatatctttagctcaagtgactattaatccgccaagagaaataatcataaaaccatttgatcctaagagtaatactaatgctatttacagtgaaattcagcgggcaaacattggtgttcaaccagttattgatggtgaaaaaattcgtgttaattttccccaaattactcaagaaactcgcttagaaaatattaagcacgttaaaaaaataatagagcaaatttatcaagaactgagggttgtaagaagagatgcattacaaatgattaaaaaagataatcacaatgaggatttagaaaactctttaaaagctgaaatagaaaaaattaacaaaaattattctaatcaattagaagagattcaaaaagacaaagaaaaagaattgctaacaatttaa

SEQ ID NO: 27432 - DNA, 1125 bp, Mycoplasma genitalium
ttgctttttcttttaattagcgcatttgctgatggttttaacttttgatcaccgtgatcagcagatttcaattcaagaacattaaaagtagaacaagcaagtggtgttactagtgttattagtactgagattaatgaaaactttaaagctgttcgtttcagctttagcataatcattattttaattgttggggtaattggttctctgatgatttgagagttgttcacaaacatactaaaaaataaaccaaaactaagcttaagtttaacgttgttaaatgctggaataattatttttgggatgattggtacttttgttgttgtttatttttacaaatgaaatgcaactgttaatggtatttgaacattaagttttactctttctgtggttttactttgaataatttacattgcttgcatgagtaaaacaagaattaagtttagcttacaactttcatatagcttaggagctattgcttgctttattgctagcataggtactatttacttttctgttatcaggggttgaactacaatctttttattgatgagtttagcagtcagtgttgatacatttccttttctttttggaaagcgctttggtaaaaatcctttaattaaaatttcaccatcaaaaacatgagaaggagctttttttggcatcattagcaccattgttgttgttgctttactttgtgttttatattcaattcctttctttgtagcaaagcctacttttaatcaaacaaatggaatagcgctcaatacaccccaaaattatgatagccataatcttattaccaatatttttttaattgcctttatctctggaggaagtagtttttatatctactggtgggtaagcactttagctttaatttttacaggatctgtttttgcaataggcggtgatcttttttttagttatattaaacgcttaattagtatcaaagatttttctaaggttttaggtaaacatgggggagttttagatcgatttgattcaagttcttttttaattagtttcttctttgtttatcatttaatagcaggaaccatttccaaccaaaggttgttgatggaacctaatacttatttcagtgcaatcactagtattcaaagctag

SEQ ID NO: 27433 - DNA, 813 bp, Mycoplasma genitalium
atggacacatatacctccgccaaaattaattggttcccgggtcacatgaaaaagatccatgatcaattaaaaaagttatctagtcaaattgatggcatcattgagatagtagatgctagagcaccaactttaactcataattcagaaataattagttattttttaaataaaccaaaattaatactggcattaaagacagatttagcacaatacaaaccaaataaaaagatcttatttggttcattaaaagaaccttttaaactcaaaaaaaaagttctaaagacattaacaactttatttgcaaataaaagacaacaattaaaagcaaaaggcttattaatcaaacaatttagattagcagttattggcatgcccaatgtaggtaaatctagtttaattaaccttttgataaataaaaatcacttaaaagtagctaaccgcgctggtattactaaatcattaaattggattcaaattagccctgaattattattaagtgataccccaggagtttttttgaaaagaattgatgaaattcaaattggatataaactagttttgactaatgttattagaagagaagtagttaatatagaagaagtgggaatgtttgcttttaattatcttaagaaacattacaaacagcttttaccatttgaagcggatagctttattaactttttggaaaaatttgctaaagtgagaggcttaattaagaaagctaatgaactaaacactaacttagcatgtgaaatttttattaatgaacttattaatgggaaatatggcaaattaagttatgaacttaattag

SEQ ID NO: 27434 - DNA, 360 bp, Mycoplasma genitalium
atgaaaaaaataaataaacaagcattaattgatgcagtagaacaaaaacagttaaaggaatatgttcctgaatttggagcaggagatgaagttaatgttgctattaagttacgtgaaaaagaaaaagttcgagttcaaaacttcactggaactgttttaagaagaaggggaagagggattagcgaaactttcatggtaagaaaaaccactgatggaattcctattgaaaaaaactttcaaatccacaaccctaatatagacatagaagtaaaacgcaggggtaaagtaagaagagcatacatctcttatatgcgtgaaagatctggtaagtcagcaaaaattaaagaaaaaaagtcttaa

SEQ ID NO: 27435 - DNA, 696 bp, Mycoplasma genitalium
gtgaaaatcactgttttaacactttttgaaaacactatttggccttacttaaatagttctattatgttacaagctcaaaaagcaaatttagttcaatttgaagtagtaaattgaagaaatttttgcaatgataaacataaaactgtggatgatatggcttatggtggaggaagtggcatggttttaaaagctgaacctattattaattgtttaaatttttataaagccccaaattctcatgtagttttactctccccagaaggtgaacaattttctcagaattgtgctaaaaaacttacaaaatacgaacacttaattttgttatctggtcactatgaaggttttgatcaaagaatttataaatatattgatcaaattgtttctttaggtgattttgttttaagtggtggggaacttgtagcactaagtgttattgatgctactgttagattaattaaaggagttattaatgatcagagtcttatttgtgaatcattcaatgataatctattagattttcctgtttatacaaggccatacgatttaaaaggcgataaagttcctgaagttttactttcaggagatcaccaaaagattgaatcatttcgtaaagaacagcaaatcttaaaaactgcaaaatacagacctgatttatacaaaaaatacttagaaaataaaaatgaaaaaaataaataa

SEQ ID NO: 27436 - DNA, 270 bp, Mycoplasma genitalium
atgcggatgggaagagtacactatccgctttatagaatagtagcggttgattcgcgagtaaagcgtaatggaaagtatatcgctttaattggacatctaaatccagctttaaaggaaaataagtgtaaattagatgaaactgttgccttagattgacttaataaaggggcaattccaactgatacagtccgttctttatttagtgaatctggtttgtggaagaaatttattgaaagtaaaaataagaaagaaacaagtcctaaaaagtag

SEQ ID NO: 27437 - DNA, 435 bp, Mycoplasma genitalium
atgaaaagaataagtgagcttttaggttatgatcttatttcattagcaaataaagttccttttgttgtttgtgaagttgtttcagttattcctattgcaaacacccatctaaaaaggtgtaaagttaacactggtttgacaaaaagcttggatattgtttgtggagctaataatgttagagttggtatgaaaacagttttagtacaagtaggtggagtgttacctagcggtacagttatcaaaaaaactaaaatagctggttttgattcagttggcatgttatgttctgaaaaagaacttaatttaaaacagaaaaatgagggtataattgagattaatcctaagatcaaagtaggaaaaccatttattgatgtatatttaaataaacaacattccaaatgagtaaataccaaaaaaagagtgaagctgagctaa

SEQ ID NO: 27438 - DNA, 1185 bp, Mycoplasma genitalium
atggcaagagagaaatttgaccgttccaaaccacatgtcaatgttggtaccattggtcacattgaccatggtaaaaccactttaacagctgctatctgtacagttttagcaaaggaaggaaaatcagctgcaacgcgttatgatgaaattgataaagcccctgaagaaaaagcaaggggaatcacaattaactctgcacacgtagaatattcttctgacaaacgtcactatgcccatgttgactgtcctggacatgctgactacattaaaaatatgatcacaggtgctgcacaaatggatggagctattctagttgtttcagcaactgatagtgtgatgccccaaacccgcgagcacatcttacttgcccgccaagtaggggttcctaaaatggtagtttttctaaacaagtgtgatattgctagtgatgaagaggtacaagaacttgttgctgaagaagtacgtgatctgttaacttcctatggttttgatggtaagaacactcctattatttatggctcagctttaaaagcattggaaggtgatccaaagtgggaggctaagatccatgatttgattaaagcagttgatgaatggattccaactcctacacgtgaagtagataaacctttcttattagcaattgaagatacgatgaccattactggtagaggtacagttgttacaggaagagttgaaagaggtgaactcaaagtaggtcaagaagttgaaattgttggtttaaaaccaattagaaaagcagttgttactggaattgaaatgttcaaaaaggaacttgattcagcaatggctggtgacaatgctggggtattattacgtggtgttgaacgtaaagaagttgaaagaggtcaagttttagcaaaaccaggctctattaaaccgcacaagaaatttaaagctgagatctatgctttaaagaaagaagaaggtggtagacacactggttttttaaacggttaccgtcctcaattctatttccgtaccactgatgtaactggttctattgctttagctgaaaatactgaaatggttctacctggtgataatgcttctattactgttgagttaattgctcctatcgcttgtgaaaaaggtagtaagttctcaattcgtgaaggtggtagaactgtaggggcaggcactgtaacagaagttctagaatag

SEQ ID NO: 27439 - DNA, 879 bp, Mycoplasma genitalium
atgaaaacaaaaataagaaaagcagttattcctgctgctgggttgggtgttaggttactaccagcaacaaaagcaattcccaaagagatgttaccattggtaaataaacctactatccaatacatagtagaggaagcagttaaaagtggcattgaacagattcttgtcattgtttcatccaaaaaaacagctatattagatcattttgattatgatctgatcttagaaaatgccttaattcaaaaaaataaattgcaggagcataaagagattgaagatattgctaatttagcacatatcttttttgttagacaaaaaaatcaagatggtttgggagatgcaatcttgtttgctgaatcttttgttggtaatgaagactttgcagtattgttaggtgatgatgttgtttttagtaaagaacctgctttaaaacaatgcttggaagcttattatgaaactaattgtcaaacaatcggtgtacaagaagtagatccttgtcatgttgataagtatggaattatcacccctgaaggtgattacaaaaataaagatcttattaaggttttagcaatgactgaaaaacctaaaccaaaagatgctaaaagtaatttagcaatcttagggcgatatgtactcaaaccatctattttcaaagcacttagaagtgtaccttatggagttggtggtgagttgcaactaactgatggtttaaatttttgtttgaaaaatgaaaacttttatgcaagaaagtttactggtactaggtttgatgttggcacaaagagtggttttattaaagcaaatttatttactgctttaaacaataaagatattagtaaaaaagaagttttagaacttttaaatttagttaaagcttaa

SEQ ID NO: 27440 - DNA, 1224 bp, Mycoplasma genitalium
atgttaattaatatagataatattttagtaaaaatgttaaataacatattgcaatttctcaaagaaagagaactttattcacaagctaattttgaaacagaactagataaccatttaaaagagaaaaaaaataacttttatgttggttttgatccaactgctaattctttacatattggcaattatgttttaattcacattgcaaaattattaaaagacatggggcatactccgcacatagttctagggagtgcaactgctttaattggtgatcctactggcagaattgaattaaggaaaattttagaagaaaaagaaattgtaaaaaacaccaaaacaattaaaaaacaaatcaaacagtttttaggtgatgtaattattcatgaaaacaaagtttgattagaaaaacttaattacattgaagttatccgtgaattaggtgcttttttttcagttaacaagatgttaagcacagacgcatttagtgctaggtgagaaaaaggactaactctaatggaattaaactatatgatcttacaagcatatgacttttattatctacataaaaaccataatgtcactttacaaataggtggaagtgatcagtgggctaatattttggctggtgctaacttaattaaaagaaaaaataatgctagtgtttttggattaactgctaatttattagttaaagctaacggagaaaaaatgggtaaaactagtagcggagcattatgacttgatgaaaataaaactagtgtttttgatttttatcaatactggattaaccttgatgatcaaagcttaaaaaagacttttttaatgctaacaatgcttgataaaaaagtaatagatgaattgtgtaatttaaaaggcccaaaaattaaacaaaccaagcaaatgctagcctttttaattactgaattaatccatggcactaaaaaagcaaaagaagcacaacaacgatctgaactaatatttagtaatcaaccagatcttgatattaagttagtaaaaacaagcactaatctaattgattatttagttgaaactaaatttattaaaagtaaatcagaagcaagaagattaattagtcaaaaaggtttgacaattaacaataaacacgttttagacttaaaccaaataattgaatgaaaagaagagttacaaattattagaaaaggtaaaaaaagttttttaacaattaaaactgttaattcttag

SEQ ID NO: 27441 - DNA, 2109 bp, Mycoplasma genitalium
atgaaaaaaagaaataagggtttagtagaacaaacaactactgaaaaaaataatttttcacgtaaaactgcttgaaaagtcttttgatgagtcatcattttagctgttgttattggtgttttagcttatattttcagtccaagagctgctactgcagtagttgaaagctgaaaattaaatggaggtagtaacagcactttaacagcaaaagtaagcggttttagtaatgaactgacatttaaacaaataaatggttcaacttatgttactgataccattctccaagtttccattacctttgatggtttaaatagtccattaactgttactgctcacaaaactgttaatagtaatggcaatgttatctttaatattgctaacttatcaattaaccaaagtaatggtcagattaccgttaatagtaatggaaccatgatgaatggtggttctagtaataacacaaagagtattgcaggttttgaaacccttggtactttcattgctcctgatactagagctagagatgtattaaatggtttgtttggcttgctaccaattattatctttgtagttttctttttactcttttgaagaagtgctaggggtatatctgcagggggcagagaagaagataatattttttctattggcaaaacccaagctaagttggctaagtcaactgtgaaatttaccaatattgctggacttcaagaggaaaagcatgagttgcttgagatagttgattatttaaaaaatccattgaaatatgcccagatgggagcaagatccccacgtggggtaattttatacggtccacctgggacaggtaaaacattattagctaaagcagtagctggtgaagctggtgttcctttctttcaatcaacgggttctggatttgaagatatgcttgttggtgttggtgctaaacgagttagagatcttttcaataaagctaaaaaggctgctccttgtattatttttattgatgaaattgattcagttggttctaaacggggtagagttgaactctcttcttattctgttgttgagcaaaccttaaaccaattgttagctgaaatggatggatttacaagcagaacaggtgttgttgtaatggcagctacaaataggttagatgtattagatgatgcattattaagacctggaagatttgatagacatattcaaatcaatctccctgatattaaagaaagggaagggattttaaaagttcatgctgaaaataaaaatctctcttctaagataagtcttttagatgttgctaagagaactcctgggttttcaggtgctcaattagaaaatgttatcaatgaagctacattgttagcagttagagacaaccgtaccacaattaacattaatgacattgatgaagcaattgatagagtaatagctggtcctgctaaaaagtcacgtgtaattagtgatgaagatagaaaactagttgcttatcatgaggctggtcatgccttggttggtttacatgtccacagtaatgatgaagtacaaaagattaccattattcctcgtggtcaagcagggggttacacactttcaacacctaagagtggtgatcttaacctaaaaagaaaatctgatttacttgcaatgatagcaactgctatgggcggtagagctgctgaagaggaaatctatggtaatttagaaattactactggcgcttctagcgatttttataaagcaactaatattgcaagagcaatggtaacccagcttgggatgtctaaattaggtcaagtgcaatatgtaccaagtcaagggacactcccttctaatgtaaaactttattcagaacaaactgctaaagatattgacaatgagattaatttcattattgaagaacagtataagaaagcaaaaacaatcattaagagtaaccgtaaggaactagaattgcttgtagaagcacttttaattgctgaaactattttgaaaagtgatattgacttcatccataaaaacactaaactaccaccagaaatcttattgcaaaagcaagaacaacaagcaaagcaaaaactaaataaatctgaagtaaaaccagaaagtgaaacaaacagttag

SEQ ID NO: 27442 - DNA, 510 bp, Mycoplasma genitalium
atgcagttaagagttggcctaggaagcaaaaaataccacataaaattaaggaaagaaagtaaaaataaattttggttaggcggtgttgattttgagaattctaaatatatttatgatcttgaaaacagtgatgaagttagtgatgttatccaattagcagttgctgatgctttatttggtgcaactgcattaggtgatggtcatattgttttcaataaaggaaaatcaacagtccaatttaaaggtactgcaaaaaaagaagcaccaagagtcttagcaagaacttacaatttcatcagaaaaaactgaattatcaataatattgatatctccttagagattcctcaagagcaaaaggttgatgattataaacacgctatctttgcttttatttgtagtgctttaagaatttcagaattaacaattaatctcaaagttagaaaacctttagacagtaatgaaattaattgcttagctgttgttttagtagaacgtcaaaaaactaaataa

SEQ ID NO: 27443 - DNA, 1455 bp, Mycoplasma genitalium
atggaaaaaattagaacacgttatgcaccatccccaacaggatatctgcatgttggtggtacaagaacagcaatctttaactttttactagccaagcactttaatggtgagtttattatcaggatagaagatactgatactgaaagaaacataaaagaaggaattaattcacaatttgataacttgcgttggcttggagtcattgcagatgaatcggtttataaccctggcaattatggtccatatctgcaatcacaaaaactagcagtttataaaaaactagcatttgatttaattgaaaaaaatctggcatatcgttgcttctgtagcaaagaaaaattagagtcagatagaaaacaagccattaataaccacaaaacccctaaatacttaggtcattgtcgtaatttacattccaagaaaattactaatcacttagaaaaaaatgatccttttactatccgcttaaaaataaacaatgaagctgaatatagttgaaatgatctggttaggggacaaattactattcccggcagtgcgttaacagatatagttattcttaaagctaatggtgttgctacttataactttgcagttgttattgatgattatgatatggaaattactgatgttttaaggggagctgagcacatctctaacactgcataccaacttgctatatatcaagcattaggttttaaaagaattccccgctttggtcatctttcagttattgttgatgaaagtggcaaaaaactttctaaacgtgatgagaaaactactcagtttattgagcagtttaaacaacaaggctatctacctgaagcattattaaatttcttagcactcttaggttgacatccacagtacaaccaggagttttttaatttgaaacagttaattgaaaactttagtttaagtagagttgttagtgctcctgctttttttgatattaaaaagctgcaatgaatcaatgctaattacattaaacaattaactgataatgcttatttcaatttcattgataattacttggatgttaaggttgattatttaaaagataaaaacagggaaataagtttactttttaaaaatcaaataacccatggtgttcaaataaacgaattgataagagaatcttttgccactaaaataggtgttgaaaacttagctaagaaaagtcatattttgtttaaaaacatcaaactttttttagaacagcttgccaaatctttacaagggttggaagaatgaaaagctgagcaaattaaaacaactattaacaaagtaggagcagtgtttaacttaaaaggtaaacaactttttatgccaataaggttaatttttacaaataaggagcatggacctgatttagcacatattattgaaatttttgataaagaaagtgcaataaacttaattaagcaatttattaatgcaacaaaccttttttaa

SEQ ID NO: 27444 - DNA, 780 bp, Mycoplasma genitalium
gtgaatagtttttttccttcacgtaaattaggtcaaaattttacggttaatttaagcgtcattaaaagaatttttgcttttgttaaaaatttaaatccacaagcaattgttgaaataggtgttggtaaaggagcgttaacaaattatttgttaaaactcaaaataccttacaaggggatagaaattgataaacgcttaattgaatatcttctagttgaaaagatattaactgaagaccaactagttaaaggcgatattctcaaaaaggactttaatagtttttttgaaaatttaagtccattattgtgtggtaatatcccatatagcattacatctccaataatcaataagtttttagaatcaaagcttcgaagctttgttttaatgacacaaaaagagtttgctaatcggcttctggcaaaggttaattctagtgattatagtgcctttggtgctttttgtcaatactatttgactattacaacagtttttaaaattgataggcatgcttttaaacctaaacctaaggtggattcaaccttaatattattagaaaaaaataaatcggttagttatgactttaagtttggtctgtttttaaagcaatgtttcaatcaaagaaggaagatgttaattaataacttaaagcatttttttgcagttgattatttacttaacattattcaaaagcaaaatttaaagactagcattagagcgcaagagttgagtccttgtcaactctttaatctttaccaaaacatttgtaatggaaaaaattag

SEQ ID NO: 27445 - DNA, 1158 bp, Mycoplasma genitalium
atgcctatcaaactagcgcaaacaaataaagagataaaaaccacctttaatcctttttgatcagcagcagttgttaatgaaaaaaacaactgaaaaaacttcaaaaagttttcagctattttcataaaggttattaaggtttttatctttatttttttaactattgttgggctttggggctgtactcaaaccttagcacaaccctgaacaggtactaatcaagtcttaggttcaggacttgagataggttataaatttggtactactggtgattataggtatgatttgatttcaaataactttggcccttatttcacctttagtgattacaccttagcatatggccctttttatggatgatttgtctggcctgcagcgcaaatagttttaccaattatgtatgcaaccagagttccactaggtagcggggtggaacttgggtttaacatgattctttcattaatagtacttttactattagttcgcttgataactattgtgattaccttaaactctactttagcacttgaaaagatgaatgaagtgcaaggtaaattagcagaaattaacgctaaatataaaggggcaatagatttacaaagtaaaagaaacagacagttagagataatgtcactttataaaaaacacaacattaaatcatctgctgcttttgttcaagtttttgtaactttacctatctttttaattatttataggattgttactactttaagaccaattaaagcaatcatcttatttaacttttgggatctttcaaaagtacctttaacagaaattttctctaatttcactacaactggttgacctttcatcatctttttagtgattgttttaccagtccaatttctctctcaaaaacttcctcaagtgtgggcaagtaagcgtaatgagaatgcgaaagcccattctcaaaaaagtattgaacaactcaacaaaactaaaaagatgcaattaattttttactttgtgtttgctgctattactgcatttagtgctgctggagttggtgtttattggtttttaaatgctttgtttactttattacaatcttatttaacccatgttttcattgtcaaaagaagggaaaaaagaaagcaaaattattccaaattagatttgattttagagcgtgaatag

SEQ ID NO: 27446 - DNA, 387 bp, Mycoplasma genitalium
gtgctcaactcacggtttccagtgagcgttaaaaagagtcacagcttaagagaacgcaaggtttttacaaccattcttcaaagtaaaaccaggttctttggtacctttattaacgcttattttattaagaataatcattctacttgaagggttgcaatatcaattgcaaaaactaaatataagctagcagtacaacgtaacctaattaagcgtcagatccgtagtatctttcaacaaattagtaataatttagaaccttgagatattttagttattgtcaacaaaggctttattgaattaacatttaaagaaaaacaaaaactttttttgcaactattaaagcggataaaagaagtagatgcctatcaaactagcgcaaacaaataa

SEQ ID NO: 27447 - DNA, 147 bp, Mycoplasma genitalium
atgaaacgaacataccaaccaagcaaattaaagcgtgctaaaacccatggttttatggctaggatggcaactgcacaaggacgtaaagttttaaggcaaagacgttttaaaaatcgtgctcaactcacggtttccagtgagcgttaa

SEQ ID NO: 27448 - DNA, 1314 bp, Mycoplasma genitalium
atggaacaatttaatgcctttaaatctctattaaaaaagcattatgaaaaaacaataggttttcatgataaatacattaaagacattaatcgtttcgtatttaaaaataatgttcttttaattcttttagaaaatgaatttgctcgtaattccttaaatgataattctgaaattattcatttagctgaaagtttgtatgaaggaattaaaagtgttaattttgttaatgagcaagatttcttttttaacttagcaaaattagaagaaaatagtcgtgatactctttatcaaaattctggattgagtaaaaactatacttttcaaaactttgtaattagtgaaggaaataaaagagcttatgaagcaggcgttagattagctgaaactcaagataacgaattttcaccgctttttatttacggagaaaccggtcttggtaaaactcacctactacaagcaataggaaatgaaaaatttcgtaattttccaaatgccagagtaaagtatgttgtttcaagtgattttgcccaagaagttgttgatgctttttatcaaagggataaaggtatagaaaaactaaaaaaaaattatgaaaatttagatttagttttaatagatgacactcaaatatttggcagaaaagaaaaaaccttagaaattcttttcaatatttttaataacctagttctaaataaaaaacaaattgttttagtttctgataaggctcctgatgaactaattgatattgatgcaagaatgatttctcgctttaaatcaggattattactaaagatagaaaagcataatttgtcttcactttgtgaaatacttactgttaaattaaaagaaaaagatcctaacatccaaataactaatgaggcaagacatgatgcagcacaaatttcaggtaacgatgtgcgtgctttaaatggaattgcaacaaagttattattttttgctaaaacttcaaaacaaaatttaataaatactgaaaatttaaaagaaattctttttgaagaatttgagaagtttcataaaaagagctttgatccttatttattaatagagaacgtttgccgtagatttaatgttcctatggacagtgtactttcagaaaatcgtaaagcagaacttgtccgtgttcgtgatgtgtgtaattaccttttgcgtcaaaagtacaacatgcaatttcaacaaattggcaaaatatttaagagaagtcattcaagtgtattaatggcagttaaaagagttgctaaaatgattgaaaatgacagttcattacgggatgtaattacatcattagtaatttag

SEQ ID NO: 27449 - DNA, 810 bp, Mycoplasma genitalium
atgatcatttcttttgtaaataataaaggcggcgtattaaaaactacaatggcaactaatgttgcaggatcattggttaaactttgtccagaaaggcgaaaagtcattcttgatcttgacgggcaggggaatgtttctgcatcatttggacaaaaccctgaaagattgaataacacgttaattgacattttgttgaaggttccaaaattcagtggttcaaataatttcattgaaatagatgattgcttgctatctgtatatgagggacttgatattcttccttgtaattttgaacttaattttgctgatatagacatatcacgtaaaaaatataaggcctcagatatagcagaaatagttaagcaactagcaaaaagatatgaatttgttttattagatacaccaccaaatatggcaactttagtttctactgcaatgagtttatcagatgtcatagttattccctttgaaccagatcaatattcgatgctaggtttgatgagaatagttgaaacaatagatacatttaaggaaaaaaatacaaatcttaaaactattttagttcctacaaaagttaacgttcgtactcgtcttcataatgaagtaatagatttagctaaaacaaaagctaaaaaaaataatgtagctttttctaaaaattttgtttctctgacatcaaaatcatcagcagctgtaggttatgaaaaattgccaatatcattagtatcatcaccaagtaaaaaatatctaaatgagtatttagaaataacaaaagaaatcctaaatttagcaaattacaatgtccattaa

SEQ ID NO: 27450 - DNA, 1566 bp, Mycobacterium leprae
atgtttgtaccgcacgccaaaaagcccgaaatttacgagaaccagagagatacgtcgttggccgatgaccttagtctaggtttcaccacggtttggaacgcagtcgtctccgaactcaacggcgaatccaacacagacgacgaagccaccaacgacagcaccctagtcactccgctaactcctcagcaaagagcatggctaaatctggttcaaccactcaccatcatcgagggatttgctcttttatcggtgcccagcagctttgtccaaaatgaaattgaacgtcatctacgaacgccaatcaccgatgcactcagccgtcgactcggacaacagatacagctcggagtccgtatcgcaccgccctctaccgaccatattgacgacaattcctcgtcagccgacgtccttctaaccgacgattgcggcacagatacagacgaaaattacggggagcctcttacaggcgagtaccagggtttgccaacctacttcaccgaacgtccgcaccataccgaatcaaccgtcacgggaggtaccagccttaatcgccgttacaccttcgaaacgttcgttattggcgcgtcgaatcggttcgcgcatgctgccgcgctagcgatagccgaagcaccggcccgagcctacaacccccttttcatttggggcgagtcaggtcttggcaaaacccacctattgcacgccgccgggaactacgcacaacgactgtttcccggcatgcgggtcaaatatgtctccacagaagaattcaccaacgacttcatcaactcgctccgtgacgaccgcaaagtagcgttcaaacgcagctaccgcgacgtcgatgtgctactggtcgatgacatccaattcatcgaaggaaaagaaggtatacaagaagagttcttccatacctttaataccttacataacgccaacaagcaaatcgtcatctcttctgaccgcccaccgaaacaactcgccaccctcgaagaccgactaaggacccggttcgagtgggggcttattaccgacgtacaaccccctgaactagaaacccgcatcgccatcttgcgtaagaaagcccagatggaacgcctagcggtgcctggcgatgtcctcgaactcatcgccagcagtatcgaacgtaacatccgtgaactcgagggagctctcatcagagtcaccgcgtttgcttcgctcaacaagactgcaatcgacaaagcattagcggaaatcgtactgcgtgacctgatcgcagacgccagcacgatgcaaatcagtgcggcaaccataatgacagccaccgccgaatacttcgataccaccatcgaagaactccgtgggccaggcaaaacccgagcactggcccagtcacgccagatcgcgatgtatttgtgtcgtgaactcaccgacctctcgctacccaagatcggccaagcattcggccgtgaccacaccacggttatgtacgcacaacgaaaaatcttgtccgagatggctgaacgtcgcgaagtgttcgaccacgtcaaggaactcaccactcgcatccggcaacggtctaagcgctga

SEQ ID NO: 27451 - DNA, 1200 bp, Mycobacterium leprae
atggacctggccaaaaccaatgttggttgcagcgatttaaaattttgtttagcacgtgagtcgttcgccagcgcggtgtcatgggtagcgaagtatctccccactagaccaacggtaccggtgctatccggcgtgctgctgaccggttcagatagcggcctaacgatctccggattcgattacgaagtttccgcagaggtgcaggttgctgccgagatagcttcttctggaagcgttttggtatctgggaggttgttgtcagatattactcgggcgcttccgaacaaacctgttcacttttatgtggacggtaatcgggttgcattgacttgcggaagtgcgaggttctcgttgccgacgatggcggttgaagactaccctacactgcctactttgccggatgaaactggcacgttgccatcggatgtgttcgctgaggcgataggtcaggttgctattgcggccggtcgtgactataccttgcccatgcttaccgggatccggatcgagatctcgggtgacacggtagtcttggccgccaccgataggttccgtttggcggtccgcgagttaaaatggtcggtgttgtcatcggatttcgaggcatcggtgctggtgccggccaaaactttggtggaagttgctaaagccggtaccgacggctctggtgtttgtctgtcattgggcgctggagtcggcgttggaaaagatgggcttttcggcattagcggtggcgggaagcgcagtactactcgacttcttgacgctgagtttccgaaattcaggcagttattgccggctgagcacaccgcagtggccaccatcgacgtggctgagttgaccgaggcgatcaaactggtggcgttggtagctgaccgtggcgcgcaagtgcgcatggaattcggtgacggtatattacggctttccgccggcgccgatgatgtgggccgagccgaagaagatcttgctgttgcttttactggtgaaccgttgactatagcgtttaacccgaattatctgactgatggacttgcatcggtgcattcagagcgggtgtcatttggtttcacgacaccgagtaagccagcattgctgcgtccaacgtctaatgatgatgtccatccgacgcatgatggcccctttcccgcactgccaactgactatgtgtatttactgatgccagttcggttgcctggataa

SEQ ID NO: 27452 - DNA, 2037 bp, Mycobacterium leprae
gtggctgcccagaggaaggcccaagacgaatatggcgctgcgtccatcactattcttgaagggctggaggccgttcgcaaacgtcccggtatgtacgtcgggtcaactggtgagcgtggtctccaccatctgatatgggaagtggtggacaactcagtagatgaggcgatggccggttatgctacgcaagttgatgtgcggttattcgacgacggtagtgtcgaggtcgccgataacggtcgtggtattccggtggcagtgcatgctacgggggtaccgactgttgacgtagttatgacccaattacatgccggcggtaaattcggtggtaaagatagcggttataacgtcagtggtggtttgcatggggtaggtgtgtcggtggttaacgcattgtccaccagggtcgaggtcgacatcaaacgtgacggctatgaatggtcacagttttacgacaaggctgtgccgggcattcttaagcaaggcgaagctactgaggcgacgggaacgacgattagattttgggcagatcctgacattttcgaaaccacaaagtatgactttgggacggtggcgcgccgaattcaagaagtggctttcttgaacaagggtttgacgatcaatcttgttgacgaacgggtgaagcaggacgaagttgtcgacgatgtcgtcagcgatacagccgaggctcctgtggctatgaccgttgaagaaaagtcaacggagtcgagtgcgccgcacaaggttagacaccgtacgttccactaccccggaggcctggtggacttcgtcaagcacatcaaccggactaagactcctattcaacagagcattatcgattttgatggcaaaggtgccggtcacgaggttgaagttgcgatgcagtggaacggcggctattcggaatcagtgcatacctttgcgaacacgattaacacccatgaaggcggcacccacgaagaaggtttccgtagcgctttgacatcagtggtgaacaagtacgctaaggataaaaaactactcaaagacaaggatcccaacctaactggcgacgatatccgtgaaggtctggcggcggttatctcggttaaggtcagtgaaccacagtttgagggtcagaccaaaacaaagctggggaacaccgaagttaagtcattcgtgcagagggtctgtaatgagcaacttattcactggtttgaagccaatccagtagatgcgaaagcggttgtgaataaggcgatatcgtcggcacaagcccgaatagctgcacgtaaagcacgagagttagtgcgtcgaaaaagtgccaccgatcttggtggacttcctggaaaacttgccgattgccgctctactgatcctcgaagttctgaactgtatgtagtggaaggtgattcggctggtggttcagcaaagagtggccgtgattcgatgtttcaggcaatccttccgttacgtggcaagatcataaatgttgaaaaggcacgtattgaccgagtgctaaagaacaccgaagttcaagcaattattacggcattgggtactggaatccatgatgaattcgatatctccaggctgcgttatcacaaaattgttttgatggccgacgctgacgttgacggccaacatatctcgacgctgttgttgactttgttatttcggttcatgcgaccactcatcgagcatgggtacgtgtttttagcgcagccgccactttacaaattgaagtggcaacgtatggatccggaatttgcttactccgatagcgagcgcgacggcttattagagaccgggcttaagcttggcaagaaaatcaacaaagaggatggtatccaacgttataaaggtttaggtgaaatggatgccaaggagttgtgggaaaccaccatggacccgtcggtgcgagttttgcgtcaagtaacactggatgacgcggcggctgctgacgagttattctctattctgatgggtgaggacgtcgatgcacgccgtagctttatcacccgtaatgccaaggatgttcgtttcctggatgtctag

SEQ ID NO: 27453 - DNA, 3750 bp, Mycobacterium leprae
atgactgatatcacgctgccaccaggtgacggttctatacagcgggttgagccggtcgacattcagcaggaaatgcagcgcagctatattgattacgcgatgagtgtgattgtgggccgggcgttgcctgaagtccgcgatggtctcaaaccggtacatcgtcgggtcttgtacgcgatgttagactccggtttccgcccggaccgtagccacgctaagtcagcacggtcagtcgctgagacgatgggcaattaccatccgcacggcgacgcatcgatttatgacacgttagtgcgcatggcgcagccgtggtcgctgcggtatcccttggttgatgggcaaggcaatttcggttcgccgggtaatgacccaccggcagcgatgcgttattgtgtgtcaggaaattccttggtgaggttgctatttgggaaatcaatacgaatcggtgatatcgttactggagctcagttcaattcggacaatccgatcgacttgaaggttcttgatcggcatggtaatccggttgtagccgattatttattccattcaggagagcaccaaacctatacagtgcgcaccactgaaggctatgagatcaccgggacgtcgaaccatcccttgttgtgtttagtgaatgtcggcggtatacccaccttgttgtggaagctgattggagaaattcgatcaggagactacgttgttttacagcggatcccaccagtggaatttggtccggcggactggtattctacgatggaagcattgttattcggagcctttattagtgggggcttcgtttttcaggaccatgctggatttaacagccttgaccgtgactatttcaccatggttgttaatgcttatgatacggttgtgggtggcctgcgttgcatatcttctcgaatcaccgtatcggggtcgacgctactcgaacttgatgtttataacctcatcgagtttaagaagacaagacttagcggtttatgcgggcaacggtctgcggacaagttggtacctgactggttgtggcactcaccttccaccgtcaaacgagcattccttcaggcattgtttgaaggtgaaggattttcttcgatattgtcgcgaaatataattgagatttcctactcgacacttagtgagcgactggccgccgacgtccagcagatgctgcttgaattcggagtcgtgtctgagcgctattgccatactgtcaatgagtacaaggttgtcatagctaaccgcgctcaagtagaaatgtttttcacccaagtcggtttcggtgttactaaacaagctaagcttatccgggacgtggtatctatgtctccatgcgttggcatggatatcaactgcgtaccaggtttggccactttcattcgtaagcattgtgataaccgctgggtcgaggaagactcatttaatcagcataatgttgattgcgtccaacattggcaccatcatagcgcggaaatcgtcggccacatcgccgatcccgatattcgtgccatcgtgactgaccttactgatggccggttctactacgcgcgcgtcgcgtccgtgactgataccggtattcaacctgtgttcagtctacatgtggacaccgaggatcattcgtttttgactaatggattcatcagccataacaccgaggctcggcttactccattggcgatggaaatgttgcgcgagatcgacgaggagacagttgatttcatatctaactacgatggccgggtgcaggaaccgatggtgttgcctagccgttttcccaacctgttggctaatggttctggcggtatcgcggtcggcatggctaccaatatcccgccgcacaacctgtatgagctcgccgacgctgtgttttggtgcctagagaaccatgacgctgacgaagagacgatgctggtcgctgttatggaacgggtcaaaggtcctgatttccctaccgccgggttgattgtcggttcgcaaggcattgccgatgcttacaagactggccgtggttccattcggatacgcggagttgttgaggttgaagaagattcacgcggaaggacgtcattggtcatcactgagctaccgtatcaggtcaaccacgacaacttcatcacttctatcgctgagcaagtccgcactggccggctagccggcatctccaatgtagaagaccaaggcagcgaccgggttggtgtacgtatcgtcatcgagatcaagcgtgacgcggtggccaaagtggtgctcaataacctgtacaagcatactcagctgcaaactagtttcggagccaacatgttgtcaatcgttgacggcgtgccgcgcactttgcggttggatcagatgatttgttattatgtcgaacatcaactggacgtcattgtccggcgcactacctaccgattgcgtaaagccaacgagcgggctcatattttgcgtggattggtcaaagcgctcgatgcgttagatgaggttattacgttgattcgggcatcgcagaccgtggatattgctcgtgttggggtggtcgagttactcgatatcgacgacattcaggctcaagctatcctggacatgcagctgcggcgtttggcggctttggagcgtcaacgcattattgatgatctcgctaagattgaggtcgagatcgctgatctgggagatattctggctaagccggagcgtcggcgtggtatcattcgtaatgaactgactgagatcgcagagaagtacggtgatgaccgtcgtactcggataatagcggttgatggtgatgtcaacgacgaggatttgattgctcgtgaagaggtcgttgtcacgataactgaaactggatatgctaaacgtactaaaactgacctgtatcgcagccagaaacgcggcgggaaaggtgttcaaggcgccggtttgaagcaggacgacatcgtccggcatttcttcgtgtgttcaactcacgattggatcctgtttttcaccacccaaggccgcgtataccgggccaaggcctatgaattgccagaggcttctcgaacggcacgcgggcaacacgtggccaatttgcttgcattccagcctgaagagcgcatcgctcaggtaattcagatccgtagctatgaagacgctccatacttggtccttgccacgcgcgccggtctggttaagaagtcaaagttgaccgattttgactctaatcgttcgggtgggatcgtggcaattaatttacgtgacaacgatgagttggtcggtgcagtgttgtgcgcggccgacggcgacttgcttctggtatcggctaacggccagtctatccggttctcagcgactgacgaggccttgcgtccgatggggcgggctacctctggtgtgcagggcatgcggtttaacgccgatgatcgactgttgtcgttgaatgtggttcgcgaagatacttacctgcttgtcgcaacgtctgggggttacgctaaacgcacctcgattgaggagtacccgatgcagggccgtggcggaaagggtgttctaacggtcatgtacgatcgtcggcgcggtagcttggttggggccatcgtggttgatgaagacagcgagttgtacgcgatcacctcagggggtggggtaattcgtacaacggcacgccaggttcgccaggcaggacgccagaccaagggtgttcggttgatgaacttaggtgagggcgacacgctgttagccatcgcacgtaatgccgaagaaagcgccgacggcggtgtcggttaa

SEQ ID NO: 27454 - DNA, 1869 bp, Mycobacterium leprae
atgaccaccccaccacatttgtctgatcgctacgagctgggcgacatcctcggttttggaggcatgtccgaagttcacctggcccgcgacattcgcttgcaccgcgacgtcgcagtcaaggtgctgcgtgctgatctggcccgcgaccctagtttctacctgcgcttccgacgggaggcccaaaatgccgcggcgctaaaccacccgtccattgtggcggtctacgacaccggcgaggcagaaacgtccgctggtccgctgccctacatcgtcatggagtacgtcgacggcgcaacgttacgcgatatcgtgcacacggatggcccgatgccaccccaacaagcaatcgagattgtcgccgatgcgtgccaagcactgaacttcagccaccagaacggcatcattcatcgcgacgtcaaaccagccaacatcatgatcagcgccaccaatgcggtaaaggtgatggacttcggtatcgcacgcgcgattgccgacagtaccagcgtcacccagaccgcagccgtgatcggcaccgcccaatatctgtctcccgaacaggcccgtggcgattccgtcgacgctcggtcagatgtctattcgttaggttgtgtgctttacgaaatcctcactggtgaaccacctttcatcggtgactcgccggtctcggtggcctaccagcatgttcgcgaggacccaattccaccgtcgcagcggcatgagggcatctccgtcgacctcgatgccgtcgttcttaaagcgctggccaagaatccggaaaaccgctatcagacagcggcggagatgcgcgccgatttgatccgggtgcacagtggtcaaccacctgaggcgcccaaggtgctcactgacgccgatcgaagctgtctgctgtcgtccggggctggcaactttggcgttccgcgtaccgacgcgctatctcgccagtctctagatgaaaccgagagcgatggttcgattggacgctgggttgccgtagtcgccgtgttggcagtcctgacgatcgccatcgtcgctgctttcaatacattcggtggcaatacccgcgacgtccaggtgcctgacgtacgcggccaagtatccgccgatgctatctccgcactgcaaaaccggggcttcaaaacccgcaccctgcaaaaaccggactcgacgatcccgcctgaccatgtcatcagtaccgaacccggggccaacgcctcggtgggtgcgggcgacgaaatcacgattaacgtctctaccggacctgagcaacgcgaagtgccagacgtctcctcgctcaattacaccgacgcggttaagaagctgacttcctccggattcaaaagctttaagcaggcaaactcaccgtcgacgccggaattattgggcaaggttatcggtacgaacccatcagccaaccagacctcggcgatcaccaacgtcatcaccatcatcgtcggctccggaccagagactaagcaaatccctgacgtcactggtcagatcgtcgaaattgcgcagaaaaatctgaacgtctacggcttcactaagttcagccaagcgtcggtggatagtccccgcccaaccggtgaggtgattggtaccaatccgcccaaggacgcgacggttccagtggactcggtcattgaattgcaggtgtccaagggcaaccaattcgtgatgcctgacttgtccggtatgttctgggccgacgccgagccgcggttacgcgcattaggctggaccggggtgctggataaaggccccgatgtggatgctggtggctcccagcacaaccgggtggcatatcaaaacccgccagcaggtgccggagtaaaccgggacggaatcatcacgctaaagttcgggcaatag

SEQ ID NO: 27455 - DNA, 2919 bp, Mycobacterium leprae
gtgactgaactgccgaccactgtccctgggtacaactcggctgttgcccagacggactccgatgcgatgcgataccgctataccgcggagctagcaggccgtatcgaaagcacctggcaagacaactgggcgcggctgcagaccttcaacgtgcccaacccggttgggtcgctagccccgccggacggatcggtagttcccgccgacaagttgttcgtacaggacatgtttccctatccatcgggtgacggattgcatgttggacatccactaggttacatcgccaccgacgtctacgctcgatacttccgtatgaccggtcataacgtgctgcacgcgatggggttcgatgctttcgggctgcccgccgaacagtacgcgatgcaaaccggaacccacccacgcattctaactgaggctaacgttgtcaactttcggcaccagctgggccggttgggtcttggccacgacagccgacgcaccttctcgaccaccgatgtcgagttctacaagtggacccagtggattttcctgcagatctacaacgcttggttcgacgtagcagctaacaaggcgcgcccgatcgcagaattgattgccgaattcgattccggtgagcgccgccttgttgacggccgtgactgggccacgttgtcggccggggagcgggccgacgtgatcgacaactgtcgactggtctaccgggcggactcgatggtcaactggtgtccgggtctgggcacggtactggccaacgaagaggtcaccgccgacggtcgcagcgaccgcggcaacttcccggtattccggaaacgtttgaggcaatggatgatgcggatcaccgcctacgctgaccggttgctggacgaccttgacctgctggactggccggagcaagtcaaaactatgcagcgcaactggatcggccgttccagcggagcgaccgtgctgttctcagcgatcctaagccgcagcgatgccgcgacaaccgaagtcgacgtcgaggtgttcaccacccggccggacaccatgtttggcgtcacctatctggtgctggcacccgagcacaacctggtcgacgaactggttgccaccgtctggccggacaggacggacccccggtggacgtatggtgccgccacgccaggtgcagctgtcgcagcctaccgccgtgcaatcgttgccaagtcggacctcgatcgccaagagagcaaggagaagaccggcgtcttcttgggtaggtacgccaccaacccagccaccggaaaaccggtgccgattttcgttgccgactatgtactggtcggctatggtaccggtgcggtcatggcggttcccggccatgacccgcgtgactgggacttcgcccataagttccatttgccgatcgtcgaagttattgctggaagcgatatttcagaggccgcctatgtgggcgatggtgtgttggtgaactccggttacctcgacggtatggacgtggcaacagcccaagaggccattaccgcccgcttggagtccgaaggtcgaggacatgctcgcatcgaattcaagctaagagactggcttttcgctcggcagcggtattggggtgagccgttcccaataatctatgatagtgacggacgaccgcatgcgctagacgaggccgcactgccggttgagcttcccgacgtaccgtactactctccggtgttattcgatcctgatgatgctgacagcgagccatcacctccgctggccaaggcgaccgagtgggtgcacgtagagttggatctgggcgacggtttgaagccttacagccgcgacaccaatgtcatgccacagtgggcgggcagctcttggtacgaactgcgttacaccgatccacacaactcagagcggctctgtgccaaggaaaacgaggcctattggatgggtccacggccgactgaacacggcatcgacgatcccggcggcgttgatttgtacgtcggcggagccgaacatgcggtgctacatctgttgtatgcgaggttttggcacaaagttctatacgatctgggccacgtcagctctcgagaaccctaccgtaggctgatcaaccagggctacatccaggctttcgcttacactgatgctcacggttcatatgtgccggcgaaccaggtattccaacgcggcgacgggttcttctgtccgggacccgacggcgagatcgaagtcttccaagagtttgggaaaatcggtaaaagcttgaagaattcggtatcacctgacgaaatctgcgatgaatacggtgcagacacgttgcgtgtgtatgaaatgtcaatggggccgttggaggcgtcccgaccgtgggccacgaaggacgtcgttggcgcatatcgtttccttcagcgggtgtggcgactggtggtagatgaacgcactggtgaaacccgggtggtggacacagcaggggagttagatacttacacgttgcgaacattgcaccgcaccatcgcaggagtgtcccaagactatgctgcactgcgcaataacaccgcaacggcgaagctgatcgagtacaccaaccatctcaccaaagaacaccgtggctcggtgccccgggtcgctgtcgagcctcttgtgttgatgttggcgccgctagccccacatctggcagaagagctgtggctgcggctgggccacaccacctctttggcgaacggcccttttccccaggccgatcccgcctaccttgttgacgataccgttgaatacccggtgcaggtgaacggcaagattcggggtcggatagtggttgccgccgacgcggactacgacaccctgaaaactgttgcgttggctgacgataaagtacagcagtttttggccggtgctacaccgcgcaaagtgattgtggtcgcgggccggctgatcagtttagtcatttaa

SEQ ID NO: 27456 - DNA, 1761 bp, Mycobacterium leprae
atggcggccgattatgacaaactctttcggcttgacgatggtgcctacgcatcgccagatcaggcagcggagcagttattcgacgatgctccactatatccgccacccatcataccaacctgtactacgacgcccaatggtgaagttgcgtccccaatgccggattggtcagagcagctgccgccgaaccccccggctgcatccaaatctcctctgcccccgatgcccatcggcagctcggtgcaacccccgccggcctcatccgaatctccgcgggcccctatgccagttagcgcccctccccgttcgccagcagcatcgttaatgccaatcagcgaacctccgcaatggccacccgcggaggcacccgaacatcaatttgctaaagccgagcccccatcggtcccgataccgatcaacgagccttccccggccaaacctgcaacgccaatgccgatgacgccaatcgacggatcccagcgaacgccggtcacctcgcctgaaccttctcttgctgaattcgaagcacagcctccggctacacccaaaccatctttgcttccgaggccaatgagcagtccgcctgaagcgccgcgtccatctgcgaaccaacattcacgacacgctcgccggggtcaccaccatcgcgacgaaacccaacaggccaacccggcatcagcaactgagcctatgatcgcgccgcgcgcgaggacagctgaactgcggcaggcgccccacgccgcagcagagccggctccgacacaacatcttaccagacctgatggcctggtaagtcaccgtaccgcactgcacgattcgactgcgacatccgcaatcggcgtgcagacaggacggagcaccggggccaaaaagccgagcaaggtggtggctaaacgagggtggcggcattgggtccataccgtgacgcggataaacctgggcctgtcaccagacgagcgctacgagctggatttgcgcacgcgggtacgtcgaccgccccgcggttcgtatcagatcgggatcttgggcctcaaaggcggggccggtaagacgaccgtgacggttactttgggctcgatgttcgctcgggtgcgtaacgaccggattctggtagttgacgcagataccagctgcggaaacctcgccgaccgagcgggacgtttttcggaagcaaacatcgctgatctgctggcagacaaagatgtgaagtcctacaacgatatccgcacgcacaccagcgtaaatgcagtcaatcttgaagttctccccgcagcggaatacagcacagcccaacacgccctgagcggagaggactggaatttcgctgccgcgacagtatcaaagtactacaatgtaatgttggccgactgcggggtcggtttgttcgacccggtcacccgcggtgtgctctcgacagcgtccggggtggtgatcgttaccagcacgtcggtcgacgccgcccggcaagctgcgattgccttggactggctacgccataacggttatcaagacttattgagtcgtgcatgtgtggtgattaaccacgtcatgccgaaagagcccaacatcgctagcaaagatttagtgcaacaattcgaacaacaaattcaacccggccgggttgtggtactgccttgggacaagcacatcgcagccggaaccgaaattcgactcgaccggctcgaccccctctaccggcgccggatcctcgaactggccgcagcactgtccgacgattttgagagagctggacgtcattga

SEQ ID NO: 27457 - DNA, 4584 bp, Mycobacterium leprae
atgacggccaagcgcgtcgggctgtataaccccgcgttcgagcacgattcgtgtggagtagccatggttgtcgacatgtacggtcggcgtacccgcgacattgtggacaaggcgatcaccgcgctgcttaacctcgagcatcgtggtgcgcagggtgcggagccgcgcagtggtgacggcgcaggcatccttattcaggtcccagatgcattcttgcgggcagtcgtggattttgagctccccgccgcaagtagctacgctaccggcattgcgtttttgccgcagtcgtccaaagatgccgcggctgcctgcgccgcggtggagaaaatcgcggtggccgaggggctgcatgtactgggttggagaaacgtgcccaccgacgcttcgtcgttaggtgcgttatcccgtgatgcgatgcccaccttccggcaggtgttcatggcgggagccactggtctgacgttagaacgccgcgcctacgtgatccgtaaacgtgccgagcatgaactcggcaccaaaggccccggtcaggacggtccggggcgcgaaaccatctacttcccaagtctgtcgagccagacgttcgtctacaagggcatgctcaccaccccgcaactcaaggcattctaccgggacttgcaagatgaacggctgactagcgcgttaggcatcgtgcattcccggttctccaccaataccttcccgtcctggccgctcgcgcatcctttccggcgcattgctcacaacggcgagatcaataccgtcactggcaacgagaactggatgcgggcccgtgaggcgttgatgaagactgacatctttgggtcgaaagctgacatggagaagctgttcccgatctgcaccccgggtgcctccgacaccgcgcgctttgacgaggcactggaactgctgcacctgggcggccgcagcctggtccacgcggtgctgatgatgattcctgaagcctgggaacgccacgaatcgatggatcctgcgcgccgagctttttaccagtaccacgcctctttgatggagccgtgggacggtccggcgtcgatgacattcaccgacggtgttgtggtgggtgctgtgctcgaccgcaatggcttgcgcccgtcgcgtatctggatcaccgacgccggattggtggtgatggcttccgaggccggcgtgttggatctcgacccgtcgattgtggtccgccggatgcgactgcaaccgggccggatgttcctagtggacaccgcacaggggcgcatcgtctctgacgaagagatcaaagcgaaactagcggctgagcacccttaccaggagtggcttgacaaaggtctggttccaattgatgagttgccggcgggcaagtacgtgcggatgccgcatcatcgacttgtcatgcggcagttggccttcggctacacttacgaggaactcaatctgctggtagcacccatggtccgtgccggctctgaaccgattgggtcgatgggcgccgataccccgattgcggtgctgtcccggcggcccaggatgctttacgattacttccaccagctattcgctcaggtgaccaacccgccgctggacgccattcgcgaggaagtggtgactagcttgcagggcaccaccgggggtgagtacgacttgctcagcccagacgagaattcctgtcaccagatttggttgccacagccgattctgcgcaattacgagctggccaagctggtcaacctcgaccctgccgacgaggtcaatggacgcccgcatggcatgcggtctacagtggttagctgtctgtatccagttgccgacgccggcgccgggttggctgctgcgctgactgaggtgcgcgcgcaggcatcggcggctatcgtcggcggcgcgcgagtaatcatcttgtccgaccgcaattccgacgaacagatggctccgattccgtcgttgctttccgttgcggcggtacaccaccatttggtgcgtgaccgcacccgcacccatgtgggtcttgtggtggaatccggtgacgcccgagaggtccaccacatggcagcgttgatcggtttcggtgcggcggcggtcaacccctacctggtgttcgagtcgatcgaggaaatgctcgacagaggtgtcatcgatgggatagaccgcaagacagcattgaataactatatcaaggctactggccaaggtgtacttaaaataatgtccaagatgggcatttcgacactagcctcttacgtcggtgcgcaactgttccaggcagtcggcatctctgaagacgtgctggatgaatacttcagcgggttgagttgcccaacaggaggaatcaccctcgacgacattgctgctgaagtcgcagtccgccatcgggtggcttacttagaccgaccggatgaacgtgcccatcgcgaactcgaagtcggcggggaataccagtggcgcagggaaggcgaataccatctgttcaacccggagactgtctttaagttgcagcacgctacgcgtagcggacagtacaagatcttcaaggagtacactcgcctcgtcgatgaccagagtgagcggatggcttcgttgcgtggattactcaaattccgttcaggtgtgcgtaccccggttcctctggatgaagtcgagcccgcgagtgaaatcgttaagcgcttttcgacgggagcgatgagctacggctcgatttccgctgaggcgcacgagacccttgccattgcgatgaaccgcctgggtggtcgatcaaacagtggtgaaggtggcgaggacgtcaaccgctttgagcccgatcccaatggggattggcgacgcagtgctatcaagcaggtcgcttctgcgcggttcggggttacctcgcactacttaacgaactgtactgacatccagatcaagatggcacagggtgcgaaacccggtgaagggggccaacttccggggcggaaagtgtacccatggattgctcaggtacggaactccacccccggtgttggcttgatctcccccccaccgcaccatgacatttactctattgaagatctggcgcagctgatccacgatctgaaaaatgcgaacccatcggcgagggtgcatgtcaagcttgtctcggaaaacggggtaggcacggtggctgcgggggtatccaaggcacatgccgacgtggtcctggtctcggggcacgacggtggtaccggcgcgaccccgctgacatcgatgaagcactcgggtgcgccatgggagctggggctggccgagacccagcagacattattgctcaacggattacgcgaccgaatcgtggtccaggtagacggtcaactcaagacgggtcgtgatgtgatgatcgctgcgttgctaggcgctgaggaattcggcttcgccacggccccactggtagtcgctggctgtatcatgatgcgagtatgtcatctagacacctgcccggttggcgtcgcaactcagaatcctttgctacgcaagcggttcaatggcaagcctgaattcgtcgagaatttcttcatgtttatagctgaagaagttcgggaatatatggcacagttgggttttcgaacgtttaatgaggcggtaggccaggtgggtgcgctggacacgactccggttcgggagcattggaaggcgcatagtatcgatctgacacccgtgttacacgagccggagtcagcattcatgaaccaggatttgtactgcagttcgcgccaggatcatggtctggacaaagtgctcgatcagcagttaatagctgtcagcagggatgcgctggatttcggtaagccggttaggttctccactaccatcggtaacgtcaatcgcacggtaggcaccatgctcggccatgagctaacgaaagcctatggtgcccaaggacttccggatggaaccatagatatcacgttcgaaggatccgcgggcaacagctttggcgcctttgtacccaaggggatcacgctgcgtgtctatggagatgccaacgactatgttggcaagggcctgtctggtggtagaattgtggtgcggccgtccgatagtgtgccgctgaactacgttgccgaggataacattattggcggcaacgtgattctgttcggcgccaccagcggggaggtttatttgcgcggggttgtaggcgagcggttcgcggttcgcaactccggggcccatgcggtagtcgagggcgttggtgatcatggttgcgagtacatgactggcggtaaggtggtcatccttggccgcaccggccgtaactttgcggctggcatgtccggcggtgaggcttatgtttacgattccgacggcgaacttccggccaacctgaacttcgaaatggttgaactcgagccccttgacttcgatgacgcagcctggctgtatgctacgatacaggcgcatgtcgacgctactgattccgctgttggccagcggatactggctggctggtccgagcagcaacgatacttcgtcaaggtgatgccgaaggactacaagcgggtgttgcaggctatcgcgttagctgaacgcaacggtgtggatgtcaacaaggtgataatggagccggcacatggctga

SEQ ID NO: 27458 - DNA, 1467 bp, Mycobacterium leprae
atggctgatccggctggctttttgaaatacacacagcgagaattaccgaggcgacggcctgtcccgctacggctgcgtgactggaaggaattatacgaggaattcgataaagagactttgcggaatcaggcgtcccgttgcatggactgcggtattcctttctgtcacaatgggtgtcctttgggaaatttgatcccggaatggaatgacttggtgcgtcgcggccgttggcacgatgcggttgaacgtctgcacgccacaaacaattttcccgatgtcactggccggctatgtccggcgccatgcgagtcggcgtgtgtgctcggcattaaccaggatccggtgacgatcaagcagatcgagctagagatcatcgacaaggccttcgacgaaggttgggtgcaaccactgccgccgcagcagttgaccggtaagacggttgccgtggtgggttcggggccagctggacttgctgctgcccaacaactcacccgtgcgggtcatcgcgtgacggtcttcgaacgcgacgatcgcatcggcgggttgctgcggtatggcatcccggaattcaagatggaaaagcgcttcctggagcggaggctagaccagttgcgggctgaaggcaccgaattccggtctggcgtcaacgtcggagttgacatcactgccgatcagctgtgcgctgattttgatgcggtcgtgctggccggcggcgcggccacttggcgcgaactgcccattccgggacgtgagttagatggcgttcaccaggcgatggagttcctgccctgggtcaaccgtgtccaggagggagatgacgtcctcggagacgacgggcagccgcctatcactgctaaggacaaaaaggtggtcatcatcggtggtggcgacaccggggcagactgcttgggcgcggtgcaccggcaaggtgcgatccacgtgcaccagctcgagataatgccgcgtccgccggatgcccgcgctgcatccacgccgtggccaacttacccactgatgtatcgggtatcgccggcccacgaagaaggtggcgagcgggtgttctcagttaacaccgaggagttcgtcggcaagaacgggcgggtgcacgcgctcaaggctcatgaagtgacgatgcaagacggccggtttgtcaaggttgagaactccgttttcgagctcgaggccgatctagtgttgctggcgatgggattcgttggtccggaaaagccgggcctgctcaccgacctgggtgtgaagttcaccgaccgcggcaacgtcgcacgtggcgccgactttgatacttcggttcctggtgttttcgttgcgggcgacatgggacgtggccagtcgttgatcgtttgggcgattgctgagggtcgggctgccgcggcggctgtggatcgatttttgatgggcgcaaccgcgttgccggcacccgtcaagccgtcgtctttaccacttcagtag

SEQ ID NO: 27459 - DNA, 816 bp, Mycobacterium leprae
atgatgttggccgatgaggtgttcgccgggcatccatttgtagttgctcaccgcggtgcgtcggctgttctcccggaacataccctggctgcctatgagctcgcgctcaaagagggcgccgatggtgtagagtgcgatgtgcggctgactcgtgacggccatatggtttgtgtgcatgaccgccgcctggaccgaacctcgacgggtgtcggtttggtcagcacgatgacgctagcccagttgcgcgcgctggagtacggtgcgtggcacaacagctggcgtccggatggtacgcacggtgataccggtcttctgaccctagatgcccttgtttcattggttctggactggcaccgaccggtgaagatctttgtcgaaaccaagcacccagtccgttatggcgcgctggtggaaagcaagttgcttgcactcctgcaccgcttcggtatcgccgcgcctgcatccgctgaccgatctcgggctgtcgtgatgtcgttttcggcggctgcggtctggcgggttcggcgagccgcaccactgctacctacggttctgctcggcagagccggccgttacctgaccagcagcgcggctactgccgtcggggctactgccgtcgggccctcgctgccggcgttgaaggagtatccgaaactcgtggaccgcgctggcgcccaaggccgggcggtgtattgttggaatgtcgatgattacgacgacatcgatttctgtcgcgatatcggtgtcgcctggattgccacccgccacccaggtcgcacaaaggcgtggttgcagaataatgggcgcaccgagtag

SEQ ID NO: 27460 - DNA, 1254 bp, Mycobacterium leprae
gtgattgacctgcaattgctccgggaagaccccgacgtggtccgccgttcccaacttagccgtggcgaagacccggccttggtggatgccctactgacagccgacactgctcgtcgggccgcaatttcggctgcagactcgctgcgtgctgaacagaaggccaccagcaaaagcttgggcgcggcatctgccgaggaccgtccggcgttattggagcgcgcaaaggacctcgccgagcaggtgaaagccgctgaaaccacccaggctgagactgcggcggcattcgctgcagcgtacatggcaatttccaacgtcgttctggatggagtgccgaccggcggaaaggacgactacgcggtactggatattgttggcgatccaccgcctttgagcaatccaaaggaccacctggaactcggcgaagcactgggcttgatcgacatgcagcgtggtgccaaagtgtccggctcgcggttctacttcctcaccggtcggggtgcgctgttacaactaggcctgttgcagcttgcgttgcggcttgctgtcgagaacgactttatcccaatgatcccgcccgtgctggtgcgcccggaggtgatgtctggtaccggatttttgggcgctcatgccgaggaggtgtatagggtagacgatctgtatctggtgggcacctctgaagtgccaatggccggctatcactccgacgaaatcctcgatctatccgttggcccgctacggtacgcgggttggtcgtcgtgtttcaggcgcgaggccggcagccacggcaaggacactcgtggcatcatccgggtgcaccagttcgacaaggtggaggggtttgtctactgtgcacccaccgacgccgaggttgaacaccaacggctgctgggttggcagcgcgagatgttggcgcgcatagaggtgccatatcgggtaatcgacgtggctgcgggcgatctcggttcgtcggcggcccgcaagttcgattgcgaggcgtgggtaccgacccagggcagctactgcgagctgacctcgacgtcaaactgcaccaccttccaggcgcgccggctagctacccgctaccgagatgccagtggcaagccacagatcgttgccacactaaacggcacgctgggtaccacccggtggctggtcgcgatcttggaaaaccaccagcggcccgacggcagcgtgcgggtgccgccggctttggtacctttcgtcggcacagagttgctagagtcgccccgctga

SEQ ID NO: 27461 - DNA, 774 bp, Mycobacterium leprae
ttggctgtggaaccactatacgggactgtaattcagtttgctcgcctgctctggctgattcagggtctgaaggtcagtgttcggggtatagaaaacttgccggccagcggcggggccgtcatcgccatcaaccacaccagctacctcgacttcacttttgcgggtttacccgcttaccagcagggcctagggcgcaaggtgcggttcatggccaagcaagaggtattcgatggcaaaattaccggaccgattatgcgccgcctgcgacacataccggtggaccggcaagagggtgccgcgtcttacgaagccgccgttaggaatctcaaagatggtgaactcgtcggcgtctaccccgaggcgacgatcagccgaagctttgagataaaggaatgcaaagggggcgcagcgcggatgtcggcggaggctagggtgccgataattccgcacatcgtctggggttcacagcggatctggaccaaggactgccccaagaagctccttcgcccgaaggtgccgattttggtgctcgtcggcgaaccgattgaaccaacgttgggtgtagcacaattaaaggccttgttgcactttcggatgcaacatctgctggaacgagcacaagagctgtacggaccgcacccggctggggagttttgggtgccgcatcggctgggcgggggtgccccttcgctaatcaaggcggctcgcctcgacgctgaggaggcaaccgagagggcggcgcggcgcgcccagcgtgccaaagtagcggagtag

SEQ ID NO: 27462 - DNA, 846 bp, Mycobacterium leprae
gtgaccgatacgactaggccggctccaacgccgacccagccaacgcttatagcctgtgacgttgacggcacgttgctcgatgagaacgagactgtaaccgcgcgtacccgcgccgctgtacgctccgccgtggccggcggagcgtatttcgtcttggccacgggccgcccgccgcgttgggtgcggccggtcgtcgacgcacttggtttcccgccgatggcggtgtgtgccaacggtgccgtgatatacgatcctgcgaccgatcgggtggtatcggcgcgcacgctggccgttgacatcctaggcgagttggtcgagatcgcaacgcgcgtcatccctggcgcgggtctggctgtcgagcgtgtcggtgatcgcgcccatgacagcgctaccccacagttcgtcagctcggtgggttacgagcatgcgtggctccacccggacaacactgaggtgtcgatcgaagatctgcttagcgttccggctatcaagctcctgatccgcaagtccggtgcccgcagtgcggatatggctgccgaactagccaagcatgtcgggattgcgggcgacataacctactccaccaacaacggtctagtggagatcctgccgctgggaatcagcaaggccaccggcgtcgaagaggttggacggccgctagggatcgcggatggcaacgcggcggctttcggcgacatgcccaacgacgttccgatgctgctacgggcgggtcacggcgtggcgatgggtaatgcgcatcccgccgtgctggccgccgctgacgagatcaccgcccccaataccgatgacggtgttgcccgggtgttggaacgctggtggagctaa

SEQ ID NO: 27463 - DNA, 1242 bp, Mycobacterium leprae
atgaccgttagttttgatctcttcgttgttggctcggggtttttcggcctgacaattgccgagcgtgtggcgacccagctaggcaagcgtgtgcttattgtcgagaagcgtccgcatatcggtggtaacgcctattccgaagccgagccgcagaccggcatcgaagttcacaagtacggtgcccacctgttccatacctctagtaagagagtgtgggactacgtgcggcagttcactgagttcaccgactaccggcaccgggttttcgcggtgcacaacgggcaggtataccagtttccgatgggactgggtctggtgtcgcaattcttcggcaggtacttcactcctgacgaagcgcgacagctgattgccgagcaggcctctgaaattgatacggcggatgcaaagacccttgaagagaaagctatatcactgattggccggccgctctatgaggcgtttgtcaagggatacacggcaaagcaatggcagaccgaccccgccgagcttccggctgccgtgattagtcggctgccggtgcgctacacctttgacaaccgatacttcagcgacatctacgagggcctgccggtcgacggttacacggcatggtgcacgaagatggccgacgacgaccgcatcgaagtaaggtttggcaccgactggttcgatgttgccgatcaactgcgtgccgacagcctcggagccccggttgtttacaccggcccgctggaccgctactttgactacgctgcaggccgcctcggctggcggaccctggacttcgaggtggaagtgctacctatcggtgactttcaggggacgccggtgatgaactacagtgatctcgatgtgcctttcacgcgcatacacgagtttcgtcacttccaccgcgagcgccattacccgattgacaagacggtgataatgcgggagtactcccgcttcgcggggtatgacgatgaaccctactatcctatcaacactgaggccgaccgcgccatgttggcagcctatcgggccaaggctaagtctgagacggcgtcgtcgaaggtactgttcggcgggcggctgggtacctaccaatatttggatatgcatatggccattgccgccgcgttgaacatgtacgataacatccttgcaccgcacctgcgtgacggttctcccctgatggaggaaccagcggtagctgctgcacagcacgcagcgccagctatcggacgggaaggcggcgcgtaa

SEQ ID NO: 27464 - DNA, 579 bp, Mycobacterium leprae
atgcctgaagataaggcgcctactggcgagttggccgctatcgcggctgttcagtcggtgttggttgaccgacccggtgtgctgcccacggcacgaggaatgtcgcacttcggagaacacagcatcggctggctggcgatatcattacttggcgcgatcctggtgccgtgccgccgtcggtactggctggtggcgggggccggcgtgtttgctgcacatgtggctgccgtgctgatcaaacggatggtccggcgtatccggccgaaccatccggccgtcacagtgaatgtcggtacacccagtccgctcagctttccgtcggcacatgccacctcgaccgcagccgcggccatattgatcggtcgagctagcagactgccaaaaggaatagttgccgcggtgctagtggctccgatggcgctgtcgcggatagtgctgggggtgcactatcccagtgatgtggccttcggtgtcgtgctcggtgccgcggtcgcaggtactaccgcccgtttcgatagccggttatcacgcagatggactgtccaacacggcctcagctcgggaagtgcggtcaaatga

SEQ ID NO: 27465 - DNA, 1554 bp, Mycobacterium leprae
atgattatgaagagtacagccgagaagctggctgagcttcgcgttcggctggagttggccaacgagcccggaggtgaaaaggccgccgccaagcgcgacaagaagaatatcccaagtgcccgtgcccgcatctacgcgttggtcgatccgggcacgtttcttgagatcggcgcgctgacgcgcactccgggtgatcccaacgcgctctacggcgatggtgttgtcaccggacacggcctcattaacggccggcaggtcggggtgttctcgcacgaccagacggtgttcggtggcacggtcggtgagatgttcggccgcaaagtggcccggctcatggagtggtgcgcgatggctggatgcccgattgtcggcattaacgactctggtggtgcacgcatccaagatgcggtgacctcgttggcatggtacgccgagttgggtcgccgacacgagctactgagtggaattgtgccgcagatctctattgttttgggaaaatgcgctgggggagcggtgtattcgccgatccagactgacttggtggttgcggtgcgtggccagggttacatgtttgtcaccggccctgacgtcatcaaggacgtgaccggagaagaggtgagcttagatgagctgggcggcgtcgactcccaggctaagtacggcaacatccaccaggtggtggagtctgaggcggccgcattcggttacgtgcgggatttcctgtcatttctgccgcccaactgcttcgacaaagcgccgatcgtgaaccctggcctggagcctgagatcatggcacatgacctcgagttagactcaatcgtgccggattcagacaatacggcatatgacatgcgtgaggttctgctacggattttcgatgatggccatttcctggacgtcgccgcacaagccggacaggccatcatcaccggctatgcccgtgttgacggccgcactgtgggtgtggtggctaaccagcctatgcacctgtctggggcgattgacaatgaagcctccgacaaggctgcgcggtttatccggttctgtgacgctttcaatatcccgttggttttcgtggtagacacgcctgggttcttgccgggggtagagcaggagaaaaacggtattatcaagcgcggcggtcggttcctttatgcggtagtggaggccgatgtaccgaaggtgacgatcacgattcgcaagtcttatggcggcgcgtacgcggtgatgggatccaagcagctggccgccgacctgaactttgcctggccgaccgcgcgcatcgccgtgatcggcgctgacggtgccgcgcagctcttaatgaaacgcttcccagatccgagttcgccggacgtccaggcgatccgcaagaccttcgttgacaattacaatctcaacatggcgatcccgtggattgctgccgagcgcgggttcatcgacgctgtggttgagccgcaccaaaccaggctgttgctgcgcaagtcattacatctgttgcgcgacaagcagcagtggtggcgggtgggacgtaagcacggactcatcccgttatag

SEQ ID NO: 27466 - DNA, 819 bp, Mycobacterium leprae
atggtggagggtcctcatatcgagacaaacaatgcgtgggtggaatttcccattttcgacgccaaggcgcgttcgttgaaaaaagccgttctgggtaaggcgggcggcaccattgggcgcaacaactccaacgtcgtcgtcatcgaggcattgcgggacatcacgatgtcgctaagcgtaggtgaccgagtgggtttggttgggcacaacggtgccgggaaatcgacgctgctgcgcctgctttcgggcatctacgagcccacccgaggttgggcgaaggtcaccggccgagtagcaccggttttcgacctcgggattggcatggaccccgagatctccggctacgagaacatcataatccgcggcctgttcctcgggcagacccgaaagcagatgctgggcaaggtggacgagatcgctgagttcactgagctcggcgattacctgtcgatgccgctacgcacgtattccaccgggatgcgagtcagactagcgatgggcgtggtcactagcatcgaccccgagatcctgttactcgatgaagggatcggctcggtggacaccgacttcctgaagaaagcacaatcccggctgcagagcttggtggaacgctctggaatcttggtcttcgctagccactccaacgagttcctggcccgattgtgcaagaccgcgatgtggatcgaccacggagtcatcgagctcagcggcggcatcgaagacgtagtgcgtgcctacgaaggcgaggacgcagcccggcatgtgcgcgaggtgatagccgaaactgcctccgcgcaaaacgcttccggagatgagtga

SEQ ID NO: 27467 - DNA, 1011 bp, Mycobacterium leprae
atgcacgccatcgtcgctgaatcagccaaccaaatggtatggcgggaagtacccgatgtcacagcaggccccggcgaggtactgatcgaggttgcagcgtccggagtaaaccgcgccgacgtgctgcaggtagccggaaaatatccgcacccgccaggggccagtgcgatcatcggcatggaggtagccggtgtcgtcgcagcagtcagctcaggggtcaccgaatggtctgttggacaagaagtttgcgctttgcttgccggcggcggctacgcggaatatgtcgccgttcccgccagccaagtgatgccgatccccaagggggtcaacgtggtcgactccgcgggaataccggaagtggcctgcacggtgtggtcgaacctggtgatggccgctcatctgagcgcaggccagctgctgctgttgcatggcggtaccagtggcataggaagccacgggatccaggtggcacgagcgttgggcgccaaggtcgcggtcaccgctggatcggaagaaaagctggaattttgtcgcgccctgggcgcccaaattaccatcaactaccgcgacgaggacttcgtcgcacggctgcagcagcagaatggcggcgctgacgtaatcctcgatatcatgggcgcggcgtatctggaccgcaatatcgacgcccttgccatcgacgggcaacttatcgtcataggcttgcagggcggggtaaaaggcgagctcaacctcggcaaggtgctgagcaaacgggcccggattatcggcagtacactgcgggcccggcccgtaaacggcccgaacagtaaaagcgaaatcgtggccgcagtcacggcctcgatctggccgatgatcgccgacggttctgtgcggcccatcatcggagcacgcatggctgtccaacaggcggctgacgcgcaccaactgttgttgtcagggaaggtttccgggaagatcgtgctgaccgtcgcaggctcgggaaccgagactttactctcgcggcaccactag

SEQ ID NO: 27468 - DNA, 2043 bp, Mycobacterium leprae
atgctgcgcagggtaatcagcttagttgtttcggcaaaaagtcacgtcctttaccccgctatcgtggggcctcatcagatttcgcgtcgcggagccgggccaagtatgaagcgtcgactcggattcgaggacacggtagcgaaacggtcttaccttcttgccgtcaagagccgaaggatcatcatgaaagcgaatgtgtcatttcacgctaggggtgaggtggcaacgcaacctgcgcagggcccacctgagcaaacgggacaactggtcaacgggactgcaacgcgattcgcgatgggcgagtcgatgctcaccgatctgttgcagaaagcagccagccagttccccaatcgtgcggcgtacaagttcatcgactatgacgtggatccagcgggatttaccgaaactctgacatggtggcaggtctatagacgctcgatgagcgtggcgtatgagctcaggatctacgcgtcggacggcgatcgggtcgctatattggccccgcaggggcttgaatacatagttgcctttatgggagcgcttcaggccggtctcattgctgttcctcttccagcgcctcaatttggcattcatgacgaacgaatttctgcagcattgcgggattctttgcccagcgtaattattacgacctcggcggccatcgttgaggtcacaaaatatgcgccacatgcacgctctgcgcaaggctctgcgccggtcgtcgtggcggtggacgtgctggacctggactctccacgagagctcgatccgagtcggtatgagcgtctgaatacggcatatctgcagtacacatcggggtccacccgagcaccggctggtgttatcgtttcgcacaagaacgtcatcaccaactgtgtacagttaatgtctgactatttgggggatatagagaaagttccgtcaactgctgtctcgtggttgccgttttaccacgacatggggttgatcctgggcgtcattctaccgatggtcaatcaagacactgcggtgttgttgagtccgatggcatttttgcagagaccggctcgctggatgcaattactgggaaaatatcgcggtcagatttcttgtgcgccgaattttggtttcgaattagcggtgcgcagaacgtcggatgacgatatggctggacttgatcttggacacgtgcgggcgattgccactggggccgaacgcgtaaacgctgcgacgctccagcgtttcaccgaacggtttgcccgcttcaacctagatgagacggcaattcgaccgtcatacgggcttgccgaggcgacggtgtacgtggctacagctgggccaggacgcccacctaaaagcatctgtttcgactaccagcatttgtcggccggtaaggctaagcgtagcgccaacggcgcgggtgatggtgtgaacttggtcagttatggcgcgccgcgggcgtcggtactgcggatagttgaccccgataccaggattgagacctcggaggggacggtcggggaaatctgggtgcagggggacaacgttgctcgtggttattggcgcaaccccgaaaacactgagcggacgttcggtggacaacttgtcaatccttcgcctggtacaccagacggcccgtggctgcgcaccgaagacctcggcgtcatttttgaaggcgaactgttcatcacgggtcgtatcaaggatctcttggtcgtggatgggtccaaccactatccggatgacatcgaggcgacgatccaggaaatcaccggtggtcgggttgtggcgatagctgttccggatgattgcactgagcagttggtcaccatcatcgaactcacaaagtggggttacgcggattgtgatgcgatggaaaagctgtgcacggtcaaacgtgaggtcacctccgcggtatccaagtcgcaccgggtgcgtgttgcggacgtcgttatcgtggctccgggttcaattcctgtcaccaccagcggcaaggttcgacgtgcagcctgtgtcgagcgttatctaaaccacgaattcaaccgtctagacgctacggcatga

SEQ ID NO: 27469 - DNA, 6312 bp, Mycobacterium leprae
atgactgcgagcgttgaaggggctgaccagaagagcgaaaagcttataagttatctcaaaaaagttgttgtcgaacttgatgagacacgtgctcggttacgggaatacgaacaacgcgcaacagagccggtcgcggtggtcgggatcgggtgtcggttcccaggcggcgtggatagtccagacaggctgtgggatgttgtttcggagtgccgcgatgtcgtgtcggagtttccgacggaccggggttgggacgtcgatgggctgtttgatcctgatcccgatgcggaaggcaagacctacacgcggtggggtgcgtttttagacgacgcggccggctttgacgccgggttctttggcatcgcccctagcgaggtgctggcgatggaccctcagcagcgattgatgctggaggtttcatgggaggcgttagaatacgcggggattgacccattgtcgttgcgcgggtccgcgactggggtgtttacagggattttcgcgccgagttatggcagcagggacactgggggcctgcagggctatggattgaccggcaccgcggttagtgtggcctcggggcgcgtgtcgtatgtgttggggctggagggcccggcggtatcggtggacacggcgtgttcgtcgtcgttggtagcgatccattgggcgatgtcgtcgttgcgctcaggtgagtgcgatttggctttggccggtggggtgacggtgatggggttgccgtcgatttttgtgggcttcagtcggcagcgggggttggctgctgatgggcgttgtaaagcgtttgcgagagcggccgacgggactggctggggcgagggtgccggagtggtcgtgctcgagcggctctcggacgcacaaagattgggccatacggtgttggcggtggtgcgtggtagtgcggtcaatcaggatggcgcatctaatgggttgactgcacccaacgggcttgcccagcagcgggtgatccaggcagcgttaactaatgcagggctgtcctcggcagacgtggatgtggttgaggcacatgggaccgccactacgttgggtgatcctatcgaagcgcaggcattgctggccacgtatgggcagggacgtccggcagaccagccgttgtgggtgggctcaattaagtcgaatatgggccacactcaggccgccgcaggggtggccggggtgatcaagatggtgcaagctatgcgtcaccacgtgatgccggcgacgctgcatgtggatgagccttccccgcgggtggattggaccaccggcgcggtgtcggtgttgaccgaggcccgggattggtcggttgaagggcgcccgcgccgggcgggggtgtcgtcgtttgggatcagtggcaccaacgcgcatgtgatcttggaagaggctccaaccccggttgaggcgagttatagcaccgctgaccagcagcggttgtcggtagtgccctgggtggtttcgggtagatcgacagcggcgttgatggcgcaagcgagtcggttggcgttctatgtgcaggctgacccggaggtggatccagttgatgtggggtgcgcgctggcggcgcgttcggtgtttgagcatagagcagtggtcgtcggcgaaagccgtgagcaactaattgcggggctagctgggctcgcagttggcgagtcgggcgctggcgtggcgatcggtcaagcagcgccgctgggcaagacggtggtcgtgtttcccggacagggtgcgcagcgtatcggtatgggccgcgagttgtgcagccagttgccagtgtttgctgaggagttcgatgcggtgaccggtgagttggatcgccacatgcgattgccgttgcgcgacgttgtgtggggagccgacgcgggtttgctcgacagcactgagtttgctcagccggcgttgttcgcggtggaggtggcgttgttcgcggtgttgcagcactggggcctgcaaccggattttgtgatggggcactccattggggagttggcggcggcttacgtggctggagtattggctcctgccgacgcggcaatgctggtggtggcgcgaggccggttgatgcagtcgatgccggcaggcggcacgatgtgggcggttgctgcttcggaagacgaggtggtgtcgctgttaggtgagggtgttgggatcgctgcgatcaacgcgcctgaatcagtggtgatctccggtccgcaggccgcggtgagcgccattgcggataagttcgctgcgcagggccggcgggtgcatcagctggcggtctcgcatgcgtttcattcgccgttaatggagccgatgctcgaggagtttgtgcgcgttgcggctcaggttgaggtgcgcaagccgcagattggtctggtgtcaaatgtgacgggcgagttggctggccctgatttcggttctccgcagtactggggggagcacgttagccgggcggtgcgttttgtcgacagtgctcgtcatttgcagactttgggtgcgacccacttcattgagtctggccccagtagtggtttgatgggcgctattgagcagtccttggctccggctgaggctgtggtggtgtcgatgatgggtaaagaccggcctgagctggcctcggtgctcggtgctgccggtcagttattcgctaccggtatgccagtggagtggcctgcggtgtttgccggttcaagtaggcggcgggtgacgttgcccacctatgcgttccagcgccgtcgattttgggaaactccgggaactgatggtaccgcctctgtgtctggtttaggcctgggctcgaccgaacatgcgctgttgggtgcggtggtcgagcgacccgattctggcggggtggtgttgaccggcaggttatcgctggcgaatcagccgtggttggctgatcacgtgattggcggggtcgtgctgtttcctggggcgggttttgtcgagttggtgatccgcgccggtgatgaggtcggttgtgcgggtgtcgaggagttggtgctggcggcaccgctggtgctgcacccagggtcgggggtgcaggtgcaggtggtcgtggcagccgctgatgagtcgagtcgtcgggcagtgtcggtgtattcccggggtgatcaatcccacgggggttggttgctaaacgccgagggcttgttggaggtggatgccgcggaggccacggtggatttgtcattgtggccgccggaaggtgccgagagcgtggatatctcggacgcctatcctcagttagccgagcgcggttacgcctacggcccggcgtttcagggtttggtggcaatctggcggcgcggttcggagctgttcgccgaggtagtcgctcccactggtgtggttgtcgacgggatggggatgcacccggcgttactagacgcagtgctgcatgctttggggttggctatcgagaacactcaggcgaccaccgagatgcgactgccattttgttggcgcggtgtgtcgctgcatgccggtggtgctgggcgggtgcgtgctcgcttcacctcggcaggggcggatgcgatcgcagtggatatcgcagactccgcggggttgccggttttgaccgtgcgttcgctggtcactcgtgcgatgactgctgaacagctgcgcaccgccgtgaccgcggctggtggtgcgctcgaacaggggccgatggacctagtgtggtcgccaataccgcttagcagcgacggtcacggcggtggcctgccttccgtagtgtcttgggcagactattgcgccggcagaggcaatgatacgggcgtcgtggtgtgggaattcgggtctgcgtctgctggtgcccaagcacctgtggactcggtagccgcggtatattcggccacccacgccgcccttcaggtgctgcagttttggtttggccaggatagagccggtacgctggtggtgttgacccgtggtgctgtcgggttggtcggtgagggtatcagtgacctggccgccgctgcggtatggggcatggtgcggtcggcgcagagcgaacattccggcaagattgtgttgatcgacaccgactcggcagtggacgtggcggtgttggcagaccttggcgaatcccaactgttggtgcgctgcaacaccgtgcatgcggctcgtttgtccccggccccgcaactgctggctctgccggtcggggagtcaatgtggcgtttggctgccgatggcggtgggactttggaggatctggtgatccagccctgcccagaagtgcaagcaccgctgcaggcggggcatatgcgggtggcggtggctgcggtcggggtcaacttccgcgacgtggtggccgcactgggaatgtatcccggccaagccccgccactgggtgcagaaggcgccggggtggtgatcgaaatcggtcccgaggttaccggtgtggccgtcggtgacgcggtgatgggtttcctcggtggggcgggtccgctggcagttgtgcaccaacaactgattacccagatgccgcagggctggtcgttggctgaggccgccgccgtgccggtggtgtttttgacggccttgttcgggttggcggatttggccggcatccgggccggggaatcggtgcttatacatgccggaaccggtggtgtgggcatggcagcagtgcagtttgctcgccactggggtgtggaaattttcgtcaccgccagccgcggtaagtgggacacgctacgcgacatggggtttgacgacgaccacatcggtgattcccggacgttggagttcgaggagaagttccttgcagtgactgatggtcgcggggttgatgtagtgctcgattcactggccggtgatttcgtggatgcttcgttgcgcttgttagtccgtggtgggcgttttctcgagatgggcaagaccgatatccgcgatgcgcaggagatcgctgccaactatcctggtgtgcagtatcgggcgttcgatctgtcggaggccggcccggtgcgcatgcaggagatgctatgcgaggtgcgtgagctcttcgatacccaggtgctgcatcggttgccggtcactagctgggatgtacgctgcgcgccggcagccttccggttcatgagtcaggcccgccacatcggcaaggttgtcttgaccatgccttcggcgctggctgatggattggccgaaggcaccgttctaatcactggcgcttccggggcgatcggtggggtattggcacgccacatggtcagcgcctacggtgtgcgccatctggtgttggctagtaggcggggtgatcgtgctgagggagcggttgagttggccgctgaattggttggggccggcgccaagatacaggtggtagcttgtgacgtggccgataatgatgctgtacgaggattgttcgctcagctgtcgcgggagtttccgccggtgcgcggcgtgattcatgccgccggtgtgctcgatgacggggcgatcacttcattgacaccggatcgggtcgatacggtgttgcgagccaaggtggacgcggcgtggaacctacacgaggccacccgcgatctggacttgttgatgtttgttttgtgctcctcgatcgcggccacggtcggctcgccggggcagggcaactactccgcggcaaacgcgttcctcgatgggttggccgcttatcggcaggccgccgggttggccgggacatcgctggcgtgggggttatgggagcagcccggcggcatgaacgctcatttgagcagccgtgacctagcccgtataagtcgtagcgggctggctccgatgaaccctgcccaggcgctggaattgtttgacgctgcgttggtgatcgatcacccctttatggtgactgcccttctggaccgggccgcacttgatgcccaggcccaggctggcgcgttgccgccattattcagtaggctggtgcgacgttcgcggcgacgccaaattgaggaccccggggatgccacccagtcgaagttggctctggtccagcgcctacaaggactggctgcgaacaggcaactcgagctgctggtaggggtcgtgtgcttgcaggcagcggcggtactgggccggccctctcctgaggacatcgaccccaacaccaagtttcaggacctcggtttcgactcgctgacagccgtcgaattgcgcaacaggctaaagtcagcgaccgggttgactttgccgccaaccgtgatcttcgatcaccccactcccaccgcggtcgccgagtacgtcgctcagcaaatgctgaaaagccgcccagcggaatccggtgatgaaacgtcacaggctgtcgaaccgaaggttgaggaagtgtccgtacacgcttaa

SEQ ID NO: 27470 - DNA, 702 bp, Mycobacterium leprae
atgaatgatcggaagtgggtgacgtcgtccgttatgctagtgacgttgagtgcctgtctggcgctggggctatccggatgctcttcaacgaaacctgatgcccaggaacagagtagttcgtctagcccggcgtcctctgaccccgcgctcaccgctgagattaagcagtcgctggagacgacaaaggcgttgtccagcgtgcacgtagtggtccaaacaaccgggaaagtcgacgccttgctcggtatcagcaatgccgacgtcgacgtccaggccaatccacttgcggtaaagggcacctgcacctataacgaccagcccggggtcccgtttcgagtgttgggtgacaacatctcggtgaaactgttcgacgactggagtaatctcggctccatctccgacctgtcaacctcacatgtgcttgaccccaacaccggtattacgcaggtgttgtcgggtgttatcaacttacaggcgcaaggcaccgaggtggttgacagaatcccgaccaacaaaatcactggaaccgtccctacgagttcggtcaagatgcttgatcctaaggctaagggttcgaagctggcgaccgtgtggattgctcaggacggctcgcatcatctcgtccgggcaagcatcgacctcggctccgggtctattcagctcacgcagtccaaatggaacgagccggtgaacactaactag

SEQ ID NO: 27471 - DNA, 2709 bp, Mycobacterium leprae
gtgtcaaccgacgacagtcataggtcgctccggctagccaacctccttgtcatcaccgcctggatcacagcggtagtgatagccaacttaattttcacgttgacacaggcgaaacttcgtgataagaactcggtgctcttgccgcaagacaccatgacagtcaccacaaccaaccagattgcgcaggctttcccaggcaccggcacgaacgccattgcctacctggtggtggaaggcaacaggacacttgaaccggaagaccagccttactacgactctgccgtcaacgccctgcgcgccgatactcacgacgtgggatctgtcctcgactggtggtcggatcccctcaccgccccgctggggaccagtcccgacagccgctccgcaatagccttgatctggttgcagggcgaggcggggacgacccgagctcgggcatccctcggcgctatccgatcagtggtgcgccagttaccgccgagtgaagagctccgcgcccgtatcgtggtcccagcgaccactaacaacatgcctatggagatgactgcctggcagggcatggcaatcgtgaccgcagcggcggtgatcgccatcttattcctgctgcgagcgcggcaagccatacggatcgtggtgatcatgctgctgacagccgacttttcgctcgcggcggcttggccgctcgccgcggtggtacagagacaaactggggggaccgtttcggtattctcttggaacttggctgcagtcctgacgatcgggaccatcaccgcttccaccctgctagcgtccaggtcctacacaggtgattctgccgcgcccacttgccgcgcccacttgcccgcattggcactgctcggggcgtgtgtcgcattgctcaccggtacattactgcttgcccgaacaccggcactacacagcgtcggcaccgtagcactgggtgtcgttgtggcacttgcagcttcgttgacactgctgcctacgctgatcaagctcgcaggaccaagtgggcaaatatcaccacaggtgaacggcaatacctggacacgtcggttgttagtacccaacttctctagtccggcacgcctcaccgccgtggtgctggccacctgcgcactaccagtcatcgggatgcggttgggtctggccgaggaccataccgcgcaaagtggcacacagatcctcccgggcaatctgctacccgacattctgctcatcaaatccgcccgggacctcagggatcccgcggcgcttatcgccatcgaccaagtcagtcaccgtctgatggagattcccggcgtacgcaaggtggagtcggcggcatggccggctggtgtaccgtggaacgacgcctcgctcagctccgcggcgggaaggctcgccgatcagatgagtcagcaggccgggtcgttcgtgccggcagtgactgcgatcaaacaaatgaagaccatgatcgatcagatgagcagcaccgtggacgaactggaaagcaccgtcaatgtggctctggccggggcccaccaagtgcaacagtacctcaacccggtgctctccgccgcacggaacattaaaagcaaaaccgctgaattttcgggatacctggacacagtccgcggctgggtcgtaagcgttacaaactgtcccaacgacgtattgtgttcggccatgcgcaaggtcattgaaccatatgacaaagtggccgccagcatggaccaactgtccaatggtgtcgaccgtatctcggcgatatcggaccaaacaataagctccttcaacgaagcaccgcacatggtggcgcagatgcggtcggcgctgaagcaagcacgctccttcatacccaggctggaatccaccatccaggaactcatgccgcaaatagcgcaagcatcggcgatgctgaaaaatctcagtagagactttgctgataccggtgaaggcggcttccatctacccatgaaggagctgatgagttcatcctaccagcacgtacgagaatcgatgttctcgtcagacggaacagcgacccgcctggtcgtctacactaatgagcataacccgggtcttgataccgcggcgcgtgcgcagcagctcgaaatcgccgcaggcaaggcgatgaaatacggaagcctcgttgacagccggatcacgctaggtggggccgcacaagtagccgtagccgctcgtgctgcccttacccacgacgctgtgctgttggcaggtatgctatttgcagtagtggccctggccagcatgtgggtcagcgctggcagtggagttgcggttggcttaggcgtgctagccgcctacctcggcgggttgggaatctcggttgcgctgtggcaacacatcctgggtcacgaactgcaggcctcggtcccactggtatccttcgccatcctagctccgtgtggggtactgtatctggttaccagtctcgaggccgctcgagtctccgccgaggcgaagactgcggcgaccgtgtccgtgcggcgcgcggttgtaccgctgactgtgctcggcgctatattcggcgccggactggtggtggcggaagcttccttcagtgcgctcagccaagtcggtacggttctggtgatcgcgctgggcgcgctcaccaaggtggaacaagttttgatttcctaccatgccgaagcggccatgccagcctggtcaaaactgccgagccgattaagcggtggccctaactaa

SEQ ID NO: 27472 - DNA, 1665 bp, Mycobacterium leprae
atgacctccatgcaagcaatccccgacatcactgccaccccggcgtgggacgctctgcgcaggcatcacgatgagatcggggcaacccatttacgccagttcttcgccgataatcccaatcgcggccgcgagctcgtgatcacagtcggagatctttacatcgactacagcaaacatcgcatcacccacgatacggtgcagctgctggtagatctggcccgagctgccaaccttgaacaacgccgcgaccagatgctcgccggcgtacacgtcaacacctcggagaatcggtcggtgctacacaccgcgctgcggctaccccgagacaccgaactgatcgtcgacggccaaaacgtggtccaggacgtacacgcggtactggacgtcatgggtgacttcaccgaccggctacgcagcggcgaatggaccggagccaccgggaaacgtatcaacactgtcgtcaacatcggcattggtggttcagacctgggtccagttatggtttaccaggcactgcgccactatgccgacgcggggatctcggcgcgtttcgtgtccaacatcgatcccgccgatctgactgctaaattgtcagatttagagcctggcacaacgcttttcatcgtagcatcgaagacgttctctacgctggaaacattgaccaacgccaccgctgcgcggcgctggctgaccgacgcacttggcgaagccgccgtttccaagcatttcgtcgctgtctctaccaacaaacgcctggttaaggacttcggtatcaacacggctaatatgttcggcttctgggaatgggttggtggccgttattcggtcgattcggcgatcgggctgtcgctgatggcggtcgtcgggcgagagtctttcgctgatttcctgtccggcttccacatcgttgaccaacatttccagaacgcgccattggagtccaacgctcctgtgctgctcggcctgatcggactgtggtactctgatttcttgggtgcacaatcacgagccgtgctgccgtattccaacgacttggcgcgtttcgcggcctatctgcaacagctaactatggaatccaacggtaagtcgacgcgcgctgacggcacgccagtcactaccaataccggtgaaatctattggggcgaaacgggaaccaatggtcaacacgctttttaccagttgctgcatcagggcacccggctggttccggccgatttcatcggattcagccaacctatcgacgatttgccaactgtcgatggcatcggcagcatgcacgatctgttaatgagcaatttcttcgctcagacccaagtgctggcattcggcaaaactgcggaagaaatcgcagcagaaggtacacccgccgaagttgttccacacaaggtaatgcctggaaatcgtccgacaacatcgatcctggccaaccgactcaccccgtcggtgttgggccaactgatagcactctacgagcatcaggtgttcaccgagggcgtgatttggggcatcgactcgttcgaccagtggggtgtggagctgggcaagaaacaagccgaagcactgcttccggtaattactggcaacgcctcgcccgcgcaacagttggacagctccactgatacgctggttcgtcgctaccggacagaacgagggcgtacgagctga

SEQ ID NO: 27473 - DNA, 2337 bp, Mycobacterium leprae
atgagtgtgcacacgacagatgccaagcccgactctgaagtagatcggctgcttgacggccttaacccgcagcagcgccaggcggtggtacatgagggttcgccgctgctgattgtggccggcgcgggctcgggcaaaactacagtattggctcgacggatcgcttacctgattgcagcccgaagtgtcggggtcagtcagattctggccatcaccttcaccaacaaagccgctgcggagatgcgcgagcgcgtggcccgactggttggagaccacactgggccgtctatgtgggtgtcgacgtttcattcgacctgcgtgcgcattctacgtaaccaggcttcgctgatcggcgggctcaactccaacttttcgatctatgacgtcgatgattcgcgtagcctgctgcagatgatcggacaagacatgggactcgacatcaagcggtattcgccacggctgatggccaacgccatctccaacttgaagaacgaattgatcgacgccgaaagtgcggtagccaacctgtcttcagacactgatgacctggctcgcaccgttgccacagtctacggcgaataccagcggcgactgcggacagctaacgcgctggacttcgatgacctgatcggagaaactgttgggatcctacaagctttcccgcagatcgccgaacactaccggcggcggttccggcacgtcctagtcgacgaataccaagacactaaccacgcacagtacgtgctggtgcgggaattggtcggacacggggccaggaattcacctgacgacatgcctccgggggagttgtgcgttgtaggcgatgccgaccagtcgatctatgcgttccgcggatccaccattagcaatatcgaggacttcgagcgtgactacccggacaccacaacgattctgctggaacagaattaccgctcaacgcaaaacattctgtcggcggctaactccgtgatcgctcgtaacttcggacgccgcgacaagcgcttgtggacagacgctggcaaaggcgagttgatcgttggatacgtctccgacaacgagcacgacgaggccaagttcatcgccgatgaaatcgatgctctggtcgggggtggcgagattacctacgatgatgtggctgtcttgtatcgagctaacaacttatcgcgatcattggaggaagtgtttatccccaccgggattccgtacaaagttgttgggggtttttgtttttatgaaagcaaggagattcgcgaccttatcgcttacctgcgagtactagataaccccggcgatgccgtcagtatgcggcgcatcctcaacacaccgcgtcgaggcatcggcgatcgtgccgaggcttgtgtgtcggtgtacgcagaaaataccggaactagcttcgccgatgcactacaggctgtggcggaaggcaaagtgcccatgctaaatacccgctcggtgaaagcgatcgcggggtttgttgcactgcttgacgacctgcggtgtcgtgtcgatgacgacctgggtgaactggtcgaatctgtgttggaacgcagcggatacctcagggagttggagtcctccacggacccgcaggagttagcccgtctggacaacctcaatgaactagtaagcttcgcacacgaatttagcactgaacaggctaacgctgccgcgcttgcgaagtccttgcatactcccgaggatgaagacgtgccggataccggtgcgttggcggcgtttctggaaaaggtgtcactgatgtccgacaccgaccagatccccgagaacaattccggtgtcgtcacactaatgacgttgcatgccgcgaaaggattggaatttcccgtggtgttcgtcactggatgggaggacggcatgttgccgcacatgcgaactctgggtgatccgaccgagctttcggaggagcgtcggctggcctatgtcggcataacccgggcacgtcaacgtctctacttgagcagggccatcactcggtcttcttggggacagcccattctcaaccctgagtcacggttcctgcgggaaattcctccggaactcatcgactggcggcgtagtattctcaccgattcatacagtacgccagcgagtggcgcaagccggttcggtagggtgcgtccgtcgtcgatccggtccggggcgagcaagcgtgcgctgctggtgctggcgcccggtgatcgagtgacgcacgacaagtacggcctgggtcgggttgaggaagtttccggggtcggtgaatcagcgatatcactgatcgacttcggcagttcggggcgaataaagctgatgcacaaccacgcccctgtcaccaagctttga

SEQ ID NO: 27474 - DNA, 1002 bp, Mycobacterium leprae
atggctgccgaagctgtgcgctcattccgcaaccgctggttgaatcatcaacgcaacgacgtcaccgaaatcattcccgtcgacggctttgacgacttcgatgacctttatgacctagatttcgccgaaattgacgaactccagttcagcgacgacgactacaacttctgcaacgaaacgcaagtgttgctggcttcagagatcgacgatttacaggacatcgacagcttggcttcggaaccgctagcagcgtctgccaacgttgccccgaacttcaccagcgcgccgcgccgaccctgccagcatcgaaagcaaccaaccagcgcgaccagaggccgtttgctgatctcggcaatggccgccggagcaatggccacagcagcacataccgtcattagtcatgacgatatccccaagaccgagacagtgctgaccgccaacgcatcggcgctgagcggcgcaacggtcagcgacgcaacccagggtgttcaggtcatcacagtccatcccgcggctagtactgcggtgcacaacgaggagcacgccaaaggcacagctttcgctcacgagcgtgctcaacgtgaggcgcggctgtcgcagccgctctatgtgatgccaacgaaaggtatattcacttcaaattttggataccgctggggtgtgctgcacgccggtatcgacctggccaacgcgatcggaaccccgatccttgcggtgtccgacggtgtagtcatcgacgttggaccgacagccggctacggcatgtgggtcaagctgcgccacgccgacggcacagtcacactctatggtcacgtcaacaccacgctggtcaacgtcggtcagtacgtggtggcgggtgaccagatagctaccatgggtacccgaggcaactccaccggcccgcacttgcatttcgaagtgctgctcagcggcagtgaacgaattgaccccgtgccgtggctagccaagcggggaatctacgtcggcaattacaccggttaa

SEQ ID NO: 27475 - DNA, 903 bp, Mycobacterium leprae
atggcgattttcctcactaaagacaacacagtcatcgtccagggtatcactggcagcgaggctgccgttcacaccgcccgcatgctcaaggcgggaacccaaatcgtgggcggcgtcaatgcccgcaaggcaggcaccaatgtaacgcatgaggacaaacacggccggatcatcacactgccagtgtttggcaccgtggccgaagccatcgaaaacaccggcgccgacgtctcgatcatatttgtgccgccgcggtttgccaaagaagccattatcgaggccgtcgaagcagaaattccgctgctggtcatcatcactgagggaattccggtgcaagacagtgtatatgcatgggcctacaatctcaacaaaggtactaagactcgcataatcggcccgaactgccccggtatcattactcccggccagtcgttggttggcattactccagctaccatcaccggagcaggtccgattggtttggtgtctaagtcgggcaccttgacctaccagatgatgttcgagctcagcgatttcggcttctcgaccgcaatcggtatcggtggtgacccggtgattggtaccacgcacatcgacgccatcgaagccttcgaacaggatcccgacaccaaaatcatcgtcatgatcggcgagatcgggggggatgccgaagagcgtgcggcagactacatcaaagctaacgtgtccaagcccgttgtaggatacgtcgcgggattcactgcgccggaaggtaagacgatgggccatgctggtgccatcgtgtccggctcgtcgggcactgcggctgtcaagaaggacgccttagaggcagcgggagtcaaagtcggtaagactccgtcggagacggctgtgttggtccgcgagattctgtgcaccctgtaa

SEQ ID NO: 27476 - DNA, 546 bp, Mycobacterium leprae
gtgttagtcgataagcaattgtccgagctcggatatacggttgcacccatggagaagggtgtcgagttggtagtcggacgtgcacttattgtcgttgtcgacgatcgcaccgcgcatggggatgaggaccacagcgggccgctggtcactgagctgttgaccgaggccgggttcgtcgttgatggtgtggtggcggtggcggctgacgaggtcgagatacgcaacgcgttgaacactgcagtgatcggtggggtggacctagtggtctcggtcggcggaaccggtgttacaccacgtgacgtcgctccagaggccacccgcgagattctggatcgggaaattctaggtattgccgaagccatccgtgcttcggggctgtccgcgggaatcaccgacgccggattgtcgcgtggtctagctggtgtttcgggcagtacgttggtggtaaacctcgccggctcccgttatgcggtgcgcgacggaatggctacattgaatccgctggccacccagatcattgggcaattatcgagtctggaaatctag

SEQ ID NO: 27477 - DNA, 594 bp, Mycobacterium leprae
atggtgaccgcgagcaaggccacgttacggaaacaactgctggctgcccggcgcagcgttgccgacgacattcgagccgccgagaccaagatgctcagccagcacctggagctgctggtgaacagtgccagcacggtctgcgcgtacgtgccggtaggcaccgagccgggcgctattgagatgctggatgtgttgctccgcaagacgggacgagttttactgccagtagcgcgtactggcgatgatgagattccactaccgctgcaatggggcgagtaccggcccggtggactgacctccgggccttgggggttgctcgaaccacccgagcttcggctgcccgagtcggccttagccgaggccaacctggtgcttgtcccggcgctggcagtcgaccaccacggcgtacggttaggtcgaggtggcggcttctacgaccggtccctggcaggacgggatccgcataccctgctgatcgcgctggtacgggataccgagttactcaacgagttgccatcggagccacacgacgtccgaatgacccatgcggttacgcccgagcgtggagtgatcgcattaccgaacagcgaataa

SEQ ID NO: 27478 - DNA, 921 bp, Mycobacterium leprae
atgtcactcctcctaagcgcgcaagtcccgatcccattcactgcgatcgttcctgcggccggtctgggcactcgtttcttgccagcaaccaaaacggtgcccaaagagctactacccgtcgtcgacacccccggtatcgagttggttgcagccgaggccgctgcggccggggccgaacgtctggtgattgtcacctccgaaggcaaggatggggtggtcgctcatttcgtccaagacttggtgctagagggcacgctgttggcacgcggcaacaaagccatgttagccaaggtgcgtcgtgcgccggagttaatcaaagtggaatccgtcgtgcaggctgagccgctaggactgggacatgctatcggctgcgcggagcccacactggcgccggatgaggatgctgtgtcggtgttgctgcccgatgacttggtattgccgactggcgtgctggagacgatgtcgaaggtgcgggccagccgcggcggtacagtgttgtgtgccatcgaggtggcatcagaagagatcagctcatacggggttttcgacgtcgagccggttcccggcggggacaatcctaacgtgttgaaggttatcggcatggtggaaaagcccaaagccgaagatgctccttcgacgttcgcggcagccggtcgctatgtgcttgatcgcgcaattttcgatgcgttgcgtcgcgtcagtcgtggcacaggcggcgaggtgcagatcaccgatgcgatcgcgttgctaatcaaggagggccatccggtccacgtagtggtgcatcgcggatctcgacacgacttgggaaatcccggcggctacctgaaagctgcggttgactttgcgttggatcgtgacgattatggcccggatttgcggcggtggttggtggagcgattgggtttaatcgagcagtag

SEQ ID NO: 27479 - DNA, 1275 bp, Mycobacterium leprae
gtgcgttctgtggaagagcagcaggcccggatattggccgccgcggtagtcccacggccagtacgtgtcgccattgccgaggcacagggattgatgtgcgccgaagaagtgatgaccgaacggccactgcctggtttcgaccaggcggcgattgatggctacgcggtacgtagcgtcgacgtctcgggtatcggtgagtcggatggaggtgaatccggttcatccgatgaggatgggcgttatgtgctgaccttgccggtgatgggaaccatcgaggctggtgcgcgcacacccagcaggctgctgccccaccaggctgtccgagtgcagactggggcaccgctgccggtgctggccgatgcagttctgccggtgcggtggaccgacggcgggatgtcgcgcgtgcggattctgcgtggcgcgccgtcgggtgcctatgtacggcgtgtgggcgatgatgtgcagcccggggacgtcgccgtgcgtgccggaacaatcatcggggctgcccaggtggggctgctagcggcggtcggccgcgaacgagtactggtgcacccgcggccacggctgtcaataatggccgtaggtggggaactggtcgacatctcgcgtactccaggcaacggacaggtgtacgacgttaactcctatgcattgaccgcggccggccgtgatgctggtgcggaggtgaaccgcatcggcatcgtcagcaacaacctgaaggagttcggcgaagttgttgagggccagatcagccgagccgaagtcgtggtgatcgccggaggagtcgggggggcggcggccgaggcggtgcgggcagtgctctcggagataggcgagatggaggtcgttcgcgtcgccatgcatcctggctccgtccagggcttcgggcagctgggtcgcgagggcgttccgacatttctgctgccggccaatccggttagcgccctggtggttttcgaagtaatggttcggccgttgatccggttgtcgctgggcaagcgccagccgatgcgccggatcgtgcaggcccgaacgctatcgccgatcacttcggtggccgggcgcaaaggttacttgcgcggtcagttgatgcgggatcaggacaccggtgaatacctggtgcaagcacttggtggcgctcttggtgcgtcgtcgcatttgctggcgacgcttgccgaagcaaactgtctggtagtgattcccagtggcgccgagcagattcgtaccggtgaggtcgtcgacgttgctttccttgctcagcgcggctaa

SEQ ID NO: 27480 - DNA, 846 bp, Mycobacterium leprae
atgacctatggtcgcctgttgctgggtgccaccccgttgggtcaacccttagatgcgtcgagaaggttgaccgacgcactgtgctgtgccgatgtcgtggcggctgaagacacccggcgggcgagaactctggcgaaaacccttggcgtggtcatcactggtcgggtgataagcttgtttgaccagattgaggccgtgcgggtgtctgccctagtagcggagattgaagctggtgcaacggtgctggtgattagcgatgccggaatgtcggtgatcagcgaccccggttaccggctggtcgcggcgtgcatcgctgctggcctgccggtgcggtgtctacctgggccgtccgcggttatgacggcactggccgtgtccgggctttcgtcggagaagttctgtttcgagggtttcgcaccacgcaaaagctcggcgcgcagaacctggttggcttcgttggccgacgaacggcgtacctgtgtgttcttcgaatcgccgcgccggttggccgcatgcttgcgtgatgccgtcgaccagctcggcagtgcccgtccggtggtggtctgccgggagctgaccaaggtgcacgaggaggtggtgcgtggatcgcttgacgagttagcaacctgggcagccaacggtgtgctcggcgagattaccgttgtgctggccggtgcgactccgcgtgccgacctgttcttgctagttcctgaggtggagaacctcgtagcagggggtgcccgcgtcaaggacgcgtgtggccaggtggccgctgtgcattcgtcggtgcgttcgcgccagctttacgatgcggtcttgagggcacgccaggtgtcgtcgcgctag

SEQ ID NO: 27481 - DNA, 2844 bp, Mycobacterium leprae
atgaagggccccaggggttctaggagcggcagaaatgggagcccgcggcgacttgttatagtcgagtcgccgacgaaagcgcgcaaattgtccggctatctaggatctgcgtacatagtcgaatcatcccgggggcatatccgtgacctgccgcggacggcggctgatgtgcccgcgaagttcaagtctgagccgtgggctcggctgggcgtaaacgtcgacgcagactttgaaccgctctacatcatcacccccgagaagaagagcaccgtcactgaactcaaaggtctgctccaaggagtcgacgagctctatctggccacagatggtgaccgcgagggcgaagccatcgcctggcacctgatgcagactctgaaaccgcgagttccggtcaagcggatggttttccacgagatcaccgagcacgcgatcctcgccgccgctgcgcatccccgtgaactggatattgacctggttgacgcgcaggagacccgacgcatcctggaccggctgtacgggtatgaagttagtccggtactgtggaagaaggtagcgcctaagctttcggcgggccgagtgcaatcggtggccacccgcatcatcgtgcagcgtgaacgcgaccggatggcgttctgcagcgcggtgtactgggacattgttgccaagctggacgccagcgtgtccgatccgaccgcccagccgctcacctttgtcgcccgtctgacggctgtagatggcttgcgggtcgccaccggccgcgatttcggtgcgatgggcacgctgcgtggagactgtgaggtctccaaaatcattgtcctcgacgacctgaccgcaaccacgttggccgcaggattgcgcggcgctcagcttaccgtggcctcagcggaagagaagctctacactcggcgaccgtatccgccattcatgacgtcgacgctgcaacaggaagccggacgcaagttgcgattctctgcggaacgcacgatgagcatcgcccagcggctatatgagaacggttacattacctacatgcgtaccgactcgaccacgttgtctgagtcggctatcaacgccgctcgtacgcaggcgcgtcagctctacggcgaggagtacgtctctgactcgccgcgtcagtacacccgcaaggtaaagaacgcacaggaagcccacgaggccatccggcctgcaggagagacgttcgctaccccggacgcggtgtgtaatgaactcgacggtgacgaattccggatctacgagctggtatggcggcgtactgtagcttctcagatggccgacgctcgcggtaccacgctgagcttgcggatcgagggccgagccggcgagcaacacgttgtcttctcagcttccgggcgcaccctgaccttccccggcttcctgaaggcctatgtggaaaccgtggacgagctggccggcggcgaggctgacgacgctgagcgtcgactaccgcatctgacctctggtcagctgctggatgtcatcgatctgactccggacgggcacgccaccaaccctccggcccgctatacggaagcttctttggttaaagcgttggaggagttgggtatcggccgcccgtcgacgtactcatcgatcataaagaccgtccaggaccgcggctatgtgcagaagaagggcagcgccctggtgccgtcgtgggtcgcgttcgcagttaccggccttttggagcagcatttcggccgtctcgtcgactacgatttcaccgccgcgatggaagacgagctcgatgagatcgctaacgggaatgagcaacgtaccaactggctcaacaacttctactttggtggcaaccacggtgtgtccgattcaatagcccgctccggcggcttgaagaagttggtcggcgtgaatattgaagggattgatgcacgagaggtcaattccatcaaactgtttgacgatgagcacggtcgtcctgtctatgttcgggtaggcaagactgggccgtatctggaacgcttgttggcaggcgatgatggtgaacttaccccgcagcgggcaaacctcaacggcacactcactccggatgagctcaccttggaggttgccgaggagcttttcgccacaccgcacgaggggcgcgttctgggggtggatcccgaaactggccacgagatcgtcgccaaagacggtcggtacgggccttatgtgactgaggtcctgcctaagcacgatgacgactatggtgcagcggatcagggaactaagaaaactaagaagggtaggagggcttccgcttctcaaggccccaaaccgaggaccgggtctttgctgcggagcatggatttgcaaacgatcactctcgaggatgcattgaaactgttgttgctgcctcgggttgtcggtgtggaccctgcgtccggtgaagagatcaccgcgcagaacgggcgttatggtccatatctgaagcgcggcaaagattctcgaccactaacaactgaagaccagatgttcatcattactctcgacgaggcgttaaagatctacgctgaaccgaaacgtgctggtcgacaaagtacttcgccgccgcctttgcgtgagctggggactgatccgacgtcgggcaagccaatgctgatcaaggacggccggttcggcccgtatgtcaccgacggtgagaccaacgctagcctgcgcaagggtgatgacgtggtgtcgataaccgatgaacgtgccgccgaattgttggctgaccgacgggcccgaggtccggttaagcggcctgctaagaaggctcgcaaggtcccggcgaagaaggcagctagactggctccggcccgcgggatcagccagtcacctcgctag

SEQ ID NO: 27482 - DNA, 1710 bp, Mycobacterium leprae
gtgctagcgtttcgtggctacttctattgggacgacctgatcctgataggaaagactggcacccagggcctgctgtcagcatcgtacttgttcgatgaccacgacggccacctgatgccggccgcattcctagtcgccggagcgctcatccgattggcaccactggtctggaccggaccagcgatcagcctggtgtttctgcaattgctagtctcactgaccctgctgcgcgcgctttacgtcatcctaggctggcgccgggtgctgctgatcccattgacatttgggctttttacgccgcttgccgtaccagggttcgcgtggtgggcagcggcgctgaattcacttcccatgctggctgccctgggctgggtgtgcgccgacgcgatcctgctggtctgcaccggcaaccatcgctacgcagccaccggtgtgatggtctactgcggtgggctgttgtttttcgagaaagctgcggtaatcccattcgtcgcgttcgcagtagccgccctgctgcgccatgtgcgaggtgatcacgcggcgttacggacggtgtggcgtgacggcctgcgcctgtggatcacgtcgctgacattgaccgttatctgggtaacgctctatctcgccgtaattaatcagcaacgatggagtttcgacctgtcgatgacggggcagcttctgttgcgctcgatcacccacggtatcgtgccgggcctggccggcgggccatggcattgggaccgatgggcgccggcctcgccgtgggccgctcccccgccgctggtgatggcactcggctggctgttgctgatcggagtgctggcgctctcgctggtacacaagcaacgcatcaggttggtgtggctgaccgcggcggggtatacggtaacctgccagcttccgatctatctgatgcggtcgtcgcagcaaaccgctttagaattggctcaaaccctacggtatctgccggatcttgtgattgtgctagcgctgctgacggccatcgcgtttcatgcgccgaaccgcgcgttcgccgcacgttggctagacacgtcgccaacccgcactggggtgacaaccgggatcgctgggctgtttttggccagcagcctgtactcgacggtgacgtttctcaccagctggcgtgacaaccccacccaactctatctgcagaacgtccgtgctgatctggccgccatgcatgcggcctcgagtgcgcctctgctggattccgaggtcgaccaactggtgctgcaacgggtcgcctggccggagaacctggccagccacatgttcgctctgctacgagataggccagaatttgcctcggctacatcacacttgatgatgttgaacagttccggctcgctgatcgaagccagggtgacctggatccggaccatcgttgcagggcttacgccgcactgcggctatttcgtacgaccggacaggccgacgcgcatgatgctcgacggtccactgctaccggccgattggaccgtcgaactcaactacctagccaaccgcgacggcttgatgacgttgtcgctgacccaagggcccagtgttaaggttccggtgcatccaggacttaaccgagtctacgcgcggctgccgggtgccggagacgcaatcaccgtgctcgccaacacaaccacactgtcgttgtgcatcgcatccggaccggttggctttctcgcgccagcctaa

SEQ ID NO: 27483 - DNA, 1071 bp, Mycobacterium leprae
atggcagcgttccgcggtttcggcatctcgcttttaacaaccgcgatagccctcttagtcgcatacatctacggtgggcttgcctccctcttgccgctaatagtgctcgctatcttcgaagtgtccttgtcgttcgacaacgccatcatcaacgctgcgatactcaagcagatgagtcgattttggcggaagatgtttctgacgatcgggatcctcatcgcagcattcggtatgcgcctgatcttcccagcggttatcgtctgggcaaccgccaagctggatcccgttcgcaccatggacttggctttacatccgccgcccaatcacgcgctggaatttccagacggctcacctagctatcaaaagctcataatgtcggcccacccacagatcgcagcctttggcggaacgttcctgttgatgctgttcctggatttcgtctttcaagaccgagacatcaagtggctcaagtggatcgaggcccccttcacccgcatcgggcgacttggtccgctgtcggtggtggctatatttgtgttggttctcatcgccactgcgctgacgcactctggcgatgagcgcgcgaaggtgctgatcgcagggcttctgagcttggtgacgtatctgctcgtaagcgtattgaaccgagcgtttcgaccacccgacattgacacggcttccgggcggaggatggcaggcagggccggcctagtcagattcctttatctcgagattctcgacgccaccttctccttcgacggagtcaccggcgcttttgcgatcacctctgacccagtcatcatcgcgctgggtctgggactgatcagctcggtgttcatccgttcgatcaccatatacctggtccaccaggacgcattggaccgttatgtgtacctggaatatggtgcccactgggcgattggtgcgctatcggtgatgatgttgctttctgtcgaaccgcgattcgaaatcctcgaggccgtcaccgccttggtgggcgtgctcttcatcggcgcagcactcacctggagcgtgttccgcaatcatcgcgaggtcaaggcctgtacatag

SEQ ID NO: 27484 - DNA, 1386 bp, Mycobacterium leprae
ttgaatcctattcgctggcagaaatcttacgtagttgtcggattggccatgctggcgttcatcatcgccgcggtgaaggcggcaaccgtcttcaccacgggcggccacagcacgaatggagcacggtccgcggtaccgcctccgcgggcgtctacggtcaagccggcattggttccggtaaccgaaaccgccgtggtacccagcgttggcggactggctgccgcgctggcgtcggctttggcagatcccagtttgggtagttttgggggacggatcaccgatgcgatgactgccaaggaactctggcagcaacaagatgacatgccgttggtgccagcgtcggccaataagctcttgaccgcagctgcggcgctgttgacactggaccgccagactcggatcagcacccgggtggtggctgcaggcccgaatgcccaagggcctgtcgttctggtgggtgctggggatccgaccctgtcggccgcatcgcccgaccagagcacctggtataggggtgcgccgcggatcagtgaccttgtcgaacaggttcgtcgcagcggcgtgacgcctacggctgttcaggtggatacctcgctgttcaccggtccgacgatggcgcagggctgggatcctgccgatgtggacaacggctacactgccccgatcgagtcggcgatgatcgacgctgggcgtatccagccgacaaccgtcaaatcacgacggtcacgtaccccagctctggacgccgggcgggaattggccaaggccctgggggtcgctcccgatgcggttacaatcgtcaaggcatcgtctggggcgcggcagctggctgtggtgcagtcagcgccgctggtccagcggttatccgagatgatggacaactccgacaacgtgctggccgaatgcatcggccgcgaggtagcggccgccataaaccggcctttgagctttgccggcgcggtcgacgcggtgaccaaccggttaggtacagcgcatatcgacaccaccggcgctgctctggtggattctagcgggttgtcggtcaacaaccgcttgaccgccaagacactcggcggtgcggtgcaggcggcggcggggccggatcaaccggtgttgcgtgcgctgctggatctgctcccgatcgccggcggcagcggcacgttatcggaccgctttctcagttcggcgacccaccagggtccggccggctggttacgtgccaagaccggctcgttgaccgctattaattctttggtcggggtcgtcactgaccgcagcggtcgggtgttgacattcgcgttcatctccaacgacgctggcccgaccggtcgtgccgcgatggacgagcttgctactaggctgtggatgtgcgggtgcgctacgtga

SEQ ID NO: 27485 - DNA, 972 bp, Mycobacterium leprae
atggatcgacagggtgctgtagggcagctgcgcaggacagtcgaagagtttgctggtacctattgtgatatcgacgatcaatggtgcgtagcgctctccggcggctcggactcgttggcgctcactgcggttgcggcccaactacgctctacgaccgcatttatcgtggatcacggtttgcagtctgactcggccgctgtcgcagaaaccgctcgaaagcaagctatctcattgggatgtgttgacgcacaagtgctttgtgtgcagatagatccaccgtttggtcccaaaggcgggctcgaggcagcggcccgtgctgcccgatacgctgtgttgggcgccaatcgtaatggcccggtgttgttagcccacactctcgacgatcaagctgagacggtgctgcttggcttgggccgcggttctggggcgcgctcaatcgctggaatgcggccgcacgatccgccgtggtgccggccgttactgggtgtgcggcgcagcgtgccgcgtgccgcgtgccacgagctgggcctaaacgcttggcaggatccgcacaacacagactgtcgttacacccgaacccggctgcgcctcgaggtgctgccgctattggaggacgtgctaggtggtggggtcgtcgaggcgttggcccgcactgcgacggcgttgcgcgaggacactgaactgatcgacacgttcgccgcacaggcgctgcccaacatctgtgccgggtcggggctacatgcgcgggctctggccgcacttcccgacgcggttcgacgccgggttatccgtggctggctgttgaatggaggcgcgaccgggctgaccgacaagcagatccgtggagtggacacactggttaccgcgtggcgcgggcaaggcggggtggcggtgggatccaccttgcgcggacagcgtttgatcgccagccggtacgacggcgtactgaccttgcactgcgcgcccgtttag

SEQ ID NO: 27486 - DNA, 2373 bp, Mycobacterium leprae
atgttattgatgaaccgaaaaaacgttatccgcatggttacggcgatcgctgtagtggtgctgctcggctggtcgtttttctacttcagcgacgacactcgtggttacaagttcgtcgacacctcggtggcgatgtcccagatcaacggccacaacgtcaagagcgcgcaaattgatgaccgggaacagcagctgcggttgaccttgaagaagggcaacaacgacaccgatggctctgacaaggtcataaccaaataccccaccgggtacgcggtcgatttgttcaacgcgctgagcgctaagaacacgaaggtcaccaccgccgtaaacgaaggcagcatcctgggcgagttgctcgtttatgtgctgccattgcttttgctggtgggcctgtttgtgatgttctctcgtatgcagggcggcgctcgaatgggctttggattcggcaaatcacgcgctaagcaactttccaaagacatgcccaagaccactttcgctgacgttgccggtgttgacgaggcggtcgaggagctctacgagatcaaggacttcttgcaaaacccctgtaggtaccagacgctcggcgcgaagatccccaagggcgtgctgctctacgggccgccgggcaccggtaaaacgttgctggcccgcgctgtggcgggagaggcaggcgttccgttcttcaccatctccggatccgacttcgtcgagatgttcgttggcgttggcgcttcacgcgtaagggacctgttcgaccaggctaagcagaacagcccgtgcatcatctttgtcgatgagatagacgcggtgggccgccagcgcggcaccgggctcggcggtggccacgacgagcgcgagcaaacactgaaccagttgctggtcgagatggacggttttggcgatcgggcgggcgtcatcttgatcgcggcaaccaaccggcctgacatcttggaccccgcgcttctaaggcccgggcgtttcgaccggcagatcccggtgtccaacccggacctggcaggtcgtcgcgcggtgctgcgcgtgcattcgaagggcaagccgattgccgacgatgctgacctcgacggactggccaaacgcactgtcggaatgaccggcgctgaccttgccaacgttgtcaacgaggcggcgctgctgaccgcccgagagaacggcctggtgattaccggacccgccttggaggaggcggtggaccgggtgatcggcgggccacgtcgcaagggccggatcatcagcgagcaggaaaagaaaatcacagcgtatcacgagggcgggcacaccttggcggcttgggctatgcctgatatcgagcctatctacaaggtgacgatcctggctcggggacgtaccggcgggcacgcggtggcggtgcccgaggaagacaagggcttgaggacccgctcggaaatgatcgcgcagctggtgttcgcgatgggtggacgtgccgccgaggagttggtgttccgcgagccgacgaccggtgcggtatcggatatcgagaaggccaccaaaatcgcgcgctcgatggttaccgaattcggtatgagctccaaacttggagcggtcagatatggttccgagcacggcgacccgttcctcggccggaccatgggcacccaggcggattactctcatgaggtcgcccgcgacatcgatgatgaggttcgcaagcttattgaagccgcgcacaccgaggcgtgggagattctcaccgaataccgcgacgtgcttgacaccctggccggcgagctgctggaaaaagaaactctgcaccgaccagagctggaggggatcttcgccagcgtcgaaaagcgaccccggctcaccatgttcgacgattttggtgggcggatcccgtcggacaagccgccgatcaagacacccggcgagctggcgatcgagcgcggcgagccctggccccagccagtccccgagccggcgttcaaggcagccatcgcccgtgcttcgcaggccgctgaggcctcgcaccaagcagcacaatcggataccgatgggccccccggccagggggccaatggttcacatgccggggaccgtcagcgccagcacggccctactcaacccgactatggcgctccgccgggttggcatgcgcctggatggccgccacaacagccgccggattactggtatccgcctgaacagcaaccctcacagtcgccctattggccgcagcccgcgcccagctatccgggccaagccccccctccgtatccgtcgtacccgccttgtccttcttacccgccgcctggtcaatccgccccggacgcgggtaagccccctgcacagttggacgagggcgtgagcccctccaacccaccggcgcacggctga

SEQ ID NO: 27487 - DNA, 855 bp, Mycobacterium leprae
gtgagtttggcgccagtgcaggttattggggttttgaacgtcactgacaattcgttctcagatggcggacgttaccttgatcctgacgatgctgtccagcacggcctggcaatggtcgcggaaggcgcggcgattgtcgacgtcggtggcgaatcgacccggcccggtgccattaggaccgatcctcgagttgaactctctcgtatcgttcctgtcgtaaaagaacttgcagcacaggggattacagtaagtatcgatactacgcgcgctgatgttgcacgggcggcgctgcaaagcggcgcacggatcgtcaacgatgtgtctggtgggcgagcagatcccgcgatggctcctctggtggctgaagccggtgttgcgtgggtgttgatgcactggcgactgatgtcggctgaacggccgtatgaggctccgaattaccgcgacgtggtggctgaagtgcgtgccgacctactggctggtgtcgatcaggctgtggccgcaggtgttgatcctgggagtctagtgatcgatcccgggcttggattcgccaagacgggacagcacaattgggcgctgctgaatgcgttaccggagttggtggctactggggtcccgattctacttggcgcctcgcgtaaacggttcctgggtaggttattagctggggctgatggcgcggtacgaccgccggacggacgtgagacggcgaccgcggtgatttccgcacttgctgccctacacggggcttggggtgttcgggtgcacgatgtgcgtgcctcggtcgacgcactcaaggtcgtcggggcttggctgcatgctgggccgcagattgaaaaggttagatgtgatggctga

SEQ ID NO: 27488 - DNA, 576 bp, Mycobacterium leprae
atgactcgcgtcgtactgtctataggatccaatctgggtgaccggctggcgtggctgcagtcagccgtcgatgggctgggtgatgcggttgtcgcggtctctccggtgtatgacaccgtcccgtggggagccgtggagcagagatcgttcctcaacgcggtagtgatcgccgacggcccggcgtatgacacgaaggcctggctgtgtcgggctcaggagctcgagcggaacgcgggtcgggtgcggggacagcgctggggcgcacgcacactcgacgtcgatctgatctcctgctatcagacttcgggtgctacgaccggtgcggtcgaggtgattacgtgcgaaagcaacttgacgttgccgcatccgcgggctcatctgcgggctttcgtgctggttccgtggttggctgtcgactcggatgctgagctgaccgtcgctgggcgggcgcaacgggtcgatcggctgttggcagagatggagccgaccgagcgggaaggtgtgcggttgaccaatctgacgctcaagctgaaacgtagttcgccggcgcggccagtcagtccgaaatcagactga

SEQ ID NO: 27489 - DNA, 1524 bp, Mycobacterium leprae
gtgaacgctgacccgttggagactgacgctgctcttcctgagcagtttcggattcgccgggacaagcgtgctcgtttgttggcggaggggcgtgacccgtatccggtcgccattgaacgcacccataccctagctgaggttcgcgcagcctatcccgacctggcgaccgactccgccaccgatgacatcgttggtatcgcgggtagggtaatattcgcgcgtaattcggggaaactgtgctttgcgacactgcaggacggtgacggcaccaacttgcaggtgatgattagtctcaacaaggttggttccgaaacgcttgacgcgtggaaagtcgacgtcgatcttggcgacattgtttatgtacacgggaacgtgattagctcgcgtagcggcgagttatcagttcttgctgattcctggcagatggtatctaagtcgttgcggccactgcccgtcgcgcataaagagatgagtgaagagtcgcgggtgcgacagcgttatgttgaccttattgtctgtccgcaagtgcgaatagtagctcatcagagaattgccgttatccgcgccatacggactgcgttagaacgacgcggttttctcgaagttgagacgcctatgttgcagactctggccggtggcgctgcggcccggccattcgtcacacattccaatgccctggacatcgatctgtacctgcgtatcgcacctgaactgttcctcaagcgatgcatcgtcggtggtttcgacaaggtcttcgaacttaatcgagtgtttcgaaacgaaggcgccgattctacgcattccccggaattttccatgctagagacctaccagacctacggaacctatgacgattcggcggtcgttacccgagaaattattcaagaggtggccgatgaggcgatcgggaccagacaactgcagatgcctgatgacagcgtctacgacatagatggagaatgggagacgatacaaatgtatccgtctctgtcggctgtgttgggtgaagaaatcacgccgcagacgtcagtcgatcggctgcgagccatcgcggatcggcttggccgtgggattggtccagagattcttgacaagcccagttacggacatggaagactcgtcgagcaactgtgggagtacacagtgggcaacaccctgagcgcgcccacatttgtcaaagattttccggtcgaaacaactcctttgacccgtcagcatcgaagcatccccggagtgaccgagaagtgggatctctacctgcgtggagttgaactggccacggggtactccgaattaaacgatccggtcgtgcagcgggaaagatttggtcaacaagtccgtgctgcagccgccgaggaagatgaggcgatggcacttgatgaggaatttctggcggcactggagtacgcgatgccgccatgcactggaactggaatgggtatcgaccggttgttgatgtctttgactggactgtcaattagggagactgttttgttcccgattgttcggccgcactccaactga

SEQ ID NO: 27490 - DNA, 2547 bp, Mycobacterium leprae
atgttcgaaagatttaccgatcgtgcccgcagggtggtcgtcctggcacaggaagaggcccggatgctcaaccataactacatcggcaccgagcacattttgctgggtcttatccacgaaggcgaaggtgtcgcggcgaaatcgttggattcgttggggatttcacttgaagccgttcgcagtcaggtcgaagatattatcggccagggtcagcaggcgccgtcggggcatatcccgtttacgcctcgtgccaagaaggttcttgagctgagcttgcgtgaggcgctgcagctcggccataattacatcggcaccgagcacattttgctgggccttatccgggagggagagggtgtggccgcccaggtgctggtcaagttgggcgccgagctgacccgagtgcgccagcaggtgatccagctgctaagtggctaccagggcaaagaagctgctgaagcgggcactggaggccggggtggcgaatccggtagtccatctacatctctggtgctcgaccagttcggtcgaaacctgacggctgctgcgatggagagcaagctggatccggtcattggccgcgaaaaggaaatcgagcgggtgatgcaggtgctgagccggcgcaccaagaacaacccggtgttgatcggcgagcctggcgtcggcaagaccgctgtcgtcgagggtcttgcgcaggccatcgtgcacggtgaggttcccgagacgctgaaagacaagcagctttacacacttgacctgggctcgttggtagccggctcgcgctaccgcggtgacttcgaggagcgcctgaagaaggtactcaaggagatcaacacccgcggtgacataatcttgttcatcgatgagctgcacaccctggtaggtgccggtgccgccgagggggcgatcgatgccgcgtcgatcctcaagcccaagctggcccgcggtgagctgcaaaccattggcgctaccaccctcgacgaatatcgcaagtacatcgagaaagacgccgccctggagcgccgcttccagccggtgcaggtgggtgagccaacggtggagcacactatcgagattctcaagggcctgcgggaccgctacgaggcccaccatcgggtgtcgatcaccgactcggcgatggtggccgccgccactctggccgatcgctacatcaatgaccgattcctcccggacaaggcgatcgacctgattgacgaagcaggcgcccggatgcggattcgccgaatgaccgcgccaccagatctgcgtgagttcgacgagaagatcgccgaagcccgccgggagaaagagtcggcgatcgacgcccaggatttcgagaaggcggctagcctacgcgaccgggagaagcaactggtagctcagcgtgcagaacgcgaaaagcaatggcgttcaggcgatctcgatgttattgcggaagttgacgacgagcaaattgccgaggtgctgggcaactggaccggtataccggtgttcaagctcaccgaggctgagactacccggctgctccgtatggaggaggagctgcacaaacggattatcggccaggaggatgctgttaaggccgtgtccaaggcgatccgtcgtacccgcgccgggctaaaagaccccaagcgcccgtcgggttcgttcatcttcgccggcccgtccggtgtcggtaagactgaactgtctaaggcgctggccaactttttgtttggcgacgacgacgcgctcatccagatcgatatgggcgagttccacgaccggttcaccgcgtcgcggctttttggtgctccgccgggatacgtcggctacgaggagggcggtcagctcaccgagaaggtgcggcgcaagccgttctcggtggtgctgttcgacgagatcgaaaaagcgcatcaggagatctataacagcctgttgcaggtgcttgaagacgggcggctcaccgatgggcagggtcgcacggtggacttcaaaaacaccgtgctgatctttacatccaaccttggtacctccgacatctccaagccggtcggtctgggcttcacccaaggtagtggtgagaacgactacgagcggatgaagcagaaggtcaacgatgagctgaagaagcacttccgcccagagttcctcaaccgcatcgacgacatcatcgtcttccaccaactgagccgtgatgagatcatccggatggtcgatctcatgattagccgggttgctaaccagctcaaggtcaaagacatgacgctggagttgacaaacaaggctaaggccttgttggctaagcgtggcttcgatccggtgctgggtgctcgcccgctgcggcgtactatccaacgcgagatcgaggaccagctctcggagaagatcctcttcgaggaagtcgggccgggacaggtcgtcaccgtcgacgtcgacaactgggatggcgaaggccccggtgaggacgtgaagttcactttcactgggatccgcaagccgtcgacagagccggatctggctaaggccggagtgcacagcgctggcgggcctgagccggtcgagcagtag

SEQ ID NO: 27491 - DNA, 1614 bp, Mycobacterium leprae
atgaggccctattacatcaccactgccatcgcgtatcccaacgctgcgccgcacattggtcacgcgtacgaatacatcgccaccgacgcgattgcccgcttcaagcggcttgacggcttagatgtgcgcttcctgaccggaaccgacgagcacggcctgaaggtcgcacaggccgccgaagcagccggcgtgccgacagcgcaacttgccaggcgcaattcgggtgtatttcagcgcatgcaagaggcactccacatttccttcgatcggttcatccgcaccaccgacgccgaccactacaaggcagctaaggaaatctggcggcgaatggatgcggccggcgacatctacctaggtacctattccgggtggtactcggtgcgcgacgagaggtttttcgtcgactcggagaccaaacttctcgataacggcatccgagtagcagtagaaaccggcacactagtcacctggactgagaaagagcagacctactttttccgactgtcggcatatgtcgacaaattgctagcccactacgacgccaaccccgacttcatcggacccgaggtgcgtcgcaacgaagtgatcagctttgtctccggtgggctggaagatttctcaatctcgcgcacttcattcgactggggtgtacaggtcccagaacatcctgaccatgtcatgtacgtctggatcgacgcgctaaccaactacctcaccggagccgggttcccggacaccgactcggagttgttcggtcgttactggcccgctaatctacacatgatcggcaaagacatcatcaggttccatgccgtatactggccggcgtttttgatgtcagccggaatcgagctgccacgaaggattttcgcacacgggttcttacacaaccacggcgagaagatgagcaagtcggtgggcaatatcgttgacccgatggcgctggtacaaacgttcggcgtggatcaggttcgatattttctgttgcgcgagatcccgttcggccaggacggcaactacagcgaagaggcgatcatcacccggatgaacaccgacctggccaacgaattcggcaatctggcgcagcgctcgttgtcgatggttgccaagaacctgggcggcgtagtgcctgaacccagtgagttcacctccgccgacactgcgcttctcacgacggccgacggcttgctggagcgggtgcgcggcaactttgacggacaggcgatgaacctggccctggaagctatttggctgatgctcggcgaagctaacaagtacttttcgtcgcaacagccctggatcttgcgtaagagcgagtctgaagcggatcaggccaggttccgtaccgtcctctacacgacttgcgaggtggtgcggattgcggcgttgcttgtccagcccgttatgccggaatcggccggcaagatgttggacttgcttggccaggaggaagaccaacgggcattcactgccgtcagtgtgcggctggcccccggcacggtgctgccgccacccaccggtgtgttcccccgctaccagccttccgaaatcgagggagcggaccccgtgaagtcgagcagcaagcggagagaacacaataagcgacgggagtga

SEQ ID NO: 27492 - DNA, 789 bp, Mycobacterium leprae
ttggtcgatgcccatacccacctcgacgcgtgcggcgcccgcgacgccgatgacgtgaatgccatcgttgagcgagccgcggctgtaggtgtggttgcggtcgtcaccgtcgcagacgacttggaatctgcgcgttgggtcattgctgccgccgggtgggaccggcgggtgtacgcggcggtggcgttgcacccgacgcgagcaaactcgctcaccagtgccgctcgggccaagattgaacaactggcggcccatccgcggatggtggctgtcggcgagaccggtatggatttgtattggcccggccgcctcgacagctgtgccccacctgacgtgcagcgcgaggcgttcgcatggcatattgatcttgccaagcgatgtggcaaaccgctgatgatccacaaccggcaagctgacgcggaagtgcttgacgtcttgcgtgctgagggcgcccccgagcaagtaatttttcattgtttttcgtctaatgctgcgatggcccgccgctgcgtagacgccgggtggatgctcagcttgtccgggacggtgagtttccgtaatgctcgtcccctgcgggaagctgttccgttgatcccagcgcaacagcttctggtggaaaccgatgcgccatttttgaccccgcatccccaccggggtctagctaacgaaccttactgccttccttacactgttagagccgttgctgaattggttgaacgttccccagaagagctggcgcaaatcaccactagcaatgctctacgcgtgtacaagctaggatctgtatag

SEQ ID NO: 27493 - DNA, 921 bp, Mycobacterium leprae
gtgcagcggaagagtgggtgcacactgaccatccggctactcgagcgtaccgagatcaggtggctggtaaaagaacttgaatgtcggccacggaaatctctcggccaaaatttcgtgcacgacgccaacacggtgcgacgtgtggtttcgacttccagagtgaaccggtctgacttcgtcttggaggttggtcctggcttcggatcgctcacgctggcattgctggactgcggcgctgccgtcagtgccatagaaattgacccagtgttagcgggtcggttgccgcagacggttgctgagcattcaaataatgagatccaccggctcacggtgtgcaaccgcgacgttttatcctttcgccgtggcgatctggctaccgagccgacggcgctagttgccaacctgccgtacaacgttgcggttccggcgttattgcatctgctcgccgagttcccgtccatcaggactgttacggtgatggtgcaggctgaggtcgccgaacggcttgccgccgagccgggtggcaaggattacggcgtgcccagcgtcaagttgagtttctttggacgggtccgtcgctgtggcatggtgtctccgactgttttctggccgattcctcgtgtctactccggtttggtacgcgtcgaccgctatgcgacttcgccatggccgactgatgacgccttccgtcggcaggtattcgaactggtagacattgcattcactcagcggcgcaagacatctcgcaacgcgtttgtgaagtgggcgggttcgagtaacgaatcagcgaatcgattgcttgccgctagcatcgatcctgcccgtcgcggcgagacgctgtccatcgacgacttcgttcgactgctgcgacgttctgatggtcgagacgacgcggcggtgcggtctgcttcggcgagctga

SEQ ID NO: 27494 - DNA, 648 bp, Mycobacterium leprae
atggctaagtcaaccgtcaacaagctgagcgtatcggtgcgtactaacaccggcaagggcgcgtcccggagagcccggcgtgacggcaaggttcccgccgtcctctacggccacggcgaggagccacagcacctggagttgccggcacacgctttctccgctgtactccgacacgtcggcactaatgcggtgctcactctcgaggtcgctggaaaggaacagttggcgttgactaaagcaatcgacgtccatccgatccgccacaccatcatgcacgccgacctgctggtcgtccgtagtggagaaaagatcgtcgtcgaagtccccgttgaggtcgagggcgacgctggacccgacatcctggtcacccaggagaccacctccatcgagatcgaggccgaggcgctgtcgattcccgagcagttgaccatgtccatcgaaggcgccgaaccgggtacccagttcaccgccaggcagatacccctgccggtgggcgtcactctagtttccgacccggagatgctggtagtcaatgtggtaaacgcgccgacggacgcacaaaccaaggccaaatacgcaggcgaggcacacgaagctccggaagtaggaacagccgaaaacaagaccgccgcaaccgagtccgagtag

SEQ ID NO: 27495 - DNA, 984 bp, Mycobacterium leprae
atgttgagccacgactggaccgacaatcgaaaaaacctgatgctcttttcgggccgtgcgcatcccgagctagccgagcaggtagccaaagaactcgacatgcacgtcaccacccaggacgcgcgggaattcgccaacggcgagatcttcgtgcgcttccacgaatcagtgcgcggctgtgacgccttcgtcctgcaatcttgcccggcaccggtgaatacctggctgatggaacagctgatcatgatcgacgcgctcaagcggggcagtgccaagcggatcaccgccgtcataccattctacccttacgctcgacaggacaagaagcaccgcggccgcgagcccatctcggcgcgactggtcgctgacttgcttaaaacggcgggcgccgaccggatcgtgacggtcgacctacacaccgaccagattcagggtttctttgacgggcccgtcgaccacatgcgcggacaaaacctgttgacggggtatatcaagaacaattacccggacaccaacatggtggtggtctcccccgactccggcagagtgcggatcgccgagaaatggggcgacgcactgggcggtgtcccgctggccttcattcacaagacccgcgaccttcgcgtacccaaccaagtggtatccaaccgagttgtcggcgaagtcgaaggtcgcacctgtgtgctgatcgacgacatgatcgacactggcggcaccgtcgccggcgcagtgcaattgctgcgtaacgatggcgccagtgacgtaatcatcgcagctacccacggtgtgctgtcgcccccggctgctgaacggctggcccagtacggcacccgggaagtgatcgtcacgaacacgctaccgatcggcgaagagaagcgtttcccccagctcacggttttgtccatcgcaccgttgctagccagcaccatccgcgccattttcgaaaatggctcagtcacagggctattcgacggagaagcgtag

SEQ ID NO: 27496 - DNA, 1479 bp, Mycobacterium leprae
atgacgtttcgtggtgataccgcggtcctcgtcttagcggccggccccggcagccgaatgcggtcagatacaccgaaagtgctgcacaccatcgctggtcgcagcatgttgtcgcattcactgcacgcgatcaccaaactggcaccccagcatctagtcgtggtactaggccacgagcatcagcgcattgcgccgctagtcgccgaactggccgacaccctcgaacgcacgattgacgtcgcattacaggatcgacctcgcggtaccggacatgccgtgttctgtggcctgtccgcattacccgatgactacggcggcattgtcgttgtaacttcaggcgataccccactgctcgacgccaacactctggccgaactgatcgcaacccacaacgccacatccgccgcagtgacggtgctaaccacgacatttagcgatccccttggctacggccggatcctgcgcacccaggacaatgaagttatggcgattatcgagcacgccgacgcatcgccttcacaacgcgagatccgcgaggtaaatgccggcgtgtatgccttcgatatcacggcgttgcggtcggcgttgatcagactgaactccaacaacacccaacaggagctctacctcaccgacgtgatctccatccttcgcagggaaggccaaaaggtgaatgctcaacacatcgacgacaacgcacttgtggctggcgtcaacaaccgcgttcagctggccgaactgagcgccgaactcaaccgccgcattgtggccactcaccaggtggccggcgttaccatcatcgatcctgctaccacttggatcgatatagacgtgactataggcaacgacaccgtaatccaccccggtactcagttgctcggccgcactcagatcggcgagtgctgcgtcatcggcccggacaccacgctgaccgacgtcttggtcagtcagcgtgccacagtggtccgcacgcacggcacatcgtcaactataggtgcgggcgctatggtcggtccgttcacctacctgaggcccggaaccgtgctgggcaccaagggtaagttgggcgccttcgtcgagaccaaaaactccacaatcggaaccggcgccaaagtgccgcatttgacctacgtcggcgacgccgatatcggcgagcacagcaacatcggcgcgtccagcgtattcgtcaactacgatggcacagccaaacagcgcaccactatcgggtcacacgtacgcactgggtcggacaccaagttcgtcgcgccggtgactgtgggcgacggcgcttacacaggcgccggcacagtcgtgcgcaacgacgtcccgccgggggcactggctgtttccgtgagcccccaacgcaacatcgaaaactgggtgcagcgcaagcgacccggcagtgccgcagctcaggcagcagaaaaggcctcaacacgtacaggcaaacaatcccagcagaaatccgaacctgactag

SEQ ID NO: 27497 - DNA, 3675 bp, Mycobacterium leprae
atgaccgcaccggggcctgcttgcctagacaccccaatcgcggggctcgttgaattggcactcactgcgccgaccttcggccagctcatggagcgcgcgggcactagaccagctgaattgatcctggctggccctgcctgtgcgcggttgttcgtcgccagtgcgctggctaggctgggtcccttgctggtggttaccgccaccggtcgtgaagcgagcaatcttaccgcagagctgcgcggtgtcttcggcgccgcggtggcgatgttcccgtcctgggagacgctgccgcacgaacgactttcacctggtgtagacaccgtcggtgcccggctgatggtgctgcgccgactagcccatcccgacgatgcccggttgggtccacccttgcaggtggtggtgaccgcggtgcgttcgctgctgcagccgatgacagcgcagctgggtttggtggaacctgttaccttgagcgttggcgatgagatcggttttgaacgggttatcgcgcgcctggtcgagctggcatatacccgggtagatatggtcggccggcgcggcgagttcgccgtccgcggtgggattctcgatattttcggcccgactgccgaacatccggtgcgtgtcgaattctggggtgacgagattaccgagatgcggatgttttcggtggtcgatcagcgctctattcccgagatcggtgttgacacgttggttgcgatagcctgccgggaactgctgctcagcgacgacgtgcgagctcgggctgtcgagttggccgcgcaggcggctgcacggcgaccgacagaggaacctgccatctccggcagcgtcactgacgtgttggccaagctagccgaagggataccagtcgacgggatggaggctctactcccggtactttgtcctgacgattatgcgctgctgactgaccagttcgctgctgacacgccggtgttgctgtgtgacccggaaaaggtccgcattcaggccgccgatttgatcaagaccgatcgagcattcctcgaggcgtcgtggtcggttgccgccataggtgcagacaacgcggcacccgtcgatgtcgagcagctgtacgggtcggggttcgtagaattaggcgacgtgcaggccgccgccatccggtccggtcatccgtggtggaccttgagccaactgtccgacgagtcggctttggagctcgacatccgggcggcaccgtcgacgcgtgggcatcagcatgccatcgacggcatttttgcgatgctgcgtgcgcatgttgccaccggtggatatgcggcgatcgtcacgcctgggaccggaaccgcccatcgagtggtggagcgacttgccgagtctgacattccgggtgcgatgctggaaccggctgccgcccccggacttggcctgcgaccaggcctggtcggggtgctcaaaggtccgctgcttgatggtgtggttataccgggcgccaacctggtgatcatcaccgaagccgatctgaccggcagccgagcgacgcctgtcgagggcaagcggctggcggccaagcggcgcagcgccgccgatccgttggcacttaccgctggtgacttggtggtgcatgatcagcacggcatcggacggttcgtggaaatggttgagcgcaccgttggcggtgctcgtcgcgagtacctggtgctggaatatgcctcgaataagaaaagtaagcaggccgacaagctgtatgttccgatggattcgctggatcagttgtcacggtatgtaggcgggcaagcgccggcgcttagccggctcggcggcagcgactgggctaataccaagaccaaggcccgctgcgcggtgcgagaaattgcgggtgaattggtgtcgctatacgccaaacgccaggccagccccggacacgcattcgggccggacacgccctggcaggccgagatggaggacgcgtttggcttcaccgagaccgtcgaccagctcaccgcgatcaccgaggtcaagggcgatatggaaaagtcggtgccgatggaccgagtgatctgcggtgacgttggttacggcaaggccgagatcgcggtgcgtgcggcgttcaaggcagtgcaggacggcaagcaggttgccgtattggtaccgaccacattgctggccgaccagcatctgcggacgttcaccgaacggatggccggatttccggtgactgtcaaggggttgtcacggttcaccgacgccgccgagtctcgcgcggtgatcgacggccttgccgaggggtcggtggacatcgtgatcggcacgcatcggctgctgcagaccggggtgtgctggaaggatctgggtctagtcgtggttgacgaggaacagtggttcggcgtcgagcacaaggagcacatcaagtcgctgcgcacccacgtcgacgtgctgaccatgagcgccaccccgatcccgcgcaccctagagatgagcttggctgggattcgcgagatgtcgacgatcctgacgccgcccgaagagcgctacccggttttgacttatgtagggccgcacgatgacaagcaggtcgcggctgcgctgcggcgcgaacttctgcgcgatgggcaggcgttttatgtgcataaccgggtcagctccatctatcaggccgctgcccgggtgtgtggcttggtgcccgaagcgcgcgtggtggtcgcgcatgggcagatgcccgaggatctgctggaaaccaccatgcgggggttctggaaccgcgaatacgacatcttagtgtgcaccacgatcgtggagaccggcttggacatccccaacgccaacacgctcgtcgtcgagcgcgccgataccttcggtctgtctcagctgcaccagctgcggggtcgggtcggccgtagccacgagcgtggttacgcctacttcctctacccgccgcaggcgccgctgacggagatcgcctacgaccggttggtgaccatcgcacagaacaatgagctgggagcgggcatggcggtcgcgctcaaggacctagagatccgcggcgccggcaacgtgctaggtgtcgagcagtccgggcacgtagcaggggtcggattcgacctttatgtgcggctggtgggtgaggccgtcgaggcgtaccgagccgttgccgacggcaaaaccgccattactccggaggagccgaaggatgtacggatcgacttgccggtggatgcacacctgccgccagattacatcgccagtgatcggctccgacttgaaggctaccggcggttggccgcggcgtcttctgacacagaggtagcggccgttgtggacgagctcattgatcgctacggggcactgccagagccggcccagcggttggtggcggtggctcagttgcggctgctgtgtcgaggctcgggcatcatcgaagtgaccgccccgtcggcctctaccatgcggttgtccccaattaggctgatagattccgcccaagtgaggttaaagcggatgtatcccggagcgcagtaccgtgctaccgcggccacggtccaggttcctataccgcgagccggcagctccgggggaaccttaggtgtcccgtgtatccgcgatgtggaattggttcaggcggtggctgacttgatcacggcgctgcagggcctaccgaggaaggttattggcataacgggaccggaaccgacatcgaagtga

SEQ ID NO: 27498 - DNA, 1344 bp, Mycobacterium leprae
ttgagcccacccacaggacgtccacgtctcagccatgactataaggagaacttggtgccggttatcgagcaggtcggggcccgcgagatcctcgattcccgcggcaaccccacggtcgaagtcgaggtggtgctgattgacggaaccttcgcccgcgcagcggtgccttcgggcgcatcgaccggcgagtatgaggccgtcgagttacgtgacggcgacggtcgttacggtggcaagggtgtgaaaagggccgtggatgctgtgctcgacgagatcggtccagtggtgatcggcctcaacgccaatgaccagcggctgatcgatcaggagctgctggacctcgacggcacccccgacaagtcccgattgggtggtaacgcgatcctgggtgtctcgctggccgtcgccaaggcagccgccgattcagcggaattgccgctgttccgttatattggagggtctaacgcacatatccttccggtgcctatgatgaacattctcaacggcggcgcgcacgccgacactgctgttgatgtgcaggagttcatggtggcaccgatcggggcacccagtttcgttgaggcgctgcgttggggcgccgaggtatatcacgctctcaaatcggttctgaagaaaaaagggttaagcaccggcctgggtgatgagggtggctttgcccctgaagtggccggaaccaccgcggcgctggacttggtcaccttagctattgaagcggcgggttttaagccgggtgccgatgtggcattggcccttgatgcggcagccaccgagttctacacggacggcatcggctaccatttcgagggcatgacccacactgccgaccagatgactgagttttatgccgacttgctgggttcatacccactggtgtccatcgaagatccgctgtccgaagatgattgggacggttgggctgctctgacggcgtcgataggggaacaggtgcagatcgtcggggacgacatctttgccaccaatcctgagagactggaggagggcatcggtcgcggtgtggcaaacgcgttgctggtcaaggtgaaccagataggcacgttgaccgagacgctcgaagctgttgcgttggcacatcacagcggatatcgcacgatgatcagccaccgcagtggcgagaccgaggacacgatgatcgctgacctggtcgtggctctcggtagcgggcaaattaagacgggagcgcccgcccgcagtgagcgcgtcgctaaatataaccagctgctgcggattgaagaggagctcggcgacgccgcccgctatgccggcgatctggcatttctgcgatacgtcgtggaaacgagataa

SEQ ID NO: 27499 - DNA, 1299 bp, Mycobacterium leprae
atgccggcagtcgtcctcatcggcgctcagtggggcgacgagggcaaaggtaaggtcacagacctgctcggcggacgtgcccagtgggtggtgcgctatcagggtggcaataacgctgggcataccgttgtcttgcctactggcgagaacttcacactgcatctgatcccgtcgggggtgctgacgccgggtgttaccaacgtcatcggtaacggtgtggtggtggatcccggagtgctgctcagcgaactgcaaggcctggaagatcgtggtgtcgacacctcccagctgctgatctcagccgatgcgcacctgctgatgccctaccacgtggccatcgacaaggtcaccgagcgttacatgggcaacaagaagatcggcactaccggccgcggtatcgggccctgttaccaggacaagatcgcccgcatggggatacgggtcgccgatgtcttagaacctggtgagttgacccacaagatcgaggctgcgctcgagttcaaaaaccaggtgttggtcaagatctacaaccgcaaggcgttggacctggctcaggttgtcgaaacgctgctggagcaggcgcagcaatttcgacatcgcatcaccgacactcgtctgttgctcaacgacgccctcgaggccggtgagacggtgctgcttgaaggcgcacaaggcaccctgctcgacgttgatcacggcacctacccgtatgtgacatcgtcgaatccgacggcgggcggtgcggcgttgggctccggtatcggaccgacccggatccacactgtgctaggcattctcaaggcctacactactcgggtgggttctggtcctttccctaccgaactgttcgacgagaacggcgagtacttggccaagactggtagcgagatcggcgtgacgacaggacgacggcggcgttgcgggtggttcgacgccgtgatagcccgctacgccacccgggtcaacgggatcaccgactatttcctgaccaagcttgacgtgctgtccagcttggaaacggtgccggtctgcgtcggctatcagatcgccggtgtgcgcacccacgatatgccgataacccaaagcgatctcgcccgtgccgagccgatctatgaggagctgccgggttggtgggaagacatctccggagcgcgggaattcgaggacctgcccgccaaagcgcgtgactacgtattgagactggaagaacttgctggagcacaggttgcgtgcataggtgtcggtccgggacgggatcagaccatcgtgcgatgcgatgtattgaggagccgtcggtga

SEQ ID NO: 27500 - DNA, 1038 bp, Mycobacterium leprae
atgcctatcgcaacaccggagatctacgccgagatgttgagacgcgccaaggaaaactcatacgcttttccggccatcaactgtacgtcttcagagaccgtcaacgccgctatcaaaggctttgctgacgctggcagtgacggcatcatccagttttccaccggtggtgcggagttcgcctccgggctcggcgtgaaggacatggtgacgggtgcggtagcgctagcgaagttcactcacactattgcggccaagtacccgatcaacgttgcactgcacactgaccactgtcccaaggacaaactggacagttacgtgcgccctttgctggcgatctcggctagaagggtagcgaccggtaaggatccgctgttcggatcgcacatgtgggatggctctgcgataccgatcgatgagaatctggccatagcccaagatctgctgaaggacgcagcggccgccaagatcattctcgaagtcgagatcggtgtggtcggcggcgaggaagacggcgtggccggcgaaatcaacgaaaaattatatactactccgaaggatttcgtgaagacgatagatgctctgggcgccggtgaacacggcaagtatctgctggctgcgacgtttggcaacgtgcacggtgtctataagcctggcaacgttaagctgcgtcccgacatcctggccgaaggtcagaaggtggcagcggccaagctcagtcagtctgagggctcgaaaccgttcgattttgtgttccacggcggttccggttcggaaaagtcggagatcgaggaggcgctgcggtacggtgtggtgaagatgaacgttgacaccgatacccaatatgcattcactcgcccagtgtccggtcacatgttcactaactacgacggcgtgcttaaggtcgacggcgatgtgggcaataagaaggtgtacgacccgcgcagctatcttaagaaggccgaagcatcgatgaccgagcgggtgcttgaggcctgtaacgatctacgttgcgccggaaagtcggtggcggctagttga

SEQ ID NO: 27501 - DNA, 708 bp, Mycobacterium leprae
gtgcaggagcctcataggcagcccgcgatctgtctgtccacccgtctcgccaaggcgcggctttatctatgcaccgacgcgcggcgtgaacgcggcgacttagcccaatttgtcaacgccgccctggccggcggggtggacatcgtccaactgcgagacaagggttcggtcggtgaacagcagtttggcccactggaggcgcgcgatgcgttggccgcgtgcgagatcttcaccgacgcgacgggaagacacgacgccttgttcgcggtcaacgaccgcgccgatattgcccgcgcggcgggcgccgacgtgctgcatttgggacagggcgatctgccgcctggtgtggcgaggcagatcgtatgccgccagatgctgatcggcctgtctacccatgatcggcaccaggttgccgcggctgtggccgccttagacgctggcctggtcgactatttctgtgttgggccctgttggcctacccctaccaaaccggaccgcccggctcctggtcttgagctggtgcgggctgccgctgaactcgctggagacaaaccgtggttcgctatcggcggtatcgacgcgcagcggctgcccgacgtgctccatgccggtgcccgccggattgtagtggtgcgggcaattaccgcggccgccgacccccgcgccgcagccgaacaactcatttcgacgctgacagcaactagctga

SEQ ID NO: 27502 - DNA, 1626 bp, Mycobacterium leprae
atggccaagacaattgcgtacgacgaagaggcccgtcgcggcctcgagcggggcttgaacagcctcgccgacgcggtaaaggtgacgttgggtccgaaggggcgcaacgtcgttctagagaagaagtggggtgctcccacgatcaccaacgatggcgtgtccatcgccaaggagatcgagctggaggacccgtacgagaagattggcgctgagttggtcaaggaagtcgccaagaagacagatgacgtcgccggtgatggcaccacgacggccaccgtgctggcccaggcattggtcaaagagggcctacgcaacgtcgcggccggcgccaacccgctaggtctcaagcgtggcatcgagaaagctgtcgataaggtaactgagactctgctcaaggacgctaaggaggtcgaaaccaaggaacaaattgctgccactgcagcgatttcggcgggtgaccagtcgatcggtgatctgatcgccgaggcgatggacaaggttggcaacgagggtgttatcaccgtcgaggaatccaacaccttcggtctgcagctcgagctcaccgagggaatgcggttcgacaagggctacatttcgggctacttcgtcaccgacgccgagcgtcaggaagctgtcctagaggagccctacatccttctggtcagctccaaagtgtctaccgtcaaggacctgctgccgctgctagagaaggtcatccaggccggcaagtcgctgctgatcattgctgaggatgtcgagggtgaggcgttgtctaccctggtcgtcaacaagatccgtggcactttcaagtcggtggcggtcaaagctcctggctttggtgaccgccgcaaggcaatgttgcaagacatggccattctcaccggagcccaggtcatcagcgaggaggtcggtctcacattggagaacaccgatctgtcattgctgggcaaggcccgcaaggtggttatgaccaaggacgaaaccaccatcgtcgagggtgccggtgacaccgacgccatcgccgggcgagtggctcagatccgtaccgagatcgagaacagtgactctgactatgaccgcgagaaactgcaggaacgcctggctaagttggccggtggtgttgcggtgatcaaggccggtgctgccactgaggtggagctcaaggagcgcaagcaccgcatcgaggacgcagtccgcaacgccaaggccgcggtggaggaggggatcgtcgccggcggcggtgtgactctgctacaggctgctccggctctggacaagctgaagctgaccggtgacgaggcgaccggtgccaatattgtcaaggtggcgttggaagctccgctcaagcagatcgccttcaattccgggatggagcccggcgtggtggccgaaaaggtgcgtaacctttcagtgggtcacggcctgaacgccgccaccggtgagtacgaggacctgctcaaggccggcgttgccgacccggtgaaggttacacgttctgcgctgcagaacgcagcgtccatcgccggcctgttccttactacggaggccgtcgtcgccgacaagccggagaagacggcagctccggcgagcgacccgaccggtggcatgggtggtatggacttctga

SEQ ID NO: 27503 - DNA, 726 bp, Mycobacterium leprae
atggctgtggcaacgggcactgtagttgcagtggtcccggccgccggggcggggaagcggctagcggccggcattccgaaggcattctgtgaacttgacgggcgtacgcttgtcgaacgtgctgtcgttggcttgctggaatctggcgttgttgaccatgttgtggtggcggtgcctgctgatcgcattgcccagacccagtgggtgctatcccaacggctagccaattcggcgggtcaacacgccacagttgtggccggcggggccgaccgcaccaaatcggtgtgtcaggctcttgcgacccttcccgccccgtcaagggtgggcgcacccgagtttatattggtgcatgatgccgcgcgggcgctgacaccagcacggttaatcgtgcgggtggttgatgctttgcgtgctggtcataccgcggtcgttccagcgctgccactgtctgacaccattaaagccgtggacgccaacggaatggttcttggcactccggcgcgggtcggcttgcgggcggtgcagaccccgcaggggtttgctaccgagctgctatggtgcgcttatcagcgtggcccccatcttgatgccgtcgatttcaccgacgatgcttcccttgtcgaacatctcggtggccaggttcaggtggtcgccggcgatccactggcgttcaagatcaccactcagttggatctgctgctggcgaagaagattctgcgccggtga

SEQ ID NO: 27504 - DNA, 477 bp, Mycobacterium leprae
gtgagtgaactgccccgggtcggtttgggtttcgatgtccacgtgtttgaaccggggcggccgtgttggctggtggggctgctgttcccggacaacgacggctgcgccgggcactccgatggtgacgtagcggtgcatgcgctgtgtgatgccgtgttgtcggccgcagggcagggtgatatcggcggcctgttcgccgttggcgatccgcgttgggaacgcgtcagcggtgctgacatgctgcgccatgtagtcgaattgttactgcgacatggctacgaggtcgtcaacgcgtccgttcaagtgatcggtaaccgaccgaaaatcggtccgcgccgtaccgaggcgcaacggttgctgtcagctctgctgcgagcgccagtatcagtggcggcgacgaccaccgagggacttggcctgactgggcgtggcgagggcttgtccgccatcgcgactgcgttggtggtccaggtctga

SEQ ID NO: 27505 - DNA, 1422 bp, Mycobacterium leprae
gtgatcgatagcggccatttgcggctccacgatacggtagctggtgctgtgcgcgatttcgttccgctgcgagccgggcacgtctcgatctacctgtgtggtgccaccgttcaaggacagccgcacatcgggcacgtccgcagcggggtagccttcgacattctgcgccgatggctcatggcacgcggctatgacgtcgcgttcatccgcaacgtcaccgatatcgatgacaagattcttaacaaggctgccgcggctggccggccgtggtgggaatgggcggccacccacgagcgcgcgtttaccgcggcctatgacgccttggacgttttgccgccgtcagcagagccgcgagccaccgggcacattacccagatgatcgagctgatcgagctgttgatcgagacaggtcacgcctatacgggcggctctgatgtttatttcgacgtgctcagctacccggattatggccagctatctgggcacaagatggactatatccaccaaggcgaaggtgtgactaccggcaaacgtgatcaacgcgactttactttgtggaagggcgccaagtccggtgaaccgtcgtggcctacgccgtggggccgtggccgtccaggctggcacctggaatgctcggcaatggctcgtgcttatcttggttctgaatttgacatccattgcggtggaatggatttagtttttccgcaccacgaaaatgagatcgcgcagagccgcgctgtcggggatggcttcgcccgttactggctgcacaacggctgggtaacgatgggtggggagaagatgagtaagtcgctgggtaacgtgttgtccatcccagccgtgctgcagcgggttcggccagccgaactgcgttactatctcggtagcgcccactaccggtcgatgctggagttctccgaggccgcgctacaggatgcggtcaaagcttatgtcggagtggagaatttcctgactagggtgcgtactcgggttggtgccgttggcaccggcgaactgaccccacggttcgctgcagcactcgacgacgatctggcggtgccgatcgcgctggctgaggtgcaccacgctcgtgtggagggtaaccgagcgctcgacatcggcgaccacgaaggtgcgttgacgaacgccggcgctattcgagcgatgatgggcatcttaggttgcgacccgcttgacgaacgttgggaatcccgcgatgagacgtcggcggcgctagcggctgtcgatgtgctggtggccgctgagctagaaagccggcagatggcacgcgagcagcgtaactgggtacttgccgatcagatccgcgatcgactcaaggatgccggtattgaggtaactgataccgtcaacgggccgcagtgggaactgttggctggcgataagcaagttgatgcccggtaa

SEQ ID NO: 27506 - DNA, 759 bp, Mycobacterium leprae
atggcctgtatcgaccttaacgccgacttgggtgagggcttcggcgtgtggcggctcggcgacgatgaagccatgctgcggatcgtcactagcgccaacgtggcgtgcgggttccacgccggagatcccgccgggctgcttagggtatgccggttagcagccgaacgtggcgtgcgcataggagcacaggtgagctatcgcgacctagtcgggttcggccgacgattcatcgacgttaccgccgacgatcttctcgccgatgtagtttatcagatcggcgcattgcaagcgatcgcacagaccgccggttccgcggtgtcgtacgtaaaaccccatggagcactgtacaacacgatcgtgaccaaccgcgaacaaggtgccgcagtcgctgcggcaatacagctggtggattccacgctgccagtgctgggtttggctggttcgacgttttttgacgaggccgcgcgcattggcttacgcacggtagcggaggcgttcgccgatcgaacctaccgaccggacggtcagctgatttctcggcgcgaacccggcgcggtgttgcacgaccctgcggtgatcgcgcaaagagtggtaaccatggtgaccaccggtaaggccactgcggtcgacggcacacagcttgccgtcaccgtggaatcgatttgtttgcatggcgattcccccaacgctatacagatggctaccgcggtgcgcgatcaactcaacgccgccggcatcgatatcagggcgttctgctga

SEQ ID NO: 27507 - DNA, 444 bp, Mycobacterium leprae
gtgcctacatacgcgcccaaggcgggtgacaccacgtgttcgtggtacgtcatcgacgccacggacgtggtgcttggccgccttgccgctgtagcggccactctgttgcgcggcaagcacaagcccacgttcgctcctaatgttgatggcggtgactttgtcatcgtgatcaacgccgacaaggtcgccatcagcggcgataaagtacagcataagatggtttaccgccactcggggtatcccggcggcttgcgcaaacgcaccattggcgagctgatgcaaaagcaccccgaccgcgtcgtagagaaagccatcgttggcatgctgcccaaaaacaagcttagccgccagatccagcgcaagcttcgtgtctacgccggaccagatcatccacattccgctcagcaaccggttccattcgaaatcaagcaggtagcgcagtga

SEQ ID NO: 27508 - DNA, 462 bp, Mycobacterium leprae
gtgaccgaaaccagcgaagccgtggagattgcggtggggactccagcagccaagcatagtgaatcttttgtgttcgagcggtccatccagactgttggccgccgcaaagaggccgtcgtgcgggtgcggttggtgctcggcaccggcaagttcgatctcaatggtcgcagcctggaggactacttcccgaacaaggtgcatcagcagctcattaaagcaccgttggtcactgttgagcggacaaggaacttcgacatattcgctctcctacacggtggtggaccatcgggtcaggccggggcgcttcgtctgggcatcgcccgggcgttgatcctggcgtcaccggaggaccggcccgccttgaagaaggccggtttcctcacccgtgatccacgctcgactgagcgcaagaagtatggcttgaagaaggcccgcaaggcgccgcagtacagcaagcgctga

SEQ ID NO: 27509 - DNA, 1392 bp, Mycobacterium leprae
atgggtcgactattcggcactgatggtgttcgcggagtggccaatcgtgagttgacccctgagctcgtgctggccctaggcgcggcggcggcacggtgcttggccaactcgggcgaaccggggcggcgggtagccgtgatcggtcgcgatccgcgggccagcggtgagatgcttgaggccgctgtcatcgctggcctgaccagtgcgggtgttgacgcactgcgggttggagtgctcccgacacctgcggtggcgtatctgaccggtgcctacgacgccgacttcggggtgatgatttcggcgtcccacaacccgatggtcgacaacggcatcaagatcttcgggccgggcggtcataaattggacgacgacaccgaagaccagatcgaagacctggttaccggcgggcccgggttgcgcccggccggcgtggcgatcggtcgcgtcatcgacgccgaggatgctacggaacgttacttgcgccacgtgggcaaagccagcaccatacggctcgacggcttgacggtggtcgtcgactgcgcacatggcgcggcctcgtcagcggcaccgcgcgcgtatcgcgcagccggtgcccgggtcatcgcgatcaacgccgatcccaacggcatcaacatcaacgatcgctgtggatctacggacctgggttcgttgcgttcagcggtgcttgcccaccgtgctgacctaggcctggcgcacgacggagacgccgaccggtgtcttgccgttgatgctaatggtgatctcgtcgacggcgacgccatcatggtcgtgcttgcgcttgcgatgcaagaagccggcgaactgtcttccaacactttggtgactaccgtgatgagcaatctggggctgcacctggccatgcgttcggtcggcgtcatcgtgcgtacaaccgacgtcggcgaccgttatgtcttggaggagttgcgcgctggtgactttagtctcggcggcgagcaatccggccatatcgtgatgcccgcattgggctccaccggagacggtatcatcactgggttgcgattgatgacccgcatggtgcagaccagctcttcgctggctgccctcgcgtcggcgatgcgggcgttgccgcaggtgttaatcaatgtcgaggttgcagacaaaaccactgctgccgctgcgcctttagtgcagacggcggtcgagactgctgaggtcgaattggggaatacaggtcgaatcctgttgcgtccctcaggaactgagccgatgatccgggtcatggtggaggcagccgaagaagatgtcgcgcaccgagtggcgacgcgagtcgctgcagcggtgagtgctcaggggtcacctctccgatgctggaaccccgacgcgatatcgggcgtcgaattaagattatga

SEQ ID NO: 27510 - DNA, 1878 bp, Mycobacterium leprae
atgtgtggacttgtcggctacgtcgggcagcgccctgcctgcggggtcgtcatggatgcgctgcgcaggatggagtaccgcggctacgactcgtcgggaatcgcgctgatcaacggcagtgccaaatcgggcaatctgaccgttcgtcgtcgtgctggtcgactttccaatttggagtcggtgttggcggagatggttccggcgtcgctggccggcaacgtcggcctcggccatatccggtgggccacccatggtcgccccaccgaccgcaacgcgcatccgcaccgcgacgccaccggcaagatcgccgtcgtccacaacggcatcatcgagaatttcccctcccttcgccatgagttggagatcgccggagtagagttcgtcagcgacaccgacaccgaggtagctgtgcatttggtggcacaggcttactgcgctggcgagacggccggtgatttcgtcgggtccgtgctggcggtgctgcgccggctacagggccacttcactctggtgttcgccaacgccgacgagcccggtaccattgtggccgcgcgccgctccaccccgctagtgctcgggatcggcgacggggagatgttcgtcggttccgacgtggccgcgttcatcgaacacacccggcaggcggtcgagcttggtcaggaccaggctgtggtgatcactgcagatggttaccgaatcagcgacttcgatggcaacgatgacgctgtaaacgctcgcacatttcatatcgactgggacctggccgctgccgaaaagggcggctacgagtacttcatgctcaaggaaatcgctgagcagcccgacgcggtagtcgacacgctacttgggcatttcactggtggacggattgtgctcgacgaacagcgattgagcgatcaggaactccgcgagatcgataaggtgtttgtggtcgcttgcggtactgcctatcattccggcttgttggccaaatatacgatcgagcactggacgcggctgcctgttgaggtggagctagccagcgaatttcgctaccgggatcctgttctggaccgcagcacactggtggtagccatttcgcagtccggtgaaaccgctgatactttagaagctgtccggcacgctaaagagcagaaggccaaggtgctggcgatttgcaacaccaacggctcccaaatcccacgtgagtgcgacgcggtgctgtatactcgcgctggcccggagatcggcgtcgcctcaacgaaaacctttctggctcaggtcgccgccaactacctccttgggctggcgttggcgcaggcccgcggcactaagtaccccgatgaggtgcagcgcgagtaccgcgagctggaagcgatgcccgacctggtggcccgggtcatcgcggggatgggccccgtggccgatttggcttaccggttcgctcagtcgacgaccgtgctgttcctgggtcgccatgtcgggtacccggtggcgttggaaggtgcgctgaaactcaaggaattggcctacatgcacgccgaggggttcgccgccggcgagctcaagcacggacccatcgcgctgatcgaagaaaacctgccggtaatcgtcgtcatgccctcgcccaagggatcggcgatgctgcatgctaagctgctgagcaacattcgtgaaattcagacccgcggagcggtgaccattgtgatcgcggaggaaggcgacgacacggtacgtctctacgccgatcacctgatcgaactccccgcggtgtcaacacttttgcagccgctgctgtcgaccatcccgctgcaggtgttcgccgcgtctgtggcgcaggctcgcggctacgacgttgacaaaccgcgaaatctggccaagtccgtcaccgttgagtaa

SEQ ID NO: 27511 - DNA, 1167 bp, Mycobacterium leprae
ttggctgttacaccgatatccttgaggccaggtgtcttggccgaagctgttgtggatctgggagctattgactacaacgtgcgcgtgttgcgtgagcacgctggcatggcgcaactgatggttgtcctcaaagccgacgcctacggtcacggtgccacccaggttgccctcgccgcattggcagccggtgcggccgagctgggtgtggccaccgtcgacgaagcgctcgcattgcgcgcggacggtatcagtgcaccggtgctggcctggctgcatccacccggaatcgacttcgggcccgcgctgctggccgacgtgcagatagcggtgtcctcggtgcgtcagcttgacgagctgctggatgcggtgcgtcggaccggtcgtacggcgacggtgaccgtcaaagccgacaccgggctgaaccgcaacggggtcgtcaccgatcaatacccggcgatgctgaccgcgttgcagcgggctgtcgtagaagacgccgtaaggctgcgcgggttgatgtcgcacttggtttacgctgaccagcccgataatcccagcaatgacgttcagggcaagcggtttgctgctctgctcgctcaggcgcacgaacagggattgcggttcgaggtggcgcatctgtcgaattcatcagctacgatgtctcgtcctgacctggcttacgacctggtcaggcccggcatcgcggtgtacggtcttagtcctgtgccttcccgcggtgatatgggactaatacccgcaatgacggtgaaatgcgctgttgcgatggtgaagtctattcgtgctggtgaaggtgtttcgtacggacacgactggattgcgcagcatgacaccaatttggcgctgttgccggttggatatgcggacggtgtgttccggtcgctgggcggccggctggatgtgctgatcaatggcaagcgccggcctggcgtcggacggatctgtatggaccagtttgtcgtcgacttgggtccggggccaatcgatgtagccgaaggcgacgaagccatcttgttcggtcccggcgccagaggcgaacccactgcgcaagattgggctgatctgcttggaactatccactatgaagtggtcaccagtctacgcgggcggatcaccagaacgtaccgcgaggcccaaaccgttgacagatga

SEQ ID NO: 27512 - DNA, 1056 bp, Mycobacterium leprae
atgacgatctctgctgtgcccggcacgattatcttggccatcgaaacctcttgcgatgaaaccggtgttggtattgcctgcctcgatgactatggcaccgtgacattgttggctgacgaggtggcttccagcgtcgacgagcaggcccggtttggtggtgtggtgcccgagattgcctcacgggcgcatctagaggctcttggccccaccatacgctgcgcgcttgctgctgccggcctgaccggttcggccaagccagatgttgtagccgccacgatagggcccgggttagccggtgctttgttggtaggagtggctgcggctaaagcgtactcggctgcctggggagtgccgttctacgccgtgaaccacctgggtggacacctggctgccgacgtctacgaacatggaccgttgcccgagtgtgtggcgctactggtgtctggaggccatacccacctgttgcaggtgcgttcacttggggcgcccattgtcgagctgggcagtaccgtcgacgacgccgccggtgaagcttacgataaggtcgcgcgcctactgggattgggttatccaggcggtaaagtgctagacgacctagctcgtaccggcgatcgggatgccattgtgttcccacgcggcatgactgggccggccgacgacctaaacgcgttcagcttttcagggctcaaaaccgctgtcgcacgatatgtcgagagtcaccccgacgcgctgccggccgatgtcgccgctgggtttcaggaggctgtcgccgatgtgttgaccatgaaggcggtgcgtgcggcgaccgggctcggcgtttccactttgttgatcgtcgggggagtggccgcgaattcgcggctgcgcgagctagccgcgcagcgctgcgcggcggcggggctgatgctgcggatcccagggccgcggttctgcaccgacaacggggcgatgatcgccgcgttcgccgcacatctgctggctgcggccgcgccaccgtcaccgttggatgtgcccagcgacccgggccttccggtggtaaaaaggcagattaattga

SEQ ID NO: 27513 - DNA, 1590 bp, Mycobacterium leprae
gtggctgactctgctggcctcgaccagcccgaaccctcgccccgccccgtgttggtggtcgacttcggtgcgcagtatgcacagcttattgcccgccgggttcgagaagcacgggttttttccgaggtaattccgcacaccacctcgatcgaggagatcaccgcccgtgatccgctggcgattgtgctttctggtggaccggccagtgtctatacggaaggtgctccgcagctcgatccagcgctgtttgacctcggtttgccggtgttcgggatctgctacgggtttcaggccatggctcaggtgctcggcgggactgtcgcccgaaccaagaccagtgaatacggccggacggaactgaaagtccttggcggtgatctgcattcgggtcttcctggtgtccagccggtctggatgagtcacggtgacgcggtcaccgccgcgcccgatggattcgacgtggctgccagcagctcgggtgccccagtggccgccttcgagaaccgggaccggcgtctggccggggtgcagtatcacccggaggtgatgcacaccccgcacgggcaacaagtactcagccggttcttgcacgatttcgctgggcttgacgcggattggacggctgccaacatcgctggtgtgctggtcgagcaggtgcgtgcccagatcggcaacggccatgcgatctgcggactgtctggaggtgtggattccgcagtggccgcagcactggtgcaacgcgccatcggagaccgattgacctgtatctttgtcgatcatggtctgctgcgtgacggtgagcgcggacaggtgcagcgtgattttgtcgccgctactggcgctaagctggttaccgtcgacgcggccgagactttccttcaggcgctgtcgggtgtgaccaaccccgaaggcaagcgtaagattatcggacgccagttcatccgggcatttgaaggtgcagtacgggatttgttgggtgacagcacttttgattccgggatcgagttcttggttcagggcacactgtatccggatgtggtggagtccggtgggggcagtggcactgcgaacatcaagagccaccacaatgttggtggtcttcccgacaacctaaggttcaagctcgttgagccgctgcggctgctattcaaagacgaggtgcgtgcggtcggtcgacagttggacctgccggaggaaattgttgctcgccaaccatttccgggtcctggcctgggcatccggatcgttggtgaggtgactgccgaacggctggacacgctgcggcgggccgactcgatagcgcgtgaggagctgaccacggcgggtctggactaccagatttggcagtgcccggtagtgctgctggccgacgtacgttcggtcggtgtgcagggggataatcgcagttacggacacccgatcgtgctgcggccagtgtctagcgaggatgccatgacagccgattggacctgggttccttatgaggtgttggagtgcatctcgacgcgtatcaccaacgaggttgctgaggttaaccgcgtggtgttggacatcaccaacaaaccgcccggcaccatcgagtgggaatag

SEQ ID NO: 27514 - DNA, 1809 bp, Mycobacterium leprae
gtggatcacacgacgaagtgtgacgccgaacaatacttccaagcgattgtcacatcaatggccgacggagtcattgtggtagacatcgacggacggattgagtccattaatcccgccgctactcggatattgggcttacgagcccacgatgtcgttgacatgaagcatggccatccattctgcttctacgatacagacaatcagcgggttgatcttgagcgtgaggtcatgcgcgtcgtacgacgcgaagtaacaacggtaagcaaagtcgtcggcattgaccaacacagtggccagcggttatggctatcggtaaacgtgagcctgcttgcgtacaaggctcccccacactctgcactggtagtctcgttttctgacatttctgcccaccacctttcgatcgaacggctcacctacgaggcaacccacgactgtctcaccggtcttgccaatcgcaggtttgcggaagaccagatcaccaaatcactgcagcatgacgaacgctctcgattagctgctgtactgcttcttgacctcgacgatttcaaagtgatcaacgactcactaggccacgacgtaggtgacgcggtgttgcagactgtagcgcagcgactacgctcggctgtgcggcccgacgatgtcgtcgcgcggctgggcggagacgagttcatcgtactactccggggtcccctttcggacatgaatgctaacgacgtcgcaaaaagactgcacacaacactgtccgagtcactcgtggtcgaccagctcacggtgcctatcggagcgagtgttggcatccttgaggtgagacctgacgatcgacggcgggccgccgacattttgcgtgatgccgactccgcgatgtatgcagccaagaacaagaaacaatgtgccgtcacgccgcagcagctggtaccgttcgtcgcgctgatcgcactgtttgtgttttttacagctgcggccggagctaagttctatgcaccatcaaatctgctggtcattctccaacaaaccgtggtgctggcgatcgtcggatacggcatgactttcgttatcatggcaggctccgttgaactatcggtgggctcgatcgtcgcattgactggagtcaccgcggcactcgtggctgcacagaatcaattcgctgcgatcgtcaccgccctgctggtggggttggctgctgggatggtaaacggcatcgtttttgcctacgggaagattccgtcattcgttagcaccctcggcatgcttcaagtctgccgtggtatcaccctgatgatcagcgacagttctgccaaaccgatgccgtttcacggaatactgggtgcaatgggagccatgccgtggatcctcatcgtctgtcttttcgtcacaatcctggcagggatcttattccaattcaccatgtttggtcggtgggtcaaagccatcggtggcaacgaacgtgtcgcaacgttagccggggtacctacccgcgggatcaaagtcgcgatcttcgcgatctgcggactgacagcaggcctcggcggtatcgtgcttgcttcccgcctcggagccgggacacccaccgcagcaacaggtttcgagatcgatgtcatcgccgcagtcgtcatcggcggcacgcccttaaccggcggattgggacgactcagcggaacgctgatcggtgcaataatcatctcgatgctctccaacggcatggtgtttatgggtgttgggaatgccgcctcgcagatcatcaagggaattatgctcgccgctgcggtttttgtcttcctacaacgccgcaagatcggcattatcaaatga

SEQ ID NO: 27515 - DNA, 1038 bp, Mycobacterium leprae
atgagcacaggaacgagtgtaccactgcgcgtggctagcattatgctgatcctgggactgctaccagcaatcctgccggcgtgtggtttctcagagtcacatcacaagctgaccatcggcgtgtcctatcctaccgcgaacagtccgttctggaatgcctacacacgctttatcgacgagggaagccaccaactcggtgtctatatcaatgccgtgtcggctgaagaagacgaacaaaaacaactgtccgacgttgagaccctcatcaaccaaggcatcgacgggcttatcgtcaccccccagtcaacatcgatcgctcccacgctgctgcggatagccacccaggcaaacatcccggtggtcgtagtcgaccgctacccaggatatgccccggggcagaacaaaaacgctgattatgtggccttcctgggacccaataatgagaaagccggaagcggcattgctgaagcactcatggctggcggcgggtcgaaattccttgccctcggtggcatgcccggcaactcggtggcccagggccgcaaggctggcctggaatcagcgctcacggcagtcggtcaccggcttgtgcagtttcagtacgccggtgacagcgaagacaaaggccttgccgccgccgagaacatgctgcaagcacaccccgccggcgacgccaacgccatctggtgcttcaacgacaaactctgccagggcgcaatcaaagcagtatacaacgccaatcgtgaaaaggaattcatctttggaggaatggatttgacaccgcaagcaatcgcagcgatcgaaaacggattgtacaccgtcagcttgggcgcccattggctagagggcgggttcgggctggcaatcctctatcgcaaaatccacggccaagatcctgctgagcggatggtgaagctcgacctgctcaaggttgacaaatccaacgtcgccaagttcaaggcccgctacatcgacaacacgccacactacaactggaagtccacaaccccgttcgatatgacgatcaccttgaactga

SEQ ID NO: 27516 - DNA, 1227 bp, Mycobacterium leprae
atgttcgacttcatggtgtattcgcccgaggtcaatgcttttcttatgagtcgtggcccgggttctactcctctatggggcgccgctgaggcatggattagtctggcagagcagttaatggaggcggcgcaggaagtgtcggacacaatagtcgtcgcggtgccggcgtcatttgcgggcgagacgtcggatatgttagccagccgtgtcagcacttttgtggcgtggctggatggtaacgccgagaatgccgggctgattgctcgcgtcctccacgcagtggcatacgccttcgaggaggcgcgtgcgggcatggtgccactgctgacggtgctcgggaacatcatacacaccatggcgctgaaggcaataaactggttcgggcaagtatctaccacggtcgcggctttggaagccgactacgatctgatgtgggtccaaaactcgacggcaatgacgacctatcgggataccgtgctcagagaaacgggaaaaatggaaaattttgaaccagcaccgcagttggtctctagatattgcatggatcggcgggattccgttaattcgtttcattcttcgtcttcgtccgattcactttacgaatcaatcgataatctgtatgactcggtggctcagtccgaagaacacggatcggacagtatgtcccaatcgtacaatacgtgtggatcggtcgctcagtctgaattgtgcgattcgccgtttggcaccccttctcagagctctcagagcaacgacctttctgctacgagccttacacagcagttgggaggcctggacagtatcatatcgagtgctagtgcaagtctgcttacaacgaacagcataagcagctcgacggcaagtagtattatgcctatagtggcttctcaggttacagaaacactgggtcgaagtcaagtggctgtggagaaaatgatacagtcgattagcagcaccgcggtgagcgtggatgtggcggccagtaaagtggttgccggcgtaggtcaggctgtgtcggttggtgctttgcgggtgccggaaaattgggccacggccagtcagccggtcatggcgacggcgcactcagtgccggcaggctgcagcgcgattaccacggcagtaagcgggccgctggaaggggtgactcagcctgctgaggaagttctcacggcttccgttgccggcggcagtgggactggaggtccggccttcaacgaagcggtttga

SEQ ID NO: 27517 - DNA, 477 bp, Mycobacterium leprae
atgatcagcaagatgttccgattgctgttttataccccgcgcattccgccaaacacgggcaacgccatccggaccgcggcagtcaccggctgcgcactacatctggtcgagccgattggcttcgacctgtccaaccccaaacttcgacgggccgggctagactatcacgacctggcttcggtcaccgtccacacctcactatctgaagcatggaacgcgctatcgccggcgcgggtctttgcgttcagcaccctcgcgaacaccttgttcaccgacgtcagctaccaggccggcgacgtgctgatgttcggccccgaaccgaccggactagacgcggcaaccctggccgacgaccatatcactcagcaggtgcgcattcccatgctgtcgggccggcgttcattgaacctgtccaacgccgcggcggtagcagtgtacgaagcgtggcgacaacacgggtatgccgggttggtctaa

SEQ ID NO: 27518 - DNA, 924 bp, Mycobacterium leprae
gtggatagcgccgcacagtcgaaccaggcccagtcggttttcggccagaccggaacggcgcgggtgaagcgcggtatggccgagatgctcaaaggcggcgtcataatggacgtcgttatccccgagcaggcccgaatcgccgaaggctccggtgccgtcgcagtgatggcgctggagagggtgccttccgatatccgtgctcagggcggggtgtcacggatgagcgaccccgacatgatcgagagcatcatcgccgcggtcacgattccggtgatggccaaagcgaggatcgggcatttcgtcgaggcgcagatcctgcagagcctgggtgtcgactacatcgacgagtccgaagtgctgactcccgctgactacacccatcacatcgacaagtggaagttcaccgtaccgtttgtgtgtggggctaccaatctcggtgaggcgctacggcgcattaacgagggggcggcaatgatccggtccaagggcgaagccggtaccggtgacgtatccaacgcaaccacgcatatgcgggccatcgccggcgacatccgccgcctgacctccttatctgaggacgagttgtatgttgcagcaaaggaattacacgccccctacgagctcgtcatcgaagtagcccggacaaacaagctgccggtcacgctgttcactgccggcggaatcgccactcccgccgacgcggcgatgatgatgcagctcggcgccgagggcatctttgtgggctcaggaatcttcaagtcgagtgatccggctcagcgtgccgccgcgatcgttaaggccaccacattctacgacgatcccgatgtactggccaaggtgtcgcgcgggctgggtgaggcgatggcgggcatcgatgttgaacagattgcgcagcccgatcggctggcccagcggggctggtaa

SEQ ID NO: 27519 - DNA, 2109 bp, Mycobacterium leprae
atgagcgcccccgtacaccccgtccctggagccgatggcggcgacccgctgcgcccggccacgccgggcttgcggtcgccgcaagtcccaatccaggttcctgccggtagtaccgcagcggccgcggtcagcgaggccggattgccaacacatggcgctcccgatgcgattgtggtggtgcgcgacgccgacgggaagttacgcgacttaagctgggttccggacgtcgacgtcgaggtgactccggtacccgtcaataccgacgacggccgcagcgtgatccggcattcgacggcacacgttttggcccaagctgtccaagacctgttcccacaagccaaactggggatcgggccgcctattaccgatggcttctactacgacttcgacgtggccgaaccgttcacgcctgaagatttaaaggcgctagaaaagcggatgcggcagattgtcaaggaagggcagctgttctcgcgacggatctacgaatccaaggagcaagctcgtaccgagtgggccggcgaaccatacaagctggaacttgtcgacgacgaatcgggggatgccgagatcatggaggtcggcggcgatgagctcaccgcttatgacaacctcaacgcccgcaacggggaacgtatttggggtgacctgtgccgcggaccacacatcccaactaccaagcacattcctgcgttcaagctgaccagaagttccgctgcgtactggcgaggcaaccagaaaaacgccagcctgcagcgcatctatggtaccgcgtgggaatcgcaggaggccctcgatcgccaccttgagatgattaccgaggcccagcgccgcgaccatcgcaagctgggcattgagctggatctgttcagtttccccgacgaaatcggttctggcttagcgatttttcaccctaaggggagcatcgtacgtcgggaaatggaagagtactcccggcgcaagcacatcgaagccggctaccaattcgtcaacaccccgcatattaccaaggcgcagctgttccacacttcgggtcacctcgactggtacgccgagggtatattccccccgatgcacctcgacgccgaacacaacgatgacggcacggtgcgtaagccagggcaagactactacctcaagccaatgaactgcccgatgcacaccctgattttctcctcgcgcggacgttcgtatcgagagttgccactacggctcttcgagttcggcacgatctaccgctacgagaaatctggtgtagtacatgggcttacccgtgcccgcgggttcaccatggacgactcgcacatcttctgcacccgcgagcagctgcactgcgagctggcgtcgctgctccggttcgtcctggatcttcttggcgactatgggctagaagatttttacctcgagctttctactaaagacccggagaaatttgttggctccgaagagatctgggaagaagccacagccgcgctggcggaggtagccgagaattctactctcccattggttcccgatccaggtggcgccgcgttctacggcccgaagatctcggtgcaggtgcgcgacgcactgggtcgcagctggcagatgtccaccatccaggtagacttcaactttcccgaacggttcgcattggagtacacctccgcggacgggactcggcagcgcccagtcatgattcaccgggcgttattcggatcaatcgagcgattcttcggcatcctcaccgaacactatgcgggagcattccctgcctggctagcgcccattcaggtggtcggtataccggtcaccggtgagcatgtatcttacttggaagaggttgctgcgcaactgaaatcgtgtggtgtccggacggaggtggatgtcagcgacgatcggatggcaaagaaaatcgtccgtcacaccaaccagaaagtgccgtttatgttactggccggcgaccgcgacgtgcggaccgggtcggtgagcttccgctttggtgaccgcacacagatcaacggcgtcgcccgcgacagtgccgtcgaggccatcgtttgttggatcgttgaccgcgagaatgattttcccacagcagaattggtgaaagtaaccggcggtgagtga

SEQ ID NO: 27520 - DNA, 906 bp, Mycobacterium leprae
atgcgtcgtttttggcgtacggtcgtggaagtgacatcacaaaactctcaggctctggcccaggcatccggagcgttcacgctcggtggcgacctgaaggtcaaccgacttggtttcggcgcgatgcgcctaacgggtaagggagtgtggggcccgcccgttgaccgctacgaggccgtgcgggtactgcgacgcgccgtcgaattgggggtgaacttcatcgataccgccgactcctacggcccctacgtctccgaggagataattgccgaggcgttgcatccctacaagggactggtgatcgcaaccaaggccggtttgttgcggacaggccgggacgtatggatcccgctgggtaatccaagctacctgcgccaagaactggaaatgagcctgcgccgtctcaacgtcgacaccatcgatctgtttcaactgcaccggatcgacccgaacttcccactggccgaccaagtgggcgagctgttcacattgaaaaacgaaggcaagatccgccatatcggtctgtccgagatcaacctcgatcaactcaccgcggcccagcagatcacagagatcgtgtcggtgcagaacatgtacaacttgtcggcgcgagctgccgaaccactgttagatgccgtgaccagtcggggcatcggcttcatcccgtggtccccactggccgcgggaccgttggcggccccggacggaccgctgcagcgcatcgccgtcaaccatcacgcgacgccgtcgcaactggcgctggcctggttgctaaagcgatcgccggtgatgttgccgattccagggacatcgcgggtggcgcacctggaggagaacgtcgccgccgccgagatcagcctttccgacgacgagttcgagatgctctcggctgctggggcccagtga

SEQ ID NO: 27521 - DNA, 672 bp, Mycobacterium leprae
gtggcagccgtcatgcaggaggggctgatccgttttcccgcgggatacccggctgactccgcagtggagcgtgttgtgagctttccgagggtgggcgtcttggcgctgcagggcgatacccgtgagcatctcaccgcgctgcgcgaagccggggccgactccatgccggtacgtcgccgcggtgagctggacgaggttgacgcgctggtcattcccggcggcgaatccactaccatcagccacctgctgctcgactgcgagttgctagagccgttgcgtgcgcgtctggccgacgggttgccggcttacggtgcgtgcacgggtatgattctactggccagtgagatcctcgacgctggcgtgtgtgggcgtgaggcgctgccgttgggtgctatcgatattacagtgcggcgcaacgcttttggacgccaagtcgattcatttgaaggcgatattgggttcgctggtcttgttgatccggtgcgtgcggtgttcatccgtgcgccctgggtggaacgggccggcgatggcgtgcaggtgctggctcaagctgcgggccacgctgtcgcggtgcggcagggctcaatgttggctacggcgtttcacccggagatgaccagcgaccggcgcatccaccagttattcgttgacattgtcaacggaatcgcctga

SEQ ID NO: 27522 - DNA, 2364 bp, Mycobacterium leprae
gtggcggacgaccaaggtacggcgcaagctttgcaaccagttcaggtggtccccggccctgctgttgaggcaccggagacgccggtcgaaaccctgaagacttctagcagtgcgtctcgtcgggtccgggctcggttggcccgtcggatgaccgctcaacgcagcaccatcagtcccgtgctcgagccgctggtggctgtgcataaagagttttatcccaaggcaaacctttcgatagtgcagcgagcctttgaagtcgccgaccaacggcacgccagtcaactgcggcgttccggtgatccgtacatcacccatccgctggccgttgccaacattttggctgagttgggcatggatatcactaccctggtggctgcgctactgcacgacacggtcgaggacaccggttacacgctcgaggcactgtccgaagaatttggcgacgaggtaggccatctcgtcgacggggtgaccaagctggatcgggtggtgctgggcagtgctgccgagggcgagaccatccgcaagatgattaccgcaatggcccgtgatccacgggtgttggttatcaaggtggccgaccggttgcataacatgcgcaccatgcgcttcctgcctccggaaaagcaggcgcgcaaggcccgtgagacattggaagtcattgcaccactagcgcataggctaggtatggccagtgttaagtgggagttggaagacctgtctttcgcgatcttgcatcccaaaaaatacgaggagatcgtacggctggtagcgggccgtgcaccgtcccgcgatacctacctggccaaggtccgtgccgagatcataagtaccctgggtgcgtcgaaaatcaaggcgacggtggagggccggcccaagcattactggtcgatttatcagaaaatgatcgtcaaggggcgagacttcgacgatattcacgacttggtcggcatccgtatcctgtgcgacgagatccgcgactgctatgccgctgtcggcgtggtgcattcgttgtggcagccgatggcgggacggtttaaagactacattgctcagccgaggtatggtgtgtaccagtcgttgcacaccacggtcgttgggcccgagggcaagcctttggaagtacagattcgtacccgcgatatgcaccgtaccgccgaatacggcatagcagcgcactggcgctataaagaagccaagggccgcaacggtgttctgcatccacatgcagccgcagagatcgacgatatggcctggatgcggcagcttctcgactggcaacgagaggccgccgaaccaggtgagttcttggagtcgttgcgttacgaccttgcagtgcaagagatttttgtgttcactcctaaaggggacgtcatcacgttgccgactgggtcaacgccggtggactttgcctatgcggtgcacaccgaggtcgggcaccgatgcattggtgccagagtcaacggacgactggtggcgctggagcgcaagctggaaaacggggaattcgtagagattttcacatccaaagctcccaatgccgggccttcgcgggattggcagcagttcgtggtgtcgccgcgcgctaagacgaagatccgtcaatggttcgccaaggagcggcgtgaggaagcactggaggctggtaaggatgcgatggcccgcgaggtacgtcgcggtggacttcctttgcagcgcttggtgaatggtgagtccatggcggcagtggcccgtgagctacattacattgacgtgtccgcactgtataccgcaattggtgaaggacacgtgtctgcccggcacgtcgtgcagcggctgttggccgagttgggcggtatcgatcaggctgaagaggaactggccgaacggtccacaccgacgaccatgctgcgccgtcaacgcagcaccgatgatgtcggggtttcggtccccggcgccccaggtgtgctgactaagctagccaaatgctgcacgccggtacctggcgatgcgatcatggggttcgttacccgcggcggcggggttagtgtgcaccgcaccgactgcaccaacacggcatcgctgcagcagcaggccgagcgcatcatcgaggtgttgtgggcgccgtcgtcgtcgtcggtgtttctggtggcgattcaggtggaggcgctcgaccggcatcggctgctgttggacataacacgcgcgttagccgacgaaagggtggacattctatcggcgtcggtcaccacgtcgggtgaccgggtggcgatcagccggtttaccttcgagatgggtgaccccaagcacctcggacatctgctcaatgtggtccgcaatgtcgaaggcgtttacgatgtctatcgggtgatgtctgcgtcttga

SEQ ID NO: 27523 - DNA, 1284 bp, Mycobacterium leprae
gtgacggagtcatgcactgtgttttcgttttctgggcccaaggggataccggattattttcctccggactcggcgcaatttgtcgcggtacgtgatggtttgctcactgccgcccgcagggccggttacggcgatatcgagttacctgttttcgaggacaccgcgttgttcgctcgcggcgttggtgagtccactgacgtggtagccaaggagatgtatacgtttgctgaccgtggtgatcgctcggttacgctgcgtcccgagggcaccgctggggtggtgcgtgcggtgattgaacacggtctggaccgtggagcgttgccggtgaagctgtgctacgcgggcccgtttttccgatacgagcgtccccaggccggccgatgtcgccaactgcagcaggtcggcgttgaagcaatcggtgtcgacgacccggccctagacgccgaggtgatcaccatcgccgacgctggcttccgctccctgggtctggacgggttccagttggaaatcacttcgctgggcgatggtacttgtcgcccgcaatatcgaaaactgttgcaggagtttctcttgcagctcgaccttgacgaagatacccgccgacgcgccgagcttaatccgctgcgggtgcttgatgacaaacgaccccaggtgcaagcgatgacagccgcagctccggtgttgctagaccatttgtccgatggcgccaagcagcacttcgatacggtgctggctcacctggacgctctgcgggtgccatatgtcatcaacccgcggatggtgcgagggctggattactacacaaaaacaaccttcgagttcgtccaccccggcttaggtgcgcaatccggcatcggcggcggtggacgttatgatggtctaatgcgtcagctcggcgggcaggacttgtcgggcatcggattcggactcggggtggaccggaccttgctggccctacatgccgaaggcaagaccgtgggggaaaccacacgctgcgacgtattcggtgtgtcgctgggtgaagctgctaaactcaaggtggcgatgttggccgggcaactgcgtgctgccggcgtccgcgtcgacctgatctacggggatcgcgggatcaggggagcgatgcgtgcggcgggccgttccggtgctcgcatcgcgttgatagtagatgattgcgccattaaggccgacggtgtcggtgtgagggatctagccaccggtgaacagatttcggtagctgtagattctgttgtcgccgaagtaatttcgagaatagctccgagttag

SEQ ID NO: 27524 - DNA, 1770 bp, Mycobacterium leprae
gtgctgcgtagccacggcgctggtgtgttacggaaaagcgatgccgggcagcaggtaacattagctggctgggtgtctcgccgtcgagaccacggcggcgtcatcttcattgatctgcgcgactcctcgggcatcacacaggcggtgtttcgcgagcctgacgtgttggcccaggcgcatcggctgcgcgctgagttctgcatcgcggtttccggcgtagtcgagattcgccccgagggtaacgccaatgccgagattcccaccggcgatatcgaggtcaacgccacttcgctgaccgtgctcggtgagagtgcgccgctaccattccaactcgatgagcctgcgggtgaggaattgcggttgaagtaccgttacctcgacctgcgccgcgacggtcctggatcggcaattcggttgcgttccaaggtgaatgccactgctcgtgcagtgctggcgcgccacgatttcgttgagatcgaaaccccgacgatcacccgctcaaccccggagggggcgcgcgactttttagttccggcccggttgcggccgggcacgttctatgctctgccgcagagcccgcaattgttcaaacagttgctgatggtggccgggatggagcgttattaccagattgcccactgctaccgcgacgaggatttccgtgccgaccgccagcccgaattcactcagctcgacatggagatgagcttcgtcgatgccgaggatgtcatcgcgatctccgaggaaatcctaaccgagctctggatgctgataggctaccacattccggcgccgatcccgcggatcagctatgcggatgctatgcgacggttcggctctgacaagcccgacttgcggttcgggctggagcttgttgaatgcacagagttcttctgcgacacaacgttccgtgtcttccaggcaccgtatgtcggtgcggtagtgatgcccggcggtgctgcacagccgcggcgcacactggacgagtggcaggactgggccaaacagcgcgggcatcgcggcctggcctacgtgctggtgaccgatgacggtacgctcggcggaccggtggccaagaacttcagcgatgccgaacgctctcgcctggcctcccacgtaggcgccgaacccggggactgcatcttcttttcagcgggcccggcgaagtcgtcgcgggcactgctgggggccgcccgcggtgagatcgccaaccggctgggtttgatcgaccccgaggcctgggcgttcgtctgggtagtcgacccgccgcttttcgaacgcgccgacgaggccaccaaggtcggcgaaatggcagtgggctctggtgcgtggactgcggtgcatcatgccttcacatcgccgaaaccggaattcgaggacagcatagagtccgatcccggcagcgtgttggccgatgcctacgacatcgtttgtaacggccacgagattggtagcggctcggttcgtattaaccgccgtgatatccaggaacgggtgtttgcggttatgggattggaaaaggctgaggcggaggagaaattcgggttccttttggaggcttttacgtttggtgcgcctccgcacggcggtatcgcctttggctgggatcggaccaatgccttgctggccgggatggagtcgatacgtgaggtgattgcgttccccaagaccggcggtggtgtcgacccgctcactgatgcgccggcttcgataaccgctcagcagcgcaaggaatccggaatagacaccaagcccaaagaggttgagtag

SEQ ID NO: 27525 - DNA, 1422 bp, Mycobacterium leprae
gtggggacccgttgggtacccgaatcatcggggtttaccgtgactgacttgtctgtccttcgtggtatttctaatgttgtgtccgacagtctgtttgatttgcctggcgcgccgcagccgaccgactacggcctgggtggctcgaccggggtcccgctggcggtgcggatgcgtccggcatcgctggacgagctggttggacagggtcacttgttggcgccgggatcgccgctgcgccgccttgtcgagggctcgggtgtggtgtcggctattctccatggcccgccgggatgcggtaagacgaccctggcagcgctgatctcgcaggcgaccgggcaccggttcgaggcactgtcggcgttgtcggcgggtgtcaaagacgttcgagctgttttgaagattgcacgtagtgcgttgctctcggggaagcggactgtgctgtttatcgacgaagtgcaccgattctccaagactcagcaggacgccctgctttccgcggtggagaaccgggtggtgttgctggtcgcggcgaccaccgagaacccgtcgttttcagtggtggcgccgctactgtctcgatcgctgatccttcagttgcggccgctgaacgctgacgacatccgtgccgtggtgcagcgggccgtcgatgatccccgcggcctgggaggacagatcgctgtggcacccgaggccgtcgacttgttagttcggttggccgccggcgacgcccgacgggttttgaccgcattggaggtggccgccgaagccgtccaaaccggtgacgagctgacggtcgcgaccattgaacaatccttggacaacgctgcagtgcgctacgaccgggacggtgatcagcattatgatatcgtcagcgccttcatcaaatcggtgcgtggctctgacgtggatgctgcgctgcactatctggcgcgcatgttgattgccggggaggatccacgattcatcgcgcgccggctgctgatcctggctagcgaagatatcggcctggccgactcgaccgcgcttccgcttgcggtcgctgccgcgcagactgtgcagctaataggcatgcccgaagcccagctggcgctggcacatgccaccattcatttggctactgcaccgaaatcgaacgccgtcatgaccgcgctgggttccgcaatagatgatatcaaagctggtaaggccggtttggtaccggctcacctgcgcgacggacattactccggtgcggcggcgctgggcaacgccaaaggctacaagtattcccatgatgaccccgacggtgttgttgcccaacagtatccgccgtatgagctggtggaagtggactactatcggcctaccggtcgtggcggtgaacgtgagctcgtcggtcgactagaccggctgcgagcgataatccgcggccggcgaggctag

SEQ ID NO: 27526 - DNA, 2727 bp, Mycobacterium leprae
gtgcaaacacacgagatcaggaagcggttccttgatcattttgtgaaggcgggccacaccgaggtgcctagcgcgtcagtaatcctcgatgaccccaacctgttgttcgtcaacgctggcatggtccagttcgtgccgttctttctggggcagtgtacgccgccgtacgcgacggccaccagcatccagaaatgcatccgcactcctgacatcgacgatgtgggtatcaccacccggcacaacacctttttccagatggcgggcaatttctcgttcggggactacttcaagcgcggggctatcgaactggcctgggcgttgctgactaacagctttgccgacgggggctacgggctggacccagagagactctgggccacggtgtatctcgatgacgacgaggctgcaggcctatggcaggagatcgccggactgccacctgagcgaatccagcgtcgtggtatggccgacaactactggtcgatgggcatccctgggccatgcgggccgtcgtcggagatttactacgaccgcgggcccgagttcggccccgaaggcggtcccatcgtcaatgaggaccgctacctcgaggtctggaacctcgtgttcatgcaaaacgaacgcggtgaggggactaccaaggaggactacgagatccgcggaccgctgccacgcaagaacatcgacactggcatgggtgttgagcggattgcgttggttctgcagggcgtgcacaacgtctacgagatcgatctgctgcggccggtgattgacctagtggcgacccgcgcaccgcgcccgtatgaccccgaaaatgaagacaccaatcacgccgacaacgtccgctaccgcattatcgcagaccacagccgcaccgccgccatccttatcggcgacggtgtaagtcccgtcaacgacggtcgtggttatgtgttgcgtcgtttgctacgccggataatccgttcggccaagctgttgggcatcgatagcccgatcgtgggcgacctgatggctaccgtgtgcaatgcgatggggcgagcttatccagggctggtcaccgactttgaccggatcaaccgcattgccgtcgctgaagagacggcattcaaccgcaccctgacttctggctcgaagctgtttgacgacgtcgtcggcgccaccgtagcgtcgggctccaccgtggtcgccggtttggacgcctttaccctgcatgatacctacggtttcccaatcgagctcaccttggagatggcggccgaagccggtctgaccgtggatgagaagggatttcacgagttgatgctgcaacagcgtcagcgcgccaaggtcgatgccgccgcccgcaagcaggcacacgtcgacctgactgcgtaccgtgagctggtcgacgccggtccgactgagtttactggcttcgacgaattgactaccgaggcaagaattctcggcatctttgtcgaaggcaagcgggtcccggtagtcgcgcacgccgttcgaggccaagctggcatcaccaatcgggtagagctggtgttggatcgcactccgctttatgctgagtcgggaggccagattgctgacgccggcaccatcagcggaattggtgccggagccagctcccgggcggcggtcaccgacgtgcaaaagatcgctaaaactcttcatgtccaccgggttaacttagaatccggggaattcgtcgagggtgataccgttgttgcggtagtcgacccgggttggcgcaggggcgccgcgcaagggcattcgggtacccacatcgtgcacgccgcgctgcgccaagtgctggggcccaacgccgttcaggctggctcgctgaaccggccgggctacttgcgttttgacttcaactggcagggttcgttgactggtgagcagcgtacccaaatcgaagaagtcaccaacgaagctgtgcaagccgacttcgaggtacacaccttcaccgaaaagctcgacacagctaaagcgatgggcgccatagccctgtttggtgaggcctatcccgacgaggtgcgggtggtggagatgggcggaccgttctcgctggagttgtgcggcggcacgcatgtgcacaacacggcgcagattggcccggtcacgatcctgggtgaatcgtcgatcggctccggggtgcgccgggtggaagcatacgtcggactggattcgtttcgccacctggccaaagagcgtgcgctgatggcagggctggcatcatcactgcaggtgccttccgaggaggtacacgctcgggtagccacgctggtggagcggctgaaggccgccgagaaggaactcgagcgcgctcggcaggcaaacgtccaggcggcggcgaccaaagccgcggcgggtgctgagtggatcggtaatgtgcgggttgtggtgcaacggatgtccggcccgatagcaccagacgacttacgcttcctggtcggcgatatccgcggcaaactgggcagtgatccggcggtggtcgcgctgatcgcggtgacttcggatgggccgaccgcaactgtgccgtacgcggtcgctgccaatcccgccgcccaggatctgggaattcgcgccaacgatctggtggaacagctcgctatggtcgtagacgggcgcggcggcggtaaggccgacctggcgcaaggttcaggaaaggacccgactggcatcgacgctgcgcttgacacggtacgtgcacagatagcgcaggtcggttga

SEQ ID NO: 27527 - DNA, 555 bp, Mycobacterium leprae
gtgttttcgtcacagcaccgcctgctctaccagccaagtggccctgatctgtcaaaaaacttagaccctgagcggggacggcggctcggcatcgatgtgggtagtgtgcgcataggtgtggctttcagcgacccggacggcatcctggctaccccggtggagacggtgcgccgctaccgttccgctaagcacttgcgccgactagctgagctcgtcgtcgaattgcaggttgtcgaggtggtcgtcggcttgccatggacactgaccgaccggaccggctcgtcggcaaaggacgccatcgacaccgccgaggcactagcacggcgggttgctccggtaccggttcgactcgttgatgagcggctgaccactgtcagcgcgcagcgtttgctgcgtgctgcaggtgtacgcgctaaagaccagcgggcggtgatcgaccaggcggcggcggtggtgattctgcaaaattggctcgatcaatgccgcgctgctactccggcgagggcggatgagcctacgactggatcggtagctggagaagttatcgatgggtga

SEQ ID NO: 27528 - DNA, 837 bp, Mycobacterium leprae
gtgtccttgacagcgtgcgctaacaaggggccgcgaaaagctggaattattggttctccaatcgcgcattcccgttccccgcacttgcacctggccgcttaccgtgcactgcgtctccacgactggacgtatgagcggatcgaatgcgatgctgaagagctcccgactgtcgttagcgggttcgggccgcagtgggtcggcgtttcagtgaccatgccgggcaaattcgccgcgctgcggttcgccgatgagcacactgcacgtgccagcctggttgggtcggctaacacgctgctgcggacccagcgcggctggcgggccgacaacaccgacattgatggtgtggcgggggcgctggcggcgatcgggcctttggcagggcgtgcgctagtgtgcgggtcgggcggcactgctccggcggctgtgatggggttggctgaactgggcgtcaccgatatcaccgttttggcacgcaatcccgacaaggcgtcccggttggtcgatctcggggttcaggtcggtgtggcgacccgattgtgcggtctggacagcggtggcttggcagatgaggtgaaggctgccgaagtgctggttagtacggtaccggcagatgtggctgcgcggtatgtcgatgtcttcgcgacggtcccggtgctgctagatgcaatctacgacccgtggcctacgccactggtcgcagcggtgtccgcggcgggcggccgagtgatcagcggcttgcaaatgctgttgcatcaagcgtttgcgcaggtggagcaattcaccgggatgcctgcaccgcgagaggcgatggcttgtgctctggcgggtttgcattag

SEQ ID NO: 27529 - DNA, 1224 bp, Mycobacterium leprae
gtgttgcgctggatcaccgccggggagtcgcatggccgggctctggtggccgttgtcgaaggcatggtcgccggtgtcgaagttacctccaccgccatcgctgatcagttggcgcgccgccgacttggctatggccgcggtgcccggatggccttcgagcgcgacggggtgacggtgttgtctggggtacgccacggcgttactttgggtggccccatagccatcgagatcgacaacaccgagtggccgaagtgggaatccgtgatggccgccgatccggtcgacgccgcggaattggaagactccgctcgcaacgccccgctcaccaggccgcgcccgggtcatgcggactatgcgggtatgctcaagtacggtttcgacgacgctcgtccagtgttggagcgggctagtgctcgagaaaccgccgcccgtgtcgcggcggggacgatcgcgaggcagtttctgcgccaagctctgggggtcgaagtgctttcgcacgtcatttccatcggtgcgtcggcccgctacgatgggccaccgccggggtccgaagacctaaccgtaatcgatgctagtctggtgcgcgcttttgacgaacaagttgaaaaatctatgatcgctgagattgaagcggccaagaaagacggcgataccctcggcggggtagtagaggccgtggtgctgggcctgccagtcgggctggggtcctttaccagcggtgacgaccggctcgacagccagctagccgcagccgtaatggggatacaggcgattaaaggcgtagagatcggtgacggcttcgcgactgcgcgtcgccgcggcagctgcgctcacgacgaaatgtattctggtcctggcggtgtcgtccgcttaaccaaccggtcaggtggactcgaaggcggcatgaccaatggccagccgctgcgggtgcgcgcggcgatgaagccgatctccactgtgccgcgggcgctagccaccgtcgatctggcaaccggtgaagaggccatcgcaatccaccagcgctcggatgtgtgcgcggtgccggccgccggagtcgttgtcgagaccatggttgcgttggtgctggcccgcgcagcgctgcggaagttcggcggtgactcactgggtgaaactcgtcgtaatcttgcagcgtaccagcgcgcggtcgctgaccgggaagcgccagttgctcagtactgcggcgagtcggggataggcgggtag

SEQ ID NO: 27530 - DNA, 573 bp, Mycobacterium leprae
atgtctaatccggtcaagggacgccatcaggcccgtaagcgtgccgtcgacctgttgttcgaagccgaggcccgcgatctgagcccactcgagataatcgaggttcgtagcgcattggcgaaatccaagctggatgtagcgccgctgcatccgtatacggtcgtggtagcccaaggtgttagcgagcacaccgcccgtattgacgaactgataatctcgcatctacaaggctggaagctcgatcggctgccagcagtggatcgcgccattttgcgagtctcgatatgggagctgctatacgctgacgatgtgcccgaaccggtcgctgtcgacgaggcggtcgagctggccaaggagctgtctactgacgactcacctggcttcgtcaacggattgctgggcaaagttatgctggttacgccgcagatccgtgcggccgctcaagcagtccagcaggcggtgcgcatggctgccggtacttccgaggatcacgtaccgcagcgtgagccggctgctggccaattgggtcaggacgattcgaacggcggccaagtcgctgctgtctgccggtga

SEQ ID NO: 27531 - DNA, 1293 bp, Mycobacterium leprae
atgagcgtgttacttcgtggtgtccgcttgtatggcgagggtgaacaagtcgatgtactggttgagggcgagcagatcgccaacattggtgctggtattgatattcccgacactgctgatgtgattgatgccatcgatcaggtgctgctgcccggcctggtggacctgcacacccacttgcgcgagccgggccgcgaatatgctgaggacatcgaaactggttcggcagcagcggctcttggtggttacactgcggttttcgcgatgcccaataccacccctgtagcggacagtccggtggttaccgaccatgtctggcgtcgtggccagcaggtcggcctggttgatgtgcaccccgtcggtgcggtcaccgtcgggctggccggagccgagctcaccgagatgggtatgatggctgccggtgccgcacaggtgcggatcttctccgacgatggcaactgtgtgcataacccgttggtgatgcgccgtgccctggagtacgccactggcctgggggtgctgatcgctcagcacgccgaggaaccgaggctgactgtcggcgctgttgcgcacgagggacctacggccgccaggctgggattgtcgggatggcccagagcggccgaggaatcaattgttgcccgcgacgccctgttggcccgtgatgccggcgctcgggtgcacatctgccacgcttctaccgcaggaaccgtagagatcctgaaatgggctaaagagcaaggtatttcgataactgccgaggtaacaccacatcatcttttgctcgatgacagcaggttagccagctacgacggggtgaatcgggtcaacccgccgctgcgcgaaaccgccgacgcagtcgcactgcggcaggcgttggctgatgggatcatcgattgtgtgactaccgaccacgccccgcatgccgatcatgagaagtgcgtcgaattctccgcagcgcgccctggcatgctgggcttgcagacggcgctgtcggtggtggtgcacacgatggtggtgcctggcctattaagctggcgcgatgtcgcgcaggtgatgagtgagaaccctgcccgcatcgccgggttgcccgatcatggccggccactggaggtgggtgaaccggctaacctgacggtggtggacccggacgttacctggacggtcaccggcgacggcttggccagcaggtcagccaacacgccgtacgaggcgatgaccctgcccgccactgtgactgcgaccctgctgcgcgggaaggtcaccgcccggggtcagaagagtccggtatga

SEQ ID NO: 27532 - DNA, 1128 bp, Mycobacterium leprae
gtgagcaaagccctactggttctcgaagacggccgcgtcttcaccggcatgccgtttggtgcgattggccaaacgttgggtgaagccgtgttttccaccggcatgtccggctaccaggagacgttgaccgatcccagttatcaccgtcagatcgtggtggccaccgccccgcagatcggcaacaccggctggaacgaccaggacggtgagagtcgcgacgatagaatctgggtcgcgggttacgcggtgcgtgacccgtctccgtgcgcctcgaactggcgcgccaccggcacgctggaagacgagctggtccgccagcgtattgttgggatcgccggtatcgacactcgggcggtagtgcgtcatctgcgcagatacggttcgatgaaggcgggtgtgttttctggcaaggcaatgatcgagcccctaaatatcgaggcgctagtacaacatgtgcgcacccagcagtcgatgctgggtgctgatcttgttggcgaagccagcacactggatgcatatgttgttgaacccaaagggaaggaacgctttacggtggcagcgcttgacctcgggatcaagaccaacacgccgcgcaacttcgctcggcgtgggattcgcagctatgtgctgccggcgtcggcgacgttcaaccaaattgccgacatcaaaccgcatggcctgtttttgtccaatggccctggtgacccggctaccgccgaccacgtcgttgcgctcactcgagaggtgctgaacgccggaattcctttgttcggtatctgtttcggcaaccagatcttgggccgggcgctaggactgtcgacctacaagatggtcttcggccaccgcggtatcaatataccggtcatcgaccacgccaccggacgggtcgcggtgaccgcgcaaaaccatggtttcgcactggaaggggaggcaggccagtccttcgacacaccttttggctcagcggtggtcagtcacacctgtgccaacgatggggtggtggaaggtgtcaaactcgctgacgggcgtgcattttcggtgcaatatcacccggaggcggccgccggcccgcacgatgccgagtacctattcgatagttttgtcgaactcatggcagcccagcgatga

SEQ ID NO: 27533 - DNA, 3390 bp, Mycobacterium leprae
ttgcgcccagaaagggggacgctagtgccgcggcggactgatctcaaccatgtactggtgatcggctcggggccgattgtcatcgggcaggcctgcgagttcgactatgctggcacccaggcatgtcgagtgctgcgggccgagggcttgcaagtgagtctggtcaactctaacccggccaccatcatgaccgatccggagttcgccgaccacacctatgtcgagccgattacgccggccttcgtggagcgggtgattgttcagcaggccgagcgtggcaacaggattgacgctttgctagccaccttaggtgggcagaccgcgctcaacacagcggtagcgctgtacgaaaacggagtgttggagcgctatggcgtcgagctcatcggtgctgatttcgaggctatccagcgtggtgaggaccggcagcgattcaaagatctcgtcgctaaggttggtggtgaatccgctcgcagtaaagtgtgtttcaccatggatgaggtgcgtgaaacagtcgaggatcttggccttccggtggtggtgcggccaagtttcacgatgggcggattgggttcgggcatggctcactccgacgaggaggttggccggatggccggcgccgggctggtagcttcacctagtgccaacgtgctgatcgaggaatcggtctatggttggaaggaattcgaactcgagctaatgcgcgatggacacgacagcgtcgtggtggtgtgctcgatcgagaacgttgacccgatgggtgtgcacactggtgattcggtcaccgtagcacccgccatgactctgaccgactgggaatatcaacgtatgcgggatctgggcatcgcgatcctgcgcgaggtcggcgtggacaccggtggctgcaacatccaatttgcgatcaacccccatgacggccggcttatcgtcatcgagatgaacccacgggtatctcggtccagtgcgttggcgtccaaggccaccggtttcccgatcgccaagatcgcagtcaagctggctgtcggctacacgctagacgagatcctcaacgacatcactaaagaaacgccggcttgctttgagccggcattggattacgtcgtggttaaggcgccgcggttcgcgttcgagaaattccccggcgctgatcccacactaactactacgatgaaatccgtcggagaagcaatgtcgttgggccgcaactttgttgaggcactcggtaaggtgatgcgatcgttagaaaccggccgcttcggtttctggacggcacccgacccgcagggtgacgtcgaccaggtgcttctccggctgaagaccccgaccgaaggccgactctatgacgtcgaactggcgttgcggctgggtgcttcgactgaaaaggtggcacaggtttccggcatcgatccctggttcgtagcgcagatcggtgagctggtgaagctacgcgacgagctggtcgctgccccggtccttgacgccgagttgctgcggcgcgctaagcacaacgggctatcggatcgacagattactgcgttacgcccagaattactgggggaagacggagttcggtcgctgcgtaaacggctgggcattcatccggtgtataagacggtcgacacatgcgctgcggagttcgaggccaaaactccttaccactacagcagctacgaactagatcctgccgctgaaacggaggtggtcccgcaaacagagaaacccaaggtgctgatcctagggtccggccccaaccgcattggccagggaatcgaattcgactacagttgtgttcatgcagcaattacgttatcgcataatggttttgagacagttatggttaattgcaacccggagacggtgtccaccgactacgacactgccgaccggttatacttcgagccgctgacgttcgaagatgtccttgaggtgttctatgccgaagagcagtctgcggcgggcggtgccggggtagccggcgtcattgtgcaactcggcggccagaccccgctcgggcttgcacaacggctcgccgatgccggggttcctatcgtgggcacttcgccggaggccattgatcttgccgaagatcgcggagcgttcggagacgtgctgacagccgccgggctgccggcgccaaaatatggaactgcaacaactttcgctcaagcacgccgtatcgctgctgagattggctatccggttttagtgaggccctcgtatgtgctgggcggtcgcggtatggagatcgtctacgacgaggagacactgaaggattacatcacgcgtgctaccgcgctgtcacacgagcatccggtgctggtggaccgctttctcgaggatgcggttgagatcgacgtcgacgcactgtgcgacggcaccgaggtgtacatcggcggagtcatggagcacatagaggaagccggtatccactccggtgattcggcttgcgcgcttcccccagtaacattgggtcgcagtgacctagagaaggtgcgtcaggcgaccgaagccatcgcacgcgggattggcgtggtgggactactcaatgtacaatatgctctcaaagaagacgtgctctacgtactggaagccaacccgcgcgcgagccgaacggtgccgttcgtttccaaggctactgcaatcccgcttgccaaggcttgtgcccggatcatgttgggttccagtatttcccagcttcgtttcgaagggatgctggcggcttctggtgacggcggcaacgtggcgtcgcacgccccgatcgcggtcaaagaagctgtgttgccgtttaaccggctccggcgggccgacggagccgctatcgattccttgctcggtccggagatgaaatcgaccggtgaggtcatggggatcgaccacgattttggcagagcattcgccaagagccagaccgctgcgtatggctcgttgccgactcaaggtacggtgttcgtgtcggtggctaaccgggataagcggttactggtgttccccgtcaagcggctggctgatcttggatttcatgttatagccaccgagggaactgcggagatgttgcgtcgcaaaggaattccttgcgatgaggtgcgcaagcatttcgagccgccgaaagcgggccgccccgcgttgtccgcggtcgatgcgattcgggccggtgacgtggatatggtgatcaacacgccctacggcaactccggcccgcgtatcgacggttatgagatccgctcggccgcagtctcggtcaatattccttgcgtcacgacggtgcagggtgcttccgccgcggtgcagggcatcgaagcggggatccgaggtgacatcggcgtacggtcgctgcaagaactgcacagtgccattggtgcggggatcgcggctgataatgaggtccaatga

SEQ ID NO: 27534 - DNA, 1212 bp, Mycobacterium leprae
gtgagtgagaagggtcggctgttcactagcgagtcggtgactgagggacatcccgacaagatctgtgatgcgatcagcgactcgatccttgacgcacttttggcggaggatccttgctcacgtgtcgcggtcgagacgttggtcaccaccgggcaggtgcatgtggtgggtgaagtgacgacgttggccaagacggcgttcgctgatatcagtaatacggtccgcgaacgtattctcgatatcggctacgactcgtcggacaagggcttcgatggggcgtcgtgcggagttaacattggcatcggcgctcagtcgtctgacattgctcaaggcgtcaataccgcccatgaagtacgcgtcgagggcgcggcggatccgctggacgcccagggtgctggtgaccaaggcctgatgttcggttacgcgatcaatgacaccccggaactgatgccgctaccgattgcactggcccaccgactggcgcgaaggctgaccgaggtacgcaagaacggcgtgctgccctacctgcgttccgacggcaagacccaggtcactatcgcctacgaggacaatgtcccagtgcgtttggacactgtggtcatctccactcagcacgccgctggtgtcgacctggatgccacgctggctcctgatatccgggagaaggtgctcaacaccgttattgacgatctgtctcatgacaccttggatgtatcgtcggtgcgggtgctggtaaacccgaccggcaagttcgtgctaggtgggccgatgggcgatgccgggctcaccggtcgcaagatcatcgtcgacacctacggtggctgggcgcgtcacggcggcggcgccttctctggcaaggatccgtccaaggtggaccggtcggcagcctacgcgatgcgctgggtggccaagaacatcgtcgctgccgggctggcggagcgaatcgaggtgcaggtggcatacgccatcggcaaagccgccccggtcggtttgttcgtcgagacctttggcactgaggcggtcgatccggccaaaatcgagaaagccatcggcgaggtgttcgatctgcgtcccggcgcgatcatccgcgacctgcatctgctgcgcccaatttacgcgcaaaccgctgcctatgggcacttcggtcgcactgacgtcgaactgccatgggagcagctcaacaaagtcgacgatctcaagcgcgccatctag

SEQ ID NO: 27535 - DNA, 1020 bp, Mycobacterium leprae
gtgaacgttcaaacggtcgacagcctcgatgccgccatgcggctggctgttgaacagtcttacctggtcaagggcgccacctatccgaatccaccggtgggtgcggttattgtggatcccgatgggcgggttgttggcgtgggcgccaccgagccggccggcggcgaccatgctgaagtggtggcgctgcgcagcgccggcgttacagcggccggtgccattgcagtggtcacccttgagccgtgcaaccactacggcaagactccgccatgcgtgaacgcgctgctggaggccaaagtggataaggtagcatatgccatcgccgatccgaacgcaagcgctggtggcggtgcggctcggttgacggcagccggcgtgcatgtgcagtctggggtattggccgatctggtgaccgccggaccgctgcgggagtggctgcacaaacagcggaccgggctgcctcacgtgacgtggaagtatgccagcagcatagatggtcgtagcgctgctgccgatggctcgagtcggtggctctctagcgaagcctcgcgcgcagacctacatcgtcgccgcgccacagctgacgccattgtggttggcaccggcaccgtcctggccgataacccgaccctgacggcccgcctagccaatggtgcgctggctgaccggcaaccgttgcgggtggtggtgggcatgcgggaaataccgctagaagcgaacgttctcaacgacgattcacctactatggtgattcgtacccacgatcccatggaggtcctcaaggcgcttgcagatcggacagacgtgctgctggagggggggcctaccctggccggagcctttctgcgggctgggacgatcaaccggatcctggcctacgtcgcgccgatcttgctgggcggccccgtcactgcagtcgacgacgtgggggttcccaacattgcgcgggcgctacgttggcagttcgacggcatcgaccgggctggctcggatttagtgattagtctggtgacgcgttag

SEQ ID NO: 27536 - DNA, 624 bp, Mycobacterium leprae
atgttcaccggaattgttgaggaactcggagaggtggtcggtcgggacgcccatgccgatgcggcgcgcctaatcattcgcggtcgcacggtcaccgccgacgctggccatggcgattcgatcgcggttaacggcgtgtgccttacagtggtggaggtgctgcccgacggccaattcagtgctgatgtgatggcagaaacgctccatcgctccaacttgggtgagctacgagtcggcaatcgggtcaacctggagcgcgctgtggctattaacagccggctcggcgggcatatcgtgcaggggcatgtggacggcaccggcgaggtggtggctcgcaccctctcagaccactgggaggtggtgcggatagaggtgcccccggcggtggctcgctatttcgttgaaaagggctcgatcaccgtcgacgggatttcgctgacggtctccgggctcggtgctgaacctcgggactggttggaggtttctttgatcccaacgacccgagagctgaccacccttggccgtactccgttgggaacgcaggtgaaccttgaagtggacgtcatcgccaaatatgttgagcggctactccagagcgttcctaccggggatttgactcgatag

SEQ ID NO: 27537 - DNA, 1308 bp, Mycobacterium leprae
gtgggcccttttgatagcaaggtggcaaagatgacgaggttggactccgtcgagcgggcagttgccgacattgcggctggtaaagccgttgtcgtcatcgacgatgaggaccgcgagaacgaaggcgacctgatcttcgccgccgaaaaggcaacgctggagatggtggcctttatggtccgctatacctcgggatacttgtgcgcgccactggatggtgcgatctgcgaccggttgggacttttgccgatgtttgcggtgaatcaagacaaacatgggactgcctacacggtcactgtcgatgcgagaaacggtgtaggaaccgggatttcggcttctgatcgggctaccacaatgcgattattagctgacccggctagtgtcgctgacgatttcacccgccccggccatgtggttccgttgcgtgccaaggacggcggtgtgttgcgccggccgggtcacacagaggccgccgtcgacttggcccggctggcaggattgcagcccgcaggagcgatctgcgagatcgtcagtcagaaggacgaaggctcgatggcacagaccgacgagttgcgggtcttcgctgatgagcacgatctggcgctgatcaccattgccgatctgatcgcatggcggcgcaagcatgagaagcacatcgagcgggttgctgaagcgcggatcccaacccgtcatggagagtttcgtgctattggctatactagtatttacgacgacgttaagcatgtggcactggtccgcggcgaaattgccggatcaagcggtgacggcgatgacatattggtccgggtgcactccgagtgtttgacgggtgatgtgttcggctcacggcgttgcgattgtgggacccaactcgatgccgctatggctatggtggcgcgagaaggacgcggtgtggtgttatacatgcgcggccatgaaggtcgaggtatcgggctgatgcataaactgcaagcataccagctacaggatgctggcgcggacaccgtggacgctaacatcaagcttggattcccttctgatgcaagggattacggaattggtgcgcagatactcgtcgatctcggagtgcgctcgatgcgactgttaaccaacaatcccgccaagcgggttgggctggacgggtacggactgcagatcatcgagcgggtgccgcttccggtgcgggccaacgcggataacatccgttacttgatgaccaagcgtgacaagatgggtcacgacctgggcgggttggatgattttcatgaatcaaactattttccaggtgaattcggcggtgctttatga

SEQ ID NO: 27538 - DNA, 483 bp, Mycobacterium leprae
atgagtggtggagccggtattccggaggttccggggatcgacgcttccggtctgcggctaggtattgtcgcaagcacctggcacagcagaatttgcgatgcgctgttggcgggcgcgcgcaaagttgctgccgactcgggtatcgatggcccgacagtagtccgtgtgctcggtgccatcgaaattccggtagtggtgcaggagctcgctcgccaccacgatgcagttgttgccctgggtgtcgtgatccgtggcgatacaccacatttcgattatgtttgcaattccgtaacgcaaggcttgacgcgcatagcgctagatacctcgacgccggttggcaacggtgtgctgaccaccaataccgagaaacaggcgctggatcgggctgggcttccgacgtcggccgaagacaagggggcccaggcggcagctgctgcgctgaccaccgcattgaccctgcttaacttgcgttctcggatatga

SEQ ID NO: 27539 - DNA, 897 bp, Mycobacterium leprae
atgagtgggaacaaccacccgggagacgcctcggccgaaatcgacgtcgttctggtgaccgggttgtccggggccgggcgcggcaccgcggccaaggtgctagaggaccttggctggtatgtcgctgacaacctcccgcctcagctgatcacctggatggtggatttcgggttggcggccggatcgcggatcacccagctggcggtggtgatggatgtgcgatcacgtggcttcaccggcgatctggactcggtgcgccgcgaactcgccacccgcaacatcattccgcgtgtggtgttcatggaagcatctgacgacatgttggtgcgccgctacgaacagaatcgacgcagccatccactgcagggcgagcagacgttggccgagggcattgccgctgagcgtaggatgttggctccggttcgtgctacggccgacttgattatcgacacatcggcgttgtccgtgcccggcttgcgggaaagcatcgagcgtgcgttcggcggtgatgccagcgcgactaccagcgtcactgtggagtccttcggcttcaagtacggcctgccgatggacgccgacatcgtcatggatgtgcggttcctgccgaatccgcattgggtcgacgagttacgttcactcactggccagcattcggcggtgcgcgactatgtgctgggccagcccggcgcggctgagtttctgcggacttatcgtcgattgctttctctggttgtcgacggctaccgacgggaggggaagcgctatatgacagtcgctataggttgcaccggtggcaaacatcgcagcgtggcgatcgcggaagcattaatgggactgctacagtcggatctgcaattgtcggtgcgggtgctgcaccgggatctgggtcgcgaatga

SEQ ID NO: 27540 - DNA, 1080 bp, Mycobacterium leprae
atgatctcgcctggaagtcctccaagcatcgttgcactgggtggtgggcacggtctgtacgtgacgctgtcggcagcccgtcggcttaccccctacgtcacagcgatcgtgacggtggctgatgacggaggctcctcgggccggctgcgcagtgaattgggtgtggtgccaccgggtgatttgcgaatggccttggcggcgttggcatccgacagcccgtatggacgactgtgggcaaccatcctgcagcaccgcttcggcggcagcggtgctctggccggacatccgatcggcaatttgatgctggctggcctcagtgaggtgctggccgatccggtcgctgcactcgatgaggttggacgcatcctcggggtcaaaggcagggtgctgccgatgtgtccgatcgcgctgcagatagaagccgacgtctccggtctggaggccgacccacggatattccggctgatccgtggccaggtggcgatcgcgtccacaccgggcaaggtgcggcgggtgcggttgcttccggtagatccgcctgcgaccaggcaggctgttgacgctatcatggctgccaacttagtggtgctagggccggggtcgtggttcactagcgtgattccgcatgtcctggtacctgggcttgtcacggcgttgcgggccaccaccgcccgacgagcgctggtgctcaacttggcggcagggccgggggagacggcgggattttccgtggagcgtcacctgcacgtgcttgctcaacacgcgcccgggttcaccgtccacgacatcatcatcgacgccgaccgagtgccgaataaccgggaacgggagcagctacgccgcgccgcgacattgctgcaggccgaggttcacttcgtcgacgtggccagacctggtacatctttacatgacccgggcaagctggctacagccctggacggggtgcgggtgggtaaccaggactcgtcagcgcctacggtggcggccaccgaacagatacggcttgatggtaaacgtccacagaccggggtgaatggaccggttggcaagggaccaaggggtgacgacgcgtggcgatga

SEQ ID NO: 27541 - DNA, 978 bp, Mycobacterium leprae
atgacgatcgaagtcaaggacgaattgagccgcctggcggtgaaatcgatcagcgctcgtcgtgcggaagtcacgtctctgctgaggtttgctggagggttgcacatcgtcggtggtcgtgtggtgatcgaagctgaggttgacctggaaaatatcgcgcgccggctgcgcaaggacatttttgacctgtacggttacaatgctgttgtacatgtcttgtcggccagcgggattcgcaagagtgttcggtatgtgctgcgggtggctaacgacggtgaggcactggcacgtcagactggtcttcttgacatgcgtggtcgcccggtacgcggtttgccggcacaggtcgtgggcggcagtcttatcgatgctgaagctgtgtggcgaggggcgtttttggcgcatggatcactgactgaaccgggacgttcgtcggcattggaggtcagctgccctggtctggaggccgcgctggcgctggtgggtgcggcgcgtaagctaggagtgaatgctaaagcacgcgaggtgcgtggcgccgatcgtgtggtggtgcgcgacggtgaggcgatcggcgtgctgctgactcgaatgggcgcccaggacacccggctggtctgggaggaacgtcggatgcgtcgcgaagtccgggcgacggccaaccggctcgccaattttgacgacgccaatctacgccgttcggcgcgtgctgcaatcgcggcggccgccagagcggagcgggcgttggagatactcggggatacggtgcccgatcatctggcctcggcaggtaaacttcgcgtcgaatatcgacaagcttcgctggaggaactgggtcgactcgccgacccgccgatgacgaaagacgctgtggcaggacgtattcggcggttattgtcgatggctgatcgcaaagcgaaggtcgaaggtatccccgacaccgagtccgcggtcacgccggacttgttggaggacgcttaa

SEQ ID NO: 27542 - DNA, 1020 bp, Mycobacterium leprae
gtgacggtccgcgtgggcattaacggcttcggccgcatcggacgcaacttctaccgggcgttattggcccaacaggaacatggtattgccgacgtgcaagtagtcgccatcaacgacatcaccgacaacagcacgctggcgtacctgctcaaattcgactccatcctgggccggctgccacacgatgttagcctcgaggaagaggatacaatcgtggttggctccgagaaaatcaaggctcttgcggttcgagaaggtccagcggcattgccgtggcatgccttcggcgtcgacgttgtcgtcgagtcgaccggcttgttcaccaacgcggccaaggccaaagggcacttggaggccggcgccaagaaagtgatcgtttcggcacctgccactgatcccgatatcaccatcgtgttcggggtcaacgacgacaagtacgacggcagccagaacatcatctccaatgcgtcgtgtacgacgaattgccttgcaccgctggcgaaagtgctgcacgaccaattcggcatcgttaagggtttgatgaccaccgtccacgcgtacactcaagaccagaacctgcaggatggaccgcattctgacctgcgtcgtgcccgcgctgccgcgctgaacgttgtgccgacctctaccggtgcggccaaggcgatcggcctggtgatgcctgagcttaagggtaagcttgacggttacgcactgcgggtgccgatccctaccggctcggttaccgacctgacagccgacttgtccaagtgcgtcagtgtcaatgagatcaacgcggtgtttcaggacgccgctgagggtcggcttaaaggcatcctgaagtacgttgatgccccgatcgtctctagcgacatcgtcaccgacccgcacagttcgatcttcgactccggccttaccaaagttatcgccagccaggccaaggtggtgtcctggtacgataacgagtggggctactccaaccgtctggttgatctggtcggcctggttggcaagtcactttag

SEQ ID NO: 27543 - DNA, 1251 bp, Mycobacterium leprae
gtgcgcattcctaatcttaaagatcttcttgaggaaggtgtttctggtcgctgcgtgttggtgcgctgcgatctgaacgtcccgctgggggatgatggcgccatcaccgacctcggtcgggtcaccgcgtcggtgcctacgttgaaagcgctgcttgaggccggagccaagattgtggttgccgcccatctgggccgccccaagaacgggccagacccaaagctgtcactggagccggtcgccgcggcgctcggtgagcagctgggccaaaacgtccagttggtctgcagcaccgatcgttcccctgtcgggggtgatgcgctcgcctgtgttgagaggctgaccgacggcgacctcctactgctgcagaacatccgcttcgatccgcgcgagaccagcaaagtcgacgacgaacgactcgctctggccaagcaattggttgaattggtcgggtcagcaggagcttttgtttcggatggattcggtgtggtgcatcgcaggcaggcttcggtgtatgacgtcgctacgctattgccgcactacgccggcatactggttgctgacgagataaggatactcgagcaattgactagttcggccaaacgcccctacgcagtggtgctcggcgggtcgaaggtatccgacaagctcggcgtcatcgagtcgctggcgacaaaagccgatagcatcgtactcggaggtggaatgtgctttacatttcttgctgcacaaggattttcagtaggtaaatcgttattggaaaccgagatgatcgagacctgtcgtagtctgttggacacctacgctgacgtgcttcggcttcctatggacattgtggtgacagagaagttcgtcgctgattcgccgccgcagaccgtcgccgccgacgctatcccagatggattgatgggactggatatcgggccggaatcggtcaagcggttcgctacgttgttatccaacgcctcgaccattttctggaacggaccgatgggcgtgttcgaattccctgcgtacgccgcgggcaccagaggtgttgctgaagcaatcgtggctgttactggcaagggagctttcagcgtggtcggcggcggtgactctgcggctgcgatgcgggcgctcagcctacccgaaggcagtgtctcgcacctttccaccggtggcggcgcgtcgttggaataccttgagggcaagacgctacccgggatcgaggtactaggtcgtgagcagccaaggggaggagactcgtga

SEQ ID NO: 27544 - DNA, 744 bp, Mycobacterium leprae
gtgagcgccagtgtagagatcttttcagacagcaagaccatggtcggagccgccggaaaacgacttgccagcaccatccaatccgccgtggctgccagagaaagggcactgattgtgctgaccggtggtagcagcggcattggactactgcgggatttagctacacgtggacagcagatcgattggtctagggtgcatctattctggggcgacgagcgctacgtacccaaagacgacgacgagcgcaacgagaaacaggcacgtgtagcgttgctcgatcacatagacatcccgcccagccaggtgcacccgatgcctgcgggcgacggtgaattcggcaacgatctagaagcagcggcactagcttacgaacagctgctggctgcctacgccgcacccggttatcccaccccgaattttgatgtgcacctgatgggcatgggacccgaaggacacatcaattcgctgttcccaaataccgtagctgtgcgcgagaccagtcgtatggtggtcggagtcaggaactctccaaaaccacctccagaacgaatcaccttgacacttaatgccattcaacgttctcgtgaggtatggctgatggtttccgggacggcaaaggccgacgcagtggcagccgccatgggtggcgctccctctgcctcaataccggccgccggagctgtcgggcttgaaaccacactctggctgctggacgaagaagccgcagccaagattcctggctag

SEQ ID NO: 27545 - DNA, 1128 bp, Mycobacterium leprae
atgacctcaaaaattcagaaccccaacctcgccgcattgagcgctgccggagtgtccgtttggttggacgacttgtcgcgagaccggttgcagtcaggcaacctacagaagctgattgacaccaagagtgtcgttggcgtgaccaccaacccgtccatcttccagaaagcattcgcaaacggccacgcctacgatgcccaaattgccgagctggccaagcgcggcgccaacgtagatgtcaccgtccgcaccgtcaccactgacgatgttcgccacgcatgcgacgtgttggcgtgtgaatgggaagcttcccacggaaaagatggccgagtctcgattgaagtcgatccccgtttagcacatgacaccgacaagactatcgcgcaagccgtcgaactatggagaatagttgaccacccgaacttgttcatcaagatcccggcgactaaggctggcctaccggcgatcaccgccgttttagcggaaggcatttcggtcaacgtcacgctgattttctctgtacagcggcatcgcgaggtaattgacgcctacctggccgggatagaaaaggccgccgaagctggacgcgacctatccaagatagtctcagtagcatcgttttttgtctcccgcgtggacaccgaaatcgacaagcgactagaaaaacttggttccgagcaagcactcgcgctacgcggccaggccggtgtcgccaacgcccgattggcctacgcggcctaccagaaggccttcgaaggtggccagcgctaccagacactcatggcccgcggagcccaagtacagcgcccgctgtgggcgtcaaccggtgtcaagaaccccgattacgccgacaccctgtacgtcaccgagctggtagctccaaacacggtgaacactatgccggagacgacgattgatgccgtagccgatcacggtgtgatccgtggtgacacgatcagcggtactactttgtcctcccaaaaagtgttcgactcactggtggcggtcggagtcgatctgattgatgtgttcgcggtactagaacatgagggcgtgcagaagtttgtgaaatcctggaacgagctactcaaggaaactcaggaacagctggactccgtcgccaaatga

SEQ ID NO: 27546 - DNA, 2100 bp, Mycobacterium leprae
gtgaccacactcgaccagatctccacgctgacccaaccgcgccatcccgatgactggaccgagatcgattcggctgcagtcgacaccatcagggtgttggctaccgacgcggtccaaaaagctggcaacgggcacccggggacggcgatgagcttggccccgctggcctacactttgttccagcgcactctacgccacgaccccaatgacaccgcatggctgggtcgtgaccgattcgtgctgtcggccgggcatagcagcctgaccttatatatacaactctatctcggcggcttcggtctcgaactatctgacatcgaatcgctgcgcacctggggatccacaactcctgggcatccagagttccggcacactaagggtgttgagatcaccaccggcccactcggccagggtctagcatcagcagtcgggatggcgatggcatcacgttacgaacgtggcctgttcgaccccgacgctgaaccgggagccagccctttcgaccattacatttatgtgatcgcctccgacggggacatcgaagaaggggtgacatcggaagcgtcgtccctggccgcagtccagcaactcggcaacctcatcgtgttctacgaccacaaccagatctcgatcgaaggcgacaccaaaatcacgctgtgcgaggacaccgccgcacgctaccgcgcctacggctggcacgtacaagaggtggaaggtggcgagaacgtcgtcggcattgaggaagccatcgccaacgcgaaagccgccaccgaccggccgtcgttcatctcactgcgcaccatcatcggttatcccgcgccaaccttgataaacaccggcaaagcgcacggtgcggcccttggcgaagacgaggtagcggccactaagcgaatccttgggttcgatcccgacaagacctttgcagtccgcgaggacgtaatcacccacacccgcggcttgatagcccgcggcaaagaagcccacgaacgctggcaactagaattcgaagcgtgggcacagcgcgagcccgaacgcaaggcactgttggatcggttgctcgcccagcagcttcccgacggctgggatgctgacctgccgaactgggagccgaggtccaaggaattggccacccgcgccgcatctggtgcggtactatccgcgataggaccgaaactcccggagttgtggggcgggtcggccgatctagcgggcagcaacaacaccaccataaaagacgttgattcctttgggccgccgtcgatttcgaccgacgagtacaccgcacattggtatggtcgcaccttgcatttcggtgttcgcgaacacgcgatgggcgccattctgtccggcatcgtgctgcacggccccacccgcgcatatggtggtacatttctacaattctccgactacatgcgcccgtcggtgcgactggcgtcgttgatggatattgacacgatctacgtgtggacgcacgattcggtcggactcggcgaggacggcccaacccatcagcccatcgaacacctcgcagcgttgcgtgctatccctcgattgtcggtggtgcgtcccgccgatgccaacgaaacggcatatgcctggcgcacaatcctggctcgcggcgccaacagcggtccggtcgggctaatcctgacccggcagagtgtgccagtgttggaaggcaccaacaccgaaggcgtcgcccgaggcggctatgtgctaggcgatggtggcagctctgaagctaaggagcctgacgtcattttgatcgccaccggatccgaggtccaactcgctgtcgcagctcagaagttgttggcggataaagacatcattgtgcgggtggtgtcgatgccgtgtgtggaatggttcgagtcacagccgtacgagtatcgcgacagtgtgttgcccccgtcagtgtcggcacgggtggccgtcgaggccggcgtcgcgcaatgctggcataagctggtcggagacaccggcaagattgtgtccatcgagcactacggcgaatccgcagattaccagactttgttccgtgagtacggcttcacgccggaggccgtggttgccgcagcggaacaggtattggataactga

SEQ ID NO: 27547 - DNA, 798 bp, Mycobacterium leprae
gtgacgcaaaacaacacactaaggaacagcccactatttcccgctggcactttcactccaaatccccgacccaacgccgtgacccggatggtggccgcacagtttatgctggagcttaagctgctgctacgcaacggcgagcaattgctgctgaccatgttcatcccgatcaccctgctgatcggcctcacactgctgccacttggctccttcggccaccatcgcgccaccacgtttgtaccggtcatcatggcgctggcagtggtctctagcgcattcaccgggcaagccatcgcggttgcttttgatcgtcgctacggcgcactcaaaagattcggagccaccccgctaccggtttggggtatcattgccggcaagtccctggcagtcgtaaccgttgtgttcttgcaggcaatcatcttgggcgccattggcgttatgctgggttggcggccggcgctgatctgtttggcgctgggtgcggcgatcatcgcgctgggcaccgcgggcttagcggcacttggcctgctgctcggcggcaccttgcgggccgagatcgtcctcgcagtagccaacctgatgtggttcgtgttcgccggacttggcgcgctaactgtcaagatgaacatgatctcggcggtggttaagtgggcagcccgcctaaccccctcgggtgcactgacagaggcgctgtcgcaggcgatgactctgtcggtggactggttcggggtcatcatcctgacggcatggggcacgctcgcggcgctcgcggcacttcactggttccggttcacctga

SEQ ID NO: 27548 - DNA, 783 bp, Mycobacterium leprae
atgacgactttgatagtcaaagacttgtacgtaagcgttgagcatcccaacgccgctgaatccgagtgccagatccccatcctcaatggcgtcgacctgaccgtgaaatctggggaaacgcatgcgttgatgggccccaacggatccggcaagtccacgttgtcttatgctatcatgggccatcccaagtaccgggttatctcgggtgccatcacactagacggcgcggacgtgctaacgatgagcgttgacgagcgcgcgcgagccgggttgtttctagccatgcagtatcccgttgaggttcctggagtatcggtgtcgaactttctgcgctcggccgcgaccgtcattcgcggcgaaccgcctaaactacggcactgggtcaaagaggtgaaagccgcgatgggtgcgctggagatcgatccggttttcgccgaacgcagtgtcaacgagggcttctccggtggcgaaaagaagcgccatgagatcctgcaactggaactgctcaagcctaaaatcgccatcttagacgagaccgattccgggttggatgtcgacgcgttgcgtgtggttagcgatggggtgaaccgctacgctgattcggagcacggcggcattttgttgatcacccactatacgcgcatcctgcgctacattcgtccggaattcgtacacgtgtttgtcggcggccggatcgtcgaatctggtggctcggagctggccgacgaacttgagcagaacggctacgtacgtttctcccaaccggcggcaaccggagtctaa

SEQ ID NO: 27549 - DNA, 498 bp, Mycobacterium leprae
atgatattgcgtctagaacagatctatcaggaagtgatcctcgatcactataaacacccccagcatcgcgggctacgtgagccgttctgtgctcaagtgtaccacgtcaacccgatctgcggtgacgagatcaccttgcgcgtggcattatccgacaacggtgctagtgtcgcagatatttcgtatgaaggacaaggttgttcgatcagccaggcgtcgatctcggtgcttgctcagcaggtgatcggtcagagtgttcctgacgcactgaacatcatctccgcgttcaccgagatggtgtcctcgcgcggaacgattgagggtgacgaggacgtcctgggtgatggggtagcgttcgccggagtagccaagtacccggcccgtgtcaaatgcgcgttacttggctggatggcttgcaaagatgctttgatacatgctaattcggcagataaagtcctcgaggaggtcatggatgagcaaaatcaccgcgtcgggtga

SEQ ID NO: 27550 - DNA, 261 bp, Mycobacterium leprae
gtgaccaacatcaagtcgcagcagaagcgcaaccgcaccaacgagcgcgccagattgcgcaacaagtcggtgaagtcttcgcttcgtaccgctgtccgcgcgttccgcgaggcggtccatgccggcgagaaggagaaggcagcgaagctgctggtgtcgaccagccgcaaattggacaaggcggccagcaaaggtgtgatccacaagaaccaggcggctaacaagaagtcggcactggctcgtactctcaacaaactctga

SEQ ID NO: 27551 - DNA, 774 bp, Mycobacterium leprae
gtggtgagcacattgttctacgtcgacgcattgcccgataccggtacggtagctgtggtgggtggcgacgaagggtttcacgcggtcacggtgcgtcggatccgtcccggcgaggagctggtgctcggtgacggtgtcggtggccttgctcactgcttggtcgaacgggccgggcgcgatgggctatatgcccgggtgctggggcactggaccgtagcgccggggctaccgccggcgactgtggtgcaggcgttgcccaaggctgaacgctcagagttggctatcgaaatggccaccgaggccggtgccgatgcgttcgtggcgtggcagtctgatcgttgcgtggccagctggtacggggtccgggtggacaagggtctgcgccggtggcgtgcggtagcccgcgcggcagctcggcagtctcgccgggcgcacataccttcggtcgatggggtgttgaccactgcggcgctgctacagcggatccgggatgaggtagccgccggtgccactgtgctggctttgcacgagtcggcgaccgatcggttgtccgatgtctttgcggatatctctgtggcgcaagcaaactcgctagtgttgttggtcggtcccgaaggaggtatcgcgccggacgagattgccgcattgactgaggcgggcgccgtcgcggtccggctcggtcccaccgtgctgcggtcatcgaccgcggctgcggtggcattgggcgcgttaggcgtgctcacttcccggtgggatgcttcatcgattctgtaa

SEQ ID NO: 27552 - DNA, 909 bp, Mycobacterium leprae
gtggatatggctgaattccgttcgggtttcgtatgtttgatcggtcgtccgaatactggcaagtcgacactgaccaacgcattggtcggcaccaaggtagcgatcacttcgatgaagccgcaaaccacccgacacaccattcgagggatcgtacacagggagggtaacttccagatcgttctggttgacactcccggtctgcatcggccgcgcacgctgttgggtaagcggctcaacgacttggtgcgcgacacttataccgaggtggacttaatcggactgtgcatcccggctgatgaggccaccggtccgggagatcgatggattgttaaccagattcgatcggtcgccccgaaaacgatcctcgtcgttatcgtcactaagattgacaaagtgcccaaggaccggctgtccgcacaactggtcgctgtcagcgacctcgtcgccgactcagccgagatcgtgccggtgtcggctgtgacgggtgaacaggtcgacgtgctgatagatgtgctggctgcggccttgccaccgggtccggcttattactccgccggtgaactgaccgacgagccggaagagcttctgatggcagaactgatccgcgaggccgtgctggagggagtgcatgacgagttaccacattcgctggcggtggtgattgacgaggtcagcccgcgggcagggcgtggcgacctgattgacgtgcacgctgtgctttatgtcgagcggccaagtcagaagggaatcgtcattggcaagagcggtgcccggttgcgggaggtgggtatcgcggcgcgtcgccagatcgagaagctgttagggaccaacatctatctcgacttgcatgtcaatgtcgccaagaactggcagcgcaaccctaaacaacttggtcgactagggttttga

SEQ ID NO: 27553 - DNA, 891 bp, Mycobacterium leprae
gtggttaggaacgagcgcacgctgaagtccacggattttccgcagctgccccctgcgcccgacgactacccgacctttcccgacaagtcgacctggccggttgtcttcccgatgctgccgccatcacccgacggcgggccgaggcgaccgccgcagcacacgtcaaaagctgtcgctccacggctctcggccgcccaattgccgactcatgtcgccatcgtgatggacggcaatggccgttgggctaaccaacgcggactgcaccgcaccgagggccacaagatgggcgaagcggtggtcatcgacgttgcttgcggcgctatcgaactcgggatcaaatggctcagtctctatgctttttctactgagaactggaagcggtctgtcgaagaggtccgtttcctgatgggttttaaccgcgatgtagtgcgacggcgtcgggagaatctcaaggagatgggggtccggatccgatgggtagggtcgcgaccgcgcttatggcgcagcgtcatcaatgaattggccattgcggaacacatgacggcgggcaacgacgtcatcaccatcaattattgtgtcaactacggtggtcgcactgaaatcgcagaagctacaagagaaattgctcgtctggcagctgcgggccggctcaatccggagcggatcaccgagtccacgatcacacggcacttgcagcggccagacatccccgatgtcgatctcttcgtgcggacttcgggggagcagcggtccagcaatttcatgttgtggcaggcggcgtatactgaatacattttccaggataagttgtggcccgattatgaccgccgtgacttgtgggcggcgtgtgaagaatatgcgtcgcgcaatcggcgcttcggaagcgcatag

SEQ ID NO: 27554 - DNA, 1023 bp, Mycobacterium leprae
gtgaacaggcggattctcaccttgttggttgcgctggtgccgattctggtcttcggcgtgttgcttgcggtggtgacggtgccgttcgtgtcgctgggccccggtcccacttttgacacactcggtgaggtggacggcaagcaggtcgtcgcgatcaaaggcgcgcacacgcacccgacgtctggtcatctcaacatgacaacggtgtcccagcgcgacgatctgaccttgggtgaagccctgacattgtggctgtccggacaagaacagctggtgccgcgcgacctaatctacccgccgggaaagtcgagggaagacgttgacaaggtcaactacgctgatttcaaacagtccgaggacagtgcagcttatgccgcactgggatacctgcagtatccgtctgcagttaccgttgctaaagtcactgatcctggtcagtcagtgggcaaactgaagtctggtgatgccgtggacgcggtcaacggcagcccggtggccaatgtcgagcaattcaccggattgctgaagaaaactaagcccggcgaggtggtgaccatcgactttcgtcgcaagaacgagccacccggtgtggtacagataacattgggtgcgaacaaagatcgcgactacggctttttgggtgtcgcggtgctagatgcgccgtgggcgccatttgtggtggatttcaacctcgccaacgttggcggtccctcggccggactgatgttcagcctggcggttgtcgacaagctgaccaccggcgacttggtcgggtctacgttcgtcgcgggcaccggaaccatcagcatcgacggcaaggtgggccctattggaggcatcgcgcacaagatggctgccgcccgcgctgccggcgccacggtgtttctagtgcccgcgaagaactgctacgaggcgcgctccgataaccgcaccggcctgcgattggttaaggtcgagagcctcagccaagccgtggacgcgttgcacgctatgacgtcggggggccagctgccgagctgctaa

SEQ ID NO: 27555 - DNA, 1125 bp, Mycobacterium leprae
gtggaacctgaccgacaaaccgacatcgctgctcttgactccaccttgaccacggtggagcgggtgctcgacgtggagggtctgcgcacccgcatcgagaaacttgagcatgaggcgtccgatccgaaactgtgggatgaccaagtccgcgcgcaacgtgtgaccagcgagttatctcacgctcagggcgagctgcgccgaatcgaggagctgcggcgacgtttagatgacttgccggtactctacgaattagcggctgaggaaagggctgcggccgccgctagcggaatggaggccttcgctgaggctgatgccgaactcaaggcgctgcgcgtcgatatcgaagccaccgaggtgcgcacgctgttgtcaggcgaatatgacgagcgcgaagcgctgatcaccatacgttccggtgctggcggagtggatgccgcggactgggccgaaatgctgatgcggatgtatattcgatgggcagagcagcacaaatacggcgtcgaggtgttagacacctcctatgccgaagaagccggtgtcaaaagtgccacgttcgccgtgcacgcgccgttcgcctatggcacgttggcgagcgagcagggcacccaccggctggtccggatcagcccgttcgacaaccagagtcggcggcagacctcgttcgctgaggtcgaagtgttgcctgtggtggagatcaccgatcacatcgacattcccgaaggcgatgtgcgcgtcgatgtctaccgatccagcggtcctggcggccagtcggtcaacaccaccgactctgcggtacggctaactcacgtcccaaccggtcttgtcgttacctgccagaacgagaaatcgcagctgcagaacaaggtatcggcgatgcgcgtgctgcaagcaaagttgttggagcgtaagcgtttagaagaacgcgctgagctagatgcattaaagggtaggggtggcagctcgtggggcaatcagatacggtcctatgtactgcacccttatcagatggtcaaggatctgcgaaacgagtacgaggtgggtaacccgacagctgtacttgacggagacatcgacgggttcctggaagccgggattcgttggcgcaacagacgtgatatcagctaa

SEQ ID NO: 27556 - DNA, 483 bp, Mycobacterium leprae
gtggccagaaaccctcgtggcggcaagcagattgtggccaccaatcgcaaggctcggcacgattacgcaatcattgaattgtttgaggctggggtggcgttgcttggcaccgaggtgaaaagtctgcgggaggggcatgcgtcgctggccgacgcgttcgcaaccgtcgacagcggtgaagtgtggttgcgaaacatgcacatcccggagtatcagcatggtagctggaccaatcacgatcctcgccgtaaccgcaagctgctgctgcaccgccgccagatcgacaccctggttggcaagatccgtgacggcaacctcgcgctagtgccgttatcgttgtattttgccgagggcaaggtcaaggtcgagcttgcgctggcgcgcggcaagaaactgcacgacaagcgccaggacatggcgcgtcgcgatgctcagcgcgaagtaatccgtgaactcggtcgccgtgccaagggcatgctctga

SEQ ID NO: 27557 - DNA, 1032 bp, Mycobacterium leprae
atgagtaccgctaccggattcagcaggattttctccggcgtgcagcccacttctgattcgcttcacctcggtaacgcgttgggtgccatcacccagtgggttgcgctgcagtacgatcatccggacgaatacgaagcgttcttttgtgtggttgacctgcacgccataaccatcgcgcaagatcccgagacactgtggcgtcggaccctggtcactgccgcgcaatacctggccttgggcatcgatccggggcgcgccgtcgttttcgtgcaaagccatgtaccagcccacacgcagttggcgtgggtgctgggctgctttaccggcttcggacaggcgtctcggatgacacagttcaaggacaaggcgctgcgtcagggtgccgactccaccaccgtcggcctgttcacctatcctgtgttgcaggctgccgacgtgttggcctacgatactgatctggtgcccgtgggggaggatcagcggcagcacttggagcttgcgcgtgacttggcgcagcggttcaatagccgcttcccggacacctttgtggttcccgacatgttcattcccaagatggctgccaagatctacgatttggccgacccaacgtcgaaaatgagtaaatcggcgtccagtgatgctgggttgatcaacctgctcgacgatccggcgttgtccgtcaagaaaattcgagcagcggtgaccgacagtgaacgggagatccggtatgatccggaggtcaagccgggtgtgtcgaacttgttgaacatccagtccgcggtcaccggggttgatgtcgatacccttgtgcagcgctacgttgggcacggttatggcgacctgaagaaagacaccgccgaggccgtggtcgagttcgtcagcccgatcaaggaccgggtcgacgaattgatggccgatctaaccgaattggaggttgttcttgcggtcggagcgcagcgtgctcaagatgtggctggcaagacgatgcagcgggtttacgaccggctgggctttcttccgcaacgggggtaa

SEQ ID NO: 27558 - DNA, 1755 bp, Mycobacterium leprae
ttgatccagcaacaccgatacgacgtggtgatcgtcggcgcaggcggtgccggaatgcgggcagccgtagaagccggcccccgagtgcgaaccgcggtcttgacgaaactttatccgacccgcagccacaccggtgccgcccaagggggcatgtgcgcggcgctggctaacgtcgaagatgacaactgggaatggcacgccttcgacaccgtcaagggtggcgactaccttgcggaccaggacgcagtggagattatgtgcaaggaagctatcgacgcggtgctcgacctagagaagatggggatgccattcaatcgtacccccgaaggccgcatcgatcagcgccgcttcggcggtcacactcgcgaccacggcaaagcgccggtccgcagggcctgctacgcggccgaccgcaccggccacatgatcctgcagacgctctaccagaactgcgtcaagcacgacgtggagttcttcaacgagttctacgcactcgacttggtcctgacccaaaccccgagcggcccagttaccaccggggtagtggcctacgagttggcgaccggcgatattcacgtcttccacaccaaggccgtcgtgatcgcgaccggcggttcgggccgaatgtacaagaccacctccaatgcgcacacgctgacaggagacggcatcgggattgtgttccgtaagggacttcctttggaggacatggagtttcatcagtttcacccgacaggcctggcagggctgggcatcctaatatccgaggcggtgcgcggcgaaggcggacggctgctcaacggcgagaacgaacggttcatggagcactatgccccgacaatcgtcgacctggctccgcgtgacatcgtggcccgctcaatggtgctcgaggtcctggagggccgcggcgctggcccgcataaggactacgtctacatcgatgtccgtcacctcggcgaggaggtgctagaatccaaacttcccgatatcaccgaattctcccgcacctatttgggtgtggacccggtccacgagctggtcccagtctatccgacctgccattacgtgatgggcgggatcccgaccaccgtgaccgggcaggtgctgcgggacaatacctcgaccgtccccggcctgtacgcggccggcgaatgcgcatgtgtgtccgtgcacggcgccaaccggctgggcaccaactcgctgctagacatcaacgtcttcggtcgccggtccggcatcgcagcggccagttatgcttcagccaacgacttcgtcgatatgccaccgaacccagcggagatggtcatcagctgggtagctaacatcttatccgagcacggcaacgagcgcgtcgccgatattcgtggcgcgctacaacagacgatggacaacaatgcggcggtgtttcgtaccgaagaaacactcaagcaagcgctcaccgatattcattcgctcaaggagcgatactcccgaataaccgtgcacgacaagggaaaaagtttcaacagcgacttgttggaagccatcgagctgggctttttgctggaactggctgaagtcacggtggttggcgcgctgaaccgcaaggaatcccgtggcgggcatgcccgcgaagactatccgcaccgggatgacaccaactacatgcgccacaccatggcgtacaagcaaggcaccgatctgctcagcgatatcgcgctggatttcaaacccgtcgtgcagactcgctacgagccccaagaacggaagtactga

SEQ ID NO: 27559 - DNA, 1617 bp, Mycobacterium leprae
ttgaaggctgccgtgacacccgaagagtggatcacgcacgatcccgacccacagacagccgccgagctggccgcgtgcgaccccgatgaacttgcggcgcggttcacccgtgcactgcgcttcggcacgtcgggcttgcgcggaccagtgcgcggcggccccgacgccatgaacctagcggtggtgttgcgagcgacctgggccgtggcacaggtgctcctgcaacgagcgggctcgcggcctgcaaccgtaatcgtcgggcgcgactctcggcacggctcggcggcattcgtcgctgcgaccgctgaggtgcttgccgctgaaggtttttccgttctgctgctacccaatccggcacccacgccggtggtggcgtttgcggtgcgcaataccggcgccgcggccgggatccagatcacagcatcgcacaacccgccgaccgataacgggtacaaggtgtatttcgacggcggcatccagatcatctctcccattgaccaccaaatcgaaaacgcgatggccgctgctcccctggccgaccagatcaccaggaaacccgtaaaccccagtgaaaacagcgcctccgatctggttgaccattatattcagcgagcggccgcggtacggcgctccaacggttcagttcgggttgcccttacaccgatgcacggagtgggcggtgcggtagccgtcgagacgctgcggcgcaccggctttgacgacgtgcacaccgtagcggcgcagttcgagcccgaccccgactttccaaccgtcgcgttcccaaacccggaggagcccggcgccaccgacgcattgctggccctggccgcccatgtcggggccgacgtcgcgatagcactggaccccgacgccgaccgctgcgccgttggtatacccaccaactcgggatggcggatgctgtccggagacgaaaccggttggctgctaggcgattacattttgtcgcaaaccgacaagccggaaaccgccgtggtagccagtaccgtggtgtcgtcgcgtatgttgccagcaatcgccacacactacaacgcggtccacgtcgagaccctcaccggcttcaagtggctggcgcgcgccgacgcaaacctgccgggcactcttgtgtacgcctatgaggaagctatcgggcattgtgtcgaccccactgccgtacgcgacaaagacggcatcagcgccgcggtgttagtgtgcgatctggttgccgcactgcacaagcagggccgctcggtgcccgacatgcttgaccaactcgccctacgccacggcgtgcacgacgttacagcaatatcacgtcgcattggccccaaacaaacgggagttgacgaggctgtcgacctgattcagcggctacgcgcagccccgccgagtcagctggccgggttcaccgcgaccactaccgatatcaccgacgcgctaatcttcaccggcggtgatgatgacacgtgggtccgggtagtggtgcggctatcaggaaccgaaccgaagttaaagtgctacttggaagttcgctgctcggtggctggcaacctaccatccacccgacaacgggccagggtgctgcgcgacgagctagtcaccttggtgcagcagtggtga

SEQ ID NO: 27560 - DNA, 1797 bp, Mycobacterium leprae
gtggccagtcacgccagctcgaggatcgccaaggttctcgtcgccaaccgcggcgaaattgctgtccgggtgatccgcgcggcccgcgatgcgagactgcctagcgtggcagtatacgccgagcctgacgccgaggcgccacatgtgcggctggccgacgaagcgttcgcgctgggaggtcacacttccgcagagtcctacttggacttcggtaagatcctcgacgccgctgcaaaatccggagccaacgcgatccatcccggttacgggttccttgccgagaatgctgacttcgcccaggccgtcatcgacgccggcctgatctggatcgggcccagcccacaatcgatccgcgacctcggcgacaaggtcaccgcccgccatatcgccgcccgcgcacaggctcccctagtgcccggcaccccggatccggtcaaaaacgccgacgaggtggtggccttcgccaaagaacacggggtaccgatcgcgatcaaggccgccttcggtggcggcggcaagggcatgaaagtggcccgcaccctcgaggagatttccgaactatacgaatcggcggtgcgtgaggccaccgttgcgttcggccgcggggaatgttttgttgagcgctacctagataagccccgacacgtcgaagcgcaggtaatcgccgatcagcacggcaacattgtcgtcgccggtactcgggactgctcgctacagcggcgtttccagaagctggtcgaggaggcgccggcgccgttcctaacagacgcccagcgtaaggaaatccacgaatccgcgaagcgaatctgcaaggaggcccactactacggcgctgggacggtagaatatcttgtcggccaggatggcctaatctcgttcctggaagtcaacacccgccttcaagttgagcacccggtcaccgaagagaccacaggcattgatctggtgctgcagcagttcaagatcgccaacggcgaaaagctcgaactgatcaaggatcctatcccgtgcggtcacgccatcgagttccgaatcaatggcgaggacgcaggacgcaactttctgccctcgccggggcctgttagcaagttccacccgcccaccggtcccggcgtgcgattggactccggggtagagaccggttcggtaatcggtggccagttcgactccatgcttgccaagctgatcgtgcacggcgccactcgccaggaagcactggcgcgcgcccgccgcgcactggacgaattcgaggtcgaaggcctggccacggtcatcccgttccaccgcgctgtggtatccgacccggcgctgatcggcgacaacaacagcttctcggtgcacacccgctggatcgaaaccgagtggaataacaccatcgaacccttcatcgacaaccagcccctcgacgaagaggacaccaggccacaacagacggtgatcgtcgaggtcgacggccgccgactcgaggtctcgctgcccgccgatctcgcattagctaacccggccggctgcaatccagccggtgttatccgcaaaaaacccaagccgcgcaagcgcggtggacacaccggcgcagcgacctccggtgacgcggtgaccgcgcccatgcagggcaccgtagtcaaggtcgccgttgcggagggacaaacagtgatgacaggcgacctagtggtggtcctcgaggctatgaagatggagaacccagtcaccgcacataaagatggtatcataacgggcttggcggtcgaagccggcacggccatcactcaaggcacggtgctcgccgagatcaagtaa

SEQ ID NO: 27561 - DNA, 642 bp, Mycobacterium leprae
atgacccggctggtactcgggtccgcttccgccggtcgactcaaagtgcttcgccaagccggcattgatccactggtcgcagcttccggtgtcgatgaagatctggtcaccgcaggcctcgggtcagacacttcgccgcgcgatgtggtaagcacactcgcccgagccaaagccacccaagtcgcggcagctctgagccacgcagtcgcagacgattgcgttgtcattagctgtgattcacaactttccatcgatggccgactgtacggcaaaccgcagtccgtcgccaacgcacggcaacagtggcagtcgatggcagggcgcgccggccaactctataccggtcactgcgttatccggttactaaacaacgaaactacttattctgtcgatgaaacatcaatgaccacaatatgtttcggaaatccgtcagctgaagacctggaagcctacctggcatgcggcgaatcgttgcaagtcgctggagggttcacgcttgacggcctaggtggctggttcatcgacgcggtctacggcgatccgtcaaccgttgtagggatcggactgcctttgacgcggtcgctactgtcccgtgcggggttgtctattgccgcaatgtgggcagccaatccggtcatctag

SEQ ID NO: 27562 - DNA, 1650 bp, Mycobacterium leprae
atgacaagcgttaccgaccactcggctcattcaatggaacgcgctgccgagcacacgatcaatatccacaccacggcaggcaagctggccgagctgcataagcggaccgaagaagcgctgcatccggtcggtgcagctgccttcgagaaggtacacgctaagggtaagtttaccgcccgcgagcgcatctacgccctattggacgacgactcattcgtcgaactcgacgcactggccagacaccgcagcaccaacttcggcctcggtgaaaaccgcccggtaggcgatggcgtggtcaccggctacggcaccatcgacggccgcgacgtatgcatcttcagccaggacgtcacggtgttcggcggcagcctgggcgaagtgtatggcgagaagatcgtcaaggtccaggaactggcgatcaagaccggccgtccgcttatcggcatcaacgacggcgcgggcgcgcgtatccaagaaggcgtcgtctcgctcggcctgtacagccggattttccgcaacaatatcttggcctccggcgtcatcccgcagatctcgctgatcatgggagcggccgccggtggacacgtgtattccccagcactgaccgacttcgtggttatggtcgaccaaaccagccagatgttcatcaccggacccgacgtcatcaagaccgtcaccggcgaggacgtcaccatggaggagctgggtggcgcccatacccacatggccaagtcgggtaccgcacactatgtagcatcgggcgagcaagacgccttcgattgggtgcgcgatgtgttgagctacctgccgtcaaacaacttcaccgacgcgccgcggtattctaagcccgttcctcacggctccattgaagacaacctgaccgctaaagacttggagttggacacgcttatcccggactcgccgaaccaaccgtacgacatgcacgaagtggtgacccgcctcctcgacgaggaagagttccttgaggtgcaagccggttacgccaccaacatcgtcgtcgggctcggacgcatagatgaccgaccggtgggcatcgttgccaaccaacccatccagttcgccggctgtctagacatcaacgcctcggaaaaggcagcccgatttgtgcgggtctgcgactgcttcaacatcccgatcgtgatgttggtggatgttccaggcttcctgcctggcaccgagcaagaatatgatggcatcatccgacgcggcgcaaagctgctcttcgcctacggcgaagccaccgtacccaagatcaccgtcatcacccgcaaggcctacggtggcgcttactgcgtgatgggctccaaaaatatgggctgcgacgtcaacctggcttggccgaccgcacagattgcggtgatgggtgcctccggcgcagtaggcttcgtgtaccgcaaggaactggcccaagcggccaagaacggcgccaatgttgatgagctacgcctgcagctgcagcaagagtacgaggacaccctggtgaacccgtacatcgccgccgaacgaggttacgtcgatgcggtgatcccgccgtcacacactcgcggctacattgccacggcgcttcacctgttggagcgcaagatcgcacaccttccccccaagaagcacgggaacattccgctgtga

SEQ ID NO: 27563 - DNA, 1470 bp, Mycobacterium leprae
atgcctgtgcaacgtgtggttcgtgcggttgtcactgcgctaacccttgctatcgttctggggaccgggatcacgtggactagcttccggtcattcgaagacggcatcttccacatgtccgctccctcactgggcaagggcggcaacgacggcgctatcgatattctgttggtcggtttggacagccgtaccgatgcctacggcaacccgctgtcggccgaggagctggcgacactgcgggctggcgacgaagaggccaccaacaccgacacgatcatcctgatccgtatacccaacaacgggaagtcggcgaccgcgatctcgattcctcgggactcctacgtgcaagctcccggcctgggcaaggcgaagatcaacggcgtctacggtcagaccagggaggccaagcgagcgagcctcgtccggaccggtgattccgccgaagatgccgcggcgcaaggcaccgaagccggtcgtgaggccctgatcaagacggtcgccgatctcaccggcgtcaccgtcgaccactatgccgaaatcggtttactcggtttcgcattgatcgttgacgcgctcggtggcgtcgacgtctgtctcaaagatgcagtgtttgagccaatgtcgggtgccgactttccggccggcaggcagaagctgaatggtccgcaggcgctgagcttcgtccgccaacgtcatgagctgccccgcggtgacctggaccgggtggtgcgtcagcaggcggtgatggcctcgctagtccaccgggtcatctccggacaaaccctatccaacccatccacaataaaacatctcgagcaggccatccagcgttcggtagtgatttcctcaggatggaacctgatggacttcctaaagcagttacaaagtctggcagatcgcaaagtcgccttcgccaccattccggtactcgacgagaccgggtggagcgacgacggcatgcaaagcgttgtgcgggtagacccgcaccaggttcaaaacttcgttagtggactgttgcataaccaagcccaagacaaaaccgacgagctggcctacacacccgccaagatcaccgctaacgtggccaatgacaccgacatcaacggactggccgcggcggtatcagatatattgaccaccaagggttttattgccggctccgtggccaacaatcaaggaagccatgtgaaaagcagccaggtgcgtgctgcgaagtctgacgacctcggagcccagaaggtctctaaggaactgggcgggttacccatagtcgtcgatggatcgatccccgcaggatcggtgctagtaatattggccaacgactacactggtccgggctctgggcttttcggtaacggttcgatagcgtcagactatgcatcaaaccccggtgcttcggctgaccccaacatcccggtgccatcgccgatccttaccgccggctctgaccaacccgagtgcatcaactga

SEQ ID NO: 27564 - DNA, 1374 bp, Mycobacterium leprae
gtgaccagttcggattcgcaccgctctgcaccgtcgcctgagcatggcaccgcctcgacgatcgagatccttcctgtcgccgggcttcccgaattccgtcccggcgacgatctgagtgccgcgctcgccgcggccgcaccgtggctgcgcgacggcgacgtcgtggtggttaccagcaaggtggtatccaagtgcgagggtcggctggtcccggctcccgaggatactagaggacgaaatgaactgcgccgcaagttaatcaacgatgaaacgatacgcgtgctggcacgcaaaggcagaaccttgatcatcgagaacgggctcgggctggtgcaagctgccgccggtgtggacggatctaacgtcggccggggcgaactcgcgctgctacctgtcaatcccgacgccagcgccgcagtgctgcgcattgggttgcgcgcgatgctcggcgtcaacgtcgcggtggtcatcactgatacgatgggccgcgcttggcgcaatggccagaccgacgtcgcgataggtgcggctggtttggctgtgctgcacaactattcgggtgccgtcgaccgctacggcaacgagttagtggtcaccgaaatcgcggtggccgacgaggtcgcggcggccaccgatctggtcaagggcaaattgactgcgatgccggtggccgtagtgcgcggccttagcccgactgacgacggctcgaccgcacagcacctgctgcgaaatggccccgacgacctgttctggctcggtaccaccgaagccctcgagctgggtcgccaacaagcccaactcttgcgcaggtcagtgcgccagttcagcgatgaaccaatagcagcggagctcatcgaaacagccgtggccgaggccctcaccgccccagccccacaccacacccggccggtacggtttgtgtggctacaaaccccggctgtccggacccggctgctagaccggatggccgacaagtggcgcttagacctcgccagtgacgccttgcccgccgacgcaatagcacagcgtgtggcgcgcggccagatcctctacgacgcacccgaggtcatcattcccttcatggttcccgacggcgcacatgcctaccccgacgccgcccgtgccagtgccgagcatacaatgttcattgtcgctgtcggagcagcggtgcaagccctgctggtcgcgttggcggtgcgcgggctgggaagttgctggattggctcaacgatcttcgccgacgacctggtccgcgccgagctcgaactaccagccgactgggagccgttgggcgccatcgcgatcgggtatgctcacgagccgaccgatttacgcgaaccggtaagggtcgccgacctgttgctacgcaaatga

SEQ ID NO: 27565 - DNA, 1233 bp, Mycobacterium leprae
gtggaactgctacgcggagcgttgcggacatatgcgtggggatcgcggaccgctatcgccgaattcactggaagacctgtgccggctgctcaccctgaagctgagctctggttcggtgcgcaccccggtgactcggtttggctacaagcagcgaacggcgaaacttcgctactggaggctctggtcgctgatccggaagggcagcttggctcagtgtcccgcgctcgatttggtgacgtgctgccgttcctggtcaaggtgctggcagctgacgaaccgctgtcgctgcaggcccatccgagcaccaagcaggcggtcgagggttacctgcgcgaagaacgtctgggcattccggtgtcctcgccggaacgtaactaccgggataccagtcacaagccggagttattggtggcgctgcagtcattcgaggcgttggctggatttcgtcagtcgtcacgcactgctgagctactgacggcgttagccgtctccgacctcgaccctttcattcatttgctgagcgaccagtccgacgccgacggtctgcgtgcgctgttcactacctggataaccgcgccccagaccgacatcgacatgctggtacctgccgtgctggagggggcgatcgcctacgtcagttccggagcgacggagttcctggcggaagtcaagacggtgatggaacttggcgagcgttatcccggcgacgccggcgtgctggcatcgttgttgcttaaccgcatcagcctcactcccggcgaggctatcttcttgccggccggcaacttgcatgcctatttgcgaggtgttggggtggaggtgatggctaactccgacaacgtgttgcgaggaggcctcacccccaagcatgtcgatgtgcctgagctgttgcgggtgctggatttcaacccaactcccgaggaggcgctgcgcccgccgacccgctgcgagggttttgcggtggtttacgagaccccgaccgatgagttcgaggtagcgctattggcgctcgacggcgattatctgggtcacgaggtcgatgcgtcaccccacgatgtgtcgcaaggcccacagatcttgttgtgcaccgagggtgaaattacggtgcacggcaagttccaggcactcaccgtagaacgcggtatggctgtctggatggcggccgacgacggcccgattcggctggtcgcgcagcaacccgccaagctgttcagggcaaccgtcggtttgtga

SEQ ID NO: 27566 - DNA, 633 bp, Mycobacterium leprae
gtgttgatcgcgattgaaggtgttgacggcgctggcaagcgcactttgtccgaggagttacgccaggcgtttgaggccactgggaagtcggtagcaacgttggctttcccgcgttaccggcaatcagtagccgccgacatagctgcagaggcgctgcacggccagcacggtgatctcgcgtcgtcagtgtatgcgatggccctgctgttcgcgttcgaccgcgccggggcggtcgaggacatcgaagcgttggatcgcaaccatgacatagtgattcttgatcgctacgtcgcgtccaatgccgcctacagcgccgcgcgtttgcatgaggactgcagcgggagagcggtggcctgggtacagcgaatcgaataccagagattgcggctgccctctcccgattggcaagtgttgctcgcggtctctgtcgagcttgctgggaagcgttcccgctaccgggcccgcactgatcccgaccggctgcgtgacagctacgaacgcgacgacggccttcagcagcgcactggcgcggtatacgctggcctggctgccgcagattggggcgggcggtggctagtcgtcgatgcggatatcgattcgggctggttggtagcaactttgatgggctgttag

SEQ ID NO: 27567 - DNA, 687 bp, Mycobacterium leprae
atggacatcatgaggcaaaggattttggtcgtcgatgacgacgcttcgctggctgagatgctcactatagtgctgcgtggggagggcttcgataccgcggtcatcggtgacggtactcaggccttgaccgcggtccgcgagctacgtcccgacttggtgctactggaccttatgttgcctggtatgaatggcatcgacgtgtgcagggtgttgcgcgccgactccggcgttccgattgtgatgctgaccgccaagaccgacactgtggacgtggtgctgggcttagagtcgggtgctgatgactacatcatgaagccgttcaagcccaaggaactggttgctcgggtacgggcgcggctacggcgcaacgacgacgagccagccgagatgctgtccattgccgacgtcgacattgacgtgccggcacataaggtcacccgaaacggtgaacacatctcattgacaccgttggaattcgacctgctggtagcgcttgcacgcaagccacgccaggtttttactcgtgatgtgctgctcgaacaggtgtggggctatcgtcacccagcggatacccgcttggttaacgtgcatgtccagcggctacgggccaaggtcgagaaagacccggagaacccgaccgtggtgttgaccgttcgaggagtgggatacaaggccggacccccgtga

SEQ ID NO: 27568 - DNA, 2823 bp, Mycobacterium leprae
gtgctgtcgaagttgctgcgccttggagaaggtcgcatagtcaagcgcctcaaaagggtggccgaatatgtcaacacgttgtccgataatgtcgagaaactcaccgatgttgagctgaaggccaagaccgacgaattcaagcagcggctggccgacgagaaaaacccagaaagcctcgacgatctactacccgaagcatttgcggtggcccgcgaagctgcttggcgggtgctcgaccagcgtccgtttgacgtgcaggtgatgggcggggcggcgttgcacttggggaacgttgcggaaatgaagaccggtgaaggcaagaccctgacctgcgtgctgcccgcctacctcaacgcgctggccggcaagggtgtgcatatcgtcaccgttaacgactacctggcaaaacgcgacagcgagtggatgggccgggtgcaccgcttcctgggtctgcaggtcggtgtgatcttagcatccatgacccccgacgagcgtagggtggcctataacgcagatattacctacggcaccaacaatgagttcggcttcgactacctgcgcgacaacatggcgcactcgctggacgacttggtgcagcgtgggcacagctacgccatcgtcgacgaggtggactccatcctgatcgacgaggctcgcaccccgttgatcatttccggttccgccgatggagcgtccaactggtacaccgagtttgcccggttggtgcggttgatggacaaggacgttcactacgaggtcgacttacgcaaacgcaccgtcggcgtgcacgaaaagggcatggagttcgtcgaagaccagctcggcatagacaacctctacgaggtcgccaattcgccactagtcagctacctcaacaacgccttgaaggccaaggagctgttcaaccgcgacaaggactacatcgtacgcgacggcgaagtgttgatcgtcgacgagttcaccggtcgcgtgttgattggacgtcgctacaatgagggcatgcaccaggccatcgaggccaaggagcacgtcgagatcaaggctgagaaccagacgttggccaccatcacgctgcagaactatttccgactctacgacaaactagccggcatgactggtaccgcccagaccgaggcggctgagctgcacgagatctacaagctgggcgtggtcgccattccgaccaacaagccgatgatccgcgaagaccgatctgacctcatttataagactgaggaagctaaatacatggcggtggtcgatgacgttgccgagcgttacgagaagggccagccggtgctgatcggcacaaccagcgtggaacgctcggagtatctgtcgcggcagttcaccaagcggcacatcccgcacaacgtgctcaacgccaagtaccacgaacaagaggcgggcatcgtcgctgtggcgggtcggcgcggtggtgtcaccgtcgccaccaatatggccggccggggtaccgatatcgtgttgggtggcaacgtcgacttccttaccgaccagcgattgcgcagacgtggcctggatccggtggagacgccggacgagtacgagcaggcctggcactccgaactgcccaaggtcaaggaggaggctggtcaagaggctgccgaggtgattgaggccggtggcctgtatgtgttgggcaccgaacgccacgagtcacggcgcatcgacaaccagctgcgcggccgctccggtcgccaaggtgaccccggcgagtcacgcttctacttgtcgctgggtgatgagctcatgcgccggtttcacggcgctactttggaagccttgttgaccaggctgaacctgcccgacgatgtgccgatcgaagccaagatggtcacccgggcgatcaagagcgcccagacccaagtcgagcagcagaattttgaggtccgcaagaatgttcttaagtacgacgaggtgatgaaccagcagcgtaaggtgatctatgctgagcgtcgtcgcatcctcgaaggtgagagcctacagcagcaggcgttgggcatggttcgcgacgtcatcactgcctacatcgacggtgcgactaccgacagctacgtcgaggactgggatctggatgctttgtggtcggcgctggggacgctttatccggtcgggatcaagcacgagtcgctgacgcacgcagacgaggactccgagtgtgacgagctcagccgcgacgaattgctcgaggcgctgcttatagatgcccaacatgcttatgccgcaagggaagccgagctcgcggaactggccggcgagggtgcgatgcgtcagttggaacgcaatgtgttgcttaacgtcgttgaccgcaagtggcgcgaacacctctacgagatggattatctcaaggagggcattgggctgcgcgcgatggcccagcgcgatccgttagtggagtaccagcgcgagggctacgacatgttcatggccatgctcgatggcgtgaaagaggagtcggtcggcttcttattcaatcttgctgtggaggcggtgcctgcttcccatgtggctccggtggaaatacccgaagggttcaccggattggtcgcggatgtcgaggccatccgaccgcgcgaagaggcttcaagcgcgttgcgcaccaaggatattgataacgagtcgaccgggctgacgtattctgggccgtccgaagacggctcgacacaggtgcagcttaacagcggcggtgggcagaaaacgccagccgggatcccggttggggccagtcgacgtgagcggcgcgaagctgcgcggcggcgaggccgcggtgccaagccgtcgagatcggtgaaaaaacgatag

SEQ ID NO: 27569 - DNA, 1158 bp, Mycobacterium leprae
atggaaatttcgggggcgctgctgtcccaagtcggcgccctcttgaccacacttgctgtgctgggcgccggcgcacgccggtactctttgtctccgataccggtttatctaatggcggggctttcactcggtaagggcggcatcatgccagtgtccgccgctgatgaattcatcactacgggagcgcccattggcattgtgttgttgctgctgacattgggtctggagttctctgcgaccgagttcgccagcagtctgcggcgtcacctgccgtcagccggtgtcgacatcatcctcaacgccacgcccggcgcagtggccggttggctgctgggtttggacggggtcgccgtgctcgcgttggccggcgtcacgtacatttcctcatccggtgtcattgcgcgcttgctggctgacttacgtcggctcggtaaccgggaaacgccggcggtgctgtctgtgttggtgctcgaagactttgcgatggcggcctacttgccactattcgcggtacttgcggcgggtggcagctggctggatgccgtcgttggcatgatagtcgcggtctgtgcgctattcgcggcgtttgccgcgtcctatcactggggccatcatgtcggtcggctggtggcgcatcccgattccgagcagttgttgctgagggtcctgggggtgactctgatcgtggcggcggtggccgagtccttgcacgcgtcggccgccgtaggcgcattcttggtcggtttgaccctgacgggggataccgcggaacgcgcacgtaaggtgctcggtcctcttcgtgatctgttcgcagcgattttcttccttgctatcggcatatcggtcgacccgcacaaactcctgccgatgtttccgacagccctgatcctggccactgtcaccgcggtgaccaaggtggctaccggaattctggccgcccggtacgacggcgtggcacgacgcgggcagttgcgcgctggtacagcgctcgtcgctcggggcgagttttcgttgatcatcatcggattggtcggcacgtcgacccccgccgtggccgcgctggccacagcgtatgtcttcatcatggcaatcgctggcccggtgctggctcgctacactcctggttcgttgccgaccagctctgggtcggccaactag

SEQ ID NO: 27570 - DNA, 1503 bp, Mycobacterium leprae
atgtctactctcggtgatttgcttgctgaacatacggtgctgccgggcaacgccgttggccacttgcatgcggtggtaggggagtggcagctgcttgctgacctgtcctttgccgactacctgatgtgggtcagccgtgatgacggggtgctggtctgtgtggcgcaatgccggccgcatactgcgccgacggttctgcagaccgatgctgtgggtagcgtcgcaagcgccgatatgctgccgcttgtcactgagatgtttacctctggtgccgttcagcatgaagacgctgcgggtcagcagtattcgtggttgccattcggtcggaacgttgcggcttctccggtgcggtatggtgaccaggtggtcgcggtgctgacgcagcaccaagttgaactggcagcgcgtcgcaggcccggcaatttggagatcgcctacttggcgtgcgccacggatcttctgcacatgctggcagagggcactttccccgacgtgggggacgtggcggtgtcgcactctactccgcgggcaggcgatggtttcattcgcctcgatcgcaacggtgtcgtcgcctttgccagccccaatgcgttgtcggcgttccaccgtatgggcctgactgccgaattgcaaggccgcaatctggtgaaagtcactcggccactgctgtcggaccccttcgaggcgcaggaggtggccaagcatgtgcaggacttgctggacggcggaccgagcatgcgagtggaggttaacgccggtggggctacagtgctgctgcggacgctgccgttggtggtgcatggttcgagcgtgggcgcggccgtgctggtccgtgacgtcaccgaggtgaagcgccgtgatcgtgcgctgatctctaaggacgccacgatccgggaaatacaccaccgagtcaagaataacctacaaactgtcgcggcgctgctgcggttgcaggcccggaggatggccaacgccgaagggcgagaagcgttgatcgagtcggtgcgacgggtgtcgtcgatcgcattggtgcacgacgcgttgtcgatgtcagtggacgagcaagtcaaccttgacgaggtcatcgatcggatcctgccgattatgaacgatgtggcgtcggtggacaggccgattcggatcaaccgagtcggcaacctgggcatgctggattcagaccgtgccacagcactgatcatggtgatcaccgaactagtgcagaatgcgatcgagcatgcattcgatccggcgtcccaagaaggatttgtggcgattagtgctgagcgttcggcgcgttggctcgatgttgtcgtgcacgacgacggccgtgggttacctcaaggattcaacttggaacggtcagatagcttgggcctgcaaattgtgcgcaccttggtgtcctccgagttggacggttcgttaggcatgcggaaagcacccaatcgtggcaccgatgtggtgctgcgggtgccgattggccggcgggcccggttgctgctgtag

SEQ ID NO: 27571 - DNA, 1635 bp, Mycobacterium leprae
gtgaaccgcgacagcaaaacaccgacacaaaaccgattcagtcaccgaaaggcttttcacccacatatgactgcaccaaccagtacagctgaaccggccttcgcaaaacttggagtccgtgacgaaatagtccgtgcattagccgaacgaggcattcagcaaccttttgctatacaagaactcaccttgccacttgcactcgccggcgacgacgtgatcggccaggcccgtaccgggatgggcaagactttcgccttcggcgtgccgttactacagcgcatcagcgtcactaccacagcaaggccgctgtccggcgcaccccgagggctggtcgttgtaccgactcgggagctttgtctacaagtcgccgatgacctggccaccgtggcaaaatacctgaccgctgacgacgacaaccggcggttctcggtggtgtccatttatggcgggcgggcttatgagccgcagatcgaagcactacagacaggcgccgacgtcgtggtaagcactccagggcggctgctcgacctgtgccagcagggccacctgcagctgagcgggttgtcggtgctggtactcgacgaggccgacgagatgctcgatctgggcttctttcccgatatcgagcgcctcttaggacaaatccccaccgatcggcaatcgatgcttttctcggcgaccatgccggacccgatcatcacgctggcacgcacattcatggaccaacccatccatatccgggccgaggcaccgcactccttggcagtgcacgacaccacccagcaattcgtctaccgcgcccacgcattggacaaggtggaattgatcagccgaatcctgcaggcgcgtggacggggcgcgacaatgatcttcacccgcaccaaacgcaccgcgcaaaaagtcaccaacgagctcaacgaacgcggtttcgcggtaggcgccgtgcatggcgacctcggacagatagcacgagagaatgccctcgaggcttttcggaccggcaatgtcgacgtgctagtcgccaccgatgtggccgcccgcggcattgacatcgacgacgttacccacgtaatcaactaccagtgccctgaagacgaaaagatgtacgtccaccgcatcggacgcacgggccgtgccggccgcaccggggtcgcggtcaccctagtagactgggatgagttgcaccgctgggagacgatcgacaaggcactgggcttgggcacccccgatccggccgagacatactccaattcgccccatctgtacaccgagttggccattcccgccgaggccagcggaaccgtcggcacgccgcgcaaggcgcaagtcaaacgccgcaagaccgaccgtgacggggataagtcaggaacgtcagcgcaagccgctaaggcggcgcgaacgagcaatagcgtacagcgacaccgcatccgcggtggccaacccgtcaccggacatcccaccaataacccgtccgccgacagcctggccaccaacggcaaagtcgtcgcggagacgctgccgaactcctcgtcgggctccccatccaccaacgtccgccgtcgtcgacaccgccgcaagccgaccgaggtcgccgaaaacggtctcgacaaaaacttggctgtacaggccaattga

SEQ ID NO: 27572 - DNA, 1188 bp, Mycobacterium leprae
atgtcgacatcctcgacatcactgccgccgctagttgagcctgcgggccagctgagccgcgatgaggtgattcgatacagccgccatttgatcattccggacataggcgtcgatgggcagatgcggctcaagagcgcgcgggtattggtcatcggtgcgggcgggctgggcgcgccggtattgctgtatctggccgcggccggcgtcggtacgatcggcatcatcgatttcgacgtcgtcgacgagtcgaacctgcaacgccagattattcatggcgtagccgatgttggacggtccaaggcccagtcagcgcgcgactcgattgtcgcaatcaacccgctcgtccaggtgcgattgcacgagttcaggctggagtcgagtaatgtggttaacctgttcaagcagtacgatctgatcgtcgatggcaccgacaacttcgcgactcggtatttgatcaacgacgccgcggtgctggctaaaaagccgtatgtgtgggggtcgctctaccgcttcgaaggccaggtctcagtgttttgggaggatgcccccgacgggctgggcctgaactaccgcgatctgtacctggagccaccgccccctggcatggtgccatcctgcgcagaaggcggcgtgctgggcatcgtctgtgcctctatcgcgtcggtgatgggcaccgaggcgatcaaactgatcaccgggattggtgcgccgctgctcggccggttgatgatctacaacgcgttggagatgagctaccgtaggatcaggatccacaaggacccgtccagaccgaaaatcacggagcttacagattatcagcaattttgcggtgtggtgtctgacgatgcggcccaggtggctaccggctccatcgttacgccgcgggaattgcgcgagttgctggattccggcaagaagctggccttgatagatgttcgtgaacccgtcgagtgggacatcgtgcacatcgacggcgctcagctgatcccgcgatcgttgatcaactcgggtgagggtctggcaaagctgcctcaggaccgcatgtcggtgctgtattgcaagacgggcgtgcgctcggccgagacgttggccactgtgaaaaaggctggtttctccgacgcggtgcacttgcagggtggaattgtggcatgggccaagcaggtgcaacccgacatggtgatctactag

SEQ ID NO: 27573 - DNA, 423 bp, Mycobacterium leprae
atggtgacgtccccgtcaacatcgaccaccgttgacctcccatccacgaccaccgacttaagctcaggtttagttgaggggcacgagcacggcgctgatgggatttcgaggttagcggattaccccgcacccccaccgcgcgagactctggatgcagccggggagctgttgcgcgcactagccgcacccgttcgcatcgccatcgtgctgcaactgcgcgaatcgcagcgatgcgtccacgaactagtcgacgcactgggcataccacagccactggttagccaacacctaaaaatcctcaagggggcggggatcgtcgccggagagcgctccggacgcgaaatgctttaccggcttgctgactaccacctgacgcacatcgtcgtcgatgccgtcgcccacgctggcgtggatgcactgtga

SEQ ID NO: 27574 - DNA, 1392 bp, Mycobacterium leprae
gtgccctgcctcgtggcatccgtcatcgatacagtagttaacctggccaagcggcgcggctttgtctatcctgcgggtgagatttacggcggcacaaaatcggcgtgggattacggtccgctcggtgtagagttcaaggagaacatcaagcggcagtggtggcgctcggtggtgaccggacgtgaggatgtcgtgggaatcgattcgtcgatcatcctgccgcgacaagtatgggtggcgtctggccacctcgagatcttccacgacccactggtcgagtcattgatcacccacaagcgctaccgtgctgaccatctgatcgaggcctacgaggctaaacatgggcagtcgccgtgtaacggcctggctgatattcgcgatccggacaccggcgagcccggtcagtggacggagcctcgggagtttaacttgatgctgaagacttatctcggaccgatcgagactgaggaggggttgcactatctgcggcccgagacagcgcagggcatcttcatcaactttgcaaacgtggtgacgaccgcccgccgcaagcctccgttcggtattggacaaattggcaagagttttcgtaacgagatcaccccgggaaactttatcttccgcacccgcgagttcgaacagatggagatggagtttttcgtggagccatcgaccgcgcgggactggcaccagtactggatcgacacccggatgcagtggtatgtcgaacttggtatcgatccgcagaacctgcggctgtttgaacacccgaaggacaagttgtcgcactattccgaccgtaccgtcgatatcgaatacaagttcggttttgtcggtaacccgtggggagaattggaaggtgttgccaacagaaccgacttcgacttgtcaacgcacgcaaggtattccggagttgacctgtcgttctacgatcaggtcaacgatactcggtacacgccatatgtcatagaaccggcagccggtctgactcgatcgttcatggcgttcttgattgacgcctacaccgaggatgaagccccaaataccaggggcgggatggacaaacgtgcgctgcttcgactggatccgcggttggcaccgattaaggccgctgtgttgccgctattccggcacgtcgatttgagccccaaagcccgtgacttggccgcagaattgcgtaaatgctggaacagcgaattcgacgatgccggcgccattgggcgacgctaccgacgccaggacgaggttggtacgccgttctgtgtgacagtggacttcgagtcacttgacgacaacgccgttaccgtgcgcgagcgtgacgccatgacgcaggagcgggtcgcgatgactaacgttgccgattatcttgcagtgcggctcaaaggtagctag

SEQ ID NO: 27575 - DNA, 1290 bp, Mycobacterium leprae
gtgactacgaaggctaacacgaatcagcacgacccttacgacgacttcgatcgtcagcggcgggcgcatgaagcgccgaagactgcggttttgccgggtagcgaaggtcagcaccgcactgagttcgcacgggaccgggcccgggtgcttcacagcgcagcgctgcgacgattgtcggacaagacccaagtagtggggccccacgagggagacactccgcgcacccggctgactcattcgttggaagtggcccagatcgggcggagcatggcggtcgggctgggttgcgacctcgacctcgttgagttggctggactggcccacgacatcggccacccgccatatgggcacaacggtgaacgggctcttgatgaggtggcagtaggctacggcggcttcgagggcaatgcgcagaatttccgaatcttgaccagccttgagcccaaagttattgatgaacaagggtgtagcgtggggttgaacttgactcgcgcatccctggacgcggttaccaaatatccgtggactcgtgtaggcgggcttggacatgggagaagcaagtacggtttttacgaggaagaccgcgatcctgcggattgggtccgtgtatatgcgccggcgaatcgcgcatgcctggaagcccaggtgatggactgggctgacgatgtcgcctactctgttcacgacgttgaggatggcgtcgtttcgcaacgaatagacttacgcgtgcttgctgacgagtacgagactgccgctttggccaagctgggggagggggaattctcctgggtgactgccgatgaattgatggccgccgcgcaccgtctgtcggagcttcctgtggtcgctgcggttggcaagtacgacgctacgttggcatcgtcggtcgcgctcaagcgattaaccagtgaactggtcggcagatttgcctcggtcgcgatagcgaccacacgtgcggtggccggtccgggtccgttggtgcgctatcaggctgacctgcaggtgcccgatctggtgcgtgccgaggtcgcggtactgaaaatcttggcactgcagttcatcatgtccgatccgcggcatctggaaggccaggctcggcaacgtgagcgtatacaccgggtagcgaattggctgtactccggggcgccaagcaccctcgacccagtttttgtcacggcgttcactaccgctgttgacgacaacgcccgctggcgggtcatcgtcgatcagatcgcctcgtacaccgaaggtcggctggagcgtatcgatgccggtcaggcgagtccatag

SEQ ID NO: 27576 - DNA, 1929 bp, Mycobacterium leprae
atggtcggccgtatcccagatcgcgatattgccgctatccgtgaacgggtctgcattgaggaagtcgtcggcgattacgtccaattgcggcgcgccggagccgattcgcttaaaggcctgtgtccgttccacaacgagaaatcaccgtcgtttcatgtacgcccaaaccatggccatttccactgctttggctgtagtgagggcggtgacgtgtatgcgtttatccagaagatcgaacacgtcagctttgttgaggcggttgaaatgctggctgaccggattggccacacgattaactatttcggcacggccaccagcgtgcagcgcgatcgcggtagtcgcagcaggctcattgcggccaatgcggccgcagcagcgttctatgcggcagccttggagtcagacgaggcggcaccggctcgccagtacctcatggagcgcaatttcgatgctaatgccgcacgtcatttcggctgcggattcgcgccgtcgggctgggattcattgacaaaatatctgataagcaagggttttgaattcacagaactggaggctgcggggctgtctcggcagggacgccgtggtccgatggaccgctttcaccgtcggctactgtggccgatcctcacattggctggcgaagtgatcgggttcggcgcccggcggttgtttgacgatgacccgatggaagccaagtacgtcaacacacccgagacgctgttgtataagaagtcgtcggtgatgtttggcatcgacttggctaaacgggatatcgtcaaggggcatcaggccgttgtggtcgagggctacaccgacgtgatggctatgcatctggcaggggttaccactgctgtcgcgtcgtgcggcacggcgttcggcgatgagcatctggcgatgctgcgcaggctaataatggatgataactggtatcggggtgaattgatctttgtcttcgatggcgatgcggctgggcaggcagcggctctgaaggcattcgacggcgaccagcaggttgccggaaaatcgttcgtcgccgtcgctgcggatggcatggatccgtgcgacctccggctcagctctggagaccaggcattacgcgacttggttgcttgccgcaaaccaatgttcgaattcgctattcgaagtttgattcctgacggaatggttcttgacgatgacccacaggcgaaagtggatgcgctgcgccgatccgttccgctggttgctcggattagggactatgcgttgcgcgacgaatacgcgcgacgcctggcgggctggacgggatggtcggacgaagggcaagtgcttgctcgagtgcgcgaagaggctaaccgacgtagcgtgccggaacgcaccagaaggcgcagcgtgagcgttgaacagtcaccattcatgcagccgccgggtgctccggccgatcaactcgccgcccgtcctgacccgcgtgacccaacactgtggccgcagcgtgaggctttgaaatcggttttgcagtacccagttctggcgggcccagtattcgacacacttactgtcgagagtttcactcatcccggctacggagccgttcgcgcggccattgacgcggcgggcggggcgtcggccggcatcaccggagcacaatggatcgacgtggtgcgccagcaaaccacatcggcgctgatcgccggtctgatcaatgagctaggtgtggagtcgatccaggtcgacgacgagaagctgccgcgctatatcgatggggtgctggctcgcttgcaggaagtgtggatgggccgacagattgccgaggtgaaatccaagttgcagcgtatgtcgccgattgaccagggtgacgaatatcatgaactgttcggcgatctggtcgccatggaagcttatcgacgcagcctgttggagcaagccagcggcgacgatatgaccgcctga

SEQ ID NO: 27577 - DNA, 684 bp, Mycobacterium leprae
atgtttgcggcaatccggcgtgatatccaggcagcaagacagcgagatccggcacagcccacggtgctggaggtcatctgctgctacccaggcgtgcacgccgtctggggtcatcgaatcagtcactggttgtggaatcgtcgcgccagactggccgcgcgggcgttcgccgaactcacccgcatcctgactggggtcgacatccaccccggtgccgtgctcggagccggcctgttcatcgatcacgcgaccggcgtggtgatcggggaaaccgcggaagtgggcgatgacgtcaccatcttccatggagtcactctcggcggcaccggccgggaaacgggtaaacgtcacccaaccatcggggatcgagtaaccatcggcgccggcgccaaggtcctcggtgccatcaagatcggcgaggacagccggattggcgccaacgcagtcgtggtcaaggaggtcccagccagcgctgtggccgtcggggttcccggacaaatcatcagcagcgacagcccggccaacggggacgattctgtgctgcccgacttcgtgggcgtcagcctgcaatccctgctcaccagggtggccaagctggaagccgaagacggcggttcgcaaacctaccgcgtcatccggctacccgaagccggggtttggcacggcgaggacttctcaatctga

SEQ ID NO: 27578 - DNA, 933 bp, Mycobacterium leprae
atgagcattgctgaagacgtcacacaactagttggtaacacgccactggtccggctacgccgagttaccgaaggtgcgctggctgacgttgtcgccaagctggaatccttcaatcccgccaacagcgtgaaggacaggataggcgtggccatgatcgacacggccgaggaagcgggtttgatcaagccggacaccgtcatccttgagccgacgagcgggaacaccggcatcgcactagctatggtatgcgcagcacgtggctaccactgcgtgctgaccatgcccgagacaatgagcatcgaacgacgaatgttgttgcgagcgtacggcgccgaactcatcttgactccgggcgccgatggcatgtcaggagccatcgccaaggctgaggaattagccaagtccgataaaaggtattttataccacagcaattcgagaacccagcgaacccagccatccacgccgccacaaccgccgaggaagtgtggcgcgacaccgatggcaaggtagacatcttcgtttctggaatcgggaccggaggcactatcactggtgttgcccgaatcattaaagaacgccggcccgccacgcagttcgtcgccgtagagcccgccgcgtcgccggtgttatccggtggccagaagggtcctcaccccattcagggcatcggtgctggattcgtcccgtcggtgctggtcctggacctggtggacgagatcgttaccgtcggcaacgaagaagcgctcgacctagcccgcagactggctaaggaagagggactgctggtcggcatctccgcaggggcggccgtttgcgccgccctgcacgtggcccgccggccagagaatacaggaaaactgatcgtcgtcgtgctgcccgatttcggcgagcgatatttaagcacgatgctattcgcggacttagccaactag

SEQ ID NO: 27579 - DNA, 1554 bp, Mycobacterium leprae
atggatcagctggtgttgctgcaagccgaggagtcgctgtacggccccggtcgcagatcgaaaactgtaccgattgaccatcggcacagtctaaagtcgagctttttccggctgcgtttgaggagagcgtgtcgcatctcgcattgggaccccgaggatcaagcggcttgggaggctggcaacaaaaccatcgcccggctcaatctgctctggtcggtcctgaccgtccacctggggtattcggtgtggacgctctggccggtgatggagctgttcatgcccaaggacgtatatggcttttccgcgggtgacaagtttctgctcgctaccaccgcaaccttggttggggcgtgcctgcgggtgccgtactcgttggccaccgcacttttcggtggccgcaactgggcgattttctcggtgatggtgctgttgatccccactattgccaccatggtgctgttggctcatccaggcttgccgctttggccttatctggcgtgcgcggcactgaccggcttgggcggcggtaatttcgcggcgtcgatgactaacgccaacgccttctacccgcatcggctcaagggtgcggcattcgggctcgctggtggggccggcaaccttggggtgtcggtgatccaggtggtcgggatgctggtcatcgccagcgtcggtgaccgaaagccttacattgtgtgtggactttatgtggtgctgttgataatcgccgggatcggagcaatgttgttcatgaacgacattgagcatcaccgtatcggggtgaacaccatccggccagtactgttcgtcgtggtttccacgcgtgatagctgggttctcgcgctgctctacctggcgagtttcggttcgttcatcggtttttcattcgcattcggccaggtgctggaaaccaacttcgtcgccggcggacaaagtacggctcaggccgcgttgcacgccgctgagcttgcattcatcggaccgacgttggccgcggtagcccggttttggggtggccgactggccgaccgacttggagggagtcgcgtcaccctggtggtcttcggtgccatggtttttgccgccgggttgctgggtgtactgggcataattgagggctcacgcgtgtgcccgatcaggggtgtcatgatggccagctacttcgctggattcatcactctgttcatcttgtctgggttgggcaatggatcggtgtacaagatgatcccgacaattttcgaggcctgcagccattccctgggaatcaacgacgacgagtgccgcgactggtcacgagtgatttccggggtcgtcattggctttgtcgcggaggtcggcgcactcggcggtgttgggatcgacctggcgttgcgagagtcctacctcaacactggcggggttaccgcagcgttttggatattcatgttgtgctatgccgcggccggtgtcctgacctggaagatgtacgtgtgtcgaccattgccaggcaacttgcacgacgaagcggctaatgcgtttgcggccagcgtcggagccagcagaactcaccggggctga

SEQ ID NO: 27580 - DNA, 852 bp, Mycobacterium leprae
gtgacctcactttcgatgtctgaacatcacgttcctcgtcgccgctctcgtccggttgtgttgttggttccggtacctggaacttcgaccattcacgatttgtgggctggaaccaagctgctggttgttttcggtgtggaggtgcttctgaccttctatccgggttgggtgacgatcggtttggtggcggccctggtgtgtggggcagcttggatcgcgcgcattccgcgcgacgtgttgccgtcgatgccacgctggttgtggatcgttgttgtcctgggcggtttcacagctgcactggccggtggcagtccggtggtctcgatgggcggggtcgacatcggactcggcggggtgttgaatttcctgcgtatcacagcttggtcggtggtgttacttgggctgggggcgatggtgtcgtggaccaccaatgtcgccgaaattgggccggcaatggcgactttgggtcgtccgttgcggatattccggatcccagttgacgaatgggcagtggctgtggcgctcgcgctgcgcgccttcccaatgctgatcaacgagttccaggtgctctacgcagctcgccgattgcgtcccaaacaaattctgaacagccgtaaggctcgtcgacagcgacaagccagagagctgatcgacctgcttgccgctgccatcaccgtgacgctgcggcgcgccgacgaaatgggcgacgcgatcaccgcccgtggtggcatcggtcaactatctgcctacccggcccggccgaaattggcggattgggtgacactggcgatcacgatcactaccagcagcaccgcggtggtgcttgagacaatcttgcacaccgcttcctag

SEQ ID NO: 27581 - DNA, 996 bp, Mycobacterium leprae
atggggagccgtaggcttgcgatcgtgcagcggtggcggggacaagacgagatccccacggattggggcagatgcgtgcttactatcggggtgttcgatggtgtgcaccgcgggcacaccgagcttatcgcacacacggtgcaaactggccgcgcacgcaacgtgcctaccgtgttgatgacgttcgacccgcacccgatggaagtggtctatccaggcagccacccggcgcagctgaccacgttgacccgacgagctgaactcatcgaggagttgggcatcgacgtgttcctggtgatgccgttcacgaccgatttcatgaaactcaccccggaccgctacgtccacgagttgctggttgaacacctgcacgtggtggaggtcgtggtgggggagaacttcaccttcggcaagaaagcggccggcaacgtcatcatgttgcgtcgggccgggcagcggtttgggtttgcggtcgggtcgatgtcactgttgtccgaacatcgcggtaatgagaccgtggcgttctcatcgacctacatccggtcctgtgtggacgccggtgacatgatggcggcgaccgaagcgctgggccgcccacaccgcgtcgaggggatggtggtccgcggccaaggccgaggcactgagcttggctttccaaccgcgaatgtggcttcgccgatgtattcggccaccccagccgacggtgtctatgccgcgtggttcaccgtgcttgggcacggtccggtgactggtaccgtggtcccaggtgaatgctatcaggccgcagtgtctgtcgggaccaatccgactttttccggacgcacccgcaccgtagaggcgttcgttctcgacgccgtcgccgacctgtatggacagcatgtagcgctggacttcgttgggcgcattcgtgggcaacgaaaatttgactcggtggccgatttagtcgccgagatggagaaggacattgaccgggcgcgggccctgctggctgattga

SEQ ID NO: 27582 - DNA, 270 bp, Mycobacterium leprae
gtggcgctgacaagcgagcagaaaaaagaaattttgagttcctacggcctgcatgccaccgataccgggtccccggaggcgcaaatcgcgttgttgaccaagcggattgcggacctgactgagcacctcaaggtacacaaacacgatcatcactcgcggcgcgggttgctgctgctggtcgggcgccggcggcggctgatcaagtacctatcgctgatcgatgtgcagcgttatcgctcgctgatcgagcggcttggtctgcgccgctga

SEQ ID NO: 27583 - DNA, 2322 bp, Mycobacterium leprae
atgtctgtagctgaaatcgaagagggcgtgttcgaggcaaccgttactatcgataacgggagtttcggcacccgcgccatccgttttgagaccgggcgcttagccttgcaagccgctggcgcagtggtggcctacctggacgccgacaatatgctcttgtcggcgaccaccgccagcaagaaccccaaggagcaattcgacttcttcccgcttacggtcgatgttgaggagcggatgtatgctgccggtaggatccctggttcgttcttccgccgtgagggtcggccgtccaccgacgcgatccttacctgccggctcatcgatcgccctttgcgcccgtcttttgtcgacggcctgcgcaacgagatccaggtcgtggtgacgattctgagcgtggatcccaacgatctctatgatgtgttggccatcaatgctgcctcggcctccactcagctgggcggtctaccgttctccgggcctatcggcggtgtgcgggtggcgctcatcgacggtacctgggttgctttccccactgtagagcagctcgagcgggccgtgttcgacatggtgattgccggccggattgttggcacggatgacgagggcaagcctgatgtcgctatcatgatggtcgaggctgaggctaccgaaaacgtcatcgagctggtcgagtgcggtgctcaggcgccgacggaaagcatcgtggcccaaggactcgaggtggccaagccgttcattgctgcgctgtgtaccgcgcagcaggaacttgctgacgttgtgtcttctcgccaagccaaaccgccagtcgagtacccgacgttccccgactacggcgacgacgtctactactcggtggcttcgatggctaccgatgagttggccgcggccttgaccatcggcgccaagcttgagcgcgatcaacgcaccaacgagatcaagacccaggttctcgagcggctcgccggcacctacgagggccgggaaaaggagttgggcgcagcattccgttcgttgaccaagaaactggtccgacagcggatcctcaccaaccatttccgtatcgacggccgcgggatcaccgacattcgcgcgttgtcggccgaagttgcggtggttccgcgggcgcacggtagcgcgctgttcgagcgcggcgaaacccagatccttggcgtgaccacgctcgacatggtcaagatggctcagcagatcgactcgctggggccagaaacatccaagcggtatatgcaccactacaacttcccgccgttctccactggtgagactggtcgagtcggctcgcccaagcggcgtgagatcgggcacggtgcgctggctgagcgggctctagtgccggtgctacccagcgtcgaggagttcccgtacgccatccgtcaggtgtccgaggcgctgggttctaacggctcgacctcgatggggtcggtttgcgcttccacgctggcgctgctcaacgccggcgtgccgctcaaggcgccggtggctggcattgctatggggctggtctccgacgatgttgagtttgacggagggactgagcgtcgttttgtcaccttgaccgacatcctgggcgccgaagacgccttcggcgacatggattttaaatgcgccggtaccaaggactttgtcaccgcgctgcagctcgataccaaacttgacggtattccctcccaggtgctcgcgggtgcgcttgcgcaggccaaagacgcccggctgaccatcctcgaggtcatggctgaggccattgacagacccgacgagatgagcccgtatgcgccgcgggtcatcactatcaaggttccagtggataagatcggtgaagtcatcggccccaagggcaaggtcatcaacgccattaccgaggagaccggtgcgcagatttctatcgaggatgacggtactgtgttcgtcggtgcgaccgatggcctgtcggcgcaggccgcgatcaataagattaatgccatcgcgaacccgcagctgccgacggtcggcgaacggttccttggaactgtcgtaaagataacggaattcggcgctttcgtgtcgctgctgcctgggcgtgacggtttggttcacatctccaagcttggcaagggtaagcgcatcgcaaaggtggaagacgtcgtgaacgtcggtgataagttgcgcgtcgagatcgcagatatcgaaaaacgcggcaagatctcattggtcttggtggctgacgacgattcggccaccgtccctgcagctccggccgatgctggggctgctcaggagttcggttcgggtactgcgccagccgatgctgcgacggccagtagctga

SEQ ID NO: 27584 - DNA, 1275 bp, Mycobacterium leprae
gtgtgtcgcaccacactgccaggcggtcttcgtgtggtcaccgaacacttacccgcggtgcgctcggcgtctgtcggggtctgggtgggtgtcggatcccgtgatgagggtgccaccgtggccggggcggcgcacttccttgagcatctgctgttcaaatcgacatcgacacgcacggccatggatattgcgcaggctatagacgctgtcggtggggagctgaacgcgttcaccgccaaggagcacacctgttactacgcacacgtgcttgacagcgacttggaactggccgtcgacctggtcgccgatgtcgtactcaatggtcgttgcgccgttgacgatgttgagttggaacgtgacgttgtgcttgaggagatcgcgatgcgtgacgatgatcccgaggatgcgctgggtgacatgttcttagcggcgttgttcggtgaccacccggtggggcgtccagtgatcggcactatggaatccgtgtcggcgatgacgcggacccaactgcactcctttcatgtgcggcgttacacaccggaacggatggtcgttgcggtggccggaaacgtcgaccacgatgagatggtcgcgttggtgcgtgagcattttgggtcgcgtttgattcgcgggcgccagtcagcaccgccgcgcaagagcactggaagaatcaacggcggccccgcattgacgctgggcaagcgggacgccgagcagacccacgtgttgttgggggtacgcactcctggccgcagttgggaacatcgttgggcactgtcggtgttgcacactgcactgggcggaggcctgagctctcgtctattccaagagattcgcgagacccgcggactggcctactcagtgtattccgcgctggacatcttcgccgatagtggtgcgctgtccgtgtatgctgcgtgtcttcctgggcgtttcgccgacgtaatgcaggtaatcagcgaggtgcttgcgtcggtggcgggtgatggcatcaccgaagcggagtgccgtattgccaagggctctttgcgcggagggatcatcctgggattggaggattccaattcttggatgagccggcttggtcgcagcgaattgaactacggcaagtaccgcggtatcgagcataccttgcagcaaatcgatgaggtcaccgtcgagcaggtcaacgcgcttgctcaccagctgttgaacaagcgctacggtgccgctgttctgggtccgtatgcgtcgaaaaaaactctgccacgacaacttcggataatggtaaattaa

SEQ ID NO: 27585 - DNA, 945 bp, Mycobacterium leprae
gtgactgttgcgcccgaagactgccgcttactgcgattagaagtgcgcaacgcacagaccccgatcgagcgcaagccgccatggatcaaaacccgggcccgcatgggaccagagtacaccgcgctaaaaaacctggtccgccgtgttgctctgcacacggtctgcgaagaggccggttgccccaacatcttcgaatgctgggaagatcgggaagccacctttctgatcggtggtgatcagtgcacccgccggtgcgacttctgccagatcgacaccgggaagccggctgcgttggaccgcgacgagccccgacgggtcgccgagagcgtgcaaaccatggggctgcggtataccaccgtcactggggtcgcccgcgacgacttgcccgacggcggtgcctggctgtacgccacaaccgtgcgagccattaaagagctcaatccgtcgaccggggtcgaactgttgattccggacttcaacgggcagcccgcgcgactggcggaagtcttcgactcacgcccacaagtgttggcgcacaacgtcgaaaccgtgccacgcatctttaaacggattcggcctgctttcacctaccaacgcagcctggacgtgctcactgcagcgcgcgaggccggcctggtcaccaaaagcaacctgatcctcggcctaggcgaaaccgctgatgaggtgcgcactgccctggccgatttgcgcaaaaccggctgcgacatcgtcaccatcacccaatatctgcgtccgtcgatgcgccaccacccggtcgagcgctgggtcaggcctgaggagttcgtcgagtacacgcaatacgccgaaggtttgggcttctcgggtgtgctgggcgggccgctggtgcggtcatcgtatcgcgccggtcggctctacgagcaggctgcaggcacccggaccgtcggtacctcggtatcccgttaa

SEQ ID NO: 27586 - DNA, 924 bp, Mycobacterium leprae
gtggctcaagctagtcgtaaggccgttgtcgcgatagcgggttcgtccggcatgatcggctctgctttggccgcggcgctgcgcgctaacgatcacctggtgttgcgcatcgtgcgccggacgccggctaacgccgaagaactgcactggaatcccgaaagcggtgagttcgataccgacgcaataaccgacgtcgatgctgtcgttaacctttgcggagtcaacctgggccagcgtcggtggtcaggctccttcaagcagaacctacgggacagccgcatcactccgaccgaagtgctgtctgccgcggtcgcggaagctggtgtcaaaaccttcatcaacgccagcgcggtgggctactatggaaacacgcgggatcgcgtggtcgatgaaaatgaccgagcaggaacaggtttcctggcccagctgtgccaggactgggagggtgccacgctgccggctcaatacgccggtacccgtgtgatactcgcccgaacaggcatggtgttggctcaagaggctggtgtactgagccggatgcggccgttgttttctttcgccttaggcgcccggataggcaacggccgtcagtacatgtcgtggataagcctcgaagatgaagtgcgggcgctgctattcgctatctcgcaccaatcgctctccggcccattaaatctgaccggccctgcacctgtcaccaatgcggagttcaccaccgcattcggtcgcgcaatcaaccgcccgactccgttgatgctgcccagtttcgcggtgcgggccgccctcggagagttcgccgacgaagggctgctcatcggtcagcgcgccatccctgccgcgctggagcgcgctggtttccagttccaccacaacaccatcggtgaggcgctcagttacgcgaccacccgaccgagccagaactag

SEQ ID NO: 27587 - DNA, 1593 bp, Mycobacterium leprae
atggcctgctccgtccagatgccggcactcggtgaaagcgtcaccgaggggacagttacccgctggctcaaacaggaaggcgacacggtcgaactcgacgagccactcgtcgaggtgtcgaccgataaggtcgacaccgaaatcccctcgcctgccgcgggtgtgctgaccaaaatcatcgcccaggaggacgacaccgttgaagtgggcggtgaacttgccgttatcggcgcgccttccgaagcggctgcagcggcgcctgcgccccggccagaacctaaggcccaacccgaacccgcagcatcatcccaacctgccgcaccggcccagcaaccttccggcgcagcaaccgcgacaccggttctgatgcccgagctcggcgagtctgtaaccgaaggcacggtgactcgctggcttaagaagatcggagactcggttcaggctgacgagccactggtagaggtatcgaccgacaaggtagataccgagatcccgtcaccggtggccggcgttttggtcagcatcaccaccaacgaagacacaaccgtcccggttggcggtgagttggcacggataggtgttactctcgacagcatcgccacccccgcgccagcgcccagagccgaatccgtaccgtcccggccgacgccagccaggaaagaagccaatggcgcaccgtacgtgaccccgctggtacgaaaactcgccaccgaaaacaacatcgacctggccaaagtgataggcaccggtgtgggcggtcgcatccgtaagcaggacgtgctggccgcggccgaacaacggaaacagcagcaggcaccgacatccgcgccatcagcagccgctcccaccccgacacccgtgctggcccacttgcgaggcaccacccaaaaggtcagccggattcggcaaatcaccgcgaaaaagacccgcgaatccctgcaggccacggcgcaactcacccagacccatgaggtcgatatggccaagattgtggggttgcgagccaaagccaaggcagctttcgccgagcgcgaaggggtgaacctgactttcctgccgtttatcgccaaggcagcgatcgacgccctcaaaattcatcccaatattaacgccagctacaacgaggacactaaggagatcacctattacgacgccgagcacctcggcttcgcaatcgacactgacaagggcctgctctcccctgttatccactatgccggtgatttgtcgctggccgggctggcccgcgcaattgttgatatcgccgcccgggctcggtcaggcaatttgaaacccgaggagctgtccggtggcacattcaccattaccaacatcggcagccagggcgcgttgttcgacacaccgatcctggttccgccgcaggcagcaatgctgggcatcggagccatcgtaaaacgcccgcgggtggtcatcgatgctagcggtaatgagtcgattggggtccgcgcgatttgctatctgccgctgacctatgaccaccgactgatcgacggcgccgatgccggacgtttcctcactaccatcaagcaccggctcgaagagggagcattcgaggccgacctaggtctttag

SEQ ID NO: 27588 - DNA, 1575 bp, Mycobacterium leprae
ttgcccgtgaccaccgatccgggctaccaaggcccttcagtccatgttgccgcgtcgctgccaaaacacgatgtcagttcttcggtattgatcgtgcccgtcgtctcagccagcgacagcgacgagtccgaagaccggccgggcgcggtcgttgctgcggccgaacctttcctaaccgcagctgcggtcgccgaaatcgaggccggcctgcgcgcactggaagccacaggtggcagtgatcaggtacaccggttagtagcaccgtcgctaccggtaggcagcgtgttaacggtcagcttgggtaagccgcggtcagagtggcccgccgatacgatccgtcgcgccgctggtgtggcggcgcgttcactcggcagagcggaagtggttatcaccacactggccgagttgcctggggaatccggtgccagtatctgctcagccgtcgttgaggggctgatgctaggcagctaccggttcaccgacttccgcagccgcaaaaccgcacctaaggacaacggactgcgcaaaatcacggtgctagctaatgcaaaagacgctaagaaacagagcgcgcacggcgccactgtggcaagcgcggttgccaccgcccgtgacctggttaacactcccccaagccacttgtttcccgccgaatttgcaaaatgcgcaaagactttgggcgaatccgctggtcttgaagtggaggtgctcgacgataaggcgttacagaaagccggctacggcggggtgatcggtgtcggtcaaggttcatcgcgtacgccgcggctggtgcggctgattcatcagggatcaagactggctaagaaccccaaaaatgccaggaaggtggccctggtcggtaaaggcatcacctttgacaccggcggcatatcgatcaagccagcggcgtcgatgcaccatatgacctcggatatggctggagccgccgcggtcatcgcgaccatcacgctggccgcacaattgaagctgccgattgacgtagtcgctaccgtaccaatggctgagaacatgccgtcgggaacggcgcagcggccaggcgacgtgctgacgcaatacggcggaatcacagtcgaggtgctcaacaccgacgctgaaggccggcttatcctggccgacgccattgttcgggcatgccaagacaacccggactacctgatcgagacatccaccctgaccggtgcgcagacagtggcgctgggctcccgcatacccggggtgatgggcagcgacaagttccgcgaccgggttgccaagacctcgcagcaggtcggcgagaacggctggccgatgccgctgcccgacgaactcaaggatgacttgaaatcgacagtcgccgacctggccaatgttagcgggcaacgtttcgccggaatgctggtggctggcgcgttcctccgcgaattcgtcgccgacggagtggattgggcgcacatagatatagccggcccggcatacaacaccgacagcccgtgggggtatacccccaaaggcgccaccggtgtgccaacccggaccatgttcgcaatgctcgaggatatcgccaaccacggataa

SEQ ID NO: 27589 - DNA, 1104 bp, Mycobacterium leprae
gtgaccgatgcgccagagcttctcaaggggccgttggaagaccgtcatcgcgagcttggcgcgaattttgccgagttcggtggctggctgatgccggtgtcgtatgctggcaccgtcagtgaacacagcgccacccgtaatgctgtgggtctatttgacgtcagccaccttggtaaggcgttagttcgtgggccgggtgccgcgcagttcgtcaactccgtgctcaccaacgacctgggccgcatacggccaggtaaggcgcaatatacgttgtgctgctcagagtctggtggtgttatcgatgacctgattgcctactacgtcgatgacgatgagatctttttggtgtccaatgccgccaataccgccgcggtggtcgacgcattgcaggcggtagtgccggccggccttaccatcatcaaccagcatcgctcccacgcggtgttggcggtccagggtcctcgatcaacggacgtgctcggcgagctcgggctgccaactgggattgattacatgggttacgtcgatgcttcctatgcgggagtaccggtgcgcgtctgccgcaccgggtacaccggcgagcaaggctacgaactgctgccgccctgggagtcagcagatgtggtgttcgacgcgttggtcgccgctgtggttgacgcacgcggggagccggccggcctgggcgctcgtgacacactgcgcaccgagatgggttacccgctgtatgggcacgaactttcgcttgacatctcgccgctgcaggcccggtgtggctgggcgattggctggaagaaggatgcgttcttgggccgggatgcgttgctggccgagaaggcggcggggccgcgacggctgttgcggggcctgcgaatggctggccggggagttttgcgacctgggctgacggtgtgtgctggcgacatcccgatcggggtcaccacgtcggggacgttctcgccgacgttgcaagttggtgtcgcgttggcgttgatcgacagcgaagccgcggtgcaggacggtcagcaaattatcgtcgacgttcgtggccgtgctgtcgagtgcgaagtggtgcgtccgcccttcatcgaagtgaagacccgctag

SEQ ID NO: 27590 - DNA, 1107 bp, Mycobacterium leprae
atgaccagcggcttcctcgagttcacggtgtcactctcggcccatccggtgactgatgcggaacgtgaatcgatcctggctgagccgggcttcggtaagtaccacactgaccacatggtgtcgatcgattacattgatggccgaggttggcacgatgcgcgggtcattccctacggcccgattcagctggatccgtccgcgatagtgctgcactacgcgcaggaagtttttgagggactcaaggcttaccgctgggcggacgggtcgatcgtgtcttttcgccctgatgctaacgcggccaggttgcgttcgtcggcgcggagaatcgcgattcccgagctgcccgacgagttattcattgactctctgtgtcagctcatcgctgtcgacaatgcttgggtgccccgggtcggcggtgaagaggcgctttatctgcggcccttcatcttcgcgaccgagccggggctgggggtacggccagccaagcagtatcggtacctgttgatcgcctcgccggtcggggcgtatttcaaaggcggcatcaaccctgtcacggtctgggtgtcgatggagtacgtgcgagctagcccgggcggcaccggtgcggccaaatttggcggcaactacgctgcgtcgctgctggctcagaccgaagccgcagccaacgggtgcgaccaggtggtgtggctagacgccgtcgagcgccgcttcgtcgaagaaatgggcgggatgaacatcttctttgtgctcggcagcggcgggtcggcacgcctggtcaccccggagctgtctggctcactgctgcccggggtcacacgcgcttcgttgctgcagttggctattgatgccggattcagtgtcgaagaacgtaagatcgatatcgacgagtggcagaagaaagctgctgctggcgagatcaccgaggtgtttgcctgcggcactgccgccttcattaccccggtctcgcgggtgaaatacggtgataccgagtttaccatcgccggtggcgcaccaggtgaggtgactatggcgttgcgcgacacgctaactggaatccagcgcggtacttttgccgacacccacggctggatggcccggctgggatag

SEQ ID NO: 27591 - DNA, 975 bp, Mycobacterium leprae
gtgacgatcgctgtaaccggttcgattgcgactgaccatctgatgcggtttccgggcagattctctgagcaactgctcgtcgacaatctgcacaaggtctcgctcagctttctggtcgacgacctggtaattcatcgtggcggtgtggctggaaacatggcctacgcgatcggcgtgcttggcggtgacgtcgcactgatcggtgcagtcggcgacgacttcgccgactatcgcgattggctgcaaaatcacggagtcaactgcgatagcgtgctgatctccaagaccgcgcacacggcgcgtttcgtctgcaccaccgacctggacatggcccagatcggatcgttctataccggcgccatgtcggaggcccgcaacatcaagcttgtcgacgcgatagcgaccatcggcacgccggagttggtgatcatcggggccaacgacccggccgccatgctggggtacactcaggagtgtcgcaaactcgggctagccttcgccgctgacccatcccagcagttggcacggctatctggcgaggaaatccgcaacctcatcgacggcgccacctacttgttcactaacgattacgaatgggacctgctgctgtccaaaactggctggtctgaggccgacgtgatggcgcagattcaactgcgggtgaccacgctgggcgccaagggggtggacctggtagaacccgacggcacccgtgtgcacgtcagtgtggtgcctgaggcaggccaagttgatcccaccggcgttggtgacgcgttcagggccggtttcctaactggacgcagcgccggtctgagtctggagcgttcggcgcagctgggctcgttggtcgcggtgttggtgctggaatcaaccggaacccagcagtggggttgggatcgcgacgttgctgtggctcggctagctggcgcttatggggaggaagctgccgctgaaatcaccgttgtgctttcctag

SEQ ID NO: 27592 - DNA, 2034 bp, Mycobacterium leprae
atggatgatcggcgcctacgaacattgccgaatgaggcatactggattgccgtgtgtggactgctggcgtttgtagtggcttcggcgcgcgctgatagccgcggctctggtgggaccaacaacattcttcaggccgatcattccatggcccgcgcggtacatttgatgcgtcaccgcgggcctgacgagctaagcacctggtccgacccggacattgatgggttctcgggaggggttgcgtttgggtttaaccggttgtccatcatcgacattgcgcattcgcatcagccgctgcggtggggaccaccggagacacccaaccgctacatcctggtattcaacggcgagatctacaactacctggagctgcgcgacgagctggtcatccggcacggcgctgctttcgccaccgacggagacggtgaatctatcgtcgccggcttccattactggggcaccgagatactaacacggctgcgtggcatgttcgccttcgcgctgtgggacaccatcgcccacgaattgttctgtgcccgagaccctttcgggatcaaaccactgttcatggcgaccggaaccaacggcaccgcggtggccagcgaaaagaaatgcctgcttgaactggccgaagtgatcagattcgacacgcagattgacacccgcgcactacagcactacacggtcctgcagtacgtgcccgagcccgagacgctgcatcgcggggtgcaccgactcgaatctggctgttacgcacgtatccgtcccgaacagctcgatccagcgaccacccgctacttcgtgccgcaatttgccgccacaccgatcaccagcagcactgaacagacccgctacggcgaaatcaccgcagtgcttgcggactcagtggccaagcacatgcgcgccgacgtcaccgttggctcgtttctgtccggcggtatcgactccacagccatcgcagcactggcgatccgacacaatccgcggctgattacatttaccaccggcttcgagcatgagggattctccgagatcgacgtggcggctgcttcggctgaagcaatcggtgcgcgccacatcgtgaaggtggttacccccaacgagttcgtcgccgccctgccggagatcgtctggtatctcgacgagccaattgccgacccggccctggttccgctgtttttcgtcgcccgcgaagctcgcaagcacgtcaaggtggtgttgtccggcgagggcgccgacgagctgttcggcggctacagaatctatcgagagccgctgtcgttgaagcccttcgactacctacccgggccactgcgacgctcgatgggcaaggtgtccaaatctctgcccgaaggtatgcgcggcaagaatctgctacaccgcggatcactcacgctcgaggaacgctactacggcaatgcccgcaatttctcggaagcgcagttgcaggctgtgctacccaggttccacacgggctggacccacaccgacgtcacggcagcggtgtacgccgaatccgtcggctgggacccggtagcccgcatgcagcacatcgatctgttcacctggctacgtggcgacattttggccaaggccgacaagatgacaatggccaattcgctggagctgcgggtaccgttccttgatcccgaagtgttcgccgtggcgtcccggttacccatgcaggcaaagatcacccgcaccaccacgaaatacgcactgcggcgcgcactggaatccatcgtcccggcacacgtgttgcatcgccccaaactcgggttcccggtcccaatccggcattggctgcgcgccggcgaactgctggaatgggcgtacgcgctggtgaactcgtcgcaggccgaacatctggtcaacctagccgccgtgcaccggatgcttgacgagcaccgaggtggcatcagcgatcatagtcgccggctgtggacggtgctaatttttatgctgtggcacgccatcttcatcgaacacagtgtggtgccacagatcagcgagccacagtatccggtacagccgtaa

SEQ ID NO: 27593 - DNA, 1062 bp, Mycobacterium leprae
gtgacagctcgcgagttagtctgttcgcaacgtgtcggtcagggtctctctcgtcgtcttcggccgctggtgctggccgtgacactgggtgtgctggtggtcaccctgagcggatgcagctggtcggacgcgttggccattggctggccggaaggcatcaccccggaggcccacctcaaccgacagctgtggatcggtgcggtggtcgcctccctggtcgtcggtgtcattgtgtggggtctcattttctggtcgaccatcttccaccggaagaaaacaaccgacaccgagttgccgcgtcaattcggctacaacatgccgctggagttggtgctgaccgtgacgccattcctcatcatttctatgctgttctatttcactgtgatagtgcaggataagatgctgtacctcgccaaggatcccgaagttgtcattgatgttacggcctttcagtggaactggaagttcggctatcagcgggtcgatttcaaagacggcaccttgacctacgacggggtcgatccggcccgcaaaaaggccatggtctccaagccagagggcaaggactcccatggtgaggagctcgtcggggcggtgcgtgggctcaataccgaggaccgggcctacctgaacttcgacaaggttgaaactttgggcactactactgaaattccggtgcttgtgctgcccgctggcaagcgcatcgagttccaattgaactccgccgacgtggttcactcgttttgggtgccgaaatttttgttcaagcgcgacgtcatgcccaacccggtggcgaacaactccgtgaacgtcttccaggtcgaagagataacaaagaccggggcattcgtcggccactgcgctgagatgtgcggtacatatcactcgatgatgaacttcgaagttcgagttgtcgctcctaacgacttcaaggcctatttgcaacaacggatcgacggaaaaaccaacgctgaagcattgcaggtgatcgctcagcctccgctggcggtgactacccacccgtttgatacccgtcgcggacagttgaccaacagccagtag

SEQ ID NO: 27594 - DNA, 1101 bp, Mycobacterium leprae
gtggttttgtcatcgcaaccaccttcttctcgcagcgccaccggatcggtgttgtcgtggccgcaggtcttggggcgtttgacagcagggcaggatctcacgcggggccaggctgcttgggcgatgggccaggtcatgactgggaacgcacggccagcccagatcgccgcgttcgcggtggcgatgaagatgaaggtccccaccgcggccgaagtcagtgagcttgctgacgtcatgctcagccacgcgcgtaagctgccgacagaggcgatctgccaagatatcggagaaaccgtagacattgccggaaccgggggagatggtgccaacacagtcaacctgtccactatggctgcgatcgtggttgcggccgcaggtgtaccggtggtcaaacatggtaaccgggcctcgtcttcactgtcaggcggcgctgacactctggaagcattgggggtccgtatcgaccttggaccagagcaagtcgcgaatagcctagccgaaatcgggatcgggttctgcttcgcgccgctgttccaaccgtcgtaccggtacgcgtccgcggtgcgccatgagatcggggtgccgaccgtgttcaacatcctcgggccgctgaccaatccggcctggccgcgggctggattgatcggctgtgcgtttggcaatcttgccgaggttatggcgggggtgttcgctgcgcgacgctccagtgtgctggtagtgcatggcgatgatggactcgacgaattgaccaccactactaccagtacgatctggcgtgttcaggcgggcacagtggataagctgacttttgatcctgtcgaattcgggtttgcgcgtgctcaccttgacgatctgttgggaggggatgcgcaaactaatgcggcgaaggtgcgtgcggtactggccggggccaagggcccagtccgcgacgccgttgtgctcaacgccgccggtgcgatcgtcgcctacgctgggttatccagccacgctgaatggtcgcccgcgtgggacgatgggttggcgcgcgccagcgctgccatcgattcgggtgccgccgaacagctcctcgcgcggtgggtgaggtttagtcagcaggtctga

SEQ ID NO: 27595 - DNA, 1155 bp, Mycobacterium leprae
gtgagccgggtcctgctggtaaccaatgattttccgccccgccgtggtggcatccaatcctatctgggggagtttgtagatcgtctgatcaacatcgggtcgcatgacgtgatggtgtacgcaccgcaatggaccggtgccgatacctttgacaacgctgcccatgatggcggctatcaggtagtgcgccatccaggcacgttgatgctgcccggcccggcggtcgatgcccggatgcgccggctgattgttgaccatggtatcgacactgtgtggttcggctcggcagcgccgctggctctgctggcgccgtgtgcccgaaaggcgggagcgacccgggtgttggctagcacacacggccacgaagtgggctggtcgatgctgccggttgcacgctcggtgttgcgtcgcatcggtgacgttaccgacgttgtgacctttgtcagccgttacacgcgatcgcgtgtaacggctgccttcggacccagggctgcgttggaatacctcccgccaggtgtggacgccgatcgattccggcccgatccggcgagccgagccgagctacgtaaccgttaccggttgggtgagaggccaaccgttgtgtgcctggcgcggttggtgccgcgtaaaggccaggacatgttgatcagggcattaccatcgatccggcagcgggccgacggggccgcgttgatgattgttgggggcggcccgtatcttggaacgctgcgtaagttggcccaggggtgtggggttgccgaccacgtgatattcgccggaggcgtggcggctgtcgaggtacccgctcactacacgctggctgatgtatttgcaatgccatgccgcacccgcggcggaggcatggacgtcgagggtttgggcatcgtgttcctggaggcctcggctaccggcgtgccggtaatcgctggaaaatccggcggagctccggaagctgtgcagcacaacaagactggactagtagttgacggccggtcggtgaatatggtggctgacgcagtcaccgagttactgaccgatcgtgaccgggccgctgctatgggcgcagccggacggcactgggtaaccgccgagtggcgttgggacacgctggcagctcggttggcggatctgctgtgtggcaacgacagccgctag

SEQ ID NO: 27596 - DNA, 432 bp, Mycobacterium leprae
gtgtttctcggcacccacacgcccaaactcgacgacaaggggcggcttactttgcccgctaaattccgcgatgcgttggtaggggggttgatggtaaccaagagccaagaccacagcttggctgtctacccccgggcggaattcgaacagctagcgcgccgcgctagcaagatgtcgcgaagtaaccccgaagccagggcgttcttgcgcaatctcgctgctgggaccgacgaacaacatcccgacatgcaaggccggatcacgttgtcagccgaccaccgtcgctatgccaacctttctaaggattgcgtggtgattggagccgtcgactaccttgaaatctgggacgcacaggcttggcatgactaccaacagacccacgaagagaacttttccgcggccagcgatgaagcacttggcgacatcatctaa

SEQ ID NO: 27597 - DNA, 1119 bp, Mycobacterium leprae
gtgccttcggacagagaccacgatgcggggatatttgcgttcttcggggcggttccgaggagcgacaggtgccgccagacccggggaggtggcgaggtggttgacggctcaagtgttttcgggcatgtgcccgtctttgcgcaacggtgtgtcactctgcttgcccccgcgttgacccgccatcacgctgacgggtccaatgcgatcctggtggatgccactctcggtgttggtgggcacgcagagcgattcctgaccgaatttccgggtttgcggctgattggacttgaccgcgacccgagcgccctggatatcgcccggactcggctaatgcgatttgccgaccgggtcacgttaatccacacgcgttatgacaacctcgctgtagcactgaacaaatttggttatgccgcagtggaatcggtcgatggtgtgctgttcgatctgggtgtttcgtccatgcagctggactgtgccgagcggggtttttcctacgctcaagacgtgccgttggacatgcggatggacccgtggtcaccggttagcgcggccgacatcgtcaataattacgacgaggccgcattagccgatatccttcgccggtatggtgaggagcgattcgcgcgccgcatcgctgcgcacatcgtccgccggcgtgcccacaccccgtttacttcgaccgccgagctggtagctctgttgtaccaggcgattccagcaccggcccggcgcatcggaggccatccggccaagcgcacgtttcaggcgttgcggatcgcggtcaacgacgagttgaactcgctgagtaacgtccttcccgctgcgctggatgcgctcactgtggccgggcgcctcgtggtgctagcctatcagtcgctcgaagaccggattgtcaaacgcgtgtttgccgacgcggtctcctcccgcacaccggcgggcctcccgatcgaacttccgggccatggaccgcgattccggttgttgacgcgtggcgctgaacacgcagatgccgccgagatcgaatgtaatccccgcagtgccgccgtgcgattacgggctctgcaacgaacccagcatggagtggaaccgcagcagccaaccaggaggggcgactcatga

SEQ ID NO: 27598 - DNA, 2028 bp, Mycobacterium leprae
gtgagacgcggcgacgctcaccgcccatgctcgtcgcggtcggcacagttggggaacagctccagcacaccgcccgttcggcaacccaagcggcttcgccaaccagagaaagctaggaaagccaaggacaccaaaaaatctcgctcagcagtcgcggcggatgcagtgacggagggtcgttcagctcggaagcggcgcacccggcaggtggtcgaaataggaacttacggtccatcttttatcttccggcatcggggtggcaacgtggttatcttcgcgttgatgctggtggcggcgacgcagctgttcaacctacaggtttcaaatgccgcgggtctgcgtgctcaggcggccggacagctcagggtaactgacgtcgaaaaggcggttcgcggcagcataaccgaccgcaacaacgagcaacttgccttcactatcgaatcgcgcgcgttgacgtttcagccgaagaaaattcgccagcagctggaggaagccaaacagaaaacgccatccgctcctgacccgcagcagcgcctacaagatatcgccaaggaggtcgcgggtcggttgagcaacaagcccgacggtccgtcgttgctgaagaagctgcaaagcaacgacagtttcgtctatttggcgcgcgccgtcgatcctgccgtcgccgaggcgatctccgccaaatatcccgaagttggttctgaacggcaggacctgcgccagtatccgggcggatcactagcggccaacatcgtcggcggcatcgactgggacgggcatggattgctgggtcttgaggactccctggactccgtgttgtccggaaccgacggttcggtcacctacgaccgcgggtccgacggtgtggtaatcccgggcagctaccgcaatcggcaccgggcggttaacggctcgaccgtccagctcaccatcgacgacgacatccagttctacgtgcagcagcaggtgcagcaggcaaagaacttgtccggtgcccataatgtttcggccgtcgtcctggatgccaagactggcgaagtacttgccatggccaacgacaacaccttcgacccgtcgcaagacattgggcgccaaggtggtaagcagctgggtaacttggcagtttcctcgccatttgagccgggctcggtgaataaggtcatcaccgcatccgcggtcattgaatatgggctgtccactcccgatgaggtgctgcaggttcctggctcgatccagatgggtggtgtgtccgtccatgatgcgtgggagcacggtgtgatgccctataccaccactggagtgtttggaaagtcttccaacgtcggtacgttgatgctggcccagcgtgtcggtccggaacgcttttacgacatggtccgcaagttcgggttaggtcaactcaccggcgtggggctgcccggtgaaagcgaggggttggtaccgtccgtcgaccaatggtcgggcagcactttttcgaatttgcctatagggcaaggtctttcgacgactctactgcagatgaccggaatgtatcaagtcattgccaatgacggggtgcggataccgccgcggatcattaaggctactaacgcagctgacggtacgcggacgcaagaaccgcggccggacggcattcgggtggtgtcgccgcagactgcccagaccgtgcggcagatgctgcgcgctgtggtgcaaaaagatccgatgggttaccagcagggtactggtcccgcggccggggtgtccggctatcagatagccggcaagacaggtactgcgcagcaagttaatcccgcctgcagatgctacttcgacgatgtctactggattacctttgctggaatggctaccgtcgacaatccccgctacgtcatcggcaccatgatggacaaccctgagcgcaacgcggacggtacgcccggtcacagtgcggccccacttttccataacgtcgcgggctggctgatgcagcgtgagaacgtgccgctgtcaccggatccgggaccaccgttgacgctgcaggccacctag

SEQ ID NO: 27599 - DNA, 1593 bp, Mycobacterium leprae
gtgactgaggtggtggcggtgccggttaggttgcgccccagcgccactgcgggggtgcggctccctgagcttgtggctcaggttggtgctgtgctggccgacggccccgggcaggcggcgactgtcccagacattccggtgaccggtgtgacgctgcgggcccaggaggtgctgtccggtgatctgttcgctgcattggctggtgcatccacacacggcgctcggtatgccggcgttgcgctcgaacgaggtgctgtcgcggtgcttaccgacgttgcaggggtcgccgagctgacagcccaggccagcagcgtgccgatactcatacatccggaaccccgcagcgtgctcggcggtcttgccgccgcggcatatggacatccctccaaccggatgacggttgttgggattactggaacatcgggtaagacgactaccacctatatggttgaggctggtttacgggctggtgggcgagtggtcgggctagtcggcaccatcggcattcggatcgacggtgccgacatccctagctttctgaccacgccggaggctcctgcgctgcaggcgatgctcgcggcgatggtcgagcgcggtgtggaaaccgtggttatggaggtgtctagtcacgcgttgagtctgggtcgggtggaaggcacccagttcgcagtggccggtttcaccaatttgtctcgcgaccacctcgattttcaccccgacatggaggagtatttcgaagccaaggcggtgctgttcgatccgcactcgttgctgcgggctcgcaccgtcgtggtatgcatcgacgatgacgctgggcgcgcgacggccgcccgggccggtgacgccatcacagtcagcgccctaggtcaacccgcatcgtggcgcgcgacggacattaggtcaccgggtgtcggagcccaggagttcaccgccgtagaccccgccggtgtccagcaccgggtcggcattcggttacccggccgctacaacgtcgctaattgtcttgtcgccctggcgattctagacgttgttggggtgtctccggagcaggcttccttggggttccgggacatccgaatccccggacgactggaacggatcgactgcggccaagattttcttgcactggtcgactatgcgcacaagccaggagcgttacactcagtgttgaccgccctactgcagccggaccatcggctggcagtggtgttcggtgcggggggcgagcgtgacccgggcaagcgggctccgatgggcgagattgccgctgagctagccgatttggtcgtcgtgaccgatgacaacccgcgtggcgaggatccggcggcaattcgtcgtgacattctgaccggcactgtcgcggctggcggtgcggcgcaggtcgtcgagattggtgaccggcgggctgctatccaatacgcggttgcttgggcgggtcctgatgacgtggtgttggtggcgggcaaaggtcatgaaaccgggcagcggggcgctgccgagacctgccccttcgacgaccgggtggagctggctcgggcgctgcaggtccgtgacgcccgactgcttcctgcgcctgggcgagcgtgccaatga

SEQ ID NO: 27600 - DNA, 1554 bp, Mycobacterium leprae
atgatcgacctgacggttgcccgggttaccgagatcgtcggtggcgcgttggtcgatatctctcccgaggaggccgccgagcgtcgcgtcaccggcagcgtggaatttgattcgcgggctgttggccccggcggtctattcctggccttgccgggggcccgctcggacggacatgaccatgctgcttcggcgatagcggccggtgcggtggctgtgttggctgcccggccggtcggcgttcccgccatcgtagttgctcctgaccctcgcacgggtgacggcgggctgactggggtgcttgagcacgatgcagacggatcgggcgcggcggtgctggccgccttggctaagttggccaaggcggtggccgcggagctggtagctggcgggctgactatcattgggattaccggatcgtcggggaagacatccaccaaagatttggtggccgtcgtgctggagttgctcggtgaggtggtggcgccacccgagtcgttcaacaatgaactgggtcatccctggacagtgttgcgtgcaacccgtagcacggactatttgattctggagatgtcggcacgccgtcccggtaatattgccgcgttggcggcgatcgccccaccaaagataggggttgtcctcaacgtcggcactgcgcacctaggtgagtttggctcccgggaagccatcgcgcgaactaaaaccgagcttccgcaagctattatgcagtccggtgtggtcatactcaacgtcgatgacccggcggtggcggcgatggctgacgcgaccgtggcccgcgtgattcgggttagtcgcggtagttatagccatccggggtcaccaaacagcccagacgtttggactggtccggtgtcgctcgacgaacttgctaggccgcgcttcacgctgcatactcgagatccacgcgccggcgccaccgaaatccaactcggcgtgtacggcgatcatcaggtcgccaacgccttgtgcgcggctgcggtcggactggaatgcggtgctagcgtcgaggaagtggcggtcgcgcttgccgcgacagggccggtgtcgcggcatcggatgcaggtgaccacgcgcgctgacggggtgacggtgatcgacgacacctacaacgccaaccccgactcgatgcgggccgggctacaggctttggcctggatcgcgcatggtgggacccatgataagaaccagccaggttcttgtgctcgacgaagctgggcggtgttgggtgagatggccgagcttggagaggactcgataaccgaacacgatcgcatcggccggctagcggtgcgcttagatgtgtctcgactcgttgtcgtgggagggggaaggtcgataaacgccatgcaccgcggagcggttatggaaggttcttggggtttagagacggttaatgtggccgaccccgctgctgccctgacattgttgcgggctgaagtacgacccggcgacgtggtcctgatcaaggcgtcgcattcggtcggcctaggagcgctggctgatgtactggtgggcgacggggccatccgcccatga

SEQ ID NO: 27601 - DNA, 1080 bp, Mycobacterium leprae
atgagacagatccttgtcgctgtcacagtcgcgctggttgtgtctatcctgttgaccccagcgctgatccggttgttcaccagacacggcttcggccaggaaatccgtgaagacggcccacccagccaccacaacaaacggggaaccccatctatgggtggtgttgccattgtcgccggcatttgggccggctacctgggcactcatctggcaggcttggcgttcgatggtgaaggcgtatcggcgtcgggtgtgctggtgttgggtctggctactgcgctgggcggcgtcggattcctcgatgacttgatcaagatccgcaggtcgcgcaacctcgggttgaacaagacagccaagaccgtcgggcagataacagccgcggtgctgttcggggtgctggtgttgcagttccgcaatggcgccggcttgacaccggccagcgcggatctgtcctacgtgcgtgagattgcgaccgtcaccttggcgccggcgttattcgtgctgttctgcatggtcatcgtcagtgcctggtcaaatgcggtcaacttcaccgacggcttagacgggctggccgctggcagtatggcgatggtcaccgccgcctatgttttgatcaccttttggcaatatcgcaatgcgtgcgtgacggcgccgggactgggttgctataatgtgcgcgatccgctggacctgacgttgattgcagctgcgacggtgggcgcgtgtattggctttttgtggtggaatgccgcaccggccaagattttcatgggagataccgggtccctagcgttgggtggcgtgatcgctggcttgtcggtcaccagtcgcactgagattcttgcggtcgtgctgggttcgctgttcgttgccgaaatcacctcggttgtattgcagattctggctttccggaccactggtcgtcgggtgtttcggatggcgccgttccaccatcatttcgaattggccggttgggccgaaaccactgtgatcattcgtttttggctgctcacagcgatcgcttgcggtctgggcgtggtcctgttctatggcgagtggctagccaccattggcgcttga

SEQ ID NO: 27602 - DNA, 1473 bp, Mycobacterium leprae
gtgcttgacacactggtaccgggcgcgcctgtattagtagctggtggcggggtgaccgggcgggcggtactggcggcgctgacccgttttggcatggcggcaacgctgtgtgacgacgacccagccgccctgcagcaatacgccgacaacggggtggctaccgtgagtgcagctaccgccacacaacagatgttcgagcggggaagaaaatacgtcctggtggtcaccagtccaggtttcgcgccgaccacccccgtgctcgtcgccgcgtcggcggcgcgggtgcctatttggggcgatgtggagttagcttggcgactcgatgccgcgggctactacgggccgccacgtcgctggcttgtggtgacgggtacgaacggtaaaacgacgacgacgtcaatgctgcacgcgatgttggcggcagataaccggcgtagcctgctgtgtggaaacatcggccgcccggtgctggatgtcttaactgagttcgccgaaccctcggattttcttgctgtcgagctgtccagttttcagctgcactgggctccttcgctacggccggaggccggcgtggtgctcaacattgccgaagaccacctcgactggcattcgacaatggccgattacaccatggcgaaggctcgggtgctgaccggccgggtggcggtggttgggctggacgacagccgggccgcggcactgctgagcacgacagtagcgccggtacgggtcggcttccggttcggagaaccagctgtgggcgagctcggggtgcgtgacggttatctcgttgatcgtgcgtttgctgaagacctggccttaatgccggttacgtcgataccggtgtcgggcccggtcggagttctcgacgcgttggccgctgcggcactggcccgcagtgtcggtgtgggggcgaccgcgatcgccgacgcggtcgcattgtttcggctgggccgacaccgggcggaggtggtagccgttgctgacgggatccgctacgttgatgattccaaggccaccaacccgcacgcagctcttgtctcggtattagcctacccgcgtgtggtgtgggtggccggtggcctactcaagggtgcgtctgtcgatgcggaggttgcgcgcatggcgcctcagttggtcggcgcggtgctgatcggccgagatcgcgcgatggttgccgaggcgttatcacgacacgcgcccaatgtccccgttgtccaggttgtggcaggcgaggatgctggtatgcatgcggttgccgttgtttctggtactgatgtgataagcatcagtgatgttggcgggactatcggtactcgcgtgatggttgcggccgtggcggcggcccgggatttagcccaacctggtgacaccgtactgctggcaccggccggcgcgtcgttcgaccaatttagcggttatgccgaccgcggtgacacattcgcaactgccgtgcgcgcagcgatccggtag

SEQ ID NO: 27603 - DNA, 1605 bp, Mycobacterium leprae
gtgggtaacgcgctgggtcgggataggggtcggggcacgggagataacaacagtgtgcaggccgccacgaccgtggaggcggttgagcccggcactgctacgaccggcgaagtgtccgaagcggaggccaaaagagccggctctctgagggccggagtacgcggccctcagactcggttcgatgcctggctgggccggccgatggcctcctttcatctgataattgctgtggctggattgctgacggcattaggtctgataatggtgttgtcggcctcaggtgtgcggtcctacggcgacgacggatcggcttggatcattttcggcaaacaggttttgtggacgatcatcggtctcatcggtggttattcctcattgtggatgtcgatacggttcatccggcgcattgcattctttagttatgtcatcaccatcattttgctggtgctggtgctcatcccgggaattggcaatctcgccaacgggtcgcgtaaatggtttgtgatcgccggcttttcgatgcagccttccgagctggccaagattgctttcgtcatttggggtgcgcatctgctggctgctcgccggatggaacgagcgtcgctgcgcgagatgcttattccgttggtgccggccgcggtcatcgcgctgggactgatcgtggctcagcctgatctcgggcagacggtgtcgctgggcatcatccttttggccctgctctggtacgctgggctgccgctgcgcgttttcatcacatcgttgctcgcggtctttattgcgggagcgatcctggcgatgtccgcgggttatcggtcagaacgggtgcggtcctggatgaatcccgaggccgatcctcaagacaccggctaccaggctcggcaagcaaaattcgcgctggcccacggaggcattttcggcgacggtcttggccagggtgttgccaagtggaactatctgcccaacgctcacaacgatttcattttcgcgatcatcggcgaggaactcggcttggttggtgcgttgggactgttgggacttttcgggctgttcgcctacactggaatgcggatcgcgcggcggtcggccgatcctttcctgcggctgctgaccgccaccacgactatgtgggtgctgggccaggcgtttatcaacatcggctatgtgatcggggtgttgccggtgactggtttgcagctgcctttcatctctgccggtggaacatcggcggcagcaatacttttcatgatcggcatcatggccaacgcggctcgccacgagccagaggcggtggcggcgctgcgggccgggcgtgatgacaaggtgaaccagctgctacggctgccgctgccggtgccgtatctgccaccccgggtggagacgttccgcgaccgcaaacaggttcgcccgcaacccggcaaggcgtcggttggccgcaagcccgcccgcaaagccccccgggagcctgaccggccgctgcggccggcattcccccgagtggctgatcgactggagcaccgatcagggcagtatagagctggtcagctgcgtgccggtcaacgttatacaccgcgcgttcgtgtattcgaaggtcagcgttacgggtga

SEQ ID NO: 27604 - DNA, 1224 bp, Mycobacterium leprae
gtgaacaactcggttagggagccgacccgcgggcgaaggggcagcccgccggtcgccgatgccgcattatcggttaatccccccttgtcggttgtgctggcgggcggcggtaccgccggccatgtggagcccgcaatggccgttgccgatgcactcagagcgctggatccacaggtccggatcaccgcgttgggcacttcgcgtgggctggagaccaggctagtacccgagcgtggctaccacctcgagttgatcacaccggtgccattgccgcgtaagcttaccggcgacctggcccggctcccattacgagtgtggcgtgccgtccgagagacccgcgcggtgttcgaagtcgtcgaggcccatgtggtggtgggtttcggtgggtacgtggcactgccagcgtacctcgccgcacgtggtatccccagggtgcggcgtcgtatcccggtggtggttcacgaggccaacgcccgggccggcatcgccaatcgtgtcggtgtgcgtactgccgaacgggtgctttcggcagtacccggttccggattacgtggtgccgaggtggtgggagtgccgatccacgcgaccattactacgctgaaccgcccggcattgcgagctgacgcccgcaagcattttggcttcaccgacgacgcgcgggtgttgttggttttcggtggttctcagggtgcagtttcgctgaatcgggcggttgccggtgctgccgaggacctggccgcctcgggagtggccgtgctgcatgcctacggactcaagaacaccctcgagctgcgcacacccgagtacggtgagccgccgtacgtcgcggtgccctaccttgaccgaatggacttagcgtacgccgccgctgacctggtgatttgtcggtccggagcaatgacggtcgccgaagtgtcggccgtcggcttgccagccatctatgtaccgttcccaattggcaacggtgagcaacggctcaatgcactgccggtggttaacgccggcggcggcctggtggtcgccgacgctgacttgacgcccggtctggtggcgcggcaagttgtcaggttgttcagcgatccggcgcagctggcggcaatgacggcggccgccgcgcgagtgggacatcgcgatgcggcacatcatgtcgccaaggtggcactggatctggcacgtgcagagcgtgacacggcgtcaggacggtcggccggagggaaaccgtga

SEQ ID NO: 27605 - DNA, 1488 bp, Mycobacterium leprae
gtgaacgccggccagttgccgcccgagttgcagcgggtgcacatggtgggcattgggggatccgggatgtcgggtattgcgcgcatcctgttagaccggggcggtctggtgtctggctcagatgccaaggagtcgcgtgttgtgcacgcactgcgggcgcgcggcgcgctgatccgcatcggacatgatgcgtcattgctggacttgctgcctggcggcgctaccgcagtcattaccatccgcactgccatccccaagactaaccccgagctggtcgaagcccggaggcgcggcattccggttctattgcgatcggccgtgttggccaggctgatggatgggtgtaccacgctgatggttgctggcacacacggcaagactacgacgacgtcgatgctcgttgtggccctgcagcactgtggatgtgacccatccttcgtggttggcggtgagcttgccgtggtgggcaccaacgcccaccacggcctcggcgcctgcttcgttgccgaggccgacgaaagcgatggctcgttactggaatacacgcccaacgtagcggtggtcaccaacatcgactccgatcacttggatttctacggtagtgtcgatgcttatatcagggtgttcgactccttcgtggagcgattcgcactggggggagcgctcgtggtgtgcaacgacgatcctggggcggccgcgctggcccggcgcaccgccgagcttgggatccgggtgttgcgctacggctccgacgaccggataggtgagaccttggccgccaggttgttgtcgtgggagcaacagggcaccggagcggtcgcgcacatccagttggctggtcaaccaaactcacgggtgatgcggctaccggtacctgggcgacacatggcgctcaatgcgctaggtgcgttgctggcggcgatcgagattggtgcgtcgaccgatgaagtgctcgacgggctggctggtttcaggggtgtgcgtcgccgcttcgaactggttgggacttcaggagtcggccaggcctcaaactcgctggtgcgggtgttcgacgactacgcacaccatccaacggagatcagcgcgacgctagcggcgttccgtataatgcttgagcagagcggcggcggacgctgcatcgtggtgtttcagccccacctatattcgcggacaaaggctttgtccagagaatttggtcgtgccctgagtgctgccgatgaggtgttcatcgttggtgtcaacggtgcccgcgaacaaccgcttgctggcgtcagcggagctagtgttgctaaacatgtcagcgtgccggtgcgctatataccagactattcggcggtcgtcatagaggttgctgctgcggctggccccggcgacgtcatcgttacgatgggtatcggcgacgtgggcctgctggggccggagatcgttgccgcgctgcgggtccgggccaactgcaacactcccggctgttcgggagtgttgcagtga

SEQ ID NO: 27606 - DNA, 1026 bp, Mycobacterium leprae
gtgacagagacggacgagggtgcaccagtcaaccattcggcgacgatgtgggctgtagtgggggtgccgcccgtttgcgggggacaaccgggcgattcgggtgtggtggcggggacctccagagccttggtcgatgctgcgatcattgcaccggtcacgaccctaacgcgagacgagccagcgcagtatgaccgctacgagttcgaggggcctcgccgacgggcccgccgtgagcgggctgagcgccgtgccgcgcaggcgtgtgccatcgcgatcgaagaagcccgccgtgaggccaaacaccgtattcataggcagatgagcagcgaggccaactctcccaaaccggttgcgcgcggggttgttcggggcctgaagacgctgttcgctacggtgatgtttagtatcgccggttttgggcttgggttggccctctatgtaacgccggcgatgtcagtgcgcaacatcgtggtcaccgggattgagacggtgacccgcgaggaggtcctcgacgcggccggggtgcagcttgggacaccgctcctgcagatcaacaccaaccaggtagctgatcaggtagcagcgatccggcgagtggctagcgcgcgggcacagcgtcagtacccttcagcgctgcggattaccattgttgagcgggtgccggtggtggtgaaggactttcccgatggcccgcacctttttgactgcgatggcgtcgactttgcgaccgctccgccaccaccggcgttgccttatatcgatgtcggtcatcccggaccgatcgatccggcgaccaaggctgcgctggtggtactgctcgcgttgcgtcctgaggttgtaagtcaggtggcccggatcgcagctccgtcggtgtcgtcgatcacccttatcctgacggacgggcgggcggtgatctgggggagtaccgaccgcgccgaggagaaagccgagaagctggctgcgctattgacgcagcccggacggacatacgacgtgtctagccctgatttgccgaccgtgaaatag

SEQ ID NO: 27607 - DNA, 1140 bp, Mycobacterium leprae
atgacccccccgcataattaccttgctgttatcaaggttgtgggcatcggtggcggtggtgtcaacgccgtcaaccggatgattgagcagggcctcaagggtgtggagttcatggcgattaacaccgatgcgcaggcgttgttgatgagcgatgccgacgtcaagctcgatgtcgggcgggactccactcgggggttgggtgccggtgcggacccggaggtcgggcgcaaggccgccgaagacgccaaggatgagatcgaagaactgctgcgcggggcggacatggtgttcgtcacggcgggtgaaggcgggggaaccggcaccggaggggcacccgtcatcgcgagcatcgctcgcaaactgggcgcgttgactgtcggtgtggtcacccggccgttctcgttcgagggcaagcggcgcagtaatcaggccgagaacggtatcgcggcgttgcgggagagctgcgatacccttatcgtaatccccaatgaccgattgctacagatgggcgatactgcagtatccttgatggatgctttccgcagcgctgatgaggtgctgttgaacggcgtgcaaggcatcaccgatctgatcaccacgccggggctgatcaacgtagatttcgccgacgtcaagggcatcatgtcgggtgcgggcaccgcgttgatgggcatcggttcagcgcgcggggatggtcggtcgctcaaggccgccgaaatcgctatcaactcccccctgctggaagcgtcgatggaaggcgcgcagggggtgctgatgtcgatcgccggcggcagcgacctaggcttgttcgagatcaacgaggcggcgtcgttagtgcaggacgccgctcatccggacgccaacatcattttcggtaccgtcatcgacgattcgctgggtgacgaggtacgggtcactgtgatcgcggcgggctttgaagccaacggaccgggccgcacgcccgtgatgggcagtactggaggcgcgcaccggatcgagtcggcgaaggccggcgcgctcacttcgactttgttcgagcctgtcgacgctgctagtgcgccgctacacaccaacggtgcggctctgagtatcggtggcgatgatgacgatgtagacgtgccgccgttcatgcgtcgctga

SEQ ID NO: 27608 - DNA, 783 bp, Mycobacterium leprae
gtgaccgccatggcggcggatattgacctgcagggcgaccgcgaatccgaattaatgcatgcgctagcgacggtgcgttcccggcttgcggcagcttcgcaagccgcggggcgcaatgtcggcgaaatcgaacttctacctattagtaaattctttccagcaactgatgttgcgattttgtctcgattgggttgtcggtctgttggtgaatcgcgggcacaggaagcttcaacgaaagctgctgaattcgctgaactgttaggggtttctcgggaagagaaatcgagtattcactggcacatggtgggtcaaattcaacgcaacaaggtgcggtcgctggcgcagtgggcgcacactgctcattcgatcgacagcttgcaattggtcgctgcgctcgatcgggcggtagcagcggcgttggccggcggtcgtcgcgagcagccgttgcaggtctatgtccagataagtctcgacggagacatatcgcgcggtggtgtcaacgtcactgcgcccggcgcagttgaccgggtctgcgcacaggtcgaggagtcgaaaagcctggagttggtcgggttgatgggcatcccgccgttggggtggaatcccgaccaggcttttgagcagttgcgattggaacatcgccgggtgctgcggtcacatccggatgcgatcgggctgtccgctggcatgtctaacgattttgagatagcggtcaaacatggttcgacgtgtgtgcgtgtcggtaccgcgctattgggtccaagccggttacggtcgccgtaa

SEQ ID NO: 27609 - DNA, 633 bp, Mycobacterium leprae
atgagcacactgcacaaggtcaaggcctatttcggaatggctccgatggaagactacgacgacgagtactacgacgatcgttctcccactcacggttacgggcgttctcggtttgaggaagggtacggccgttatgaagggcgcgactacagcgacctgcgtggagacccgaccggctatctgccgctcgggtaccgtggcggctatggggatgagcaccgcttccgccctcgtgaatttgaccggcctgacctgagccgcccgcgcttgggatcgtggttgcgaaattccacccgcggagctttggctatggatccgcgccggatggctatgctgtttgacgaaggtagcccgctgtcgaagattaccacgctgcggcctaaggactacagtgaggcgcgcactatcggcgagcggtttcgagatggcaccccggttatcatcgatttggtgtcgatggacaatgctgacgctaaacgcctggtcgatttcgccgcgggcttggcctttgcgttgcgtggatccttcgacaaggtcgcaaccaaggtgttcctgctgtcgccagccgacgtcgacgtatcccctgaggagcgtcgccggatcgccgaaaccggcttttacgcctaccaatag

SEQ ID NO: 27610 - DNA, 1806 bp, Mycobacterium leprae
ttgcccgggcagtcccataaagaaccgcacaggagagcaacatcaacaccgcgatcattgaagcaggcaacgtcagaattgcgttgggcactcagcctagctgcaccggaatccccagcattcatgcgacacctactgggaaacgctcatgacaaagtggacatcacgacatcgagcgaacatgtcgccgcgttcacagaacacgccatagtgttgctgaatggtaatgcacaccaaacgcgggaactcctgggcggcaagggctataacatcaacgcgatgcgccgacaccaactggcagtacccccagcgttctgcatcaccaccgaggtcggcgttcggtatttggccgctcccacgccgacgatggaagcgatctggaacgacgtgctggaccagatgcgatggctggaagccgaaacctcacgcacatttgggtggggaccgcggccattgctggtcagcattcgctccggagccgtccaatcgatgcccgggatgatggacaccattctaaacttaggcataaatgatcccgtcgagcaggcactggcagcggccagcccctcgccgatcccccaaacctttgcccgcgacacccgtctgcggttcatacgcacgtatcggcgcatagtggatccgttaaatcccccacccgccaatacctatgaccaattacgcgcggccatagagtcaattttctcctcatggaactctcctcgcgcggttgcttaccgcacccactacggtctagacgatcagagtggtacagctgtgattgtgcaagcgatggtgtttggcaaccaaggcgcctactcgggagccggaacgttattttcccgcaatccgataaccagagagagtaaactgttcggcgagtggttgcctggcggacaaggcgacgatgtggtgtcaggattggttgaagtccagccgatcacgtccctgcgtgacgagcaacctactgtctacgacgagctagtggacaccgctggccgcttggagcgactgggatctgacgtgcaagagatcgagttcaccaccgaggacagcaagttatggctgctgcagacccgggtcgcggaacgctcggcgcaggtcgcggtgcgcctggcgctgcaactgtggcaggaggggctcatcgacgatgccgaggcactgcgccgggtgaccccggtgcatgtcgagaccgtgttgctacccgtactgcaaccggaaaaccatttatctgcaacacttttagccaaaggcacgcccacttgcccgggtgtgatatcaggcaaggcgtacaccgaagttgatgaagcattagacgctgccgagtcggccgaacaggttatcctggtgcgcgaccacaccaggcccgacgacgtccttggcatgttggcatcacagggggttgtcaccgaggtcggcggtgccgccagtcatgcggcagtggtcagccgcgaactcagccgagtggccgtagtgggctgcggccagggaaccgccgtatcgttggctggtaagcagatcaccgttgacggcgacaaaggcgaggtacgccaaggcaatctgacactgtccgcgtggtcggagaacgaaacgccggagctgcgcgagctggccgacatagcacgacgtatcagcccactgcgcgtgcacatgaccgaggaccacacgaggctggatgactcgtccgatactgcggtgcgcttagccataaacactgggcatgccgacgtggtgtcagccaccccgctaatcgtcatgatgaccactctgcggctgcaagactcaaaggattcaagcgccaaatcgtga

SEQ ID NO: 27611 - DNA, 2661 bp, Mycobacterium leprae
atgattcgtgtcatccgttcgtcattttacccacgcatgttgacaatcgatttggatgcatgggaagaaacgaagaaacagagtattgctagtgtggcgtgtagtgcagatgatataattgcgattaggcttgttgccatggctagtaagaccgtcgcccgctccggcaaccgaacgagcagtttaaaggccacctcgcgtggtgtatcccaaagccgacgaccagtaccgcctcgccccaggaggaacaggcccgccgaacgacgtaatcagtcgttgcttctggctgccgggttgacctgcggccaggccatacgcgcgacctggctggtggcggccaagggtgccggtggcgcggcacgctcaatcgggcgagctcgcgatatcgagcctggacatcgccgcgacggaatcgcgttggctctgctgggtcttgccgtcgtcgtcgccgccagctcatggttcgatgctgcccggccgatcggtgcgtgggtcgacgccgtgttgcggacgttcatcggttcggctgtcgtcgtgctcccgctggtcattgctgccgtggcagtggtgttgatgcgaacccaacccaatctcgacacgcggcccaggttgatcctaggcgcgaccttgattgctctgtcctttctcggcttacggcacctttggtcgggttcgccggaaacccccgaggtgcggcggggtgccgccggtttcctggggtttgccatcggaggaccgctgtcggacgggttgacagcctggatcgctgcgccattgttgttcatcggagcgttattcggcctgctgctgttgaccggaaccacggtacgcgaggtgcccgaagtgctgcgcggcatgttcgataccgggcttttccaacgtgactatgacgatcaatacgatgccgagtatcgatacgacgacattccgggcgccccgccagaagatttttccggttgctacgacggctctttggtcggggggggcgacgctgaacagaaggtgcgggggtggccggtgactgacctcgctgaggtttcgttgcaggacgacgttcccaccactccggaacctgccgtgcaggctggcaccgccgaggtccaccgtcttaccccccgatccgcggaggaacaccggacccaggcgctggaccgagccatcgagggttcctatacgttgccgtccatgagtttgctgttgactggcgatccgcccaagaaatgtagcgccgccaacaaccacatggccagtgcgatcggtggggttcttacccaattcaaggttgatgcggccgtaaccggctgcacccgaggaccgactgtcacccgctacgaggtggagctagggcctggtgtcaaggtagagaagattaccgccctgcagaagaacatcgcctatgcggtagccactgagagtgtccgcatgttggccccgatcccgggtaagtccgccgtcggcatcgaggtacctaacaccgatcgcgaagcggtgcggctggccgatgtgctcactgcaccctcgacgcgtcgtgaccatcattcgctggtaatcgggttgggtaaggacattgaggggaatttcatctcggccaacttggcaaaaatgccgcacctgttggtcgcgggctccaccggatcgggtaagtcgagcttcgtcaactccatgttggtgtcactgctgacccggtccaccccggaagaggtcaggatgatcctgatcgacccgaagatggtggaactgacaccgtatgaaggtattccgcatttgatcacgccgatcattacgcagccgaagaaggcggcggccgcactggtgtggctggtcgaagaaatggagcagcgttaccaggacatgcaggcgtcgagggtacgccacatcgacgtgttcaacgagaaggtgcggtccggggagatcacggctccgctgggcagccagcgggtctaccggccgtacccttacatcctggccattgtcgacgagctggctgacctgatgatgactgcgccgcgtgacgtcgaggacgccatcgtgcggatcactcagaaggcccgcgccgcggggatccacttggtgttggctacccagcgcccgtcggtcgacgtggtcaccgggctcatcaagaccaatgtgccgtcccggctggcgtttgcgacgtcgtcgctcaccgacagccgggtgattctggatcaagcgggtgcggaaaaattgatcggcatgggtgacggcctgttccttccgatgggtgcgagcaagccggttcggttacagggtgcgttcatcactgacgaggagatccacgccgtcgttactgcttgcaaagaccaggccgaacccgaatacaccgaaggggtcaccaccgctaagaccaccggtgaacgcactgacgttgaccccgacatcggcgatgacatggatgtgttcctgcaagccgtggagttggtggtatctagccagttcgggtctacttcgatgctgcagcgcaagctgcgggtggggttcgccaaggccggccggttgatggatttgatggagactcgaagcatcgtggggcccagcgaaggatccaaggcccgcgaggtgctcgtgaaggccgacgagctggcagctacgttggcgctgattcggggtggtgctagcgccgacgggtctaacgaagactag

SEQ ID NO: 27612 - DNA, 582 bp, Mycobacterium leprae
atggtagattgcgtccgtattgccaacctcgccaatatcctgactggcttgcggctgatgttggtccccgtttttttggttgccttgttcgctgggaatggccacgaaatcgtcggtcggatagcggctttcgtgatcttcacagttgcctgcattaccgatcggttagacggtttgctggcccgccgctacggcatggcgactgaattcggtgcgttcgtcgatccgatcgcggacaagaccctgatcggggcggcgctgatcggactttcgatgcttggtgacctgccatggtgggtcacggtgcttatcatgactcgcgagcttggagtgactttattgcggttggctgttattcatcgcggggtcattccggcaagttggggtggcaaactcaagactgtggtccaggcagtagcgatcggtctgttcctgctgcctttgacgcaactgtcagtgccgttccacgtgggtgcagcagtggtgatggcagttgcggtcgtgcttacggtggtcacgggtgtcgactacgtggctgggacaatcagggccgtcaggggagtgcaccagacagccagctga

SEQ ID NO: 27613 - DNA, 2136 bp, Mycobacterium leprae
atggcacaagtccccgaccgtgagaaagctctcgagctggcgatggcccagatcgagaaaaactatggcaaaggttcggtgatgcgtctcggtgacgagatgtgtcagccaatctcggtcattccgaccggctccatcgcactggacgtggctctgggtattggcggtctgccgcgtggccggattgtggaaatctacggtccggagtcctcgggcaaaactactgttgcactacacgctgtggccaatgcccaggcggtcggcggtgtcgcagcgttcatcgacgccgagcacgcgctggaaccggagtatgctaagaagctcggggttgataccgattccttgctggtaagtcaacctgataccggtgaacaagccctcgagatcgccgacatgctgatccgttctggcgcgctcgacattgtggtcatcgactcggttgctgcgctggtgccgcgcgcggaactagaaggtgagatgggggacagctatgtcggattgcaagcccggctgatgagtcaggcactgaggaaaatgactggtgcgctgagtaattcgggaaccacggcgatcttcatcaaccagctacgtgagaagattggggtgatgttcgggtgcatgaattactcgacccgcgtgactcttgcggacggttccactgaaaagatcggcaagatcgtcaacaacaaaatggatgtcagggtgttgtcctacgacccggtgacggaccggattgtgccacgcaaggtagtgaactggttcaataatggtccagctgaacagttcctccaatttactgtcgaaaagtccggtagtaacggcaagtcacagtttgcggcgacgcccaaccacctcattcgcacacctggcggctggacagaagccggtaaccttattgccggtgatcgggtgcttgccgtcgaaccacatatgctgagcgatcagcagttccaagttgtgttgggctcactgatgggtgacgggaacctctcgcccaatctgtgcgatcgtaacggtgtccggttccggttgttgggatacggctgcaagcaggtggaatatctgcagtggaagaaggcgctaatgggcaacattcggcatacggtgcgggagaattccatgggcgcgagttttatcgacttcaccccattgccagagctcgtcgagctacagcgcgcggtctacctcggagacggtaagaagttcttatctgaagagtatctcaaggcgctgacgccgttggttctggctatttggtatatggacgatggttcattcacagtgggttccaagagggtgcaggaacgtaccgccggtggcagcgggcgcattgagatctgtgtagatgccatgaccgaaggcacacgtgtacgtttgcgcgactatctgtgcgacacacacggcttggatgtgcgtttgcgagaagttggttcggccggtaaggcggtgctggtgttttccactgcggccactgcgaagttccagtcattgatcgctccatatgtggcgccgtccatggagtacaagttgttgccgcagttccgtggtcgggggagcgtgacaccgcagttcgtcgaacccacgcagcagttggtgccggcccgcgttctcgatgttcatgtcaaactgtctacccgatcaatgaaccggttcgatatcgaggttgagggcaatcacaactacttcgttgacggagtgatggtacacaattctcccgaaaccacgacgggtggaaaggcgttgaaattctatgcgtcggtgcgcatggacgtgcgtcggattgagacacttaaggacggtgtcgatgcggtcggcaaccggacccgggtcaaaatcgtcaaaaataaggtgtcgccacctttcaagcaggccgagttcgacatcctgtacggcaagggcattagcagggagggttcactgatcgatatgggtgtggaacaaggctttgtccgcaagtctggatcctggttcacttatgagggcgaacagcttggccagggcaaggagaatgcgcgcaatttcttgctggagaacgccgatgtggccaatgagatcgagaagaagatcaaggagaagcttggcattggcgcggtcgtgaccgatgacgacatcctgcccacccccgtcgatttctga

SEQ ID NO: 27614 - DNA, 1725 bp, Mycobacterium leprae
gtggaacagtccaggcgcgtgccaccgttacaatggttatcggcggtcgcccgaccgatagcgcgagtactcacgctgatatcaacgccgacattcgacatagcagacactttcggttatgcatgcccaaacccaccggaagtgagtccgaccgaaggggtgtatgtggtagcgaccaagacaagtccggcaaccggccagccggtgaagcgcaccgccaccaagacgcccgcgacccccgccaagcgatcgacgactaaggccgcaaatggctccgcccccacaaaacgagccactagtacagcatctcgggccaccaaatccacgacaccacctaaagcctccggggcaagcgacgctgcgaagaaggcccgcacctcggtcaaaagcgtcgatacaaaggcaccgtccgcgcaggaccacacgactaaagcctcggcagccaaagacaccctgaacgatcccgaagccactctgaacaccctcgactccgacgccactgccgacgacctcgatgccgaaccggacctcgacgttgagcccagcgaggacatcgacatcgacatcgaagccgccgacctcggtctcgacgacctcgaagacgacgacgtagtcaccgacatcgaaccaggtgaaaccgaggatggcgaagctactgcagccaccaagaccgacgaagcttccaccgatgatgacgaagagatcgttgagccgaccgaaaaagacaaggcctccggcgatttcgtctgggacgaagatgaatccgaggcgttgcgtcaggcccgtaaggatgccgagctcaccgcatcggcagactcagttcgcgcgtacctcaaacagatcggcaaggtggccctgctcaacgccgaggaagaggttgagctggcgaagcggatcgaggctggcctatacgccacgcagctaatgaccgagctgtctgagcggggcaccaaactacccaccgcccagcgccgcgacatgatgtggatctgtcgcgacggcgatcgtgcgaaaaaccatctgttggaagccaacctgcggctggtggtttcgctggccaagcgctacaccggccgcgggatggcgttcctcgacctgatacaggaaggcaacctgggcctgatccgggcagtcgagaagttcgactacaccaaggggtacaagttctcgacgtacgcgacgtggtggatccgccaggccatcacccgcgccatggcggaccaagcccgcaccatccgcatcccggtccacatggtcgaggtgatcaacaagctcggccgcattcagcgggaactactacaggatctgggccgcgagcccacgcctgaagagctcgcaaaagagatggacatcacacctgagaaggtgctcgagatccagcaatacgctcgtgaaccaatctcattagatcagaccatcggcgatgagggcgacagccagctgggcgacttcatcgaagatagtgaagcggtggtggccgtagacgcggtgtcgtttacgttgctgcaagaccagttgcagtcggtgttggaaacactctcagaacgcgaggccggcgtagtacggcttcgcttcggcctcactgacggccagcctcgcaccctcgacgaaatcggccaggtctacggcgtaacccgcgaacgcatccgtcagatcgagtctaagacgatgtcgaagttacgccaccccagccgttcccaggtcttgcgtgactaccttgactag

SEQ ID NO: 27615 - DNA, 975 bp, Mycobacterium leprae
gtgattcggctacgcagcgcagctgctcgggatcgttgtcaggtactgtcactggcctatcgcatcacagtcgccggcagatgccagacagtcagcccgcatcatcgccaggctaaagtaagcgaacaaccaagtctcgccaaggagattgctataacgagcaccgacgcgaccgcagatacgcccagaacctctccgcctagcgacaccgccggtacgacatcgcggcaccgcgggttcggcatcgatatcggcggcagcagcatcaagggtggcatagtcgacctcgacatcgggcaactgattggtgaccgcatcaaactgctcacccctcaaccggctaccccattggcagtcgccaagaccattgccgaggtcgtcaacgcattcggatggactgctcccctgggagtgacctatcccggcgtcgtcacccagggcgtcgtccgaacggctgccaacgtggacgactcctggattggaaccaatgcccgcgacattatcagcgctgagctgaacagccaggaagtcaccattctcaacgacgcggatgctgctgggcttgctgaagggcgctatggagcgggcaaaaacaactctggcttgattgtgctactcaccttcggcaccgggatcgggtcagcagtcatccacaacgggaaactgattcctaacaccgagttcgggcatctcgaggtcgacggtaaagaggccgaacaacgagcggcatcgtccgtcaaagacaagtacaaatggagctaccgaacatgggccaagcaggtaacgagggtgctggtcgccatcgaaaacgcgatgtgtcctgacctgttcattgccggcggcggcatcagccgcaaggccgatagatggataccactgcttgaaaaccgcaccccgatggtggccgcagccctgcagaatacggccggcatagtcggcgctgccatggcttctaccgcagatgtgacgcactga

SEQ ID NO: 27616 - DNA, 564 bp, Mycobacterium leprae
atgcgttcggatcgcggtaaacccaatgcgtgggcgatttgtgtcttttgcgcggctggaccgatgcacccggagctgctcgaactggccgccgaacttggtgaggcgattgctgagcgcggctggaccctggtctggggcggtggccgcgtttcagcgatgggtgcggtggcgtccgcggcgtggacacgcggcggtcggatagtcggcgtgatcccggaaatgttgcaacgccgcgagattgccgacacctatgtcggtgagctgatcgtcaccgaaacgatggccgaacgtaaacaggtcttggacgatcacgctgatgcgttcatcgtgttgccgggtggtctggggaccctcgatgagctattcgaagcatggaccgcgggctatttgggtatgcaccgtaaacccatcgtaatgctggacccctgggggcactacgaaggcctttgggcttggctgcacggattgatcgatagtggctatgtttcgccggtagcgatggagcggctggtggtggttgaccaggtggatgccgcgcttgaggcttgtatgtccgtctga

SEQ ID NO: 27617 - DNA, 1602 bp, Mycobacterium leprae
gtgaatactagggtggacaccgacaacgcggtaatccgatatcggcgccgtaacaggccctgtctcgagcgctcagaagaggataatgtgacctccgaccaaggcaccaacaacgaccaaaatcccggccatcacctggcgacgcgccccgtcgccaggcctcctgtcgacgccgcgtcccgtgaggcgttcggccgcccctgtgggttttcgggatcctttgtagctgaatatgtgcgcccacagaaatatcgagaccgcagcgaattcaggcctgatgatcaaccagccgaccccgtccttgccgaggcattcagccggccattcgggagcgtcgattcgctgcagcgccatcctatcgatgcgggtgcgctggctgctgagaaagatgccactcagctggacgaacccgatgatccgtggcgagaccctgcggctgcggctactctggcgagtcctgcagtggcttcaccggtgccgcacactgagttgggtcaatgcggcaaactcggtgtgcgcgacgtgctatttggcggcagagtgtcctaccttgccctggtcatcttggtctttattgctttggcgctgggtgctatcggcggtgtgatcggtcgtaagacggctgaaatcgtcgacgcgttcaccacgtcgaaagtgacgttggcaaccactaacaatactgaagagccggccggtcgtttcgccaaggtggcggcggcggtagctgactccgtggtgacgattgagtcgaagagtgaccaggaggaaatgcagggctccggtgtcatcatcgatggccgcggctacatcgtcactaacaaccacgtgatttccgaagcggccaacaagcccagccagttcaagacgaccgtggtgttcaacgacggcaaggacgtgcccgccaatctggtgggccgcgaccccaagaccgacctggccgtactcaaggtcgataacgtcgacaacctgacggtggcgcggcttggtgattccggcaaggtgcgggttggtgatgaggttatcgcagcgggtgcgccgcttgggctgcgcagcacggtgacccacggcatcgttagcgcactgcaccgccctgtcccgttatcgggagagggatctgacacggacaccgtcatcgatgccatccagaccgacgcatcaatcaaccatggcaactctggtgggccgctgatcgacatggattcccaggtgatcggcatcaatactgccggcaagtcactgtcggacagcgccagtgggctgagctttgcgatcccggtcgacgagatgaaatcggttgtgcaaacactgatcaaggacggcaagatcgtgcacccgacgttgggggtcagcacccggtcggtgagcaacgctatcgcgtccggcgcccaggtggccaatgtgaaggcaggaagccccgcgcaaaagggcggaatcctggaaaacgacgtcatagtcaaggtcggcaaccggaaagtcgccgacgccgatgagttcatcgttgccgtgcggcagctgaccattggacaggacgcctcagtagaggtggtccgcgacggtcggcacgtcacgctgacggtgaaatccgaccccgatagtagctag

SEQ ID NO: 27618 - DNA, 834 bp, Mycobacterium leprae
gtggagggtttcgccggcaaggttgccgtggtcaccggcgctggttcgggtatcggacaagccttggctatcgaactagcccgttcgggtgccaagctggcgattagcgatgtcgacggcgaagggctagcacagaccgagggacagctgaaggcgatcggcgcgtcggccaggaccgaccgactcgacgtgaccgaacgcgaagccttcctgacctatgccgacgtggtccacgagaacttcggtaaggtgaaccagatctacaacaacgccggcatcgcgttcaccggcgacgtcgaggtcagccacttcaaggacatagagcgagtgatggacgtcgattattggggtgttgtaaacggcactaaggcgttccttccgtacttgatctcctctggagatggccatgtcatcaacatctcgagtgtgttcggcttgttttcggtaccggggcaggcagcgtacaactcggctaaattcgccgtacgcggcttcaccgaggcgctgcgagaagagatggcgctggctggccggccggtcaatgtgacgaccgtctacccaggcggcatcaaaaccgcaatcgcgcgcaacgccaccgccgccgagggactcgacgtaagcaagatagccagtcggttcgacacgtgggtggcccataccagcccgcagcacgccgcccgaatcatcctcaaagcagtgcgcaaaaagaaggcgcgggtactggtcggcccggacgccaaagtcgcgaacgtggtggtgcgtttttcggggggagctggctatcagcggctattcgcgcaagtggcgagccggctgatcctcaatcaacgctaa

SEQ ID NO: 27619 - DNA, 3783 bp, Mycobacterium leprae
gtgcagaaagttgcaagtgtcgcgcaatgcgcttgcaggacagaagaattgaggcgaacagcggccgtggccaacataagttcaccattcgggcaaaacgaatggttggtcgaagagatgtaccgcaagttccgcgacgacccctcctcggtcgatccgagctggcacgaattcctggttgactacaatcccgaatcaaccgccgaaccggtacttacggaccctacctccactgataaacaaccctcagccacgccacaagcaaagccagctgcggcagctgacccggtagcgagcagggccaagcccgcgaccaccccaacagtagcgaacggcacggcagccggctctgccgcagctccagccaaaaccaccactaccccgcctatcgaaggtgacgagttgcaggtgctgcgcggtgccgccgcagtggtcgtcaaaaatatgtccgcgtcgctggacgtgccgacggcgaccagtgtgcgagccgttccagccaagctgatgatcgacaaccggaccgtcatcaacaaccagctcaagcgcaaccgcggcgggaagatctccttcacgcatttgctgggctacgcgttagtgcaggcggtcaagaagttcccgaacatcaaccggcactacgcggagatcgacggcaaacccatcgcagtgacaccggcccacaccaatctcggcctagcgatcgacctgcaaggtaaagacggcaagcggtccttggtggtggccggtatcaagcgctgcgaagaattgcgattcgcacagttcgtcaccgcctacgaagatatcgtccgccgggcgcgcgacggtaagctgaccgccgaagactttgccggcgtcacgatttcacttaccaaccccggcactatcggcaccgtgcattcggtgccgcggctgatgactggccagggcgccatcatcggcgtgggcgccatggaataccccgccgagtttcaaggcgccagcgcggagcgcatcgccgaattgggtatcggcaaactgatcaccctaacttcaacctacgaccaccgcatcatccagggtgcggaatcaggtgacttcctgcgcacgatccacgaaatggtgctctcggacagcttctgggacgaaatctttcgcgagctgagcatcccgtatctgccggtgcgctggcgcaccgacaacccggactcgatcgtcgacaagaacgctcgcgtcatggagttgatcgcggcctaccgtaaccgcggccatctaatggccgatatcgacccgctgcggttggacaacacccgcttccgcagtcaccctgacctcgatttgctaacccacggcctgacgctgtgggatctggatcgggtattcaaagtcaacggctttggcgggtggaaatacaagaaactgcgtgacgtgctgggcttgcttcgcgacgcctactgccgccacatcggcgtggaatacacccacatcctcgaccccgaacaacaggaatggctgcaacagcgggtcgagaccaagaacgtcaaaccgactgtggccgaacagaaatacatcctgagcaagctcaacgctgccgaagccttcgaaacgttcctgcatactaagtacgtcgggcagaaacgtttctcgctagaaggcgccgaaagcgttatcccgatgatggatgcggcgatcgaccagtgcgccaagcatggcctggacgaagtggtcatcgggatgccacaccgcggccggctcaacgtattggccaacatcgtcggcaagccgtactcacagatcttcaccgaattcgagggcaatctaaacccaacactagcgcacagctctggtgacgtcaaataccacctcggtgctaccggtttgtatctgcagatgttcggcgacaacgacattcaagtatcgctgaccgccaacccttcacacttggaagccgtggaccccgtgctcgaaggtctcgtccgggccaagcaggatctactcaacaaggataccaatggcaaccaagatgaagcgttttcggtggtgccaatgatgctgcacggggacgctgccttcgccggccaaggagtcgttgccgaaacgctaaacttggcgaacctgcctggttaccgggtcggcggcaccatccacatcatcgtcaacaaccagatcggcttcactaccgcgccggagtactccagatccagcgagtactgcacggatgtcgccaagatgatcggcgcgccgatcttccacgtcaacggtgatgacccggaagcctgcgtgtgggtagccaagctggcggtcgactttcggcagcgttttaaaaaggacgtcgttatcgacatgctgtgctaccgccggcgcgggcacaatgagggcgacgatccgtcgatgacgaacccgtacatgtacgacgttgtcgacaccaagcgcggcgcccgtaagagttacaccgaagccttgatcggccgtggcgacatttccttgaaggaagccgaggacgcgctgcgcgactaccaaggccagctggagcgggtgttcaacgaggtacgcgacctggaaaagcacggcgtgcagcccagcgagtcagtggagtctgaccagatgatccctgcgggtttgtccaccgcggtggacaaagcactgctggcccgcatcggcgacgccttcctggcggtaccagaaggtttcaccgtgcacccgcgggtgcagccggtgctcgagaaacgccgggagatggcttatgaaggcaagatcgactgggctttcgccgagttgctagccttagggtcgctggtggcggaaggcaaattggtgcggctgtccggccaagacaccaagcgtggcaccttctcgcagcggcattcggtgatcatcgaccgccacaccggcgaggaattcactccgttacagctgctggccaataaccccgacggcagtcccaccggcggcaagtttctggtctacaactcgccactgtcggagtatgccgctgtcggtttcgagtacggctatacggtaggcaacccggatgccgtggtgctgtgggaggcgcagttcggcgacttcgtcaacggcgcacagtcaatcatcgacgaattcatcaactccggtgaggccaagtggggacagttgtcgacagtggtgctgctattgccgcacgggcacgaagggcagggccctgaccacacctctggccgcatcgaacgcttcctgcagctgtgggcggagggctcaatgacctttgcggtgccgtcgactccatctaactacttccacttgctgcgccggcacgctctcgacggcattaaacgtccactgatcgtgttcacgcccaagtcgatgttgcgcaacaaggccgcagtcagtgatatcaaggacttcaccgagatcaagttccgttcggtgctggaggaacccacctacgaggacagcatcgacgaccgcagcaaggtcaccagggtcctgttgacctgcggcaagctctactacgagctggccgcccgcaagatcaaggacaaccgcgacgacgtcgcgatcgtgcggatcgaacagctggccccgctgccgcggcgccggctcggcgaaacgctggaccgctacgagaacgccaaagagttcttctgggtgcaagaggagccagccaatcaaggtgcctggccgcggttcggcctggagctgcccgagctgctgccccgactcaccgggatcaagaggatttcgcggcgggccatgtcggcgccgtcgtcgggttcgtcgaaggtgcatgccgtcgagcaacaggagatcctcgacaccgcgttcggctaa

SEQ ID NO: 27620 - DNA, 1152 bp, Mycobacterium leprae
atgcgattcctgcacaccgccgactggcagctcggcatgactcggcacttccttgccggtgatgcccaaccgcggtactcggcggcccgccgcgacgcggtggccgggctcggtgcgttggctgcggaagtaggtgccgagtttgtcgtggtggctggtgacgtcttcgaacacaaccaactcgcgccgcaggtggtcagccaatcattggaggccatacgcgccatcggtattccggtttacctgctgccaggcaaccacgatccgctggacgcgtcgtcggtgtacaccagcgcgctgtttaccgccgaatgcccggataacatcaatgtgcttgaccgggccggtgtccatcaggttcggcccggactcgagatcgtcgctgcgccatggcggtccaaggccccgaccacggacctggtcgccgagatgttggggggattgacggcggacatcgtcacgcgcgtgctcgttgctcacggcagtatcgacgtgtttgacccggatcgcgacaaaccctccctgatccgactcgctgggatcgacgatgcgctggccggcggcgcggtgcactacgtggccctaggagacaggcattcgctcacccaggtcggcagcagtggtcgggtgtggtactccggctccccggaagtcaccaactttgacgacatcgaatccaactctggccatgtcctggtcgtcgagatcgatgaaaatgacccgcgccgccccgtcaccgtgacggcccgacatgtcggtcattggcggtttttcacattgcattggcaggtggataacggccgggacatcgcggatcttgacatgaatctagatcagatgatggacaaggaccgcagtgtggtaaggctcgccctgaccggttcgctcacgataaccgaccgcgccgtgttggatgcttgcctggacagatatgcacggctattcgcgtggctaggtctctgggaacgccgcagtgacttagcggtgatacccgctgacggcgaatttactgacatcggcatcggcgggtttgcggctgccgccgtcgacgagctggtcgctaccgcacgtgaaggcgacactgaatcggctatcgatgcccaggcggcgctggcactactgttgcggctcgctgatcggggagtggcatga

SEQ ID NO: 27621 - DNA, 2622 bp, Mycobacterium leprae
atgaagctgcatcggctggcgttgacgaattaccgtggtaccgcgcgccgggagattgagtttcccgaccgcggtgtgattttggtgtgtggagccaacgagattggcaagtcatcgatgatcgaagcgttagacctgttactggaatttcgggaccggtcgacgaaaaaggaagtcaagcaagtcaagccggctaacgccgatattggctccgaggtttgcgccgaaattagcagcggcacttatcgcttcgtctatcgtaagcgttttaataaaaaatgcgagacggcattgacggtactggcaccgcaccgcgaacaactaaccggcgacgaagcgcacgagcgggtccgggcgatgttggctgagacggtcgacaacgatttgtggcatgcccaacgggtgctgcaggcggcgtcgaccgccgcggtggatctgtctggctgtgatgcgctgtcacgtgcgcttgacctcgccgcaggtgaccacgccgagttgtccggcaccgagccattgcttatcgaacggatcgaagccgagtatcggcgctacttcacttcgaccggacgtcctaccggggagtgggctgtcgcgatttcccgactatccgacgctgagactgcggtgggggagtgtgccgcagcggtcgccgaggttgacgaccgggtgcgtcgtcatgccgttctaactgaacgtgtagccggactggcgcaacaacggttcgctgctggacctcggttggccgttgctcaggccgctgccgacaaagtcgcagttctcacccgccaagcgcgtgaagctgagctagttgcagcagcagcaaccgcaacgaatgccgcagcagtagctgctcatacttcgcggctgcggctgctcgccgaaatcgacactcgcgctgtcgttcttgctgccactcaggacgaagctcaagaagccgtcgacgcggtgtcgacgatgcgtgctgatgctgaggcgtctgatgcagcagtcgaggagtctactgaggccctgatggctgcccaacagcgcgctgatatcgcccggagcactgtcgaccagctcgttgaccgtcaggaggcggatcggttgagcacccggctggccaaaatcgacgccatccagggtgagcgcgacctaatctgcgccgagttatctgcggtcacgttgaccgagcagttattgcagcgtattgaaaatgccgcagccatagtggatcgcactggtgaacagctgaagttgatctcggcggcggtggaattcacagccaccgctgacattgaaatcagcgttggtcagcaacgagtgtctttggaggcaggacaaagctggtcgacaacagccaccggacccaccgaagtcgaggttctcggtgttctgactgcttgcgtgatacctggtgctacagcactcgatgctcagtccaaatacgttgcagcacaagaagagctatccgtagctctggctgacggtggtgtcgttgatcttgctgcagcgcgatgcgccaaccagcggcgccgtgaattgcaaagtagccttgatcagttgagtgctgctctggccggcgtgtgtggtgatgatcagatcgaccaattgcgggcacggctggagcagttacgtgacggttaccctggtgaacctgatctcttagcggtggacatcggttctgcccgtgccgaactcgaagcggccgagacggttcgtgcggccgtcgactttgaacgcgaggtttgtcgtcgtaccgcagcggctgcaaattgccgtcttgtcgaaacatcagctcgggcaaattttttattgaaaaaagcggaaactcaacgagccgaactcgatcaggacatcgaccagttggcccagcagcgggcgtcagtcagcgatgaagacctggcgtcggctgcggaagccgggctgcgggcggtgcaaatagcagagcaacgggtcgccaagctgactgaggagttggtcgccgcggaaccggaagcggtgaccgccgaattggtggctgccactgcggcagccgagtcgttgcgtgatcaacacgaagatgctgctggcgcattgcgtgagatcagcatcgaactctcggtcttcggtactgaggggaggcaaggcaagctcgacaccgccgaggcggagcgtgaacacgcgatcagccagcacacgcagatcggccgtcgagcgcgggccgcacagttgctgcgttcggtaatggcacgccaccgtgacaccacacggctgcgttacgtcgagccttaccgcacagaattgcaacggctgggccgaccggtgtttgggcccactttcgaggtcgacatcgacagtgacttgcggatccgcagccgcacccttgacggcattacggtgcctttcgagtccctgtcaggcggcgccaaagagcaactcggcatcctggcgcggttcgccggcgccaccttagttgccaaggaagataacgttccggtggtggtcgacgatgcgctgggattcaccgatccggaccggttggccaagatgggggagatgtttgacaccgtgggtgcacacggacaggtgatcgtgctgacatgtagtcccgaccgatacgatggcttcacgggagcgcaccgtatcgatctcaacgtttaa

SEQ ID NO: 27622 - DNA, 1674 bp, Mycobacterium leprae
gtgattatgcttagcaggatcgtcgcggcgttgctggtggtcggcctgatcctgaccggatgctccgcaagcaaccgccttgtcccctctgcagcaagtaacgctgcgctcggcaaaaccagcgatatcaacccccaggatccggccacgctaaaagatggcggaaacttgcggctggcactgaccgacttcccggcaaacttcaacatcctgcacatcgatggcaacaacgccgaggtcacctcaatgatgaaggccaccatgccacgagcgttcatcatcggtactgacggttcgacgactgtcgacaccaactacttcaccagcatcaaactcactagcacttccccgcaagtggtcacctacaccatcaatccaaaggcggtctggtccgacggcacgccgatcacttggagagacatcgaccgccagatccacgccaatagcggcaagaataaagcattcgagatcgccggaaccaacggctgcgagcgagtagcatcaatacgccccggcgccaacgatcggcaggccatcgtgaccttcgcccagccatacgccgaatggcgcggcatgttcgccggtaatggcatgctgctgcccgccacaatgaccgccacacccgaagcgttcaacaagggccagctcgacagaccaggcccgtcagccggtccgtttattgtgtcatcactggatcgaaccacacaacgaatcgtgttgacccacaacccgaaatggtgggggacaccaccccgcctggacagcattacctacttggtcctcgatgacgccgcacggctaccagcgttgcaaaacaacacgatcgatgcgaccggagtcggcacgctagaccagctgaccaccgcacagcgcaccaacggcatctctatccggcgcaccccggccccccgctggtctcacttcaccttcaacggagccgttgggtccatcctagccgaccaagggctgcgcctcgcagtgtccaaaggcatcgaccggcggaccatcgccaaggtagttcagtacggcttagccaacaatcccgagccgttgaacaaccacgtctacgtcgacgggcaggaaggctaccaggacaacagtggcgttgtcggctacgacccggagcaggcgcaacacgagctcgatgccctgggctggaagctcaatggtcaattccgggagaaggacggccgtcaactagtcatccgctatctgttctacgatgcgcaaggcagccgagagtttgctcagctcgcccagcacagcctcgcgcaaatcggcgtcaaacttgaactccaagccaaagccggcagcggcttcttcaccaactacgtcaacgtgggagctttcgatatcgtgcagttcggctgggtcggcgacgcattcccactgtcagcgctcacccagatttatcaatccgacggagagagcaatttcggcaagatcagtagcccggcagtagacgccgcgatcgagcgaacgctggccgaactagatcccgctaaggcgcgcgcgttggccaacgaagtcgacaagctgctctgggccgaagggttcagcttgccgctcacccaatctccgggcgacgtcgccgtacgcagcacgctggccaactttggcgcggccggcttcggcgacctgaactacaccgccatcggattcatgcagaactga

SEQ ID NO: 27623 - DNA, 1830 bp, Mycobacterium leprae
atgagccctctactggaagtaactgacctggccgtcacgttcgaaacaaatggcgaaccagtgaccgcggtgcgcggcatcagctatcgcatcaacgccggagaagttgtagccatggtcggtgaatcgggttcgggtaagtccgcggcggcgatggcggtagtgggcttgcttccggaatacgctcaggtgcgcggttcggttaggctacacaacaccgaactcgtaggactcgccgacaagacaatgtcgcggtttcgcggcaaagcgattggcaccgtgttccaagatccgatgtctgcgctaaccccggtctacaccgttggtgaccagatcaccgaggcaatcaaggtgcaccagccgcgagtgggaaagaaagctgcccaccgacgcgccgtggaactgcttgagctagttggaattacgcagccagatcgtcgcgctcgcgcctttccgcacgaattgtccggtggtgaacggcaacgagtggtcatagccaccgctatcgccaacgaccccgatttgctgatctgcgacgagcccaccaccgcgctggacgtcaccgtgcaagcacagatcctagaagtgctcaagacggcgcgcgacgtcactggcgccggtgtgctcatcataacccatgacctcggtgtggtcaccgagttcgccgaccaagcgctggtaatgtacgccggccgagtcgtcgagtcagcccaagtaagtaccctctaccgggagcgccagatgccctacaccgtagggctgttgggctcggtacctcggttggacgctacacagggaacccggctagttccaatccccggtgcgcccccttcgttggccggcctccagcaagaatgcccattcgcaccgcgctgcccactggtagtcgacgaatgcagattgcgcgaaccagaattggtcgaagtcagggctggtcaccgcacagcctgcatccgcaccgaccaggtcagcgggcgtagtgccgccgacatctacggcatcaacaccgacactcgcacatcagcaaccagcgattcatcggtcgtggtgcgggtacgggatctagtgaaaacataccggctaactaagggtgtggggttgcgccgcgctatcggcgaaatccgcgcagtcaacggtgtaagtttcgagctgcaacagggtcgcacccttggcatcgtaggtgaatccggatcaggtaagtcgacgactctgcacgagatcctaagactcgctgtaccacaatcaggatcgatcgaagtgcttggcatcgatgtagccaccctcaaccgggcaagccgacgatcgatgcgacgcaacatccaagttgtgttccaagacccagtcgcgtcgctggacccgcgactaccagtcttcgaactaatcgccgagcctttgcacgcaaatggtttcagcaagaattatactcaaatgcgtgtcgctgagctgctcgacattgtgggattgcgccgcgacgacgcaactcgttatcctactgagttctccggaggacagaagcagcgcatcggtatcgcgcgagcgctggcattgcagcccaaaattctggcattcgacgaaccggtgtccgcactcgacgtatctatccaagctggcatcatcaacctgttacttgacctccaagaccggttaggactgtcgtacctgtttgtttcccacgacctttcggtgattaaacatctcgcacatcaagtcgccgtgatgctcgccggtaccattgtcgagcaaggcgacagccacgatgtcttccgcaatccgcagcacgattacacgcggcggctgctgggcgcgataccacgaccagaggtcgggtga

SEQ ID NO: 27624 - DNA, 1653 bp, Mycobacterium leprae
gtgacccctgccgatctggctgagctgctcaaaacaaccgctattgtggtgctggctgagcgcgggctcgatgccgctgcgttgccgcagacggtcaccgtggagcggccgcgaaatcctgagcacggagattactccagcaacctggccatgcagctgggcaaaaaagtcggtgcaaacccgcttgaactagccggatggcttgccgaggtgctggcgcaggccggcggcatcgcggacgtagaggtggcgggaccgggtttcatcaacatgcgtcttgacgcgtcggcgcaggccatgattgtcaacaccgtcatcaacgccgataaaaacttcggccactccgatgacctggctggttaccagatcaacctagaattcgtctcggccaacccgaccggaccgatccacatcggcggcactcggtgggcagctgtcggggacgcactgggtcggttgttgtcgacgcagggtgccgctgtggtgcgcgaatactatttcaacgaccacggcgcccagatcgaccggttcaccaactctttgatcgccgcggccaaaggcgagctcactccggccgacggctacgctggcacctacgtaaccgacatcgccgcgcaggtgatgcagcaggcaccctacgcgctgagcctgcccgaatccgagatgcacgagaccgtccgcgaaatcggcgtcgacttgatgttcacccacatcaaaaagtcgttgcacgagttcggcaccgatttcgatgtctacacccacgaagactcgatgcatgccagcggccgggtcgatgaggccatcgccagactgcgcgataccggtaatgtttacgaaaaggatggtgcactctggttgcgcaccagcgcttttggtgacgacaaggaccgtgtcgtgatcaagagcgacggcaagccggcctatatcgccggtgatcttgcctactacctggacaagcggcaacgcggtttcgacttgtgcatctacatgcttggtgccgaccaccacggatatatcgcccggctcaaggctgcggccgccgcattcggcgatgacccggccatcgtcgaggtgctcatcggacagatggtgaacctggtttgcgatggacagctggtccggatgagtaagcgctcaggcaacgtgattacgctcgacgacctggtcgaggcgattggtgtcgacgccgcgcgctacagcctgatccgctcgtcggtggacactccgattgacattgacttggcactgtggtcctcgtcctcgaatgaaaaccctgtttattatgtgcaatacgcgcatgcccgcctatcggcattggctcgtaacgctgccgaattcggactgattcccgacaccggacacctcgagctgctcagtcacgacaaggaaggtgcactattacgtaccgtcggtgaattcccccaggtgctcaaaaccgctgctgcactgcgtgaaccacaccgtgtatgccgttatttggaagacctcgccggagattaccaccggttctatgactcctgccgggtattgccccaaggcgacgagaagcctaccgacctgcacaccgcgcgtttggccctgtgccaggccaatcgtcaggttattgccaacgggctggcgatcctcggagtcagtgctccggagcggatgtga

SEQ ID NO: 27625 - DNA, 948 bp, Mycobacterium leprae
ttggtgacctggatgctgcctgctggtctggtggccagcgccgtggtggcggcgtctagcgctaacctcggtccgggtttcgatagcatcggtctggcattgagtctttgtgacgagattgtggtcgagacaacagattccggcttggttgttgtcgtcgatggcgagggagccgaccaggtgccgatgggccctgaacatctggtagtgcgtgccgtccgacgcggcctgcaggctgttggggtgagtgcggctggcctggtagtgcgctgccgcaacgctatcccccactcccgtggtctcggctcctccgcggcggctgtggtcggtggcctagcagtggtgaacggctttgttgcccagattgattcgacaccgctaagcaacgctcagctaatccagcttgcgtcggagttcgagggtcatcccgacaacgcggcggctgcggtgttgggcggtgcggtggtttcgtgggttgaccgcagttatgatcagcctgactactgcgcggtaccgctgcggcttcatcccgatatccatctcttcgccgctattcccgaggaacgttcttcaaccgcggagagtcgggtgctgttgcctgcccgggttagccacgacgacgcgagattcaatgtgagtcgtgccgcgttgttggtggtagcacttactgaacggcctgatcttctgatggccgcgacagaagacgtgcttcaccagccgcaccgcgcctcggcgatgtcggcttcggcggaatatttgcgactgttgcggcgtcataacgtggcagcgacgctttctggagcgggtccatccctaattgccttgagcacacagtcggagttgccccgggaagcggcagagtacggcgccgcaaacggatttatcatcatcaagatgaccgccggggatgaagtgtgctggcggccagaggtcacagttcccggttaa

SEQ ID NO: 27626 - DNA, 1833 bp, Mycobacterium leprae
gtgactgaaacggaccttatcacggttggcgaaaacactgatgacacagagctgacgaacgccgtgactacagacactcccgatgtcaaagccactgcggccaccgtgtcactgggatcgctgtccacgatggtgctgcctgaactgcgggcgctggctaatcaagccggtgttaagggcacgtcgggcatgcgtaagagcgaactaatcgccgcaattgaggaatgcagggggcaagccaacggcacgtcggtcaacgatggcccatcgcgagaccacggtggatctgcaacagccatcagcaccgaagcactggctgcccaagaggaacagaactatgcgatagtcgaggtgtcccgccgggaacgacgcggcgcttctcgtgaagcggatgtcacggccggcactagcacagcagaggccacggagtcggattgtcagggcactgctgatgatgacactcgcaccctccaagggggccaatcggacaccaagaccgaagagcgcggaccagatgtgggtaacgatcagggtgttgaacagcagagttcgagtttgcagccgcgcggtgacgacgacggcgagggccgccagggcaggcgcggacgccggtttcgtgatcgcgatcgcaggcggcgcggtgagcggtccggtgacggtgccgaggccgaattgcgtcaggacgacgtcgtccagccggtcgccggtatccttgatgttctcgacaattacgcgttcgttcgtacctctggttatctggctggtccgcacgatgtctatgtgtctatgagtatggtgcgcaagaacggcttgcgtcggggtgacgcagtgaccggagctgttcgggtgccccgagaaggtgagcagggccaccagcgccagaagttcaacccgctggtgcgtctggacagtattaacggtggatcggttgaagatgctaagaagcggcccgagttcggcaaactgacaccgttgtaccccaatcagcggcttcgtctggaaaccacgcccgatcggttgaccaccagagttatagacttgatcatgccgatcggcaagggccaacgcgcgttgatcgtgtcgccgcccaaggctggtaagaccacgatcctgcaggacatcgctaacgcgatcaccaggaacaatctggaatgtcatctgatggtcgtgctggtcgacgagcgacctgaagaggtcaccgacatgcagcgttcagtcaagggcgaggtcatcgcttcgacattcgatcggccgccgtcggatcacacttcggtcgccgagctggctattgaacgcgccaagcggctcgtcgagcagggcaaagacgtcgtcgtcttgctcgactcgatcactcgcctggggcgcgcctataacaacgcgtcgccggcctcgggtcgcatcctctccggtggtgtcgattccaccgcgctttacccgcctaagcgattcctcggcgccgctcgcaacatcgaggaaggtgggtcgctgaccatcattgccaccgcgatggtcgagaccgggtccaccggagacatggttatctttgaggagttcaaaggtaccggtaacgctgaactgaagctggaccgcaagattgctgagcgacgggttttccccgctgtggacgtcaacccctccggtactcgcaaagacgagttgttgctgtcgcctgacgagttcggcatcgtgcacaagctgcgccgtgtgttgtcgggtctggattcccaccaggccatcgacttgttgatgtcgcagttacgcaagaccaagacaaattacgagttcctggtgcaggtatccaagactacgccaggttccatggacgatgattag

SEQ ID NO: 27627 - DNA, 255 bp, Mycobacterium leprae
atgaaagctaatattcatcccgcctacgcggagaccaccgtggtctgcggatgcggcaacaccttccaaacacgcagcaccaagccgggaggccgcattgtggtcgaggtttgctcgcagtgccacccgttctacacgggcaagcagaagattttggacagcggcggccgggttgcccgcttcgaaaagcgctatggcaaacgcaaggttggggtggaccaggtggctgcgtacccggagcagaacaataaatag

SEQ ID NO: 27628 - DNA, 1086 bp, Mycobacterium leprae
atggcgcagccggtgcaatcgatcgacgtgttgcttatcgaacacgctgaacttgagcttgcattggcagacccggaactgcacagcaatcccgccgaggcgcgcaaagccggacgtcggttcgcccgattggccccgatcgtggccacgcaccgcaagctgatatcggcgcgcgacgatttgcagaccgcacgtgaactcgccgccggcgatgagtcgttcgctgacgagatcgccgaactggaatcacggatagccgaactaactacccaactcactgacatgctggcgccacatgacccgcatggccccgacgacatagtgcttgaagtgaaatccggcgagggtggtgaagagtcggccttgttcgctgctgaccttgcgaggatgtacatccgctacgccgaacggcacggttggacggtgacggtgctggacgaaaccacctcggatctgggcggctataaggacgcgacgttagcgatttctcataagggtgccagtgatggtgacgctgtcgacggggtgtggtcgcgaatgaagttcgaaggcggggtgcaccgggtgcaacgggtaccggtaacggaatcccaaggccgtgtgcatacttcggcagcgggcgtgctggtctatccggaacccgaggaaataggtgaagtgcacatcgacgagtcggatctgcgcatcgatgtctaccggtcttcaggcaaaggcggccaaggcgttaatacaaccgattccgcggtgcggatcactcatctacctaccggggttgttgtcacctgtcaaaacgaacggtcgcagctgcagaacaagacacgtgcgttgcaggtgttggccgcccgcctgcaggcaatggccgaggagcaagcactagccaacgcgtcggcggatcgggccagccagattcgcacggtggaccgtagtgaacgcattcgcacctacaacttcccggagaaccggatcacggatcaccgaatcggttacaaggcacacaatctcgatcaggtcctagacggtgacctggatgcgctttttgacgcgttaagtgctgctgataagcagtcaaggttgcaacaggtatga

SEQ ID NO: 27629 - DNA, 867 bp, Mycobacterium leprae
atgatgattcggctgcggcgtgcgattgattctgctgtgacgcagctcgaggaagcggggatcggttctgcgcgttgcgatgccgagcagctggccgctcacctggctggcaccgaccgcggtcggctggccttacttgacacgcccggggaggagtttttcaggcgttacagcgacgccgttgccgcgcggtcgcggcgggtgccgttgcagcatctcatcggtacggtgtcgttcgggccagtagtgctgcatgtcggcccggatgtattcataccgcgcccagagaccgaggccatattggcgtgggtgatggcacagcggctgccggagcggccagtgattgtggatgcgtgtactggatccggcgctttagcggtcgcgctggctcaccatcggcctgcggcacgagtgattggcatcgacgattccgattcggccctggactacgcacgccgcaatgctgaaggcaccgcagtagaatgcgtgcgtgccgatgtcaccaccccggctctgttgcctgaacttgatggatgcgtcgatctctttgtggccaacccaccctacgttcctgacgatccagtagtgcaatccattctggaacctgaagtgacccaatatgatccgcgtcacgcggtatttggcggtccggacggaatggcgctgacggctgacattgtcggtctagccgggcgttggctgcgccctggtggtttattcgccgtcgagcatgacgacagcacgtcggtgccaacgcttgacttggtctaccgaacagatcttttcgacgatgtcttgacccacagagatctagccggtcggccaaggtttgtgacggcccgcaggcgggaaagctggagcgcatga

SEQ ID NO: 27630 - DNA, 1200 bp, Mycobacterium leprae
ttggtgcagtacgttcgcgagatgtccagcgacctagccacctttgccagtggtttgctcgccttgtttgagcgtagtgctggtgtcccgctgcgcgagcttgcattggtcggactgaccgccgcgatcatcacttacttcgcaactgggctggtaggggtgttagccaaccgcttggaagcggtcgcttatcctcgcgaacgcgatgttcatgtgacgccaaccccacggatgggtgggctggccatgtatctcggcgttttggctgctgtctttctggcttctcagcttccggcgcttacccgcgggttcgtctattcctcgggcatgcccgcggtattggtggctggtgcggtgatcacgggtatcggactgatcgacgaccgctggggtctggacgcactgacgaagtttgcgggtcagatcaccgcagccagcgtgctggtcaccatgggagttgcttggagtgtcctctatatcccgctgggtggcgtcggcactatcgtgttggaccagacctcctcgattttgcttaccttggcgttgaccgtgtcgatcgttaacgcgattaacttcgtcgacggactcgacggactggccgccgggttggggctcattaccgcgatggcaatctgcatattctcggttggcttgcttcgtgaccatgatggtgacgtgttgttttatccgccggcggtgatttcggtggtacttgcgggatcctgtctgggtttcctgccgcacaactttcaccgggccaagatcttcatgggtgattccgggtcgatgttggtaggcttaatgcttgcggcggcctctacgaccgctgctggaccgatctcgcagaacgcttacggcactcgcgatgtgtttgctctgctgtcaccgttcctgctggtggtggcggtcatgtttgtgcctatgctcgacttgctgctagcgatcgtgcgtcgtattcgcgcgggtcgtagcgcctttagccccgacaagatgcatttgcaccatcggctgctgcagatcggacactcgcatcgtcgtgtggtgctgctgatctacctttgggtgggcatcgtcgcattcggtgcggcaagcacgattttcttcaacccgcgtaacaccggagcggtcatgttgggcgcaattgtgatcactggcatggcgacggtgatcccgctgttgcgccgtcgcgacaactattag

SEQ ID NO: 27631 - DNA, 756 bp, Mycobacterium leprae
atgactgagacaatcctatccggaggtcaaatcgaggtcggcgagcaccacaccaccacctggtttgggatgaccgtcaacaccgatacggtgctctccactgcgatcgcggcggcgatcgtaatcgcgctggctttcttcttgcgtaccaaggtcaactcaacaggtgttccttgtggcatgcagttgttctgggaggcgatcacggtacagatgcgcactcagatcgagagcgctatcggcatgcggattgccccgttcgtgctgccgttggcggtcacgatcttcgtgttcatcctgatctccaactggctctcggtgctgccgctgcaatacaccaacgcagatgggcacaccaccgaggtgctcagttcggcggcggccgacatcaattacgtgctggcgctggcgtttttcgtcttcgtctgctatcacttggcgggtatctggcgtcgcggcattgtcgggcatccggtggcggtgctcaaaggtcacgtggcgttcttggcgccgattaacctggttgaagaaatcacaaagcccatttcgttgtcgcttcgacttttcggcaatatcttcgccggcgggatcctggttaccctgatcgcactgttccctccgtacattatgtgggcgccgaatgcgatctggaagtctttcgacctgttcgtgggcgccattcaggcattcattttctcaattctgaccatcttgtatttcagccaagccatggaggttgaggaccatcatgactaa

SEQ ID NO: 27632 - DNA, 246 bp, Mycobacterium leprae
atggatcccatgatcgctcagggtgcacttatcggtggtggcctgatcatggctggtggtgcaatcggcgccggtatcggtgacggtatggcaggcaatgcgctggtttcgggtattgcccggcaacctgaggcgcaaagccgcttgttcacaccgttcttcatcaccgttggcttggttgaggcagcctacttcatcaacctagcgtttatggcgttgttcgtcttcgccacacccgtcaaataa

SEQ ID NO: 27633 - DNA, 1341 bp, Mycobacterium leprae
atgtcaacattcattggtcagttggttggcttcgctgccatcgtctatttggtgtggtggtatgtagtgccgccggtgtgccgtttgatgagagctcggcgggacgcggtgcgccagcagttgactgaggcggccgaggccgcagatcggctagttgaagcgagccaggcccataccaaggccaccgaagacgccaaggtcgaggcccagcgtgtcgtcaaagaggctgtcgaagacgccaagcgcattgttgagcaattgcaagcccaggccgatgtcgaggcggaacgcatcaagctacagggagctcgccaagtcgaactgctacgggcccagttgacccgtcagcttcgcctgaagtttggccacgaatctgtgcgccaggcagcagaattggtgcgcaatcacgttgccgatgcggtgcagcagtcagccactgttgatcgctttctcgatgacctcgatgccatgactcccaagggcgccgacgttgagtatccgttgttggcgaaaatgcgttcggccagtcggcgggcgctggtcgacttggcggatcggttcggtgccatcgccaagagtctggacaatcaagcgctatatactcttgccggcgaactggtgtcggttgccaaaatgctggaccgcgaaatcgtggtgactcggtatctcaccgtgcccgtcgaggatgaggcgccccgggtcaagttgatcgaccgattggtatccgcccatgtcggcgacccgacgatggagatactgcgggcggccgtatcggagcgttggtcggccaataccgacctggtcgatgccctcgagcacatctcgcgccaagcgctattggaagtcgccgaacgtgaggaccagatcgacgaggtcgaagaccaggtgttccggttttctcgcattctcgacgttgcgccgcgacttgccatcttgttggatgactacgcggtgccagccgacagtcgggttcggttgctgtgcaatgtgctgcagagcgcgagtagcgtggtcaatccgatcgcggtcgccctgttgtcccagacagtcgagttattaagaggtcagccggccaaggaagccatactgtttttggccgaagttgccgtggctcggcgtggtgaagtcgtagcgcaagtcagtgcggcggccgagatcagcgatgcccagcgcacgcggcttaccgaagtgctcagtcgcatctatggccatcccgtgaccgtgcagatgcaaatcgacgctgcactgctgggtgggctctcaatcgtggtgggtgatgaggtgatcgacggtactctctcgtcttgtctggtcgccgctgaggctgcgttgcccgactga

SEQ ID NO: 27634 - DNA, 1677 bp, Mycobacterium leprae
atggccgagttgacaatctccgctgacgacattcagaacgcgatcgaagagtacgtaagctccttcaccgccgacacgttccgcgaggaagtcggtaccgttgtcgacgtcggggacagcatcgcgcacgtcgagggtttgccctccgtgatgacccaggagctgctcgagttccccggtgggatcctgggtgtcgcactcaacctcgacgaacataacgttggcgcggtgatacttggtgacttcgaaaacatcaaagaaggccaaaaggtcaagcgtaccggcgacgttctctcggtccccgtaggggaagcgttcatggggcgggtggtcaatccgcttggtcagccgatcgacgggcgcggagatatcgaggccgaggctcggcgtgcgctggaacttcaggcgccctcggtagtccagcggcaaagcgtgaaagagccgctgcaaactgggatcaaggccatcgacgcgatgactccgatcggtcgcggacagcgtcagttggtcatcggcgaccgcaagactggcaagactgcggtgtgtgttgacaccatcctcaaccagcgccagaactgggagagcggcgatcccaagcggcaggtgcgttgtgtgtacgtggccatcgggcagaaaggtaccaccatcgcttctgtccgccgcgctctggaggagggcggagcgatggactataccaccatcgttgcggcgctggcatcagattccgctggcttcaagtggcttgcgccgtatactggttcggcgatcgctcagcactggatgtacgacggtaagcatgtgctgatcgtcttcgacgaccttaccaagcaggccgaggcataccgcgctatctccttgctgttgcgtcgcccgccgggtcgcgaagcttatcctggtgacgtgttctacttgcactcgcggttgttggagcggtgcgcaaagcttgctgaccacctcggtggcggctcgctgacgggtttgccgatcatcgaaaccaaggccaatgacatttcggcctacatccctaccaatgtcatctcaatcaccgacgggcagtgcttcctagagaccgatctgttcaaccagggggtccggccggccattaacgtcggtgtctcggtgtcccgggtcggcggtgctgcacagatcaaggccatgaaggaagtggccggctcgctgcgtctggacttgtcgcagtatcgtgagctagaggctttcgctgcctttgcctcggacctggatgccacctccaaggcacagttggagcgtggtgcgcggctggtcgaattgctcaaacaaccgcagtaccagcccatgcccgtcgaggagcaagtgatatccctctttttgggtactggcggccacctggactcagtgccggtcggggatgtcaggcggttcgaaaccgagctgctggaccacatccgggttgcacaagaggaaattttgactgagattcgggagagccagaagctcaccgacgaagccgccgattcactcactgaagtcatcaagagcttcaagaagggtttcgcggcgactggtggtgcatcggtggtgcccaacgagcacgtcgcagccctcgatgaggagaagttggacaaggaatcagtgaaagtgcaccaggctattccagcaaagacttcggagaaaagcaaaaatagcacacccaggtaa

SEQ ID NO: 27635 - DNA, 1257 bp, Mycobacterium leprae
gtggcagagcgattcgtggtgaccggcggcaaccggttgtcaggcgaagtcaccgtcggaggtgccaagaacagcgtcctcaagcttatggccgcgactttgttggccgaaggcaccagcacgatcaccaattgccccgacatcctcgatgtgccactgatggcggaggtgctgcggggtctaggcgccactgtcgaactctatggtgacgttgccagaatcacttcgcctgatgaaccgaagtacgatgctgacttcgctgccgtgcggcagttccgggcttcggtctgtgtgctggggccgctggtcggccggtgcaaacaagccagggtcgcgcttccgggcggtgacgctatcggatcgcgtccgctagatatgcatcaggctggtctacggcagctgggagcacgctgcaatatcgagcacggatgcgtggtggcttccgcagaaacattgcgcggcgctgagattcagttggagtttccttcagtgggcgctaccgagaacatcctgatggcagctgttgtggctgagggtgtgaccacaattcacaatgcagcccgggaacccgacgtggttgacctgtgcacgatgttgaaccagatgggtgcacaggtcgaaggcgtgggttcgccgaccatgacgatcaccggcgtcccgcggctctacccgaccgaacaccgcgtcatcggagaccggattgtagccgctacgtggggcattgctgctgccatgacccgcggcgacatagctgtgactggcgttgatcctgctcaccttcagctagtgttgcataagttgcatgacgcgggtgctaccgtaacccagacggacgacagctttcgcgtggcccagtacgagcgcccgaaggccgtcaatgtggcgaccttgccatttcccggttttccgaccgatttgcagccaatggcgatcgctttgacttcgatcgctgatggcacgtcgatgattacggagaatgtgtttgaggcacgattccgctttgtcgaagagatgatccggctgggtgccgatgcccgcacggatgggcaccatgccgttgtgcggggtcttccacaactctcgagcgcgccggtctggtgttcggatatccgtgctggtgccggtttggtactcgcgggacttgtcgctgatggagacaccgaggtctacgacgttttccacatcgatcgcgggtatccattgttcgtggagaacctggcgaatttaggagccgagatcgagcgagtatgcttgtag

SEQ ID NO: 27636 - DNA, 498 bp, Mycobacterium leprae
atgattcattgccgtagcatggacagcccaatcggaccgttgatcctagccgggcacggttcggtcttgacgaatctacagatggtcgatcagacctacgaacccagtcgcgtcggctggctacccgagaacggtgcatttgctgaggccgtcagccaacttgatgcctacttcgccggcgaacttaccgaattcgctattgagttggatctatgtggaacagaattccaacaacgagtctggcaggctctgctgacaattccttatggggaaacccggtcgtacggagagatcgcagaacaggtcggggctcctggcgctgcgcgtgccgtgggattggccaacagcagaaatcccatcgccattattgtgccctgccatcgagtgattggcgcaagcggacaattgatcggctacggcgggggactcaaccggaagcttacactgctcgaattggagaaacaccaggtactgacaagtttgacattattcgactag

SEQ ID NO: 27637 - DNA, 1182 bp, Mycobacterium leprae
atgacgacatcggtgatcgttactggagcacggacacccattggtaagttgatggggtctttgaaggacttttcggctagcgatttgggcgcgatcaccattgccgctgcgctgaagaaagccaatgtagcaccttccattgtgcagtacgtgattataggccaggtgttgaccgcgggggccggtcagatgccggcgcggcaggcggcagtagcggccggcatcggttgggatgtgccggcgctgacgattaacaagatgtgtctgtctggtcttgacgccatcgcactcgctgaccagctcattcgcgccggagaattcgatgtggtggtggctggcggccaagagtccatgacgaaggcaccacatctgctgatggatagccggtcgggttacaagtacggtgacgttaccattgtggaccatttagcctatgacggcctgcacgatgtgttcaccaatcagccgatgggcgcgcttaccgaacagcgcaatgatgtcgaaaaattcacgcgccaagaacaggacgagtttgctgcccggtcgcaccaaaaggcggcagcggcatggaaggacggcgtcttcgccgacgaagtggtgccggtgagtattccgcagagcaaaggtgattcgctgcagttcactgaggatgaggggattcgcgccaacaccagtgccgagtctttggccggtctgaagccggcgtttcgctgcggcggcactattactccaggctctgcgtcgcagatctccgatggtgcagccactgtcgtggtgatgaacaaggaaaaggcgcagcagctggggttgacttggctggtcgagatcggtgcccacggcgttgtagccggcccagattctacgttgcaatcccagccggccaacgcaatcaagaaggcggttgaccgtgaaggtatctccgtcgagcagctcgatgtcgtagagattaacgaggcgttcgcggcggtggcgctggcctcagcccgtgaacttggtatcgcccccgagcttgtcaacgtcaacggcggagcgatcgctgtcggtcaccccctcgggatgtcgggagccagaataacgttgcatgtcgcgctagaattggcgcgtcgcggttcgggttatggtgttgcggctctgtgcggtgccggtggccagggtgatgcgctgattctgcgggccgtttag

SEQ ID NO: 27638 - DNA, 819 bp, Mycobacterium leprae
atgagctcgccgctgttgcccgttggggtctttgactccggcgtcggcggcttgacagtcgcgcgggcgatcatcgaccagctgcctgacgaggatattgtgtatgtgggtgacaccggcaacggcccgtacggaccgctctctatccctgagattcgtgcgcacgcgttggctatctgtgacgacctagtaggccgcggcgtaaagatactggtgattgcatgcaacacggcgtctgcagcgtgcctgcgagacgctcgtgagcgctacgatgtgcccgtagtcgaggtcattttgccggcagtgcgccgcgcggttgccgccacccgcaacggccgcattggggtcatcggcacccgggccaccatagcctcgcacgcgtaccaagatgcgtttgctgctgcccgcgacaccgagatcaccgcggtggcgtgcccacgctttgtcgacttcgtcgagtgcggtgtgaccagcggtcgtcaggtgctcggactggctgaagggtatctggagccgctgcagcgttccggggttgacacgctggtgttgggttgcacacactacccactgctggctggactgattcaactggcgatgggagaaaacgtcacgctggtctccagcgccgaggagaccgccaaggaagtgctgcgggtgcttaccgaaagagacctgttgcgtcgacatgacgcgccgcccgttaaccgggttttcgaagctaccggtgaccccgaagcgttcattcagttggctgcgcgatttctcggtccagcggtgagtggtgttcaacctgcgcgacttcattctcgtgtccgttag

SEQ ID NO: 27639 - DNA, 663 bp, Mycobacterium leprae
gtgggggtatctcccagccgtgaagcggcgagaggggtggcgcttgtgaccaagctattggtcgctagccgtaactggaagaagctggcagaattgcgccgtgtgctcgacaatgccgggttgtcggggttgacgctggtatcgctgaacgacgtggtgccgttcgatgaggccccggaagccggcgccactttcgaggacaacgcgttggccaaggcacgcgatgcgtttgcagccacgggtttggcgagtgtggccgacgactcgggtttggaggcggctgcgctgggtggcatgccaggggtgctgtcagcgcgttggtcgggtagttacggcgacgacgccggcaacaccgcgctattgctggctcaattgtgtgatgtgcctgacgagcggcgcagcgcggcattcgtgtcggcctgtgcgctggtctcggagtccgacgaagtcgtcgtccgaggggtgtggccgggcacgattgccagggagccgcgcggttacggtgggtttggctatgattcgatcttcattcctgacggtcctggcctgggaggccgcacagtggctcaattaaggccggcggaaaaggatgcgttctcgcatcgcttccgtgcgttaacgttgctgatgcctgcgctgcgtgttcttgccatgcgaacgtga

SEQ ID NO: 27640 - DNA, 381 bp, Mycobacterium leprae
gtgtccactacacgtcgtcggaggcccgcactagttgctttggtgaccattgcggcctgtggctgcctggccctgggctggtggcagtggaccaggtttcagtcagcctcgggaactttccagaatctgggctacgctttacagtggccgctgttcgccggattctgcctttacacataccacaacttcgtgcgctacgaagagtcacccccacagccacggcacatgaactgcatagccgaaattccacccgaactgctgcccgctcgccccaagcccgagcagcagccacccgatgaccccgccctccggaagtacaacacctacctggccgagctggcaaagcaagacgccgaaaaccataacaggaccaccacatga

SEQ ID NO: 27641 - DNA, 393 bp, Mycobacterium leprae
gtgggcattgtcggcgtgggaatcgacctcgtctccatccctgatttcgccgagcaggtcagccaaccgggaacggtgttcatgactatcttcactcctggtgagcgtcgcgatgcctcggtcaagagttcgtcggcggtgtgtcacctggcggcgcgttgggctgtgaaggaagcggtgatcaaggcgtggtcaggatcgcggttcgcccagcgaccgatgctgccagagaacatccaccgcgatatcgaggtagtcaacgacatgtggggccgtccgcgggtccggctcaccggagccatcgctaagcatctgacggatgtgacgatccatgtgtcgctgacgcacgaaggggatatcgcggcggcagtggtgatcttggaggttctgtga

SEQ ID NO: 27642 - DNA, 3180 bp, Mycobacterium leprae
atgactaacagcgcctacccgcgcactgatctgggcgccgaccagcgcggcgggtccccaaattttcctgcgctggaagcccaggtcctcgattattggtccaacgacgatacttttcgggccagcattgcccgttgtgacgacgcccccgagtacgtgttctatgacggacctcccttcgctaatggcctgccacattatgggcatctgctcaccggctatgtgaaggacatcgttccgcgttaccgcaccatgtgtggctataaagtagagcgccgctttggttgggacacgcacgggctgcctgctgaactcgaagtcgagcggcagctgggtatcaccgacaaatcccagatcgacgccatgggaattgccgcgttcaacgaagcatgtcgcaaatcggtgttgcgctacacggaagaatggcaggcgtatgtaacccgccaggcacgctgggtcgacttcgataacgattacaagacactcgatctgtcttacatggagtctgtgatctgggcgtttaaacagctgtgggacaagggtttggcttacgagagctatcgggtgttgccgtactgctggcgcgacgaaaccccgctatccaaccacgaactgcggatggacgacgacgtctatcaaagccgccaggatccggcggtcacgctgggcttcaaggtgctggggggtgacgatgaggacctagttggtgcttatcttttggtgtggacgacgacgccctggactttaccgtcgaacctggccgttgccgtccatccggatgtaacctatgtcgatgtcagggcaggcgatcgccgtttcgttttggcacaggcgcgtctgaccgcctatgctcgagagctaggcgacgaacctgaggtgcttgccacctatcgtggcgccgatctgctgggcaggcactatctgccgccgttccagtatttctacgagtctgctagaaatgcatttcaggtgctcccaggagacttcgtgactactgatgacggcactggtatcgtccatatcgcgcctgcctacggcgaagatgatatggcgaccgccgataaggttggcatcgttccggtcacgccggttgactctaacggttgttttgacgccaccgtgcccgattaccaggggcaacacgtctttgaggccaacgcccagatcatccgcgatctgaagaaccagagtggctcggcggcggtgaacggcgcggtgttgcttcgtcacgaaacctatgagcacccatacccgcattgctggcgatgtcgcaatccgctgatctaccgtgcggtgtcgtcatggtttgtcgctgtgacggaattccgggaccgcatggtggaactgaaccaacagatcacctggtatcctgagcacgtcaaggacggtcagtttggtaagtggttgcagggtgcccgcgattggtctatctcacgaaaccgctactggggcaccccaatcccagtgtggaaatcggatgatcccgattacccaagaatcgatgtatacggcagcttggatgagctggagcgcgatttcggggtgcgtcccacgaatctacatcgcccctacatcgacgagctcacccgacccaaccctgacgatcccaccggccttagcaccatgcgacggatcccggatgtttttgatgtgtggttcgactcgggttctatgccatatgctcaggtgcactacccgtttgaaaacgatgactggttcgacgggttcgattccgctgattctgacaagcaggtcgacgcgcactatcctggcgatttcatcgtcgagtacatcggtcaggcccgcggttggttctacacgctacatgtgctggccactgcactctttgatcgtccggcattcaaaacctgtatagcgcatggggttgtgctggggtctaacggtcagaagatgagcaagtcgttgcgcaactacccagacgttactgagatatttgaccgcgacggttccgatgccatgcggtggtttttgatggcctcgccgatcctgcgtggcggcaacctcatcataactgaacccggaatccgcgaaggcatgcggcaggtgctgctgccgttgtggaacgcttacagttttttggccctttacgcacccaaaatcggtacctggcatacggatgtgtcgcatgtgttggaccgttatattctggcgaagctggcggtactgcgtgatgatctcagtcaggcgatggaggtctgtgatatctctggggcctgcgaacagcttcgccaattcaccgagccgctaacgaattggtatttgcgacggtcgcgtgcgcggttctgggacgaagatgttgatgctatcgataccctgcacaccgtgctggaagtgaccgccaggttggctgcaccacttctcccgttgatcaccgagattatttggcgcagtgtcactggtgggcgttcggtacacctgaccgattggccgcaagccaaccagctacccgccgaccctgacctggttgctgtgatggatcaggtccgacaagtgtgttccgcagcgtcatcgctgcgcaaggctaagaagcttcgggtacgccttcctctaccgaaactcgttgtagcagtgtataattcacagagactaaagccctacattgacttaatcggcgatgagcttaacgtcaagcagatagaactgaccgatgctattgacacctacggccgatttgagttcaccgtcaacgctcgagtggccgggccgcgattgggaagggatgtgcaggctgccatcaaggtggtaaaggcgggagaaggggtcgccaacccggatggcaccctgaccgccgggcccgttgtgctgcaacctgacgagtacagttcgcggttggtggccgctaacccggaatttaccgcggagctgcccgacgggtccggtcttgttgtgttggacgatacggtgactcccgaactggaggccgagggctgggccaaggatcggatccgcgaactacaggagttgcgtaagttgatcgggctggatgtttccgatcgtatccgggtgttgatgtcggtgccggccgagcgggctgactgggcgcgcgtccatcgcgacttcatcgctagggaaatcctggccaccagcttcgagtttggcgagccggctgattcggtggctatcggagatggcgtccgagtcagccttttaaaggtctaa

SEQ ID NO: 27643 - DNA, 3534 bp, Mycobacterium leprae
atgaaccagtcttccttcgttcacctgcataaccacaccgagtactcgatgctggacggtgctgcgaagatcacgcccatgttcgccgaggtcgaacggctacagatgcccgcggttggcatgaccgatcacggaaacatgttcggtgcgagcgagttttacaatacggccatcaaagccggaatcaagccgattatcggtgtggaagcttacatcgctcctggatcccgttttgacacccggcgcattacctggggtgaccccagccagaaggctgacgatgtctcggcgggtggtgcttacacgcacttgacgatggtggcagagaatgcggcaggtctgcgcaacctgttcaagttgtcttcgctggcttcgttcgaggggcagttgagcaagtggtcgcgaatggatgccgagcttatcggtgaatatgccgagggtatcattgtaactactggctgcccctccggtgaggtgcagacccggcttcgcctcgggcacgaccgggaggcgttggaatcggccgccaagtggcgcgagatcgttggccccgataactactttctcgagctgatggaccacggcttgtctatcgagcaacgtgtccgcgaaggactgcttaatatcggccgcaagctcaacattcctccactggccaccaacgactgccactatgtcacccgcgacgctgtgcacaaccacgaggcgttgttgtgtgtacagaccggcaagaccttgtcggatccgaaccggttcaagttccacggtgacggctattatctcaagtcggctgccgagatgcgccagctttgggacgacgaagttcctggggcctgcgactccacgctgctgatcgccgagcgggtgcagtcctacgccgatgtgtgggaaccgcgcaatcggatgcctgtcttccctgttcccgtgggacacgaccaggcgtcttggctacgtcacgaggtggatgccggcctcaagcgccgattccccgatggcccacccaacggatatgtcgaacgggcggcctacgagatcgacgtcatttgtgacaagggttttcctgcctactttctgatcgttgcagacctggtcaaccatgcccggtctgtcgggatccgcgtgggcccgggccgcggttcggcagccgggtcgcttgccgcctatgccctggggatcactgacatcgacccgataccgcacggtctgctgttcgagcggtttctcaacccggaacgcacctcgatgcctgacattgatatcgacttcgacgaccgtcgccgcggtgagatggtgcgctacgccgccgacaagtgggggcatgacagagtcgctcaggtcatcactttcggtaccattaaaaccaaagcggcgctgaaggattctgcgcggatccactacgggcaacctggttttgctatggccgaccgtatcaccaaggcattaccgccggccataatggccaaagacatcccgttgtcgggaatcaccgatccggcccacgaacggttcaaggaagccgccgaggtccgcagcctgatcgaaactgattcggacgtgcgcatcatctaccagactgctcgcgggctggagggtctgatccgcaacgccggcgtgcacgcatgcgcggtgatcctgagtagtgagccgttgaccgaggcgatcccgctgtggaagcgaccgcaggacggggccatcatcaccggctgggactacccagcatgcgaggccatcggtctgttgaagatggacttcctgggtctacgtaacctgacgatcatcggcgatgcgatcgaaaacattaagaccaacaggggaattgatctcgatctggaatccgtgccactggacgaccaggccacctacgagctgcttggccgcggtgacaccctgggtgtgtttcagctcgacggtgggcccatgcgcgacctactgcgtcgcatgcaaccgaccggattcgaagacatcgtcgcggtactagcgttgtatcggcccggaccgatgggcatgaacgcgcacaacgactacgccgaccgcaagaacaaccggcaggtaatcaaacccattcatcccgaactcgaggaaccgctgcgtgagatcctcgctgaaacctatggactcatcgtctaccaagagcagatcatgcgaatcgcgcagaaggtggccggttactctttggcccgagcggacattctgcgtaaggcgatgggaaaaaagaagcgcgaggtgctggagaaggagttcgagggtttttcggaaggtatgcaggccaacggattctcggtccacgccatcaaggcgttgtgggacatcatcttacctttcgccgactacgcattcaacaagtctcacgccgctggctatggcctaatatcctattggaccgcctatctcaaggccaactttgctggtgaatacatggcgggcctgttgacttcggtcggcgacgataaagacaaggcagctgtctatctggccgactgccgcaagtttggcatcacggtgctgccgccggacgtcaacgagtccgtcctggacttcgcctcggtgggtgctgacatccgctacgggttgggcgcggtgcgcaatgtcggtgccaacgtggtaggttcgttgatcaagactcgcaatgccaagggcaaatttgctgacttctcggactatctgaacaagatcgacattacgtcctgcaacaagaaagtcactgaatcgctgatcaaggcaggagccttcgattcgttagggcattctcgcaaaggtcttttcctggtccacgctgacgctgtggattcggtgctaggcaccaagaaagcggaagcgatcgggcagttcgatctgttcggcggaactgatggcggcactgacgcggtatttaccatcaaagttcctgacgacgaatgggaggataaacacaagctggctctggaacgggagatgctgggcttgtatgtgtccgggcatccgctcaacggagtggcacacctgttggctgctcaggtagacaccgccattccgacgattctcgacggtggtgtctccaatgatactcaggtgcgggtgggtggcattctggccgcggtgaaccggcgcgtcaacaaaaacggaattccttgggcgtcagcgcaattagatgatttgactggagggatcgaggtgatgttcttcccgcacacatattccagctacggcgccgacatcatcgatgatgctgttgtgttggttaatgccaaggtggtggttcgtgatgaccggattgcgctgatcgctaatcaacttgttgttcctgacttttccaacgtgcaagaggaccggccgctggcggttagtttgctgactcggcagtgcacgttcgacaaggtaaatgcactcaagcaagtgctggcgcgccaccccggcacatcgcaagtccatttgcggcttatcagcggggaccgaatcactacgcttgaactagaccagtcgctgcgggtgacatcgtcgccggcgttgatgggagaccttaaggcgctgctcggtcccgggtgtttgggtgattag

SEQ ID NO: 27644 - DNA, 1311 bp, Mycobacterium leprae
atgtctggggcgacttccgggttgacgcctgagcagatcggcgcgatcgatgccgcccatctgtggcatccctacagcaccattggtgctgctaccggcgttataccacctgtggtcgcggtcgccgctcacggcgcatggctgacgctgatccgcgacggcaagccgatcgaggcgctcgacgcgatgagctcttggtggaccgcgatccatggtcacggccactcagtgttggacgcggcgctgactacccaactgggtgcgatgaatcacgtcatgtttggcggattgactcacgaacctgcggcccggttggcgcagttgctggtggacatcaccccggcgggtttggagacggtcttcttcagcgactccgggtcggtttcagtgcaggtcgcggtgaagatggcgttgcagtactggcgcagccgcggtcagccggctaagcggcggctgatgacctggcgtggtggctaccatggggacaccttgacgccgatgagtatctgcgaccccgatggcggcatgcactcgctgtggactgacattttggcgcggcaggtgtttgccccgcaggtgccccgcgactacgaccctgcctacagtaaggcctttgagacgcagctggcgcagcacacccccgaacttgcggctgtggtcgtcgagccggtagtgcagggcgccggtgggatgcgtttccacgacccacggtatttgtgtgatgtgcgcgacatatgccggcggcacgacgtgttgttgattttcgacgagatcgcgactggcttcgggcgtaccggtgagcttttcgccgcagaccactgcggggtgagcccggacatcatgtgtgtcggcaaagccctcaccggcggatacctgagcttggccgccaccttgtgcacaaccgatatcgcacacgccataagcgtcggtgcggccggcgcgctgatgcatggacccacgttcatggccaatcctctggcctgtgccgtgtcggtggccagcgtcgaggtgcttctgggccaggactggaggtcccgcgttgccgaaatatcggctggcctaacagctgggctcgaagctgcccagggtttacccggtgtgatcgatgtgcgtgtgtgcggtgctatcggcgttatcgaatgcgaccggtcggtcgacctggccgttgccaccccggcggcgttggaccgacgtgtttggctgcgtccgttccggaatctggtttatgcaatgccgccatatatttgcccgccggccgagatcgcccagatcacctccgcgatggtcgaagtcgcgggactcgtaggctga

SEQ ID NO: 27645 - DNA, 1158 bp, Mycobacterium leprae
atgaaggtcccgatcgagacgtcaccgctggcctggctggaagcagtggagcaacagcgccgcggggccgggctgcgccgttcgctgcggccgcgctcagccgttgccaccgagctggatctggcctccaacgactatctcggtctctcccaacatcccgacgtcatcgacggcggcgttgcggcgttgcgggtttggggtgcaggtgccaccggatcccgcctggtcaccggcgataccatactgcaccacgaattggaatgcgagctagctgaatttgtcggcgcctgtgtcggcctactgttttcttccggttatgccgccaacctcggggctgttgtcggtttgtccggcccgggttcgctgatcgtctccgatgcctattcgcacgcgtccctggtggatgcttgccggctgtcgcgggcgcgggtggtggtgacaccgcactgtgacgttgacgccgtggacaccgcgctgaggtcatgccacgaggagcgtgcggttgttgtcactgagtcggtgttcagcgctgatggtgtgctggcccctgtttcggagttgcacgatgtatgccgtcggcacggcgcgttgctcctcgtagacgaggcgcacggcctcggtgtgcgtggtggtgggcgcgggctggtatacgaggtcgggctggcgggtgcacctgacgtggtgattacgactaccatgtccaaggcgctcggcagccagggtggtgcggttctcgggtcgtccgcggtgcgtgctcacctgatcaataccgcccgtccgttcatcttcgacactggtttggcgcctgcggcggtaggtgccgcgcgggccgcgctgcaaatactgaaggccgagacgtggcgcccagaggcggtgttgcagcacgcccgaaccttggctaagatctgcgatctgtccgagctgccgcagtcggcggtggtctcagtagtgttgggcgatccggaggtagcgttggccgccgcgatcgcctgcctggacgccggcgtgcgggtgggctgcttccggcctccgactgtgccggccgggacgtcgcggctgcggttgactgcgcacgcgtctctcgatagcgctaagttggaagtggcccggcgggtgttgacggacgttcttggtggctgttgtgtggcgcgccgttga

SEQ ID NO: 27646 - DNA, 1038 bp, Mycobacterium leprae
gtgactcaggcggggactcggtcaactaatggtgataccgaaaatactgacatcttggctcaggctcgccagcaggtgctagagcgcggtgagggcttgagccgggaccaggtgctgcagatgctgtggctacccgacgaccgactcgaggaattgctggcgttagcccacgacgtgcggatgcgctggtgcggtccagaggtcgagatcgagggcatcatcagtctgaaaaccggtggctgcccagaggattgccatttctgctcacagtctgggttgttcatgtcgccggtgcgcagtgcctggctggatatccgcagcctggtagaggcagccaagcagactgccaagtcaggtgccactgaattctgcatcgtggcagcggtacgagggcccgatgagcggttgatgtcccaggtagcggccggcattgaggcgattcggaacgaagtcgagattaatattgcttgctcgctggggatgctgaccgtcgagcaggtggagcagctctcgggcattggcgtgcaccgctataaccacaacctcgaaacagcccgctcgtttttcaccaacgttgtcaccacgcacacctgggaagagcgctggcaaacgttatcgatggttcgggacgccggcatggaggtatgctgtggcggcattctcggcatgggggagacagtcgagcagcgcgcagaatttgctcttgaactcgccgaactcggccctgatgaggttcctttgaattttctcaacccgaggcccggtactccctttggtgcccttgaggtgatgccgcccagcgaagcattaaaatcggtggctgcattccgattggcgttgccgcgcacgatcctgcgcttcgccggcggccgcgagatcaccctgggtgacctgggcgccaagcagggcatgctgggcggcatcaacgcagtgatcgtggggaactacttgaccacgttgggtcggcccgccgaagccgatttgagattgcttgacgatctacaaatgcctatcaaggcactcaatgccagcctatag

SEQ ID NO: 27647 - DNA, 720 bp, Mycobacterium leprae
atggcctatgctagcaccgcacacgaagtgctagctgtcgtgttccaggttcgccgagttgccgagcaggtgaagggaaccccgcaaaaggcaaaaccgcaacttagcgtgctgttatgggaacgttcccaggatccgcaacgaggcgcatggtcgctgccgggcggacggctgcgcaatgacgaggacatgacctattcggttaggcgccaattggccgaaaaagtcgatcttcgggagctcgcacatttggagcagctcgccgtgttctccgaacctgcccgactaccgggcactcggatgatcgcgtccacctttctgggattagttccctcccccgccacccccgagttgccgccagacacccgctggcacccgctgaacacgctgccatcgatggccttcgatcacggcccgatggttacgcacgcacgcgccagactggtcgccaaaatgtcctacacaaacatcggattcgctctggctccaaaggaattcgcgttatcaacgctgcgtgacatctacggcgcgacgctagggtatcaggtcgacgcaacgaatctgcaacgggtactggcccgtcgcagcgtcatcatccagactggaaccgtagcgcagtcgggccgtagcggcggacgcccggccgcgttgtatcgattcaccgactcacagttaagggttactgacgaatttgccgcgctgcggccgcccgggaattaa

SEQ ID NO: 27648 - DNA, 1671 bp, Mycobacterium leprae
atggctgagttcatctacacgatgaaaaaggttcgtaaggcgcacggcgacaaggtaatccttgacgacgttacgctgaacttcttccctggagccaagatcggtgtcgtcggcccgaatggtgccggtaagtcgagcgtcttgcggatcatggccggtatggacaagccgaacaacggtgacgcgttcctggctaccggcgctagtgtcggcattctgcaacaggaaccgccgttgaacgaggagaagacggttcgtggcaatgtggaagagggcttgggcgacatcaagatcaagcttgaccgcttcagtgaggtcgccgaattgatggccaccgactcctccagcgagttaatggaagagatgggccggctgcaagaggaactggaccacgccgacgcgtgggaccttgactcgcaactggagcaggccatggacgtgctgcgctgcccaccgcccgacgaaccggtgacaaacctgtccggtggtgagcggcgtcgtgtggcgctgtgcaagctattgctgtccaaacctgacttgttgctgctcgacgagccgaccaaccatctagacgccgaaagcgtgcagtggctcgaacagcatcttgctggttacgctggtgcggttttggcggtcacccacgaccgctacttcctggacaacgttgccgaatggatcctggaactggaccgtggccgcgcatatccctatgaaggtaactactctacttaccttgagaaaaaggctgagcgactgactacacagggtcgcaaggacgccaagctacagaagcgattgactgacgagctggcctgggtgaggtccggagctaaagcacgtcaagccaaaagcaaggcgcgtttgcagcgctacgaggaaatggctgccgaagctgaaaagaatcgtaaattcgatttcgaagaaattcaaatcccagtcggaccacgcctgggcaacatggtggtcgaggtcgaacacctcgacaaaggttacggcggacgcaccctaatcaaggacttatccttcacgttgccccgtaacggcattgtcggcatcatcggccccaacggggttggcaagaccacactttttaaaaccatcgtggggctcgagcagccggacggcggtgctgtcaagattggcgaaaccgtcaagctgagctacgtggatcagacccgcgcgggtatcgatccgaagaagatcgtgtgggaagtggtctcagatgggttggaccacattcaggtcggccaaaccgaggtctcgtcgcgggcctatgtttcggcgttcggattcaagggtcccgatcaacagaagctggccggggtgctctccggtggtgagcgaaaccggctgaaccttgcgctgacgcttaagcagggcggcaatctcatcctgcttgatgagccgaccaacgacctcgatgtcgagaccttgggttcgctggagaacgcgttggtgaatttccccggttgtgcggtggtgatttcgcacgatcgctggttcctcgatcgcacgtgcacgcacatcttggcatgggaaggcgacgacgaggggaagtggttctggttcgagggaaacttcggtgcctatgaggaaaacaaggtggaacggctcggtgctgaagctgcgcgtccgcacagggtgactcaccgtaagttgacgcgcgactaa

SEQ ID NO: 27649 - DNA, 4869 bp, Mycobacterium leprae
atgaccatcgatcccggagctacgcatgttgccgagctgtgtaccacattcacgcagggtgcggacgtacccgactggatctcgaaggcgtacatcgacagctatcgcggttcgcacggcgacgtacgcgaagcccccgaaaccagtcgagtcaatcctaacgccttggtgacgccggccatgctcagcgcacactatcgtctaggtcagtgccgaccgaacggtaggaactgtgtccgcgtctatccggcagatgaccccgcagggttcgggcccgcgctgcagatcgtcaccgaccatggcggcatggtgatggattctattaccgtgcttctgcaccggctcggggttacatacacggccatgatgaccccagtgttcatggtgcttcgcagcccgacgggggagttgctcggcgtcgaacctcgagcttctagtacgtcgcactccatcgaagggacttgggtcggtgaggtctggatatatatccagctcttgcctgctgtcgatagtaaatccctagccgaggttgaacagctgctgccccggaccctggttgacgttcagcgggttgccgctgacgcagcagcattgaacgccaccttgagcggtctggccgcagacgtcaaaacgaacaaagaaggccacttttcggcttctgaccgcgatgatgtcgcggcgttgttgcactggctgggtaacgggaattttctgcttttgggttaccagcgctgccgggtgcattatggtctggtctcctgcgacaggtcaaccggtctcggcgtgctgcgtgcacgcacaggctcccggccccggctgaccgacgataacgaattgcttgtcctagcgcaagctgctgtcggcaactatctgcgctacggggcgtacccgtatgccatcgcggtccgtgaatacgacgatggtggggacggaggtattattgaacaccgcttcgtcgggcttttcacggttgctgctatgaacgcagatgtactggagattccgtcgatctcacaccgggttcgtgcggcgcttgcgatggccaacagcgaccccatttatccgggccagctattacttgacgtcatccagaccgtcccgcgttcggagcttttcacgctgagcgctgaacggcttttcacgatggccaaagaggtggtagatctaggatctgggcggcgtgcgttgttgttcctgcgcgctgatcggctgcagtacttcgtctcctgcttggtttatgtacctcgcgatcgctacaccacaggtgtgcggttgcaaatcgaggatatcctcgttcgcgagttcggtggtacgcaagtggaatttactgcacgagttagtgaatcaccttgggcgttaatgcattttatggtccgtctgtccgaaggtgctgcgacgggctcagtcgacgtctcggaaggcaatcggatccggatccaggcgatgttgagtgaagctgcacggacatggtctgaccggctaatcgcagccgcggcttcattctctgagggttccgtctcgtatgctgaagccgagcattacgcggcgaccttctccgaaacctacaaacaagctgtcactccggccgatgcgattgaccacatagccatcatcaaagagttggccgatgattcagttaagttggtgttcttcgagcggaaagcggatgggttcgcccagctgacttggttcttgggtgggcgcagtgcctccctgagccagctgctccccatgctgcaaagcatgggcgttgttgtgcttgaggagcgaccgtttaccgtcgcccgaaccgatggcttgccggtatggatctatcagttcaagatctcgccgcatccgacaattccgctggcgtcgacagcgaatgagcgggagcttaccgcaaaacgattctccgatgcagttaccgccatctggcagggccgcgtcgagatcgaccggttcaacgagttagtgatgcgtgcaaggctgacctggcagcaggtcgtgctactgcgtgcttacgcgaagtacttacggcaggcgggtttcaactatagtcagtcctacatcgaatcggtgctcaatgagcacccttccaccgctcgatcactggtcgcattgttcgaagcgctattcgatcccagcccgttgagttcgtcaacgaactgtgatgcgcaagcggccgctgcagctgtcgctgcggacatcgatgccttggtgagtttggacaccgaccgcattcttcgtgcctttgcatctctggttcaggccaccctaagaaccaattactttgtgacacaaaaattttctgctcgcagcaaaggtgtacttgtcctcaaactcgatgcacagctgatcaacgagttgccgctgccgcggcccaagttcgagatcttcgtgtattcgcctcgtgtcgagggcgtgcacctgaggttcggtgcggtggcgcgtggtgggctgcgttggtccgaccgactggatgatttccgcacagaaattctgggtctggttaaggcacaggcggtcaagaacgccgttatcgtgccggtcggcgccaagggcgggttcgtgctcaagcggccgcccctgcccaccggcgacgccgctgccgaccgcgacgctatgagagccgaaggtatcgcctgctaccagctgtttatttctggtctgctcgacattactgacaacgtcgaccacgcgaccggaaaagttaacgcgccgccccaggtggtgcgacgtgacagcgacgacgcctacttggtggtggccgcggacaaaggcactgccacgttttccgacatcgccaacgatgtcgccaagtcctacggattctggctgggcgacgccttcgcctccggtggatcggtgggctatgaccacaaggccatgggcattactgccaaaggcgcgtgggaagccgtcaaacgacacttccgggagatgggggtggacactcaaaatgaggacttcaccgttgtgggtatcggcgatatgagcggcgacgtgttcggtaacggcatgctgcttagcaagcacatcaggctgatcgctgctttcgatcatcggcatgttttccttgacccggaccctgatgccgcggtttcctgggctgaacggcagcggatgtttgatctgccgcgatccagctgggacgactacaacaagtcgttgatcagcgagggtggcggtgtgtatagtcgcgagcagaaagccatcccgaccagtccgcaggtccgcactgccctgggcatcgatggcgaagtaaccgaaatggcaccgcccaacttgatccgggcaattctgcaagcaccggtggatttgctgtttaacggcggcattggcacctacatcaaggctgaaactgagtccgttgccgacgtcggcgatcgcgcgaacgatccggtgcgagtcaacgcaaatcaggtacgcgccaaggttatcggcgaaggtggaaacctcggggttaccgcgttgggccgcgtcgagttcgatctgtccggtggacggatcaataccgacgcgatggacaactctgccggcgtggactgttccgaccatgaggttaacatcaagatcctgatcgactcactggtcaccgctggcaaggtgaaagtcgaggagcgtaaacacctgttggagtcgatgaccgacgaagtcgcacgtttggtacttaccgacaacgaggaccagaatgacttgatcggcaccagtcgcgccaacgcagccaacatgctctcagtgcacgcgatgcagatcaaatacctggtggacgaacgcggagtcaaccgcgaattggaagcgctgccttcagagaaggagattcaaaggcggtccgaggccggcatcggccttacctcgcccgagctctcgacgctgatggcacacgtcaagctggcacttaaagagcagatgttggccaccgaactgccggaccaggatgtcttcgtgtcgaggttgccacgatacttccccaagccgctgcgcgagcgtttcaccccggaaatccgctcgcaccagctgcgccgagaaatcgtcaccaccatgctgatcaacgatctggtagacaccgccggcatcagctacgctttccggatcgccgaggatatcggggtcgggccgattgatgcgatacgtacctatgtcgccaccgacgccatctttggtgtgggtgatgtattgcggcgtattcgtgcggcaaatttgtcggtcgtgctgtcggatcgaatgacgttggatacccgtcggctgatcgaccgcgccggacgatggctacttaactatcgtccgcaaccgttagccgtcggcgccgagatcaaccgatttgccgcgaaggttaaggcgctaacgccgcggatgtcagagtggttgcgcggtgacgaccaggccatcgtcgaacagcaagccacagaattcgtgtcgcagggtgctcccgaagacttggcctaccgggttgcggttgggctatatcgctacagtctgcttgacatcattgacatcgccgacatcaccgagctcgacccggccgaggtcgcagacacttatttctccctgatggaccggctgggcaccgatggattgctcacggcggtgtccaaactaccccaaaatgaccgctggcattctttggcgcgtttggcgattcgtgacgacatctatgcttccctgcgatcgttgtgtttcgatgtgcttgccgttggagagcctgatgaaagcggtgaagagaagatcgccgagtgggagcacatcagcgcttcccgggtggaaagggcacgtttaatgcttgccgagatccacgctagcggtgagaaggatctcgcgacgttgtcggttgcggcacgtcagatccgccgcatgacccgcaccagtggacgtgggtcgtcggggtga

SEQ ID NO: 27650 - DNA, 387 bp, Mycobacterium leprae
gtgcagcaatctttctacgacgctatcggcggggccgagaccttcaaagcgattgtgtcacgcttttatgcgcaggttcctgaagatgagatactgcgtgagttgtatcccgcagacgacctggccggcgccgaagaacgattgcgcatgttcctcgagcaatactggggtggtccgcgaacatactccagtcaacgcggccatccgcggttgcgtatgcgtcacgctcctttccggatcactgccatcgagcgcgacgcttggctgcggtgcatgcacaccgccgtcgcctccatcgactcgcataccctcgacaacgagcatcgacgggagttgctcgactatttggagatggccgcacactccctcgtgaactccgcgtcttga

SEQ ID NO: 27651 - DNA, 819 bp, Mycobacterium leprae
atgtgtccggcaactgtgcttgactccattctaaagggagtccgggccgacgttgccgcacgcgaagcctgcatcagcctgtccgaaatcaaagccgccgccgcggccgcaccagcaccgctggacgctatggccgctttacgtgagcccggtattggtgttatcgccgaggtcaagcgcgccagtccatcggtgggctcattggccaccatcgctgatccggcaaagctggcccaggcctacgaggacggcggtgctcggatcatcagcgttttgaccgaggaacgtcgctttaacggttcactcgacgatctcgatgcagtgcgcgccgcggtttcagtaccggtgttgcgcaaagactttgtggtgcagccatatcagatccatgaggcgcgcgcgcacggtgccgatatgttgttgttgatcgttgctgcgttggaccaatcggcgttgatgtctatgctggaccgcaccgaatcacttggtatgattgctctcgttgaagtccgcacggaacaggaagcggaccgggccctaaaggcaggggccaaggtgataggtgtaaacgctcgcgatttaatgacgttggaagtggaccgggattgcttctcgcgaattgctcctgggttgccgagtaacgtgatcaggatcgccgaatccggtgtacgtggccccgcggatctgttggcttacgctggtgcgggagcggacgccgtgttggtcggcgaaggcctggtgaaaagtggtgacccgcgggcagcggttgccgatctggtcaccgcgggtacccacccgtcatgcccaaaaccggctcgctag

SEQ ID NO: 27652 - DNA, 1254 bp, Mycobacterium leprae
gtgatgccgaatctatcctgttttagcgtggccatctccgaacccacttgccacgaccccgattcgggtgggcattttggtggccccgatggttatggtggtcgctacgtccccgaagcgctgatggcggtgatcgaggaggtcaccgccgcttacgagaaggaacgcgttaatcaggacttcctggacctgctggacaagttgcaagcaaactacgctggccggccgtcgccgctatatgaagctactcggcttagcgaatacgctggctcggtgcgcatctttctcaagcgggaagacttgaaccacactggttctcacaagatcaacaatgtccttggtcagacattgctggcccagcgaatgggcaagacgcgagtgattgctgagacgggtgccggtcagcatggagtggccacagcgacggcgtgtgcgctgttcggcctggattgtgtgatctacatgggtgcccttgacactgctaggcaggcactcaacgtggcgcggatgcggttgctgggtgccgaggtcgtatcggtcgagactggctcgcgaacgctcaaggacgccatcaacgacgcgttccgggattgggttactaatgcagataacacttactactgcttcgggactgcttcgggaccgcatccttttccgactatggtgcgtgacttacagcgcgtcatcggtctcgagacacgtcggcaaatccagtatcaggcgggcaggctaccggacgcggttacggcgtgcatcggcggagggtccaacgctatcgggatcttccacgcgttcctcgatgatccgggtgtacggctggtcgggttcgaggcagctggcgatggcgtcgagactggcaggcatgcagcgacattgaccggcggcttgcccggagcgttccagggaacgttctcctacttgctgcaggacgaggacggtcagaccatcgagtcccattcaatcgcagcaggtctggactatccgggggttggccccgaacacgcgtggctcagggaaaccggacgcgccgaataccagcccattactgattctgaggcgatagaggcgtttcgtttactgtgtcgcaccgaaggtattttaccggccctcgagtccgcgcatgctgtagccggtgccctcaagttggcttctgaaataggcaagggtgcggtcatagtggtgaacctttcgggtcgcggcgataaggatatcgaggcagctgctaagtggttcggcctgctgggtaccagatga

SEQ ID NO: 27653 - DNA, 1419 bp, Mycobacterium leprae
gtgacgagacgcgggaagatcgtctgtacccttggccctgcaacacaatcggacgagttaatccgggcgctggttgaagccggaatggacgttgcccgcatgaacttcagtcacggcgattactccgatcacaaggctgtttacgatcgggtgcgcgtcgcatctgatgcaaccggacgcgcggtcggcgtgctcgctgacctgcagggcccaaagatcaggctgggacgctttgccacggggtccacctactgggctgacggtgaaacggtaaggatcactgtggccgactgccacggtagccacgaccgggtatcaaccacctacaagaatttggccagggatgcggtggtcggtgaccgggttctggtcgacgacggcaaggtcggactggtggtctcggccatcgatggcgacgacgtggtctgtactgtcactgaaggcggcccggttagcaacaacaagggcatgtcgttgcccgggatgcacgtgtctgctccggctttgtcggacaaggacatcgaggacctcacgttcgcgctgaatctcggcgccgatctggtcgcgctgtcgtttgtgcgctcgccgtctgacgttgagctggtccacaaggcgatggatcgcgtcgggcggcgtgtaccggtgatcgccaagctggagaagccagaagccgtcgataacctcgaagctattgtgttggcattcgatgccatcatggtggctcgcggcgacctgggtgtcgagctgccacttgaagaggtcccactggtgcagaagcgggcaatccagatggcaagggagaatgcgaaacccgtcatcgtggctacccagatgctagactcgatgatcgaaaactcccggccgacccgagctgaggcctccgacgtcgctaatgcggtgctcgacggcgccgacgcgctcatgttgtctgaggaaacgtcggtggggaagtacccattggcagccgtgaagacgatgtcgcgcattgtgtgtgcggttgaggagaattccacggccgcgccgccgttgacacacgtacctcgcacgaagcggggggtgatctcgtacgctgcccgcgatatcggtgaaagactcgacgctaaggccttggttgcgttcactcaatccggtgacacggtgcggcgactggcgcgtctacataccccgctgccgctgcttgccttcaccgcgtggccagaggtgcgcagccaactcgctatgacttggggcaccgagacatttctcgtaccaaagatgctgtccactgacggtatgatacgccaggtggacaagtcactgctcgaacttggtcgctacaagcgtggtgacttggtggtgatcgtcgctggcacgccacctggcacagtaggatcgaccaacttgatccatgtgcaccggattggggaggacgacgtatag

SEQ ID NO: 27654 - DNA, 3621 bp, Mycobacterium leprae
atgcgtgtaactgccgctaaccaacatcagtacgacaccgatctcctcgagactttggcgcagcgtgtgatggtgggtgacggcgcaatgggtactcagctccaggacgcggaacttacgttagatgatttccgcggcctggagggctgcaacgagattctcaacgaaacgcgtcctgacgtgctggaaaccatccaccgacgctacttcgaggcaggtgcggacctcgtcgagaccaacactttcggctgcaacctgtccaaccttggtgactacgacatcgccgacaagatcagggacttgtcgcagcggggcaccgtgattgcgcgacgggtcgccgacgagctgaccacccccgaccacaagcgatacgtgctggggtcgatgggaccaggcaccaagttgcccaccctgggccacaccgagtaccgggtcgttcgagacgcctacaccgagtcggcgttaggcatgctggacggtggcgctgacgccgtactggttgaaacctgtcaggacttgctgcagctcaaggctgcggtgctgggctcgcggcgcgcgatgacacaggccggtcggcacattccggtcttcgtccacgtgactgtcgagacgaccggaacgatgctgctgggaagtgagatcggcgctgcactggctgccgtcgagccgctcggtgtcgacatgatcggtttgaactgcgcaacgggccccgctgagatgagtgagcatctgcggcacttgtccaagcatgcccgcatcccggtgtcggtgatgcccaacgccgggctgccggtgctgggtgccaagggagctgaatacccgctgcagcccgacgaattggccgaagctttggctgggttcatcgctgaatttggtctttcgttggtaggtggctgctgtggtaccaccccggaccacatccgggaagtggccgcagcggtagccagatgcaacgacgggacagtgccacgcggtgagcgtcatgtgacctatgagccgtcggtatcgtcgctgtatacagccattccattcgcccaaaaaccctcggttctgatgatcggtgagcgtacgaatgccaacggctccaaggtttttcgtgaggcaatgatcgccgaggactatcaaaagtgtctagatatcgccaaggaccaaacccgtggcggcgcacacctgctggatctgtgtgtcgattacgtcggccgcaacggtgtggccgacatgaaggcgttggccggtcggcttgcaacggtgtcgacattgccgatcatgctggactctaccgaaataccggtgctgcaggcaggtttggagcacctgggcgggcgctgcgtgatcaattccgtcaactacgaggacggtgacggtcccgagtcacggtttgtcaagaccatggagctggtcgccgagcacggagcggcggtggttgcgctgaccatcgacgaacagggtcaggcccgcaccgttgagaagaaggtcgaagtcgcggagcggcttatcaatgacattacgagtaactggggcgttgataaatcggcgattctcatcgattgcttgacttttactattgccactggccaggaggagtcacgcaaagacggcattgagaccatcgacgcgattcgtgagctgaagaagcggcacccagcggtgcagactacgctggggttgtccaacatctccttcggtctcaatccttctgcacgccaagttcttaactctgtttttctacatgaatgtcaggaagcaggactggattcggcgattgtgcacgcttcaaagatattgcccatcaaccggatacccgaagaacagcgccaggctgcgctggatctagtgtatgaccgccgtcgcgaaggctacgacccattgcagaagctgatgtggttattcaaaggtgtgtcgtcgccatcgtcgaaggaaacacgggaggcagaactcgctaagctgccgttgttcgaccggttagcacagcggatcgtcgacggcgagcgcaacgggttagatgttgatctcgacgaggcaatgacccagaaaccgccgttggcgatcatcaacgagaacctgctggacggcatgaagacagtcggtgaattgttcggctctgggcagatgcagctgcctttcgtgttgcagtcggccgaggttatgaaagcagcggtggcttatctagaaccgcacatggagaaatccgactgtgacttcggtaaggggttagccaaaggacggattgtgctggctaccgtcaaaggagatgtgcacgatattggcaaaaacctcgtcgatatcattctgagcaacaacggctacgaagtggtaaacctcggcatcaagcagccgattaccaacattctcgaggtggccgaggacaaaagcgccgacgtagtcgggatgtcgggcttgctggtgaaatcgactgtgatcatgaaggaaaacctcgaggagatgaacactcgcggagtcgctgagaaattcccagtgctgctcggcggcgcggcgttgacccgcagctatgtggaaaacgacctggccgaagtctatgagggcgaagtgcattacgcacgagacgctttcgagggtttgaagttgatggacaccattatgagcgccaagcgcggcgaggcgcttgcgccggggagcccggagtccttagctgcagaagcagaccgcaataaggaaactgagcgcaaggcacgtcatgagcggtccaaacgcattgcagtgcagcgtaaggctgccgaagagccagttgaggttcccgaacgctccgatgttccgagtgatgtcgaggttccggcgccgccgttctggggttcgcggatcatcaagggtctggcggtggccgactataccgggttcctcgacgagcgcgcgttgttcttgggtcagtggggattacgtggtgtgcgcggcggtgcggggccctcgtacgaggatttggtgcagaccgagggccggccgcggttgcgctactggctagaccgattgtccacctacggcgtcttggcgtacgccgccgtggtgtacggttacttcccggcggtgtccgaagacaacgatattgtcgtgctcgctgagccgagaccggacgccgagcagcggtaccggttcaccttcccgcgtcagcaacgcggtcggttcctgtgcattgccgattttattcgatcccgggatctggcgaccgagcggagtgaggtggatgttttgccgttccagctggtgaccatgggtcaacccattgctgacttcgttggcgagttgttcgtgtccaattcctatcgtgattatcttgaagtgcatggcatcggtgtgcagctaaccgaggcgctggccgaatactggcaccggcgcattcgtgaagagctgaaattctccggaaaccggacgatgtcggctgacgatcccgaggccgtcgaggactatttcaagctcggctaccgaggtgcccgcttcgcgttcgggtatggagcatgcccggacctggaggaccggatcaagatgatggagctgcttcaacccgaacgcatcggtgtaacgatatctgaagagttgcagttacatcccgagcaatcgactgatgcgttcgtgctgcaccatccggcggctaagtacttcaacgtctga

SEQ ID NO: 27655 - DNA, 870 bp, Mycobacterium leprae
gtgagcatgctgcgggttgccgttcctaacaaaggtgcgctaagcgagccggctaccgagatccttgctgaggctggctatcgacgacgcactgatcccaaagaccttactgttgtcgaccccgttaaccgcgttgagtttttctttctgcggcccaaagacattgccatctatgtcggttccggagatctggacttcggcattaccggacgagacctggtgcacgattctgatgcgtcggtgtgtgaacgcctggcgctgggtttcggatcgtccagcttccgttatgccgggcctgccggacgcgactggacgacgtcggatctggccggaaaaaggatcgccaccgcttactcgaatttggtacgaaaggacctggttgccaagggtattgaagcaacagttataagacttgacggcgctgtagagatctcggtgcaacttggggtggccgacgtcatcgctgacgtggtcgggtccggacgcaccctgagcttgcatgacctcgtggcttttggcgagccgctgtgtgattcggaggcggtgttgatcgagcgtggtgatcggggcagcctcgatcaccacgagaccgttgcagctcgcgatcaattggtcgctcgggtccaaggggtggtgtttggtcaacaatacttgatgctggactacgactgcccgcgctcagtactggacaaggctacgttgatcacgtcgggactggagtcaccgaccatagctccactagccgagccaggctgggtggcaattcgtgcattggtgccccgccgagacatcaacgggattatggacgagcttgccgccatcggagccaaagcgattctggcttctgacattaggttttgccggttttga

SEQ ID NO: 27656 - DNA, 876 bp, Mycobacterium leprae
gtgacccggtcgtttcctgatcgtctgcctacaaacttggcatttcccggaatttcagtgataaatcagtcctcgttcgtcgacctgctgcgtcgccaagcgccagaattgctaccggtgagtcttggcggcggccaatctggcggtggtcaacaactgtcgcacgggaccacgatcgtcgtgctgaaatacccaggcggcgtcgtcatcgcgggtgatcgccgttctactcagggcaatatgatcgccggccgcgatgtgcgcaaagtctacatcaccgatgactacaccgccaccggtatcgccggcattgctgccgtagcggtcgagttcgcccgcctctacgcggtcgaactcgagcactatgagaagctcgaaggcgtgccgcttacgtttgctggcaaggtaaaccggcttgcgatcatggtccgtagcaatttaacggccgcgatgcaggggctgttggcgctgccactgctggcgggctacgacattcatgcacctgacccgcagagcgcggggcgcatcgtctctttcgatgccgccggcggctggaacatcgaggaagagggctaccagtcggtagggtcggggtcgattttcgctaagtcgtcgataaagaaattgtactcgcaggtctccgatgctgattctgccttgagggtagccatcgaggcgctctatgacgcagccgacgacgattccgctaccggagggccggatttggtccgtggcatctaccctacggcggtcactatcggcgctgagggagcggccgaggtaacagaaagccggatcgccgaacttgcccgcgagattatcgaaagccgttcacgtgcgtacactcttggctcctttggcgggagtgagaaatga

SEQ ID NO: 27657 - DNA, 2763 bp, Mycobacterium leprae
atgactgacctggccgagctggcccggttcaccgcggaattgcccttctcgctcgacgactttcagcaacgggcgtgtgcggcacttgaacgtggccatggtgtactggtctgcgcacctaccggtgccggtaagaccgtggtcggcgaattcgccgtacaccttgcgttagcggctggtggcaagtgcttctacaccacaccgctgaaagcgctgagcaatcaaaagtacaccgacctcaccgcgcgctacggccggaatcggatcgggctgctgaccggtgaccagtcggtgaacggtgattcgcctgtggtggtgatgaccaccgaagtgttgcgtaacatgctttacgctgattcgtttgcactacaaggactttctcatgtggtgatggacgaggtgcactttattgccgaccgaatgcggggtccggtctgggaggaagtgatcctgcatctgcccgatgatgtgcgaatggtcagcctgtcggcgacggtgagcaacgccgaagagttcggtggctgggtccagaccgtgcgcggcgatacaactgtggtcgttgacgaacatcggccggtgccattgtggcaacacgtattggtgggtaaacggctcttcgacttgttcgattacgacagcaacgtcgaccaatcccctgtcaacccgaatctgttgcgtcacatcgcacattgccgcgaggcggaccggatgtcggattggcgcaatccccgccggcgggcgggaagaggcagcggtgtccggccgcgcttctaccgttcacttgcgcgcccggaggtaatcgcgatcctggacgccgaaggactcttgccggcgatcacgtttgtgttttcccggttcggttgtgacgccgcagttcagcagtgcctgcggtcaccgctgcggctgaccagcgaggaggagcgtgcccagattgcggaggtgatcgaccaccgttgcggtgatctcgcggacgccgatctggcggtactcggttactacgagtggcgagaggggctgctgcgcggtctggcggctcatcatgctgggatgttgccggcattccgacacgctgtcgaggagttgttcaccgcaggactggtgaaggcggtgtttgccaccgagacgttggcgctgggcatcaatatgcccgcgcgcacggtagtgcttgagcggttagtgaaattcaacggcaagcagcatgttccgttgacgccgggagagtacactcagctgacgggccgcgcaggcaggcgaggcatcgatgtcgagggtcatgcagtggtgatctggcatcctagcgaagacaccagcggaccgtccgcggttgccggcttggcttccgcccgcacctttccgctacgtagttcgtttgtgccgtcgtacaacatgacgattaacctggtacactggatgagtcccgagcgggcgcacgcgctgctggagcaatcgtttgcccaataccaagccgatcgatccgtcgtcggacttgttcggggcattgagcgttgcactcaggtgcttggcgatatttcctctgaactgggcgggccggatgcgccgatattagaatatgctcggctacgtgcgcggatcgcagagatggaacgcgcacaatccttcgtgtttaggctgcagcgtaagcaggcggccaacgatgtgttggcggcgttgcggcgaggcgacatcatcaccatcacgcatggtcgtcacggcggactggcagtggtcctcgaatccgcccgcgacagctccaacccgcggccattggtgctcaccgaacaccgatgggcggggcggatttcctcggcggattatatgggtgcggccgcgccggttgggtcgatgacgttgcccaagcgggtcgaacaccgccagcagcgggttcgtcgtgatctagcctccgcactgcgatcggctgccacacggttgtcagttcctgatatcggtgatggagtcgatggcgacaaaatcggcttcaatgacggtgtattgcacgatcccgagctcgcgtcgttgcgcgcgcaactacgtcgtcatcggtcaaataacgcacccggtttggacacccagttacagcaggccgaacgctatttgcgcatcgaacgctacaacgcgcagctgcagcggaaggtggccgcagccaccaactcgttggctcggacttttgatcggatcgtcgggctgctcatcgagcgtgacttcatccgaggcccggctgatgatccccaagttactgatgatggccggttgttggcccgtatctacagcgaaagtgatctgttggtcgctgaatgcctgcgaaccggtgcgtgggcaggcctgcggcccgcggagttagcggctgtggtctcggcggtgctctacgagacgcgtggtgatgacggccccggtggcccagttgacgccgaggcgcccacaccgcggttacgtcaggcgctgcaacacacttcaaggttgtccgcgactttacgcgccgatgagcaacggcaccggatcgcattgagccgtgaacccgacgacggttttgtcggtgtcatttactgctgggctcggaccggtgatttagcggcggtattagctgcggccgatgcgtcgggcaacggtgcgccattgtcagcgggggattttgtgcgctggtgccgtcaggtgctcgacttattggatcaacttcgcaacgctgcccccgagcctgatttgcgggccacagctaagcgcgcaatcaacgatgttcggcgcggcgtcgtcgcagttgacgccgggtag

SEQ ID NO: 27658 - DNA, 1281 bp, Mycobacterium leprae
gtgtcttccagcatccttaacgagctgggctggcgtgggttggtcgcgcagtccactgacctcgatgctctagccgacgagttgcggcgtggaccgatgacagtctacgccggtttcgaccccaccgcgccgagcctgcatgtcggacacttggtgccgctgctggtattgcggcgctttcaacgagccggccaccggccaatcgtgctagcgggcggggcaaccggcatgattggtgatccgcgcgacatcggtgagcgcaccctcaacgaggcgtacaccgtcgccgaatgggccgagcgaatccgcggacagctggagcgtttcgtcgaattcgacgatgtcgcgaagtctaggaacggcgccatcgttgtcaacaacctggaatggacgagcccgatgtcggcgatcgagttcttgcgcgatgtcggcaaacacttttcgatcaacttgatgctagatcgggacacaatccggcgacggttgaatggccaagggatttcttacacggagttcagctacatgctgttgcaagccaacgattatgctgaattgcatcagcgccatggctgtgcgctgcagatcggcggttcggatcagtggggcaacatcatcgccggggttcgcctggtgcgacaaaagctcggcgccacagtgcatgcgctcacagtcccgctggtgaccgctgccgatggcgccaagctcggcaaatccaccggaggtggcagtttatggttggacccagagatgaccagcccgtacgcctggtaccaatacttcatcaacacctccgacgctgatgtcattcggtacctgcgttggttcacttttttgttgcccgaagaactggtcgagctggagcagacgacggtctcacgcccacaggaacgtgctgcacaacgtcgactcgccaccgagctcacggttttggtgcatggcgcagcggcaacccaggctgttgagcatgccagcagggcattgttcggtcagggcgaacttgctcgccttgacgaagcgacgttggcgacggcattgcgcgagacagtggtcgctgagctgaaacccggcaatcccgatggtattgtcgatctgttggtggccagcggtctgtcccctagcaggggtgcggcgcggcgcactatcgatgaaggcggggtgttggtcaacaacattcgcatccagagcgaggaatggacgccccggacatcggatttcctgcacggccgctggctggtgctgcgccgtggcaagcggaacatcgccgggatagaaagagtatag

SEQ ID NO: 27659 - DNA, 936 bp, Mycobacterium leprae
gtgactcctcgcaaggcggcgcaacggactgtgttgctggtcgtccacaccggacgtgacgaagcaaccgagacggctcggcgtgtaaagaaaattgtgggcgacaatggaattgcacttcgggtgttatctgctgaggcggtcgataggggatcgctgcatcttgctctcgacaatatgcgtgcaatgggtgttgatatcgaggtggttgacgctgacccgcacgttgcccagggttgcgaactggtgctggtgctaggtggtgatggcaccttcttacgtgccgctgagctggctcgcaccgcccgcatcccagtgttgggtgtcaacctgggacggatcggctttttagcggaggccgaagcggaggctattgacgttgtgctggagcacgtcatcgcgcggagctaccgcgtggaggagcgcttaacactcgacatcgtggtacgccaaggcgggaacatcatcgatcaggggtgggcacttaacgaagccagcttggaaaagggtccgcggctgggtgtgctcggggtggtcgtcgaaatcgaagggcggccagtgtccacgttcggttgcgacggggtgttggtatcgacccccacgggatccaccgcctatgcgttctcggcaggtggtccggtgctatggccggatctcgaagctatcctggtggtccccaacaacgctcatgctctgttcggccggccgatggtcaccagccccgatgctaccgtggcaattgagctagaggccaacggcaacgacgcactggtgttctgcgacggtcgccgcgaaatgattataccggccggcggacggctcgaggtgactcgctgtgccacaccagtgaaatgggcgcgcctagatagcgcgccgttcactgaccgcttggtgagcaaattccggttgccggtgaccggttggcgcgggaagtga

SEQ ID NO: 27660 - DNA, 1773 bp, Mycobacterium leprae
gtgcgtaagcacccgcaatccgctaccaagcacctctttgtcagcggtggcgtcgcttcttcgcttggcaaaggactcaccgcgagcagcctcgggcaactgttgaccgctcgtgggttgcacgtgacaatgcagaaactcgacccgtacctcaatgttgacccgggcaccatgaacccgttccagcacggggaggtctttgtgaccgaggatggcgccgagactgacctcgacgtcggccactacgagcggttcctggatcgcgatctgtccggctcggcgaatgtcactaccgggcaggtgtattcgacagtgatcgccaaagaacggcgtggcgaatatctcggtgacacagtccaggtgatcccgcacatcaccgacgagatcaagcagcgcatcatggcgatggcccagcccgacggcggagacaaccgcccagacgtcgtcattaccgaaatcggtggcaccgtgggtgatatcgaatcgcagccctttttggaggcggcacggcaggtccgtcacgaccttggccgggagaacgtcttctttctacatgtgtcgttggtgcctcacctggcgccttcgggtgaactcaaaaccaagcctacccagcactcagtggccgcgctgcgcagcatcggtattaccccggatgccctgatcctgcgctgcgaccgagatgttcccgaatcgttgaagaacaagattgcgctgatgtgcgacgttgatatcgatggagtcatctccaccccggacgcgccatcgatctatgacatacccaaagtgttgcatcgtgaggaactcgacgcctttgtggtgcgccgactcaatctaccgttccgcgacgtggactggaccgagtgggacgacttgctgcgccgtgttcacgagcctcacgggactgtgcgaattgctcttgtaggtaagtacgttgacttttccgacgcctatctgtcagtctccgaagcgctacatgccggcgggttcaaacattacgccaaggttgaggtagtttgggtggcttccgacgattgcgaaactgccacgggcgctgcagcggtgctggccgacgttcacggtgtgctgatccctggtgggttcggtatccgcggaatcgaaggaaaaatcggcgccatccggtatgctcgggctcgggggctgccggtgcttggcctatgcttgggtttgcaatgtatcgtgatcgaggccacccgctcggtcggtctcgtgcaagcgaactcggccgaattcgaaccagctacaccagatccggtgatctcaacgatggccgatcaaaaagagatcgtggccggcgaagcggatttcggcggcacgatgcggctgggggcctatcccgcggttttgcaaccggcttcgatcgtggcccaagcgtatggcacaacgcaggtgtccgagcgacaccggcaccgctacgaagtcaacaacgcctaccgcgattggatcgccgaaagtgggctgcggatttctggaacttcgcccgacggttatctggtggagttcgtcgaatatccggccaacatgcatccattcgttgtcggcacccaggctcaccctgaactgaagagccgacccacccggccgcatccactgttcgtcgctttcgtcggggcggccatcgactacaagtcggcggagttgctccctgtggagatacctgcggtcccggaaatttctgagcacttgcccaacagcagtaaccagcatcgagatggcgtcgagcggtcgttcccggcacctgcagcccgtggctga

SEQ ID NO: 27661 - DNA, 951 bp, Mycobacterium leprae
gtgacgacggccgcgcttcagacacagctgcagggctacctcgactatctgatcatcgagcgcagtatagcggcaaacacgctgagctcctatcgccgtgacctgatccgctactccaagcacttgtcagatcggggaattgaggatctggccaaggtcggtgagcacgatgttagcgagttcttggtggcgctgcgccgtggggatcccgattccggggtggcggcgctgtctgcggtgtcggcggcgcgagcgttgatcgcagtgcgcggtttgcatcggttcgctgtcgccgaagggttggtcgacctggatgttgcgcgagctgtccgtccgcctacgccaggacgtcggttgcccaagagcttgacagttgacgaggtgctggctttgctggagagtgtgggcggcgaaagtcgggccgacggaccgctggtactacgcaatcgggcgttgctggagttgttgtactctaccggatcccggatttctgaagctgttgggcttgatgtcgacgatgtcgacacccaggccaggacggtgttgttgcaggggaagggcggcaagcagcggctagtaccggtggggcgtcccgccgtgcaagcgctggatgcctatctggtgcgtggacgctccgatctggctcgtcggggtcctggaatgcttgcgacgccagccatttttctcaatgcgcgcggaggtcggttgtcgcgtcaaagtgcgtggcaagttctgcaagatgctgctgaacatgccggtatcacttcgggtgtgtcgccgcacatgttgcggcattcctttgccacccacttactcgaaggtggcgccgacatccgggttgtgcaggagttaatgggtcatgcctcggtcacgacaacgcagatctacacgttggttactgtccaggcgttacgtgaagtgtgggccggggcgcaccctagggccaaatag

SEQ ID NO: 27662 - DNA, 774 bp, Mycobacterium leprae
ttgatggtcgagatccacgattctaggatggaccggggtgctggggcggtccgtctgcaaaagatattgtcccgggctgggattgcgtcgcggcgggccgccgagaagctaatcatcgaaggccgtgtcgaagtggacggtcagctggtgagggagttgggtacccgggtcgacccggatgtctcggtagttcgggtcgatggggtcaaggtagtggtcgacgactcgctggtgtatctggcgctgaacaagccgcgcggcatgtactcgaccatgtcggacgaccgcggccggccctgtgtcggtgatttgatcgagcgccgggtgcggggcaataagaagctgtttcatgtagggcggctagacgccgataccgaagggctgatcttgttgactaacgatggcgagttagcacaccggttgatgcatccgtcccatgaggtgtccaagacgtatttggcgacggtgaaaggggcggttccgcgtgggttaggtaagaagctaagcgtgggacttgagttggacgacggcccggcgcatgtcgatgatttcgcggtggtagacgcgatcccaggtaagacgttggtgcggttgacgttgcacgaaggacgtaagcgcattgtacgtcggctactgacagctgcaggcttccctgtagagatgctggtccgcaccgatatcggtgcggtgtcgctgggagatcagcgtccgggctgccttcgggctttgctccgtgatgagatcagacaactgtataaagaggtgggcctgtga

SEQ ID NO: 27663 - DNA, 672 bp, Mycobacterium leprae
gtgaccgatattgttgtcgccatcgacggaccggcggggaccggaaaatcttccgtgtcaaggggactagcgcgtgagctgggggcgcgctacttagataccggggcaatgtaccgtatgatgacattggcggtgctgcgcgccggaattgatccagcagatgctgcagcgattggggagagtgtttggaaagtgcagatgctctccgatcatgatcgttatttccttggtggagaggatgtttcatctgagatacggactgaggaggtcacccaggcggtgtcggcggtgtcggcgattcctgccgtgcgcgtccggcttgttgatctgcagcgacagatggccgaagggcgaggcagtgtcgttgtagagggccgcgatattgggaccgttgtattacccgacgctccggtgaagatctttctgacggcatcgcccgaaacccgcgcgcgacgtcgcaacgaccagaatgtcgcgtcaggttcggccgacgattatgaccgcgtgttggccgaagtgcgccgccgcgaccatctcgactccacccgggcggtgtcgccgttgtatgtggctcaagacgccatgattgttgacaccagcaagatggctgaagccgaggtgatcgcccacctaatggacttggtgaagcagcgcagtggggcggtgtggtga

SEQ ID NO: 27664 - DNA, 1389 bp, Mycobacterium leprae
gtggtgagccaggatggcacctggagtgacgaaagcgactgggaacttgacgattcggatctagccgagttcgggccggtggtggcggtggtgggcaggcctaatgtcggcaaatcgacgttggttaaccgaattctgggccggcgcgaagcggtggtgcaggatgttcccggggtgactcgcgaccgagtctcctatgatgcaatgtggaccggacgtcggttcgtcgtacaggacaccggaggatgggaacccgacgccaaaggcctcaaacggctggtggcggagcaggcgtcggtggccatgcgcaccgccgacgcggtgatccttgtggttgacgtcggtgtcggggccactgacgccgacgaagccgcagctcggattttgctccgctcgggtaagctggtattcttagcagccaacaaggtggacggcgaaaagggcgaatcggacgcgtcggcattgtggtcgctgggactgggtgagccgcacgcaatcagtgcgatgcatggtcgcggcgtagctgacctgcttgacaaggtgctggccgcactgcccaacgtggctgaatcgacgtcgcttgacggcggtcttcggcgtgtggcgctcgtcggcaagcccaatgtgggcaagagttcattgctgaacaagttggcaggtgaccagcgttcggtagtccacgaggccgcagggacgacagtagaccctgtggactcacttattgaaatgggcggcagggtctggcgtttcgtcgacaccgcgggtttgcgtcgaaaagtcggtcaggcaagcgggcacgaattctatgcttcggtgcgcactcatggggccatcgattcggccgaagtggtgatcatgctgatcgacgcatcggagccgctaacgggacaagatcagcgggtgctctctatggttatcgatgctggtcgcgcgttggtgctggccttcaataagtgggatctagttgacgaagatcggtgcgatctgctggagcgcgagatcgatcgtgagctggtgcaggtgcgttgggcgcaacgggtcaatatctccgccaagacgggccgggcggtgcagaaactggtgccggcgatggaaaattcgctggcgtcgtgggataccagaattgcgaccggcccgctgaacatatggattaaggcagtggtggcggcgacaccacccccggtgcgcggtggcaagcagccgcgcatactattcgctacccaggcgactgctcgaccgccgacgttcgtgctgttcacgactggttttctggaagcctgctaccgacgcttcctagaacgtcggctacgtgagacgtttgggtttgagggcagtccgatccggatcaatgtgcgagtgcgcgaaaaacggggactcaagcgccgctaa

SEQ ID NO: 27665 - DNA, 2736 bp, Mycobacterium leprae
gtgagtgcagcaatgaccgctgaagtctgcgaagaccacaccaagccaatgctgatgctgctggacggcaattcgctggcatttcgcgcattttacgcactgccaacagagaatttcaagacccgcggtggcctcaccaccaacgcggtgtacggcttcaccgccatgctgatcaacttgctgcgtgaggaggctccaacgcatatcgctgcggcgttcgatgtatcgcggaaaacgtttcgctccgagtgctatgcgggatacaaggctaatcggtcatcaatccccgctgagttccacggccagatcgacatcactaaggaagtcttaggtgcgctgggtatcacggtgttcgctgaggctggattcgaggctgacgacctcatcgcgacgttggctactcaagccgaaaacgagggttaccgtgtgctggtggtcaccggtgaccgcgacgcacttcagctggtcagcaacgacgtgacggtgctctatcctcgtaaaggcgttagcgaactcacccgcttcacaccagaggctgttatcgagaagtacggggtgacgccggcgcagtaccccgacttagcggcgctacgtggcgatcccagcgacaatctgcccggtattcccggcgtgggggaaaagaccgccgccaagtggatcgtcgattacggttcgctacaagggctggtcgacaatgtcgagtcggtccgcggcaaggtgggcgaagcgttgcggacgcatctagccagcgtggtgcgcaaccgagagctcacagagcttgtcaaagatgtgccgttggtgcaaacctcggacacgctgcggctgcagccgtgggatcgcgaccgaattcaccggctcttcgacaacctagagttccgggtgttacgtgaccggttgtttgaggctttggccgccgctggagagcgtgtacccgaagtcgacgaggggtttgacgtccgcggcggtttgctggagtccggcacggtcgggcggtggctggctaagcacgccgatgacggacgcaggtctgggctagcgatcgtcggtacacatctgccgcacggcggagacgccactgcgctagctgtagccgccgccgacggtaacggcggctacatcgacaccgcgatgttgactcccgacgacgacgacgcgctggcggcttggttggccgatcccgacaaccccaaagcgctgcatgaggcgaagctggccatgcatgatctcgctggtcgcggttggacgctaggcggcatcacgtccgataccgcgttggcggcctacttggtgaggccggggcaacgcagcttcactcttgacgatctctcactccgttacctgcgtcgcgagctgcgagcagaaacacctgagcaggaacagttttcgttgcttgacaacgtcgacgaagtggacaagcaagccatccagactctgatactgcgggcccgggcggtggtagacctcgccgctgcgttggacgctgagctggatctcatcgattctacctcactactaggtgagatggagctgccggtccaacaggtgctggctgacatggagaaagcgggtattgcggccgatttgcggttgctcaccgagttgcagagccaattcggcgatcagatccgagacgccgctgaggccgcctacgccgtaatcggcaagcagatcaatctgagctcacccaagcaactgcaggtcgtgttgttcgaagaactaggcatgccgaagaccaaaaggaccaagaccggctacactactgacgccgatgctttgcagtccctgttctgcaaaacggagcacccatttctgcagcatctgctcactcaccgggacgtcacccgactcaaagtcaccgtcgacgggttgctgaacgcggtcgccgcagatggccggattcataccacattcaaccagacgattgcgacgaccggtcgactgtcctcgacagaacccaacctgcagaacattccaatccgcaccaatgccggccggcagatccgggacgctttcgtcgttggttcggaaaataacggctacaccgaactgatgaccgccgattacagccaaatcgagatgcggatcatggcacacctatcccgggatgaggggctcatcgaggccttccacactggggaagacctgcactcgtttgtggcctcgcgggcattcggtatacctatcgaggatatcacccccgaattgcggcgccgggtcaaggcgatgtcctacgggctggcctacgggctaagcgcatacgggttagctacgcagctgaaaatttccactgaggaggcgaagctgcagatggagcaatacttcgctcgattcggcggggtgcgcgactacctgatggatgtcgtcgagcaggcacgcaaggatggatacacctcgacggtgttaggccgtcgacgttacctgcccgagctagacagcagtaatcgccagatacgggaggcggcagagcgggcagcgctcaacgcgccgatccagggcagtgcggccgacatcattaaggtggcaatgatcgcggttgacaagtcgctcaaacaggcgaagctggcgtcgcgaatgctgctacaggtacacgatgaattgctgttcgaagtcgcgatcggtgagcgcgagcagatcgaggccatggtgcgcgagcagatgggcagtgcctaccccttggacgtgccgctggaagtaagtgttggctttggccgctcgtggggtgctgctgcgcattaa

SEQ ID NO: 27666 - DNA, 1446 bp, Mycobacterium leprae
atgtcaattcccgccgtcccctcgccccaaatagccgtcaatgacgtaggctccagcgaggactttcttgccgcaatagacaaaacgatcaagtactttaacgatggcgacatcgtcgaaggcaccatcgttaaagtggaccgggacgaggtgctccttgacatcggatacaagaccgaaggggtaattcccgcccgcgaactctccatcaaacacgacgtcgaccccaatgaggtcgtttctgtgggcgacgaggtggaggctctggtacttaccaaagaggacaaagaggggcggctcatcctgtccaagaagcgtgcgcagtacgagcgcgcgtggggcaccatcgaggcacttaaggagaaggatgaggctgtcaagggcatcgtcatcgaggtggtcaagggcggtctgatcctcgatatcgggttgcgtggcttcctacctgcctcgttggtggagatgcgccgtgttcgcgatctgcaaccgtacatcggcaaggagatcgaggccaagatcatcgagctagacaaaaaccgcaacaacgtggtattatcgcggcgggcttggctggaacagacccaatccgaggtgcgcagtgaattcctcaatcagctgcagaagggtgctatacgcaagggtgtagtatcgtccatcgtaaactttggtgcgtttgtcgatctgggcggtgtagacggtttggtgcacgtctccgaactgtcctggaagcacatcgaccatccgtccgaggtggtccaggtggggaatgaagttaccgtcgaggttctcgacgttgatatggaccgcgagcgggtttcgttgtctctcaaagcaactcaggaagacccgtggcggcattttgcccgcacccacgccatcgggcaaatcgtgccaggtaaggtgaccaagttggttccgtttggtgccttcgttcgtgttgaggaaggcatcgaaggtctggtgcacatctcggagctggccgaacggcacgtcgaggtgcctgaccaggtggttgctgtcggcgacgatgcgatggtcaaagtcattgacatcgacttggagcgacgccggatttcgctgtcgttgaagcaggccaacgaggactacatcgaggagttcgacccggcaaagtacggtatggccgacagctacgacgagcagggcaactacatcttccctgagggctttgatcccgactccaacgagtggctagagggttttgacacccagcgcgccgaatgggaggcccgttacgctgaagccgaacgtcgctacaagatgcacaccatccaaatggagaagttcgctgcaaccgaggaggccggacacggcagtagcgagcagcccccggccagcagtacaccttcggcgaaggccacgggtgggtcgctggctagcgatgcccaactagcagctttacgggaaaagctcgccggcagcgcataa

SEQ ID NO: 27667 - DNA, 444 bp, Mycobacterium leprae
atgggcgcctatcagaccgtggtggtgggaaccgatggttcagattcgtcgttgcgtgcggtggaccgggcaggcaaaattgccgggtcggatgccaagctgatcatcgcgtcggcctacctgccccagcatgacaatgctcgggcgttcgacatattgaaggacgaaagctacaaagtgacgggtactgccccgatctacgagatcctgcatgacgcgaaggagcgagcgcacgccgccggtgctaagaacgtcgaagagcgaccggttgtcggcgctccggtcgatgcgctggtgaaccttgccgagaaaacaaatgccgatctgctagtggttggcaatgtcggtctgagcacgatcgcaggtcgactgttgggatcggtgccggccaacgtctcgcgtcgggccaagatcgacgtcttgatcgtgcacaccacgcactga

SEQ ID NO: 27668 - DNA, 2910 bp, Mycobacterium leprae
gtggctgaccgcttgatcgtcaagggtgcccgtgagcacaacctgcgaagcgtcgatctcgacctgccgcgggattcattgatcgtcttcaccgggctgtccggatcaggcaagtcttcactggcattcgacaccatcttcgccgagggccagcgccgctacgtggagtcactgtcggcctacgcgcgccaattccttggacagatggacaagccggacgtcgacttcatcgagggtctttccccggcggtgtccatcgaccagaagtcgacgaaccgcaacccgaggtcgaccgtaggaacaatcaccgaggtgtacgattacctgcgattgttatatgcgcgtgctggcacaccgcactgcccgatctgtggcgagcagatctcccgtcagaccccgcagcaaattgtcgatcaggtgctggtgctgccggagggcacccggtttttggtgctcgctccggtggtgcgtacccgcaagggcgagttcgcggacctgttcgacaagctcaacgcacagggctacagccgggttcgggtcgacgatgtagtgtacccgttgagcgatccaccgaagcttaaaaaacaagaaaagcacgacatcgaggtggtagtggaccgactcaccgtcaagatcgccgccaagcagcggctcaccgactcggtggaaaccgccctgaacctagctgacggcatcgtagtgttggaatttcccgacgatcacgacgaacgtggccacccgcgcgaacagtgcttctccgagaagttagcttgccccaatgggcaccccctggccgttgacgacctggaaccacgctcgttctcgttcaactcgccctacggcgcctgtcccgaatgtgtgggcttgggaatccgcaaagagatcgactcagatctagtggtgcccgacccggatcgcactctggccgagggtgcggtggcgccgtggtcggcggggcgcaccgcggagtacttcacccggatgatggccgggctcggcgagaaactgggattcgacgttgacacgccatggcgcaaactcccggccaaggcccgcaaggcgattcttgaaggttccgatcatcaggtgcatgtgcagtaccacaaccggtacggtcgaccccgctcatattacgttgattttgagggcgtgctgacgttcttacagcgcaagatggagcagaccgagtccgagcagatgaaggaacgctacgagggtttcatgcgtaatatcccctgcccggtgtgtcaggggacccgactcaagccagagattctggcggtgacgttagcggcaggggagcggggcgcgaagtccattgccgaggtctgcgagctgtccatcgcggactgctcggcttttctgaacgcgcttatccttggtgtgcgcgagcaggcgatagcggggcaggtgctcaaagaaatccagtcgcgactcggctttttgctcgacgtcgggctggagtacctctcgctgtctcgggcggcagccacgctgtctggtggtgaggcccaacgcattcggctagctacccaaatcggttccggtctggtgggcgtgctctacgtccttgacgaaccatccatcgggctacaccagcgcgacaaccgtcgactcatcgaaactctcacgcggttaagggcgttggggaacacactgatcgtcgtcgaacatgacgaagacaccatcgcacacgctgactgggtcgtcgacatcggcccgggcgccggtgagcatggcggccaaatcgtgcacaacgggacctaccgtgaactgctggcaaataaggattcgattaccggtgcttacctgtcgggtcgggaaagcattgccacccccacacgtcggcgttccgtcgaccgtaagcgtgagctcaccgtcgtcggggcccgcgagcacaatctgcgcggcatcgacgtgtcgtttccgcttggcgtgttgacctcggtaaccggtgtgtcgggctccggcaagtcaactttggtcaatgatatcctggcagcggtgctggccaacaggctcaacggcgctcggcaagttccgggtcgccatacccgagtcaccggcctagaacatctggacaagctggtgagggtggaccagtcgccgatcggccgcacgccgcgatccaacccggccacctacaccggggtatttgacaagatccgaatcttgttcgcggctaccaccgaggcgaaagtccgtggttaccaacccggtagattctcgttcaacgttaagggcggtcgctgcgaggcgtgcaccggtgacggcaccatcaagatcgagatgaacttcttgccggacgtgtatgtaccttgtgaagtgtgccagggcgcccggtacaaccgagaaacccttgaagtacactacaaaggcaaggccatatccgaagtgttggacatgtcgatcgaggaagcggcggagttctttgagccgatcatcggcattaaccgttatctgcgcacgctggtcgatgtcggtctgggctatgtccgactgggtcagcccgcgccgacgttgtcgggtggtgaggcgcagcgggtcaaactggcgtccgagttgcagaagcgttcgaccgggcgcaccatctacattctcgacgaacccaccacaggactgcatttcgacgatatccgcaaacttcttaacgtcatcaatggtcttgttgacaaagacaatacggtgatcgtgatcgaacacaacctggacgtgatcaaaacgtcggactggatcgtcgatatgggtcccgagggtggcgctcaaggtggaaccgttgtcgccgaaggcactccggaggatgtcgcagcggttccggaaagctacactggcaaatttctcgccgaagtcgttggcgcagggtgcgcgcctgcacgcacaccacggcgacgccgcacagtcaccgcctaa

SEQ ID NO: 27669 - DNA, 558 bp, Mycobacterium leprae
ttgattggtccagggggggagcaggtaggcatcgtacggatcgaggatgcacttcgcgtggctgcggacgccgatctcgaccttgtcgaagttgccccaaatgccagaccaccggtttgcaagatcatggactacggcaagtacaaatacgaagtggcacagaaggcacgcgaatcccgccgcaaccagcagcagaccgtcgtcaaagaacaaaagttgcgaccaaagatcgacgatcatgattacgagaccaaaaagagccacgtggtccgtttcctggaggcgggatccaaggtcaaagtcaccatcatgtttcgcggacgtgagcagtcgcgacccgagctgggttaccgattactgcagcgactgggtgcggacgtcgccgattacggattcgtcgaaacatcagccaaacaggatgggcgcaacatgacgatggtgctggcaccgcatcgcggcgcgaagactcgcgccagcgcgcggcatccggaagtaccgggggctgggtcagtgcaagatatcgatgcaaccggcgacaccgatggttcaccgcactag

SEQ ID NO: 27670 - DNA, 195 bp, Mycobacterium leprae
atgcccaaggccaagacccacagtggggcgtcgaagcggttccggcgcaccggtaccgggaagatcgtccgtcagaaagccaatcgtcggcatctgttcgagcataagccgagcactcgtacccggcgactggatggacacacgcgggtttcagccaacgacacccaacgggtcaattcactgctgaacggctga

SEQ ID NO: 27671 - DNA, 390 bp, Mycobacterium leprae
atggcacgcgtaaagcgggcagtcaatgcccataagaagcggcgcactgtcttgaaggcttcgaaaggctatcgcggccagcggtcccggctctatcgtaaagccaaagagcagcagctgcattcgttgggctacgcttaccgcgaccgtcgcgcgcgtaagggggagttccgcaaattgtggatttcgcgaatcaacgcggctgcgcgcgccaatgacatcacttacaaccggttgatccagggcctgaaggctgcggatgtcgacgtggatcgcaagaatctcgccgatattgcgatcagcgatccggcggcgttcacggcgctcgttgaggttgcccggtcggggttacccgaagatgtcaacgtgccatccggagaagctgcttaa

SEQ ID NO: 27672 - DNA, 780 bp, Mycobacterium leprae
gtgctcaccgagcgttccgcccgggtggtcgcggcagttaagttgcatcgccaagtcgcgcggcggcgtgtcagacgatttctcgctgaaggccctaacctcgtcgaagccgccattgtaagcgggctggttcgcgacgtattcgtcacagaagtcgcggcccaacggcacgccacagtgctggctacactgaagtgtccggtccatcctgtaagcgaacgtgccgcaaaagcactttccgacacggtcactccgactgggttgatcgcggtgtgcgaaatgccgacgacccggctagcgactgtgctggctggctcaccccagctggtggtggccgctgtcgagatcagcgaaccgggcaatgcgggcactgtaatccgcatcgcggatgccatgggtgctgcagctgtgatcttcggtgggtacaccgtcgacccgtacaacggtaaatgtctgcgttcctctgccggcagtatcttctcgataacggttgtcgtggcgtctgatgcctacgccgctgtgaccgaattgcgcgccgccggactgcaagtgctggccaccatggtcgacggtgagacgtctctcgacgaagccaagccactgcttggcaagccgacagcttggcttttcgggtccgaaccacacggtttgtcaaccgaaatcgcagaagcagcggactatagagtgcgtattccgatggtcggcggtgtggaaagcctgaacgtggctgcgaccgcagcgatttgcctctatcagagctcgcgtgcattgcgtctttag

SEQ ID NO: 27673 - DNA, 1053 bp, Mycobacterium leprae
gtgggtgatcaacccgttgatctgtcgatgttgtcgtcggaagcactggccaaggcagttaacaccgcccgccaagccatcgcacttgccgtcaatctcgacgcgttggcgctcatcaaggccgagcacctcggtgaccgctcgccgctggcgctcgcacgacaagcgcttgctagcctgcccaagattgaccgggccgccgtcggcaagcaggtcaacacggcccgcagcgaggtccagcgtgactacgacgaacgactggcgacgttgcaagccgagcgcgacgcggccgtgctggtcaccgaacgtatcgatgtcactctgccttcaacaaggcagccgaccggagcacggcacccgataacgatattggccgagcatatcgccgataccttcattgcgatgggatgggaactggtcgacggacccgaagtcgagactgagcagtttaactttgacgctcttaactttcctgccgaccaccccgcacgcagtgaacaggacaccttttatattgcgccggacggttcacggcagctactgcgaacccatacttcaccagtgcaggtgcggactttgctcgagcgtgagctgccggtctacgtcatctcgatcggtcgagccttccgcaccgacgaagtcgatgccacccacacgcccgtcttccatcaagtcgaaggcctggcagtggaccgcggtctttccatggcgcatctgcggggaacgttggacatcttcgcacgcgcggagttcgggccgtcgacgcgcacccggatccggccgcacttcttcccattcaccgaaccgtcggccgaggtcgatgtatggtttgcgagcaaaaaggatggcgctgactgggtggaatggggcggttgcggaatggtgcatccaaacgtgttgcgggcaacaggaattgacccggatatctactccggtttcgcattcgggatgggcctggaacgcaccctgcagttccgcaacagcattcccaacatgcgcgatatggtcgaaggggacgttcggttttcgttgccgttcggggtgggggcttga

SEQ ID NO: 27674 - DNA, 2511 bp, Mycobacterium leprae
ttgatgcgcgttccgtatagttggctgtgcgaagtggttacggttggtgcaccggattgggatgtttccgcgagcgatctcaagcagacgctggtacgcatcggccacgagatcgaggagatgatcacggtaggcccggtcgatggcccgctgaccgtggggcgggtcaccgatatcgaagaactcaccggattcaaaaagcctattcgagcctgtgtagtcgatgttggcgacggtcagcaacacgaaattatctgtggtgcaacaaattttgtcgttggcgatctggtcgtggtagcatttcccggtactactctgcctgacgggttcgccatcgcggcgtgcgagacctacggtcgtcattctgctggaatgatttgctcagcggccgaactccgtttgagtacagatcattcggggatcctagtattgccacctggaaccgccctaccaggtgccgacggtgctgacgtacttggattggacgatgtggtatttcgtttggcgatcactcccgaccgcgggtattgcatgtcggtgcggggcttggcccgtgagatcgcatgcgcctacgacctagccttcgttgacccggccagcgaccaagcggtgccgccgttgccagttggggggcaggcgtggccggtgacggtacagcccgaaacgggagttcgtcggtgcgccctgcgtccggtcactgggatcgactttgccgccgtgtcgccgtggtggttacagcgccggctgttgttatccggaattcgtgcgatctcaccggcagtggatgtcaccaactacgtgatgctagaactcggccacccgctgcacgcccacgaccgcaatcgcattaccggaggcttcaccgtacgattcgcccggcccggcgagaccatcgttactatcgacgggatcgagcgtcagctcgatcccgtcgatgtcctcatcgtcgataacgtcactactgcggcgatcggcggcgtgatgggtgccgcaagcaccgaagtgcgctccgattccaccgacgtgctactcgaggctgcggtatgggaccccgccagggtatcacacacccagcggcggctgcacctgcctagcgaagccgcccgccgttatgaacgggcagtggatcctgctatctcggtagctgctttagatcggtgtgcgatgctgcttgccgatatcgccgggggaacggtttcggagaccctgaccgattggcggggcagcccgccgcgagctgactggtcattgccgccgatccggatcgccgtcgacctgccagaccggatcgctggggtggtctataaccaaggcgcaaccaccaaacggctgactcaaatcggtgctgtggtggtcgacacggtgtcctcagaaggtcacacgctcaccgtcacgccgccgagttggcgccccgatctactgcagccctccgatcttgtcgaggaggtgctgcgcctcgaagggctagaggtcatcagatcggtccggccgctcgcacccgcgggccggggactcaccgcagtgcagaaacgctaccgtgcaattggtaaggtgcttgcacagtccggctatgtcgagatcttaccgacaccgtttttgccggctgatgtgttcgacctttggggattgccggccgatgacccgcgacggacgacgacgcgagtgctcaacccgctggagtccaaccgtccccaactcgccaccacactgctgccggcgctactggaagcgttggtaagcaacgtatctcgaggcatcatcgatgtcgctttgtttgccatcgcgcaggtggtcgagccgaccgagtggactggcggcatagggtccatccccgtcgaccgtcgactgaccgatgctgaaatagctctgctggacgcctccttgccccggcagccacaacacgtcgccgcggtgttggctgggttgcgggaaccgcggggtccgtggggtcctggccgtctagccgaggcatccgacgcttttgaagcagtgcgtatcatcgcgcgggtcagtggagtcgacgtgtttttccgggctgtccaatatttgccgtggcatccgggtcggtgcgctgaagtgtttgttggtgaaacgcctatcggccatgcagggcagctgcatccggccgtgattgaacgcgccggtctgccgaagggcatctgcgcgatcgagctggacctcgctgccatgcctatcgtcgaggggttgcccgcacctcaggtgtcgccgtttccggctgtgttgcaggacgtcagcctggtggtgtccacgcaggttcctgctcaagaagtgcaggacgccattcgcgatggggccggtgaattgctcgaagacattcaattgttcgacgtcttcaccggttcgcagattggcgaggactgcaagtcgttgacatttgcactgcggtttcgcgcacctgatcgtacgctgaccgaagacgacgccagcgcggctcgcgatgccgcggtacgacacgccgccgagcgtgtcggtgcaacattgcgcacctaa

SEQ ID NO: 27675 - DNA, 1215 bp, Mycobacterium leprae
atgaccccgacacaaaccaacactgcgactatgcagcagcgctgggaaaccgtgatgatgaacaattatggcaccccaccgatcgtgctagccagcggtaacggcgccgtagtcaccgacgtagacagcaatacctatctggatttgctcggcggcatcgcggtcaacgttcttggccaccgccatcccgcggttatcgaagccgtcacacatcagataaccaccctgggccacacatccaacctatatgccactgaaccaagtatcacactcgccgaagaattggtcgccctactgggtgctgacacacagacacgggtgttcttctgcaactctggtactgaagccaacgagctggcgttcaaactgtctcggctcacgggccgtacgaaactggttgctgcgcaagcagctttccacggccggacgatgggttcgctggcattgactggtcagcccgccaagcaggcggcgtttgagccattgcccggccacgtcacgcatgtgccctacggtcaagtcgatgccctagccgccgcggtcgacaacgacaccgccgcggtgttcctggagccgatcatgggggaaagtggtgtcatcgtcccgcctgagggctaccttgctgctgcccgggatataacgacacggcacggcgccttgctggtaatcgacgaagtgcagaccggaataggccgtaccggtgcctttttcgctcaccaacacgacagcatcaccccggacgtggtgaccctggccaagggcctcggcggcggactgccgatcggggcgttcctggccaccgggccagcggcggagttgttgacgctggggctgcacggcagcaccttcggcggcaacccggtctgcaccgcggcggcacttgcggtgctgcgagtattggcgacccagggcctggtccggcgtgccgaggtgttgggcgattcgatgcgcatcggcatcgaatctctcagtcacccgctgatcgaccaggtgcgcggccgcggcttgctattgggcatcgtgttgaccgcgcctcgagccaaagatatcgagaaggccgcgcgtgacgctgggtttttggttaacgccacagcaccggaggtcatccggttggccccgccgttgatcatcaccgaatcccagatcgacagcttcatcactgccttgccaggcattctggatgcctccatagctgagctgggaaaaaaggcatga

SEQ ID NO: 27676 - DNA, 963 bp, Mycobacterium leprae
gtggggggcgcttcccgcttgcggggaagaggagcggcgcagttgactaggcattttttgcgtgatgacgatctgtcgccgactgaacaggccgacattctggcgctcgctgcagatctgaagaaggccccgttcagccgccgtcctcttgcgggcccgcgtggggttgcggtcatcttcgacaagaactccacgcgaacccggttctcattcgatataggcattgcgcagctcggtgggcatgccgttgttgttgacgggctcagcactcaactgggtcgcgacgagaccttgcaagacacggcaagggtgttgtctggctacgtcgatgccatcgtctggcggaccttcgggcaacaccggctagatgccatggccgctaccgcgacggtgccggtggtcaatgcgctgtccgacgaattccatccgtgccaagtgctggccgatctgcagacgatcgccgagcgcaagggatcattgaacggcttgcgactgtcctacttcggcgatggtgccaacaacatggctcattcgcttatgctcggtgcagtcaccgcaggtgtccacgtcaccgtcgctaccccagtaggttttacgccggatccgtcggtgctggccgcggctaagaagcgtgcggaggcgactggcgcgtcggtgaccgtgactgtcgacgcggacacagccgccgcgggcgccgatgtcctggtcaccgacacctggacgtcgatgggacaggagaacgacgggctggaccgggtcaagccgttttggccgttccaggtcaacgcccgactcgtggggctggccgactcggaagctatcgtgctgcactgccttccagctcatcgtggtgacgagatcaccaacgaggtaatggacggaccgaccagcgcgatctgggatgaggccgaaaaccggctgcacgcgcagaaggcactgttggtgtggctactggaacggtaa

SEQ ID NO: 27677 - DNA, 1413 bp, Mycobacterium leprae
atgagcaccaatcagggttcgctgtggggcgggcggttcgcagccggcccttcagaggctctggtcgcgctgagcaagtcgacccacttcgactgggtgctggctccttacgacataaccgcgtcccgggcgcacacgaaaatgttattccgagccggactgctcaatgaagagcaacgcgacgggttgttagcgggattggacaacctcgccgaggacgttgccgacggcagtttcctaccactggtcaccgatgaggacgtgcacgctgcgttggaacgcggactgatcgatcgggtcggccctgacctaggcggccggctgcgagccggccggtcacgcaacgatcaggtggccacgctgttccggatgtggctacgcgacgcagtgcggcgagtcgctgccggcgcactcgaggtcgtcgatgcgctggccaaccaagcggccgagcactcgagcaccatcatgcctggtaagacccacctgcagtctgcccagccgatcctgctggcacaccatttgttggcacacgctcatccgttgctgcgtgatgtgggccggattgtcgacttcgacaaacgggccgcagtgtctccgtatggttcgggagcattggctggctcgtcgttaggcctggacccggacgcgatggcccaggacctggggttcccggctgcagccgacaattccgtcgacgcgaccgccgctcgcgattttgcagccgaggcagcgttcgtcttcgccatgatcgccgtcgacctgtcgcggctcgccgaagacatcattttgtggagttcgaccgaattcggctatgccaggctacatgattcgtggtctaccggaagctcgataatgcctcagaaaaagaatccggacatcgccgaactggctcgcggaaagtccgggcgactgatcggaaacttggctgggttgctggcgacactgaaagctcaaccgctcgcctacaaccgcgacctgcaagaagacaaggagccagtgttcgattcggtggcccagctggagctgctgcttccggcgatggctggtctggtagccagcttaacgttcaacgtcgagcggatggctgccctagctcctgctggctatacactggccaccgacatcgctgaatggcttgtgcgccaaggtgttccctttcgatccgcacatgaggccgcgggtaccgcggtgcgggtggctgagggtcgcggcgtcggacttgaggaactgaccgacgacgaactggctgccatcagcgccaacttgacgccgcaggtccgcgaggtgctaacagtcgagggctcggtgtcgtcgcgagcggctcgtggtggtaccgcgcctagtcaagcagccaagcaactgactgtggtccgcgcgaacgcaaaccagttgcgccaactcttgatgcgctag

SEQ ID NO: 27678 - DNA, 1338 bp, Mycobacterium leprae
atgcacggtaaactgttcgggcggcgaagcctgttgcggggtgccggtgcgctcaccgcggcggcactggcacccggggctgttggttgtagttccgacgacgatgcgttgaccttctttttcgccgccaatccggaggagaccaatgcccgaatgcgcatcgtcggcgaatttcagcgcgaccatcccgacattaaagtgcgggcggtgttgtccgggccgggtgttatgcagcagttatcgacgttttgcgctggcggtaaatgcccggatgtgttgatggcgtgggatttgacctatgccgaactggcggaccggggagttttgctggatctcaacacgttgttaggacaggataaggcgtttgctgcggagctgaagtccgacagtatcgagccgctgtatgagaccttcacattcaacggaggccagtacgcctttcccgaacaatggtctggaaactacttgttttacaacaaacagctgttcacaaacgctggcgtgcagccgccgccctgcacctgggaacagccatggagtttcaccgaattcctggacaccgcccgcgctctcactaagcgggattcatcgggacgggtcacgcagtggggctttgtcaacacctggctctcgtactacacggctggattgttcgccctcaacaacggagtaccttggtccaacccgcggatgaacccgactcatctcaatttcgatgacgacgcgtttatcgaggcggtgcagttctattgcgatctgaccaacaaataccaggtggctcccgacgcatccgagcaacaatggatggctacggccgatttgttctcgttgggcaaggcagcgattgcgctgggtgggcattggcgctaccaaacattcatgcgagccgaggggctggatttcgatgttacgtcactgcctatcgggccttcggcgggcacagtgcccgccacgagatccggcgcctgctccgatatcggtgccactggactggctatcgctgccagcagttcacgcaaggaacaggcatgggagttcgtgaaattcgcgaccggccccgccggtcaagcgttgatcggtgaatcctgtctctttgtcccagtcctgcaatccgcgatctattctacgggattcgccaaagctcataatagagtggctaacctcgccgtactcactggggggccagtccattcagcgggcctgccgatcacaccagcgtgggaaaagatcaacgccttgatggatcgtaacttcggacctgtgctgcgaggagtccggccggcgacatcgctggccggactcgcacgcgctgtcgacgaggtgttgaatagtccatga

SEQ ID NO: 27679 - DNA, 1935 bp, Mycobacterium leprae
atggttgatgaaatcatcgagattgacccagtcgatgacgacccggtgaacggcgccttcgctacgcttgcggtacccagccgggtcgttaagctgcgtgccacagtgtgtcacgcactcgcgcaaatgggtgttgcgacggtagcacgggtacccgctacctgggctatgctggtgccgcgtctgccacggctggttgttgccgtggtggccggtttgctgttttgcgccagcttcccgtcgctgaactggtggtgggccgccgttgtcgccttcgcgctgctggcttgggtcttgacgcacccaactacgacacctgtaggtggtctgggctatggatttctgttcgggttagcgttctatctgccgttgttgtcgtggatcagcagtcttgtgggtgccacgccctggtgggcgctggcgaccgcagccgcgtttttgcccggtttttttggcctgctcgctgtcgtagtgggcccgctgccgggttggccgatctggtttgcggtggtgtgggcggcgcaagagtggttgaagtcggtcgttccgttcggcggctttccctgggggtcggtggccttcggccaagccgatggcccgttactgccattggctcaactcggtggcgctccgttgctctcgatggcgattgtgctggtgggatgcagcactaccgcgatcgcattagaagtcgttaagtggtggcgaagcagtggtcagtcgaatagaagcgatccaccgccggcggtggtgctgccaggtgtttgtgtgtgcctggtgttgctggccgtcgtcgttgtttggccccaggtgcggcacgcgggtgcaggatcgggcggcgaacctgtgattactgtcgcggcagtacagggcaacgtaccgcggctcggtcttgacttcaacgcgcaacgccgagctgtgctggacaaccacgtccatgagacgctgcgactggccgaggacgtgcgtgctggaatcgtcccgcaacctcaattcgtgatctggcccgagaatgcgtcggatatcgatccactagtcaatggcgatgctgggcaagagatcacggtggcggccgcgacgattgacgcgccgatcttagtcggcaccgtgcttgatgtccaaggccctgtaccacaagcccccgagtacaccaatacagtgattgtctggaatcctggcaccggaccggctgatcgccatgacaaggaaattgtgcaacctttcggcgagtatttgccgatgccgtggctttttaagcgtctttctaagtatgccgaccgggtgagccacatcgtgccccgccaaagtcaaagtagtggtgtcgtgcgtatcgcgggggtacctatcggggtgaccacctgttgggaagtgatctttgaccgtgctgcgcgaaaagctgtcctcaatggcgcccaattgctggcggcgcccaccaacaacgctactttcaacaaaacgatgagtgagcaacagttggccttcgccaaagtccgagctgtggagcacgaccgatatgtggtggttaccggcaccaccgggatcagctcggtgattgcgccggacggcagcgaattggtccgcaccgacttctttgtgcccgcatatctggacatgcaggtgcgtcttaaggcgaagctgactccagcaacttgctggggtctgaccttgcagtggatcctagtcggaacggctggagcgatcgtgctcgccgccatgcggcacaataatggttcccgctcccgtatcgttttgggtctagggtcatcggcgagtctgaagactcgggtacgccaggcgaatgttagggaggcgttgacactccgcctgggggatcgaccgctaatccacctgagccggctggtgactacactccgctctatctataagggcggccaaaagccacgttatttcgggcgacacaaaggagctaaatga

SEQ ID NO: 27680 - DNA, 1230 bp, Mycobacterium leprae
ttgcgtcaagaagtccacgatgctgcccggcgagcccgggtcgctgctcgcgctctcgcagttatgccgacggtagctaaggaccatgcactgcgggccgcagcaacggcggtaactgctcacaccgaggagatcctcgcggccaacgccgaagatctgcaggcggctcgggccaccgacacactggccgcgacgctcgacaggttagctttggataggcaacgcattgaccaaatcgcgggcggtttgcgtcaagtcgcggcgttgcccgacccgatcggggaggtgttgcgcggttacacgctacctaatgggctgcagttgcgccagcagcgggttccactcggcgtagtgggtatgatctacgagggccggcctaacatcaccgttgacgctttcggactggcgttcaagtcaggtaatgcggcgttgctgcgtggcagctcgtcagcggcgaagtccaaccaagcgctcgtagaggtgttgcacgctgcgttggttagcgaagacttgcccgccgacgcggtccagctgctttcagctgccgatagatccacggtcacccacctgatccaagctcgcggcctggtggatgtggtgatcccgcgcgggggagcgaacctgattgatgcggtggtccgtgacgcgcaagtgcctattatcgagaccggtgtcggcaactgtcacgtctacgtgcatcaggctgctgacctggaggttgccgaacggatcctgctgaactccaagacccgtcggcccagtgtctgcaatgctgccgagacgctgttgatcgatgcagcgattgccgatcacactatgcctaggttggtcgctgccttgcaaggtgccggagtaacggtgcacggtggtctttcgggagacccggacaaggctgacctgtgtcgcgaatacctgtcgatggacattgccgtggcggtggtcgatggcgtcgacgccgcaattgcccacatcaatgagtacggcaccggacacaccgaggcgattgtgaccaccaatatggctgccgcccaacggtttgccgacggagtggactcggccacggtgatggtcaacgcatcgacggcgttcactgatggtgggcagttcggtttcggcgccgagatcggtatctccacccagaaattgcatgcccgtggaccaatgggactgtcggaaatgacctcgactaagtggatcgtgtggggagacggtcagatccgaccggcctga

SEQ ID NO: 27681 - DNA, 1440 bp, Mycobacterium leprae
atgcctcggtttgtcgatcgcgtcgtcatccacacctgggcgggttctggcggtaacggctgcgcttcgattcatcgctcaaagttcaagccgttaggtggccctgatggtggcaatggtggccgtggcggcagcgtggtcttcgtcgtcgaccctcatgtgcacaccttgttggactttcatttccgaccgcacatcaccgcgccatccggcaaacagggtatgggcaacaaccgtgacggtgcagccggcgcggatctggaagtcaaagtccccgacggcaccgtcgtcctggacgaagacggtcggttgctagctgatctggtaggcgcgggcactcgtttccaagccgccgctggcggtcgcggcggcttgggcaatgcagcgctcgcgtcgcgtacccgcaaggtgcccggcttcgcactgctcggtgaacaaggcgagtctcgtgatctcaccctggagctcaagagcgttgccgatgtcggtttgatcgggtttccttcggccggaaagtcgtcccttgtgtccgtgatctcggcggccaaacccaagattgccgactacccgttcactacgcttgttcccaatctcggcgtggtctcggtcggcgaacacgcgttcaccgtcgctgatgtgcctggtttaatcccgggagcttcggcggggcgcggcctgggtctggactttttacggcatatcgagcggtgcgcggtgctggtgcacgtggtggattgtacgagtgtagaaccggggcgtgatccgatcttggacatcgccgcgctggaggccgaactcgcagcttataccccgacactgcaaggagatacgactttgggtgactttgctgagcggccccgtgcggtggtgctcaacaaaatcgatgtgccggacgcccgcgagctcgctgaattcgtttgcgacaacattgctgccgagcgcggttggccggtgtttagtgtgtcgacggtcactcgagaaaacctgcagtcattgattttcgggctgtggcagatgatctcagcgtaccacgccgcgaggtcggagccggcgccgggacggtcgctgattcgtccggtgcctgtcgatgacagcggctttaccgttgaaccggacggacagggcggctttgtggttaccggtacgcgacccgaacgttggattcatcagaccaacttcgataacgccgaagcggtcggctatctcgccgaccggctggcacgcctcggggtagaggacgaactgctgcgggtgggtgcacagccggggtgtacagtaagcattggtgggatgacgttcgattgggagccacaaaagcctgcgggccatccggtcgcaatgtcaggccggggtaccgacgcgaggttggaaagtaccgaccccgttggtaccgctgaacgcaaggttgcgcggcatcagcgtcacaaacacggtggatga

SEQ ID NO: 27682 - DNA, 267 bp, Mycobacterium leprae
atggcacacaagaagggagcttctagctcgcgtaacggtcgcgattccgccgctcagcggctgggagtcaagcggttcggtggccaggtcgtcaaggctggcgagattctggtccgccagcgtggcaccaagtttcatcccggtgtgaacgtcgggcgcggcggcgacgacacactattcgccacatcggcaggagccgtcgaattcggcgtcaagcgtggacgcaagaccgtcaacattgtcgctgtcgggctaaccgccgactag

SEQ ID NO: 27683 - DNA, 312 bp, Mycobacterium leprae
atggcgacctatgcaatcgtcaagaccggtggcaagcagtacaaggttgctgtgggagacgtggtcaagatcgagaagctcgacttcgagcccggcgccaaggtatctttgcccgtcaccttggtcgtcgatggcgccaccgtcaccaccaatgccaaagctttggccaaagttgcggtgaccggtaaagtgctcgagcacaccaagggtcccaagatccgtatccacaagttcaagaacaagactggctaccataagcgccagggacaccgtcagcagttgactgtcctcaaggtcactggcatcaagtag

SEQ ID NO: 27684 - DNA, 2775 bp, Mycobacterium leprae
gtgatagacggtgcacccccgttagagccatcaaaagagccgacgcagcatatggaactgccggaccgcttgagagtccattcgctagcacgaacgttgggaaccaccagcagacgagtgttggacgtgctgagcgctctcgacggccggatccgtagcgcacattccagtgtcgaccgcgtcgacgcggtccgggtccgtgatctgctggccagccaacccaactcacctcatgaactcactgccgtacctgataaccctgtcgcgctcgaagagcgcgactctcggctggtgctagaaaccacagtagagcggccgcactacatgccgttgttcgttgcgccacagccgatagaggtcgatgatgactcctgcgctgacgatgatgtggaatccggtgacgactccgacgttggcgacgacgaagagcaacccgatcgaccggcgaaccgtcgtcggcgtcgtggccgtcggggtcgtggtcggggccgcggtgagcagggtggatccgacgtccagagcgacgatgtcgacggcgcggtcgactcaaccgagtctgaggacttcgatggccaagatttcgacgagtccgaagacaccgaaatcggttacgacgagagtgggtcctctgaagccggcaaccgccgccgccgtcggcgccgacgtcgtaagtcgggggtaggtgaagacgaggggtgcgcgcccgacgatccgccgaacacggttgtgcacgaacggacaccccgtgcggctggtcggtctgctagttttgacaacggcgtcaacggcacgggcagcgccgatatcaagggtatcgacggttcgactcgactggaggccaagcggcaacgccgccgagacgggcgcgacgccgggcggcgccgttcatcagtgttgagcgaggccgaattcctggctcggcgcgagtccgtcgagcgggtcatggtggtgcgcgatcggatccgcactgagccgccccaccctggcgctcgatacacccagatcgcggtgctcgaagacggcatcgtcgtcgagcacttcgtgacgtcggcagcatctgcttccctggtcggcaacatctacctcggtatcgtgcagaacgtgctgccgtcgatggaggcggccttcgttgacatcggtcgcggtcgcaacggcgtgctttatgccggagaagtaaactgggaagcggccggattgggcggggccgatcgcaagattgaacaggccctcaaacccggcgactatatcgttgtccaggtcaacaaggacccggtcgggcacaaaggggcgcgacttaccacgcaagtgtctttggccggtcgttacctggtttacgtcccaggggcgtcgtcgaccgggatcagccgtaagctgcctgacaccgaacgccagcgcctcaaggagatcctgcgtgaggtagtgccacccgatgcgggcgtgatcatccgcactgcgtcagagggcgtcaaagaggaagacatccgcaaggatgtcacccgcctgcaggagcactgggaacagatcgaagccaagacaatccagaccaaggaaaaggccgctggcgctgcggtggccctttatgaggaaccggatgtgttggtcaaagtcatccgcgacttgttcaatgacgacttctcgggcctcgtcgtctccggcgacgaggcatggaataccatcaatgagtatgtgaattctgttgctcccgaacttgtttcgaagttgacaaagtatgacccgccaatcggtccggacgggcagcacgggccagatgtcttcgcggtacatcgcatcgacgagcaattggccaaggcaatggaccggaaagtgtggctgccatcgggcggtacactggtgattgaccggactgaggcgatgacggtgatcgacgtcaatactggcaagttcaccgggtctgggggtaacctcgagcagacagtcaccaagaataatcttgaggcagctgaggagatcgtgcgccagctgcggctgcgtgatattggcggcatcgtggtcatcgacttcatcgatatggtgctcgagtccaaccgcgacttggtgttgcgtcgactgactgaggtgcttgctcgcgaccgcactcgtcaccaggtgtccgaggtgacgtctttggggctggtgcaattgacccgcaaacggttgggcaccgggctggtcgaggcgttctcgacatcgtgtccgaactgcacaggtcgcggtatcctgctgcacaccgacccagctaattcgaccccgatggttggacgcaagtccgagtcaggcggtcggcgaagtaagcgatcgaaaaagaaccgatcggacgagaccgctgtggttaaagtaccggtgcatgctccgggcgagcatccgatgtttaaggcgatggccgcgggctcgtcctcggtggttgttggtggcgaggacgaatccaacgagtctggtacagaactcaccgggaagatcgacgagccgctcgaagagcaggctgttgctggcctagatgatgttgaccaggaagatttcgacaccgacgaagaagacgacctcgacgatgacgaggagctcgacgacgaggaagaccttggcgacgatgacgaggaactcgatttagacgacgatcttgacgttgacgaagacgagtctgactccgaggccgacctcgacagcgctgacgtgcttgaccgctccactctcctgatcagaaacagatcaggttttgcccgtccgcgacggcggcgcgcagcgggtcgtccggccgggccgccgatccacgtggactga

SEQ ID NO: 27685 - DNA, 2661 bp, Mycobacterium leprae
gtgaccaccagccctagttcctctgctgacctgctgcccaagtcgtgggacccaggtgcgatggagagcgtgatttaccagaagtggttgaactccggttacttcgccgcggatcccgccagcacaaaacctgggtattcgatcgtgcttccgcctcctaatgtgaccggcagtctgcatatgggccacgcgttagagcacaccatgatggacgccttgactcgccgcaaacggatgcagggatatgaggtgttatggcagccaggcatggaccacgcagggatcgcgactcagagtgtagtggaaaaacagcttgcgatcaacggcaagatcaaggaggactttggtcgggagctgtttgtcgacaaggtgtgggactggaagcgtgaatccggcggtgccatagccggccagatgcgccggctcggtgatggggtggattggagccgcgaccggttcactatggatgacggcttatcgcgggcggtgcggatgatcttcaagcggctctacgacgccgggctgatctaccgggcggagcggctggtcaactggtcgccggtacttcggacggcactctccgacatcgaggttatctacgacgagatcgagggcgaattgatctcgttccgctatgggtcactcgacgacgacgagccacacatcgtggtagctaccacccgggtcgagacgatgctcggcgacaccgggatcgccgtgcatcccgatgacaagcgctatcagcatctggtcgggactacgctgccgcacccgtttatcgaccgcgaacttgtaatcgtagctgatgagcacgtcgaccctgaattcggcaccggcgccgtcaaagtcacacccgctcatgatcccaacgactttgaaatcggattgcggcacaacctgccgatgccgaacgtcatggacgttaaggccgttatcgttgacaccggaactgaattcgacggcatggatcgattcgaggcccgcatcgcggtgcgcgaagcgctagcggtgcagggccgcattgtcgaggagaaacgaccctaccggcacagcgtgggccattctgagcgcagcggcgaggtcatcgagccacgcctgtcgctgcaatggtgggtcagggtggaatcgctggccaaggccgctggtgacgcggtgcgtaacggggacaccgtgattcaccctgctagcatggaatcgcgctggttcgcttgggtggacgacatgcgcgactggtgcatctcacggcagctgtggtggggccatcgcataccgatctggtacggtcccaacggggaacaagtgtgtgtcggtcccgacgagacccctccggagggctggcaacaggaccccgacgtgctggacacctggttctcgtccgcgttgtggccgttttccacgctgggctggccacaaatgactccggagctggaaaaattctatccgacaagtattctcgtcaccggctatgacattctgtttttctgggtagcgcgcatgatgatgctcggcaccttcgtcggcggggacgatgccatcacactgggtggctgccgtggcccgcaggtgccgttcaccgatgtcttcctgcatgggctgatccgcgacgaattcggtcgcaagatgagtaagtccaggggtaacgtcatcgacccgctggcctggatggatatgttcggagctgacgcgctgcgcttcactctggcacgcggctccagccccggtggtgatctggctataggagaggatcacgtccgcgcgtcgcgcaacttcggtaccaagctgttcaacgccacccggtacgcactgctcaatggtgctgcgctggtacctttgcctgcgctgacggcgctgacagatgccgaccgctggattctcggaaggctggaacaggttcgcgccgaagttgattcagctttcgatggctacgaattcagccgcgcctgcgaggcgctctaccattttgcgtgggacgaattctgcgactggtatctcgaattggccaaggcacagcttgctgacgggctcacgcacaccacagcagtgctggccgcggcactcgatacgttgctgcggttgctgcacccggtgatgccgtttattaccgaaacgctctggcaggcactgacccaactggagtcactagtgattgctacctggccggagccttctggcatcagcctagatctggttgccgcgcagcggatcagcgatatgcagaagctggtgaccgagatccgtcggttccgtagtgatcaggggttggtcgatcgacagaaggtgccggctcgattgtctggtgtcgaagattccgacctggccacccaggtgggcttcgtgacatcactagctttgcttactgctgcgagcaacgattttcgcccttcagcgttgctggaggttcgtctcggccctaacaaagaccgcgccgtcgtcgttgaactcgacacttcgggcaccatcgatgtggctgccgagcgtcgtcgcatggaaaaggacttggctgcagcgcaaaaagagctggcatcgaccgccgcaaagttggccaacgcggactttctagctaaagccccggaagcagtcgttgtcaaaatccgcgatcgtcagcggatggctaaggaagaaaccgaccgcatcatcgctaggctggctgggctgcaatga

SEQ ID NO: 27686 - DNA, 1281 bp, Mycobacterium leprae
atggcgcgtatcggagacagcggtgacttgctgaagtgctcgttttgcgggaagagtcagactcaggtcaagaaactaattgcgggccctggggtgtacatctgtgatgaatgtattgacctgtgcaacgagatcatcgaagaagaactggccgatgctgacgatgtgcagcttgatgagctgcccaagcctgttgagattcgggagtttcttgagggttacgtcatcgggcaggacaccgccaagcggacgttggctgtcgcggtctataatcactacaagcggatccaggctggagagaagggccgtgactctaagcgcgaaccggtagagttggccaaatccaacatcttgatgctgggacctactggttgcggcaagacttacctggctcagacgttggccaagatgctcaatgtcccgttcgccatcgccgacgccaccgcactgaccgaggccggttacgtcggtgaggatgtcgagaacatcttgcttaagctgatccaggccgccgactatgacgtcaagcgtgccgagaccggtattatttacatcgatgaggtcgacaagatcgctcgtaagagtgagaacccatcgatcactcgtgacgtctccggcgagggcgttcaacaagccctgctgaaaattctagaaggtacccaagcgtcggttcccccgcaaggtggccgcaagcacccacaccaagaattcattcagatcgataccaccaacgtgttgttcatcgtcgccggtgcctttgccgggttggataagattatttacgagcgtattggcaaacgcggcttaggctttggtgccgaagtccgctccaaagccgaaatcgacaccaccgatcatttcgccgatgtgatgcctgaagatctgatcaagttcggcttgatccctgagttcatcggacgactcccggtgatcgcctcggtcatcaatctggacatggagtcgttggtcaagatcctgtccgaaccgaagaacgctttggtcaagcagtacacttggcttttcgaaatggacggtgtggagctggaattcactaacgacgcgctggaagcggtcgccgaccaagcaatccaccgcggcaccggcgctcgtggcctgcgggccatcatggaagaagtcctgctacccgtgatgtatgatattcctagccgcgatgacgttgccaaagtggtggtgaccaaggagactgtgcaggacaacgtgttgccgacaatcgtgccgcgcaagccgtcgcgcactgagcgccgcgataagagtgcctag

SEQ ID NO: 27687 - DNA, 489 bp, Mycobacterium leprae
atgtcgggcatgcgtgtctacctgggggccgatcacgccggctacgagctcaagcggcagattatcgagcatctgaaacaatccggtcatcagccgatcgactgtggcgcctttagttacgatgtcgacgatgaatatccggcgttttgcatcactgccgcgacgcgcacggtggccgatccaggtagcctcggtatcgtgcttggggggtcgggcaacggcgagcagatcgcggccaacaaggttgtcggcgcacggtgcgcgctggcgtggagcgtcgagaccgcgaggctggcgcgtgaacacaacaacgcgcagttgatcggtattggcggccgcatgcacaccgtcgctgaggcgctgactattgtcgacgctttcgtgaccacaccgtggtcggaagcgcagcgccaccaacggcgtatcgatatcctcgccgaattcgaacgtacgcaccaagcgccgccggtgcccggcgctcaggcctga

SEQ ID NO: 27688 - DNA, 2589 bp, Mycobacterium leprae
gtggcccttccaaacctcacccgggaccaggctgtcgaacgctccgccctgatcaccgtcgacagctaccagatcaacctcgatctcaccgacggccccgacaacgcccctagcgaccgcacgttccgctccatcaccacggtggtgtttgacgcactagccggcgccgacaccgtaatcgacattgctgccgatgccgtgcgcagtgccaccctcaacgaccacgaactcgacgtctccgaatacgacgaatcgaccggtatcccgttacctggactggccgatcgcaacgttgtcgtcgtcgacgccgactgccgctactccaacaccggcgagggcctacatcgcttcgtcgaccccgtagacgacgagatctacttgtactcgcaattcgaaacagctgacgccaaaaggatgttcgcctgcttcgaccaacctgacctcaaggccaccttcgaggtagaggtgaccgcatgcaagaactggaaggtgatctccaatagcgtgtgcatcaacatcaccgaggggacacacaccttcgccaccaccccacgtatgagcacctatctggtggcgttgatcgccgggccatacgctgcttggtacgccagttaccgcgacgaacacggtgaaatcccgctgggcatctactgccgagcctcgctggcacaattcatggacgccgagcgattattcacacagactaagaagggatttaatttttaccacaagcactttggcctaccgtacgcgttcggcaaatacgatcagctcttcgtccccgagttcaatgccggagcaatggaaaacgccggcgcggtgacgttcctcgaggactacgtcttccgcagcaaagtcacccgtgcttcctatgaacggcgcaccgagacggtactacacgagatggcacacatgtggttcggcaatttggtcaccatgacctggtgggacgacttgtggctgaacgagtctttcgcaacctttgcatcggtgctgtgtcaaagcgaagccaccgaatttaccgaagcgtggacgacgttcgccactgtggaaaagtcgtgggcttactgccaggaccaactgccatccacgcacccgatcgtcgccgacatcccagacctggctgcagtcgaggtaaactttgacggcatcacttacgctaaaggcgcttccgtattgaagcagctcgttgcgtacgttgggttagagcaattcctggccgggctgcgcgactacttccgcaaacacgcattcgccaatgccacttttgacgatctgcttgtcgcactggaaaacgcctccggacgcgacttgtcacactggagtcaacagtggctgaaaaccactgggatcaacatgctaaggccagatttcgacgtcgacgccgatggcaaatttacccggttctcggtgatgcaaagcggcgccgaaccgggtgcgggtgagactcgggtgcaccggctggcggtcggaatctacgataactgcggggaagccgacaaactggtgcgggtgcatcgggaagaactcgacgtcgagggtacagaaacggaagtacctgcactggttggcatttcgcagggcaagctgattcttgtcaatgatgacgacctgacctactgctcactgcggctagatgcccagtcgctgcaaaccgcgctacagagcatcgccgacatcgccgaaccactgccacgcaccctggtgtggtcaacagcctgggaaatgacccgcgaggccgaattgcgtgcccgcgacttcgtggcgctggtttcaggtgccttgcatgccgaaaccgaggtcggggtggcacagcggctgctactgcaggcgcaaacggcgctgggctcatatgccgatccagactgggcgcgtgattacggctggccgcagttcgccgaccggatcttggaattggcgcgcgccgcagtatccgggtcggatcaccagctcgctttcatcaacacgctgtgctcatcggtgctgtcgccccggcatgtgcagacattggctgccctgctcaacgatgaccccaccgagctgggattgcctggcgtgcaggtcgataccgatctgcgctggcgcatcgtaaccgcactcgccaccgccgggactctcgatgccaatgggccgcagacaccatggatcgacgccgagatgcaacgtgacccgacggccgccggcaagcgccacggcgctcaggccgcagcagcacggccgcagtccgacattaaggacaaggcgttcactacggtggtcgaagatgacaccctgactaacgctgcaggccgggcaataatcgcgggcattgtcgcaccaggacaaggtgagctactcaagccgttcaccgcgcgctacttcgccgcgatacccggtgtctggacacggcgatccagcgaagtagcgcaaacggtggtgatcggcctgtatccccactgggacatcagcgacgtgggtatcgccgctgctgaggagttcctaaccgccccggagtcaaaagtaccaccagccttgcgccggctggtgctggagggccaggctgcggtgaagcgcgcactacgcgctcgcatgttcgacagtgctgactaa

SEQ ID NO: 27689 - DNA, 1104 bp, Mycobacterium leprae
gtgtccccctttgggcgagtgtcggctaccttgccggtgtttccctgggataccttggccgatgcgaaagccgtcgccgagagtcatcccgacggtattgtcgacctgtccgttggcaccccggtcgatcccgtagcgccgctgattcaagaagctcttgctgccgcgagctccgtagcgggatatcccactacggccggcactgcgcggctgcgtgaggcggccgtggcagcgttggaccgccgctacggcatcaccggactcactgaggcggccgtgctacctgtgattggcaccaaggaactgatcgcctggttgccgaccctgctgggcctgcgcgccggcgacgtggttgtggtgccggaactggcgtatccgacatataatgttggcgcccggttggccggagcacgggtgctgcgtgcggattcgttgacccagctgggcctgcagtccccggcgctgttctacctcaactctccgagcaacccgaccggccaagtactcgccgtgaaccacttgcgcaagatggtgggatgggcgcgcaatcgtggtgtcgtggtggtttctgacgagtgctacctgggtttaggttgggacgccgagccgttctcggtgttgcaccctttggtttgtgacggcaaccatactgggctgctggcggtgcactcgctgtcaaagagctcgtcgttggccggatatcgggcgggttttgttgctggagatccggacttggttgctgagctgctggcggtacgcaaacacgccgggatgatggtgccgactccggtgcaggcggccatggtcgccgcccttggggacgacgctcacgaacgcgagcagcgagaccgctacgctcgtcgaagggatgttttgttgcccgcggtcgtatcagccggttttaccgttgatcattccgaggccggcttgtacctgtgggccagccgtggtgagccttgtcgggatagcgttgagtggttcgcccagcgtggaatcctggtggcgctcggcgaattctacggccccggtggttgtcagcatgtgagggtggctctgaccgccagcgatgagcggatcgctgccgtcgtcgcgcggctcagctag

SEQ ID NO: 27690 - DNA, 1887 bp, Mycobacterium leprae
gtgccattccgcaatgtcgccattgtcgcgcacgtcgaccacggcaaaaccacgctggttgacgcgatgctacgccagtccggcgcgctacacgaacgcggtcaagtccaggaacgcgtgatggataccggtgacttggaacgggaaaaaggcatcacaatcctggccaaaaacacggccgtacattgtcacaattcggacggtacggtgacggtgatcaatgttatcgacacgcctggccatgccgacttcggcggtgaagtggaacgcgggctgtctatggtggatggggtgttgttgctggtcgatgcctccgaagggccgctgccgcagacgcggttcgtgctgcgcaagacgctggctgcgcatttgccggtgattctggtagttaacaagacagatcgtcccgacgcacgcatcgccgaggtggtggaagccagccacgacctgttgcttgacgtcgcatccgatcttgacgaggaagcggctgcggccgccgagcgtgcgctgggtctgccgacgttgtatgcgtccgggcgtgccggcatcgccagcaccgagcagcctgctgacggtgctgtgcccacgggcgacaacctcgaccccttgttcgacgtgctgatggagcacatcccgtcgccgaagggtgaccccgaagcgccgttgcaggcgttggtgactaacttggacgcctcggccttcctcggtcggcttgctttggtccgcatctataacggcaagctgcgcaaggggcagcaggtggcttggatgcgtgaagtggacgggctgcctgtcaccaccgacgccaagatcactgagttgctggtcaccaaaggtgtcgagcgcagcactacagaggaagcgacggcaggggatatcgtagccgtagcgggactgcccgagatcatgatcggtgacacgttggccgatcccgagcatgctcatgcactaccgcgtatcaccgtagacgagccggctatctcggtgacgatcggcaccaatacctcgcccctggcgggcaaggtgtcgggccacaagttgactgcgcggatggttcgtggccgcctggacgctgagttggtcggcaacatctcgatccgtgtggtggacataggacggcccgatgcgtgggaggtgcagggccgaggtgagcttgcgttggcagtgcttgttgagacgatgcgtcgggaagggttcgagcttacggtcggcaagccgcaggtggtcacccgtacgatcgatggcaaactgcacgaaccattcgaggtgatgacgatcgactgtcccgaggagttcgtcggcgcgatcacccagttgatggccggccgtaagggccgcatggaggagatggccaaccatgctgtgggctgggtgcgaatggacttcatcgtgcccagccgtggcttgattggcttccgtaccgacttcctcaccctcacacgcggcaccggtattgctaacgctgtgttcgacagctatcggccgtgggccggtgagatccgagccagggatacggggtcgctggtttccgaccggccgggtactattacgccgtttgctctgctccaacttgccgatcggggtcagttcttcgtgtcgcctggccaggacacttaccaaggtatggtcgtcggaatcaaccctcgtccggaagatctcgatatcaatgttactcgtgagaaaaagctgaccaacatgcggtcatcgaccgccaatgtcatcgagacgttgaccaaaccgctcgagctggacctggagcgggcgatggaattctgctcgttcgacgaatgtgttgaggtgacccctgagattgtgcgggtgcgcaagatcgaactggaatccaacgcccgggcccgaggccgggcccgagccaaggttcgaggctag

SEQ ID NO: 27691 - DNA, 1677 bp, Mycobacterium leprae
gtggatgtagccctggccccgccaggtccgctggcctcaggtgggttgagggttacagcgttgggaggcatcagcgaaatcggccgcaatatgacgattttcgagcatctgggccggttgctgatcatcgactgcggcgtgctgttccccggccacgacgagcccggtgtcgacctgatcctgccggacctgcgccatatcgaagaccggctcgacgatatcgaggcgctcgtgttgacacacgcgcacgaggatcacatcggcgcaatcccgttcttgctcaagttgcggtctgatatcccggtagtcggctcgaagttcaccttggccttggtcgccgcgaaatgccgtgaacaccgcatcaaaccggtgtttgtcgaagtcgtcggggggcagagctctcggcacggtgtgttcgagtgcgagtatttcgccgtcaaccattccataccggacgcacttactatcgcggtctacacgggcgcgggaacggtattgcacaccggagacatcaagctcgatcaattgccgctcgacggccgccctaccgacttgccaggcatgtcccggctgggtgacgctggtgtagaccttttcctgtgcgactcaaccaatgccgagatacccggcgtcgggcctagtgaaagcgaggtgggtccgacactgcataggctgattcagggggctgatggccgtgtcatcgtggcgtgttttgcttccaatgtggaccgggtgcagcaggttatagatgctgcagtggcattgggccggcgggtgtcgttcgtcggacggtcgatggtccgcaatatgagcatcgcgcgtgacctcggatttctacgagtagacgattcccatatgattgacatcgccgctgccgagatgatggcaccagaacaggtagtgttgattaccactggcacccaaggtgagccgatgtcggcgttgtcgcggatgtcacgcggcgagcatcagagcatcacgctgacctcgggtgacctcgtcgtgttgtcatcatcgctgatccctggcaacgaggaggcggtctacggtgtcatcgacgcgctcgccaagattggagctcgagttgtcaccaatgcccaagcccgggtccatgtttcgggccacgcctacgctggtgagctgctgttcttgtacaacggcgtgcggccgcgtcaggttatgccggtgcacggtacttggcggatgcttcgcgctaacgctaagctggctgccagcaccggggtgccggaggattcaatcttgatcgccgagaacggcgtcagtgtcgacctggttgctggtaaggcgtcggtctccggagcggtgccggtcggcaagatgtttgtcgatgggctgattaccggcgatgtcggcgatgttatcctgggtgagcggcttatcttgtcgtcgggttttgtcgcggtcacggtggtggtgaagcgcagcactgggcgtccagttactgtgccgcaactgtattcacgaggattttccgaagaccccaaagcgcttgagcctgcagttcgcaaggtcgaggcagagctggagtcgctgctcgccgagaacgtgaccgacccgagcaagatcgcccaggccgtgcgccgcgccattggcaaatgggtaggtgaaacctaccgtcggcagccgatgatcgtgccgacggtgatcgaggtttga

SEQ ID NO: 27692 - DNA, 498 bp, Mycobacterium leprae
atgacggtggtgggcctgatctgggctcagtcgacgacgggtgtgattgggcgcgacggcggcatgccatggcgagtgcctgaggatctgactcgcttcaaacagctgacgatgggtcacccggtggtgatgggccgacggacctgggattcgttgccggttggggttcgcccgctgccaggccgccgaaatatcgtgttgagccgacaaattgactttatggctgagggagcggaggtgttcggttctctcgaagagaccatttccaatctcgagaccgagcctgagatgtgggtgattggcggtgagcagatctaccggcttgcgttgccgctggcgacccgttgcggggtcaccgaggtagacacctacctgcttcatgaggacgatgacgtgctggccccggtgctcgacgatacatgggtgggtgtgacgggagagtggctggtgagctgctccgggctgcggtaccggttgcacagctatcatcgttcatga

SEQ ID NO: 27693 - DNA, 801 bp, Mycobacterium leprae
gtgctgatagcgacgccatacgaggatttgctgcgtctcgtgcttgactgcggcgtagccaaaatggaccgcaccggcaccgggactcgcagtctgtttggtcagcagttgcgttacgacctgtcggttgggttcccgctagttacgacgaaaaaggtgcacttcaaatcggttgtctacgagttgttgtggttcttgcgcggcgactccaacgtcgcctggttgcatgagcatggagttaatatctgggatgagtgggctagcagcacaggcgacctcgggccgatttatggtgtgcagtggcgatcttggccgacctcttcgggtgattacatcgaccaaatcagcaccgcactggatttgctgcgtaccgaaccggattctcggcgcatcattgtgtcggcttggaatgtcggtgaaatcccgcagatggcgctgccaccatgtcacgcgtttttccaattctacgtcgctcaaggccggctgagttgccagctgtaccagcgcagcgccgacatgttccttggtgtgccgttcaacatcgccagttacgcgcttctgacccacatgatggccgcccagtccggtcttttggttggtgagttcgtctggacgggcggtgattgccacatctacgacaaccatgtcgagcaggtacagctgcagctcagccgcgaaccccgagcatatccagaactctttttagcgcagcgtgattctatcttcgactatgtctacgaggacgtcgtcgtcacgaattatgatccgcacccggcgatcaaagccccagtcgcgatatga

SEQ ID NO: 27694 - DNA, 963 bp, Mycobacterium leprae
atgagcgaaagctccacaggtgcaggactcggtccgggaatagtggtcattgacaagccgtccgggatgaccagtcacgatgtggtggcgcgctgtcgccgaatattttgcactcgcagggtggggcacgcgggaacgctggatccgatggccaccggtgtgctggtgctcggggtcgatcgagccaccaagatcttgggtctgctggccggggcctcgaaagagtacgtcgcgaccatccgcctaggtcagaccacatctactgaagacgccgaaggtgaactgctgcagtgtgtctcggctcggcacgtgacagacgaggcgatcgccaccgcgatcggtaggctgcgcggtgatatcaagcaggtgccgtcggcggtcagtgctatcaaggtcgacggccgtcgtgcttatcgactggtccgcgagggtcatgttgttgagctgcaagcccggccggtacgcattgaccggtttgaggtgctggctgttcgacccgggcccgaagtcggattagccgatgtcatcgatcttgatgtggaagtcgaatgctcatcgggaacctatattcgtgcgctggctcgcgacctcggcgatgcgttcggggtaggtgggcatctgacgtcgttgcggcgcacccgggtcggccgtttcgagctggaccaggcgtggtcactcgaggatctggcggagctaccgcggttgagtcggacgctagacgagacctgtttgctgatgtttcctcgccgtgaccttacggtaagcgaggtcgaggcaaccagcaacgggcgaccaatttcgtcggccggtatcgacggcatctatgccgccagcgacgccgacggccgagtcattgcattgctgcgcgacgagggcccgcggaccaagtcggtggtggtgctgcacccggtctttgtgcgagtcagcatcggacggggcattgttggggtgattgaggcctaa

SEQ ID NO: 27695 - DNA, 1443 bp, Mycobacterium leprae
atgggatgcaacaagcgaggcgtgactcgccaggaagacgacttctccgcctggtacaacgaggtcgtcgccaaggcaggactgatcgatcgaggacccgccaagggaaccatggtgattcgcccgtacggctaccgaatttgggagctgttgcaggacgagcttgatagcaagatcaaggaactcgggcacgaaaatgcctactttccgatgctgatcccagagaactatttcaaccgggaagccgagcatgtcgaagggttccatccggaactggcggtcgtcacccatgccggcggcaaggagctgtccgagcccctcgtgatccgtcccacctccgagaccgtcatcggcgacatgatggccaaatggatcacctcccaccgtgacctaccgctgcggttaaaccagtggtcgaatgtggtccgttgggaacttcggccccgaatgctgctgcgcacgatcgaattcctgtggcaagaaggtcactcggcgcacatcgagaaatccgacgctctccgcgaaactttgttcgctctggacatatacaccacgttggctcgtgacatggccgccattccgattgtttctggagagaaaaccgccggtgagcggttcgccggtgcgctcaacacctacactatcgaagcgatgatgcgcgatgggaaagcgttgcaatccgcaaccactcattacttgggagacaacttcgctcgggcgttcaacatccgctacaccaccgccgaagaacaacaagctttcgtgcacacgacgtcttttgggctaagtacgcggatgatcggtgctatcgtgatggtccacggcgatgacaagggccttgttctcccaccccaggtggccccctaccaagttgtcatcgtgccaatcactaccggcaacaaggcatccgaggtcggacatgccgcagcagacttggcgcgacgcctgcaagctgccggggtgcgcacgcatgtggatgcgcgtccacagctgacgccaggctggaaatacaacgaatgggagctccgcggggtaccgatccgcctcgaactcggcccgcgcgacctcgaagccggaaccacagtcatggtcaggcgtatcggtgagaaagccaaacagcccattgccatcgcagctgccccgaccgaactccccggcattctcgaagagttccaacgcaccttgctggagcgcgccacccaattccgcgacgatcacaccacactggtcgacaactgggacgctttcgcaacaaccgtagccacaggatgggcacttgccattcattgcggcaacccggagtgcgaagaggacatcaaagccgaaacagcggccaccccccgatgcgtacctcggcaaggcgccccagctaccggacggtgcatacgctgcgatgcaccatctgcttacgacaagcgagtcatctttgcgagagcctattga

SEQ ID NO: 27696 - DNA, 2775 bp, Mycobacterium leprae
gtggcaggtaaggcccgtgtacacgagttggctaaggaactcggtgttacaagcaaagaagtcctcgcccggctaaatgagcagggcgaattcgtcaagtctgcgtcgtcgacggtcgaagcaccggtcgctcgccggctccgtgaatcgttcggtggcatcaagccggccgcggataagggtgctgagcaggtagccacaaaagcccaggccaaacgcctcggcgaatcgctcgaccaaacccttgaccgggctctcgacaaggcggtcgcaggcaacggtgcgacgactgctgcgccggtacaggtcgatcattccgctgcagtggtgcctattgtggctggcgagggtccttcaaccgcgcatcgtgaggaactggcgccgcccgcaggacagccttcggagcagccgggagtgccgctccctggccaacagggcactccagcggcgccccatccgggccatccggggatgccgaccggcccgcaccccgggccggcacctaagccagggggtcgtcccccgcgcgttggtaacaacccgttttcgtcggcgcaatctgtagcccggcccatccctcgtccgccggcaccccgcccgagcgcttcgccaagcagcatgtcgccgcgtcccggaggtgcagttgggggagggggaccccgtccaccacgtactggcgtaccccgacccggtgggggtcggccgggcgctcccgtcggcggtcgctccgatgcgggtggcggtaactaccgtggcgggggtgtcggagccctgccgggtggcggctcgggaggttttcgtggccgtcccggtggtggcggccacggtggtggcggccggcccggacagcgcggcggtgcggccggtgcatttggccgtcctggcggtgcaccccggcgcggtcgtaagtccaagcggcagaagcgccaggaatacgactctatgcaagctcctgtcgttggcggcgtgcggttaccgcatggcaacggcgagacgattcgattggcgcgcggagcatccctctcggacttcgccgagaaaattgacgccaatccggctgcattggtgcaggcgctgtttaacctcggggagatggtgacggcaacccagtcggtcggtgacgagacactcgagttgctgggtagcgagatgaattacaacgtccaggtagtcagccccgaggacgaagaccgtgagttgctagaacccttcgacctcacttacggtgaggaccaaggagacgaagacgagctgcaggtccgtccgccggtcgtgaccgtaatgggccacgtcgaccacggcaagacccgcctgctggatactatacgaaaggccaacgtccgcgaggccgaggctggcggcatcacccagcacatcggtgcctaccaggtcggagtcgacctcgacggcagcgagcggttgatcaccttcatcgacaccccgggccacgaggcgttcaccgccatgcgtgctcggggcgccaaagccaccgacatcgccatcctggtggttgccgccgacgacggtgtgatgccgcagacggtggaggccatcaaccatgcgcaggccgctgacgtgccgatcgtggtggcggttaacaagatcgacaaggaaggtgctgacccggctaaaatccgtggccagctcaccgaatatggtttggtagcagaggatttcggtggcgacaccatgttcatcgacatctcggcaaaggtgggcaccaacatcgaggccctgctcgaggcggtgctgctgaccgccgatgccgctctggacttgcgggctaactccggcatggaggcccagggtgtggcgatcgaggcgcacctggaccgcggtcgaggtccggtcgccacggtgttggtacagcgcggtacgctgcgcatcggcgactcggtcgtcgccggcgacgcgtatggccgtgtccgccgcatggtcgacgaacacggagtggacatcgaggcggcgctaccgtcgagtccggtgcaggtcatcgggttcacgtcggtgcccggcgctggtgacaacttcctggtcgttgacgaggatcgcatcgcccgccagatcgccgatcggcgcagcgcccgtaagcgcaacgccttggcggcgcgttcgcgcaagcgaatcagcctggaggacctggattcggcgctgaaggaaaccagccagctgaacctgatcctcaagggcgacaacgccggtacggtcgaggcgttggaagaggcgctgatgggcatacaggtcgacgacgaagtcgctttgcgcgttattgatcggggcgtcggtggcatcaccgagactaatgtcaatcttgcgtcggcctcggatgcgatcatcattggcttcaacgtgcgcgctgaaggtaaagccaccgagttggcaagccgcgagggcgtggagatccgctactacttggtcatttaccaggcgatcgatgatatcgaaaaggccctgcgtggcatgctcaaaccgatttacgaagagaatcagctggggcgtgccgagatccgggcgctgttccgttcctcaaaggtaggcatcattgctggctgcataatcagttcgggtgtggtgcggcgcaacgcgaaggtccggctgttgcgtgacaacatcgtggtcaccgacaacctcacggtgacctcgctgcgtcgggaaaaagatgacgtgaccgaggtacgcgagggcttcgagtgcggtatgacgttgggttactcggatatcaaggagggtgatgttattgagtcctacgagttggtagagaaacaacgtgcgtag

SEQ ID NO: 27697 - DNA, 1044 bp, Mycobacterium leprae
atgaacatcgacatggctgcgctacatgcgatcgagatggatcggggtatctcggtcaatgagttgctcgacacgattaggtccgccctgctaactgcttaccggcatacccaggggcatcagatagacgcgcgtattgacatcgaccgcaaaactggcgttgtgaaagtgatcgcccgcgaagtcgatgacgatggcaatgtcattagcgaatgggatgacacgccagagggttttggccggatcgcggctactaccgcgcggcaggtgatgctgcaacgatttcgcgacgccgaaaatgagcgcacttacggagagttttccacccgcgagggtgagatcgtcgcgggtgtgatccagcgcgacagccgggccaacgcccgtggattagtcgtcgtccggatgggtagtgagaccaaggcttccgaaggagtgatcccggcggctgaacaggtccttggcgagagctacgaacatggcaaccgtttgcggtgctatgtggtcggtgtgactcgtggggcgcgtgagccgctgatcaccttgtcgcgtacccaccccaacttggtacgcaagcttttctcgttggaagtcccggagatcgccgacgggtcggtggagattgtgtcggtggcccgggaggccggccatcgttccaagattgcggtggcctcccgcgttcccggtttgaatgccaaaggggcctgtatcggtccgatgggccaacgggtccgaaatgtgatgagcgaactttccggagaaaagatcgacatcatcgattacgatgaggacccggcccgtttcgtcgccaacgcattatcgcccgcgaaggtggtctcggtgtcggttatcgatcagactgcccgggcagcccgcgtagtggttcccgactttcagttgtctctggccatcggcaaggagggccagaacgcgcggctagccgctcggcttaccgggtggcgtatcgatatacgcggtgattcgccgccatgctcggctggccagtcggaacagaatgccagccatgggatggcccacgaacgctag

SEQ ID NO: 27698 - DNA, 1605 bp, Mycobacterium leprae
atggtgactctttacgaccatgagcgggcagtccacaactggacagctgcacgatcggatcgtccggccccgtcgcgactgacgcagcaggtggagcccgcctcagaacgcacaagcaagtacccgacgttgctgccttctggtcgtttcccttctggtcgtttcattgcagcggtcatcgtgatcggtggcatgcagctattggcgaccatggacagcaccgtcgccatcgtcgcgcttcccaagattcaaaacgagctgagcctgtccgacgccggccgtagttgggggattactgcctacgtgctgacattcggcgggctgatgttgctcggtggccgcctcggcgacaccatcgggcgcaagcgcacgttcatcgtcggcgtcgcgctgtttactatttcctcggtgctttgcgctgtggcctgggacgaagtgaccttggtcattgctcgactattgcagggcatcgggtcggctatcgcatcaccgaccggtctcgcactggttgcaaccaccttctctaagggctcagcgcgcaataccgctacggcggtgttcgccgcgatgacggcaatcggctcggtgatgggcctcgtggtcggcggggcgcttaccgaggtgtcgtggcgactggcgtttttagtgaacgtgccgattgggttggtgatgatctacctggcccgcaccgctttgcatgagacccacaaggagcggatgaagctggacgcggctggggccattctggccacgctggcttgcaccgcggccgttttcgccttctcgatgggaccggagaagggttggatttcgctgaccacgatcggttcgggcttggtggcattggtagccgctatcgcatttgccgtcgtggaacgtactgctgaaaatcctgtcgtaccgtttgacctgttccgggaccgtaatcggctggtcaccttcatcgcgattttcctggccggtggcgtcattttcagcttgactgtatccatcggcctatacatacaggacatcttgggctacagcgcgctacgcgctggcatcggctttatcccgttcgtcatcgcgatgggaatcggcctgggcgtgtcttcacagttggtgtctcggttttcgccacgggtattgacgataggtggtggatggctgctcatggtcgctatgctgtacggttgggcgttcatgaaccgcggcgttccctattttcccaacctgttagcacccatcgtcgttggtggaatcggcatcggcatggccgtcgtcccgctgacgttgtctgctatcgccggggtaggtttcgatcggatcggcccggtgtccgcgattgcgctaatgctgcagagcctcggcgggccactcgtgctggctgtcatccaagcggtcatcacctcgcgcacgctgtacctgggcggtaccaccggcccagtgaagtttatgaacgacgcgcagttgcgtgcacttgatcacggctacacctacggcctgctgtgggtggccggagcggtcgtcatcgtcggcgtggcggcgctgttcatcgggtacacccccgagcaggtggcctacgcgcaggaggtcaaggaagcggtcgacgccggcgaactgtag

SEQ ID NO: 27699 - DNA, 1179 bp, Mycobacterium leprae
gtgaacatgcgtctgggcatgcccgaggctccggctcccgggcttgccccccggcgtatcacgcgtcaattgatggtcggcaacgttggggtcggtagtgatcaccagatctccgtgcagtcgatgtgcatcaccaagactcatgacgtcaatgcgacgttgcagcagattgcggagttgaccactgccggctgtgacatcgttcgggtggcctgcccgcgtcaagaggatgctgacgcacttgccgaaatcgcccggcacagcaagattccggtgattgtcgacatacatttccagccgaaatacatctttgccgccattgacgccgggtgtgccgcggtgcgggtcaaccccggcaacatcaaggaattcgacggccgggtcggtgaggttgccaaagccgcggccgcggccggtatcccgatccgcatcggcgtcaacgccggctcgctggataaacggttcatggacaagtacggcaaggccacgtccgaagcactggtggagtctgcgctgtgggaggcatcactgttcgaagagcacggcttcggcaacatcaagatcagcgtcaagcaccatgaccccgtcgtgatggtcgccgcctacgagcaactggccgcccagtgcgactaccccttgcacctcggtgtcaccgaggccggtcctgttttccagggcaccgtcaagtccgcggtcgccttcggagcacttttgtcgaagggcatcggcgacaccatccgggtttcgctatcggcgccgccggtcgaagagatcaaggttggcaaccaaattctcgagtcgctcaaccttcggccacgttcacacgagattgtgtcctgcccgtcgtgcggccgtgcgcaggtcgacgtctacaagctggccaatgaagtcagcgctgggttggacggactcgaggtgccgttgcggatcgccgtgatggggtgcgtcgtcaacgggcctggtgaggcccgcgacgccgacctgggtgtcgcgtccggaaacggcaagggccagatctttgtcaagggtgaagtgatcaagaccgtacccgaagcccagattgtcgagacgctgatcgaggaggccatgcggcttgtctccgagatggggaccgagaaaggcagtgatcactgttcagaaacgacaaggagcggttcaccggttgtgaccgtaaactga

SEQ ID NO: 27700 - DNA, 939 bp, Mycobacterium leprae
gtggcttccaccgatcccggcacaggcaccccgcttgacgagtcggtgcctgggatcaagagggctatgcggcaatcgactaagaataccccccgggcgggacgtaatctgcccgccgcgatcgcggtgggcttaagtattggtggtgttctcgtcgcaacgctggtgtttgctccgcgaatctgggttgtcttgtgcgctggcgccattttcgttgctagccatgaggtggtgcggcggctacgggaagctggatatgtgattccggctatcccgctgctcatcggtgggcagttcaccgtctggttaacttggccgtatcgcaccgttggtgcattggctggcttcggtgcgacggtggtggtctgcatgatttggcggcttgtcatgcacgacaacagcaagcagcacgaatctcgggaagctttggcaggtccgccggtgtcaaattacctgcgggacgcgtcggccaccgtttttttggccgcgtgggtcccgttgtttgcctcgttcgcagcattgctggtttatccgaaggatggtgcgggccgggtattctgcctgatgattgcggtggtagcttccgatgtgggtggttacacagtaggggtacttttcggcaaacatccactggttccaaggattagcccgaataagtcctgggagggattcgccggttcgctggtctgcgggaccaccgcaaccatcctgactgctaccttcctggctggcaaaacaccgtgggttggggctttgctcagttttgtactggtgctcacctgcacgctgggggatttggtggagtcccaagttaagcgcgacctcggcatcaaagatatgggccggctgctacccggccacggtggcctgatggaccggcttgatggtgtgctgccgtcggcggttgtagcttggaccatgcttacgttgctgccctga

SEQ ID NO: 27701 - DNA, 558 bp, Mycobacterium leprae
atgatcgatgaagctcttttcgatgcagaagagaaaatggagaaggctgtttcggtggcgcgtgaagatttgtcgatgattcggaccggccgcgccaatccaggtatgttctctcgactcgtcattgattattatggctcggccaccccgatcacccagctggccagcattaatgtacctgaggcgaggcttgttgtcatcaagccgtatgacgccattcagctgcatgccattgaaactgctattcgtaactccgacctcggggtgaaccctagtaacgacggtaccttgatccgggtagccgtaccgcagctaaccgaggaacgtcggcgggagttggtcaaacaggccaagtgcaagggggaggacgccaaagtctcggtacgcaacatccgtcgcaaagtgatggaggaactgcatcgcattcgtaaagatggcgaggcaggcgaagatgaggtcagccgggcggaaaaggacctagataagaccacccaccagtacgttatccagattgacgaactggtcaagcacaaagaaggtgagctgctggaggtctag

SEQ ID NO: 27702 - DNA, 840 bp, Mycobacterium leprae
atgacggagtcctgggagtctcaagtcgccggctcggcggttcccaagccacagctgatgagcgccaatggtgtgtcggctgctgcagcgggccgtggagaacggctcaaccatgctggtaacccggggcatcggtctaagtattcgagggtgctgcttaaacttggcggagaaatgttcggtggaggccaggtagggctggatctcgatgttgtggcgcaggtggcccgccagatcgccgaggtggtccgcggcggcgtgcaggtcgctgtcgtgatcggcggtggcaactttttccgcggcgcacaattgcaacagcgtgggatggagcgcacgcgttcggattacatgggcatgctcggtactgtgatgaacagccttgcactgcaggacttcctggaaaaagaaggcatcgccacccgagttcaaactgcgatcaccatgggccaggtggctgagccttatcttcctttgcgggctgtccgccacttagagaagggccgggtggtaattttcggtgcaggcatggggcttccgtacttctccactgataccacggcagcgcagcgggcactggagatcggcgcggacgttgtgttgatggccaaggcggtcgacggtgtgttcgtcgaggatccgcgggtcaacccggaggccgagctactcaccgcgatcagtcaccgcgaagtaatcgaccgtgggcttcgggtagctgatgccacagcgttcagtctttgtatggacaatggcatgccgatcctggtgttcaatctgctgaccaatggcaatatcgcccgtgcggtcgctggtgagaagatcgggacgttggttaccacttaa

SEQ ID NO: 27703 - DNA, 831 bp, Mycobacterium leprae
atggcgaattttactgtcgctgatgtcaagcggcttcgcgcgctaactggtgccggcatgctcgactgcaagagtgtgctggtcgaaaccgacggaaacttcgacaaggctgtcgagtctctccggatcaagggtgccaaggacgttggcaagcgtgccgaacgggccactgccgagggcctggttgcggctaaagatggtgcgcttatcgagttgaactgcgaaacggacttcgttgctaaaaacgccgagttccaaaagctggccaaccaaatcgttggggtggtggcggcagccaaaatcgttgacgtcgacgcactcaagggggctagtgtcggtgataagacggtcgagcaagcgatcgccgagctggcggccaagattggcgagaaactgaaactgcgccgcgccgcgatcttcaacggcaccgtggcaacctacctacacaagcgcgcggctgacttgccgccagcggtgggcgtgctagttgagtatggtgccggcaccgacgcggctaacagcacagcggcggcacatgcggccgcgctgcagatcgccgcgctcaaggcgcgtttcctgtcccgcgacgatgttcccgaagacgtcttggctagtgaacgtcgcatagccgaagagaccgctaaagctgcgggcaagccggagcagtcgctgcccaagatcgtcgaaggccggctaaatggtttcttcaaggattccgtgctgctcgaacagccgtcggttttcgacaacaagaagaccgtcaaggtcctgcttgacgaggccggcgtgacggtgacgcgattcgttcggttcgaggtgggccaagcctag

SEQ ID NO: 27704 - DNA, 834 bp, Mycobacterium leprae
atggctgttgtgaccatgaaacagctgcttgacagcggcacccacttcgggcaccagacccgtcgttggaatcccaagatgaagaggttcattttcactgatcgcaacggcatctacatcattgacctacagcagacgctgactttcatcgacaaggcctacgagttcgttaaagagactgtcgcccgcggtggcttagttttgttcgttggcaccaagaagcaggcgcaggagtccgtcgcggccgaagcgactcgcgtcggcatgccgtatgtgaaccagcgctggctgggtggcatgctcaccaacttctccaccgtgcataagcggttgcagcgtctaaaggagctggaggcgatggagcagactggtggtttcgagggtcgtaccaagaaggagatcttgggcttgacccgggaaaagaacaagctggagcgcagcctgggcggtatccgggatatggcgaaggtgccgtcggcaatctgggttgtcgacacgaacaaagagcacatcgccgttggcgaagcccgcaaactgggcgtcccggtgattgcgatcctggacactaattgcgaccccgacgaggtcgactacccgatcccgggcaacgacgacgcgatccgatcggcggagctgttgactacggtgatcgcctccgcggttgccgaaggcttgcaggtccgtgccggtctgaggtgcggcgatggcaagcccgaaacggaggccgttgagccgctcccggaatgggagcaggagctgttagccggtgctggttccagcgccctcaacgattcgggcgcggacttatcagaagccaaccctacggaagcctga

SEQ ID NO: 27705 - DNA, 723 bp, Mycobacterium leprae
atggccaccacctggccgccgtgcaggataatccgtaagtctgggggtttgcgggggatgtggactctagagtacgaactgcagcgcagcgggttggggccggtggcaggggtggacgaggtgggtcgcggcgcctgcgcgggtccgctggtggtggcagcttgtgtgctcgggccggggcgactggaggaaagtcttgatgattccaagaagcttagcgcgaaggggcgggagatgttgtttcctttgatctgccggtacgcgctggcttaccacgtggtgttcatcccgtcggttgaggtcgaccggcatggtgtgcaggtagccaatattgaaggcatgcggcgtgcggtggccggtctgtcggtgcggcccggctatgtattaagcgacggttttcgcgtacccggcctgtcggtgccgtcgctgccggtagttggtggagacgcggtggttgcctgcattgccgcggccagtgtgctggccaaagtcagtcgtgaccggttgatggtcgcaatggacgctgactatcctggctacggcttcgctgcacacaaggggtactgcacgcgcgcgcatagcttggcgctcacccagctggggccttgcccagaacaccgctattcgttcatcaacgttcggcgcatagtgaccaggtctaatacccgggcggtggctggattcacaccggctcctccggccgagcacggcgaatgccggtga

SEQ ID NO: 27706 - DNA, 870 bp, Mycobacterium leprae
gtgaccgaaaccacggactccgtacctgaacctccgtccgacgctgaccagttgcagccgaaggtgtctatctgtggtcttgatatgcccgctgaagtatctgagactgccgcggaagccgcaataggcgtgtcggagcccaagaagcgttcggcgttgtgggaattcgcgattttggcggtgatcgctataggcttgtactacgtcatgttgacgttcgtggcacgcccctacctgattccgtcggaatccatggagcccacgctgcacggatgctcgggctgtgtgggcgaccgcatcatggtggataagatcacttatcgcttcagctcaccacaacctggtgacgtcatcgtcttcaagggcccgccgtcgtggaacacgatgtacaaatctatccggtcaaacaacatcgtgctgcgctcggtgcaaaacgcgttgtcgttcgtcggtttcgtgcctcccgacgagaacgacttggtcaagcgcgttatcgcggtcggaggacagacggtgcagtgccggtccgacacgggcttgacggtcaatgggaagccactcaaagagccgtatctcaggccggtcaccatgaatgccgacctgtcattctccccgtgcctgggtagcgagttcggtccagtcacggtcccgcagggacgcctgtgggttatgggtgataaccggatacactccgcggactcgcgttaccactgcaactccaccgacgtggtgaatgggctttcgtgcaccggtgatccgaattcggggactgtgccggtgtccaatgtcatcggtaaggccagggtcgtcgtgtggccgccgtcacgatggggtggtgtgggttcggtgaattcccagcaggggcagtag

SEQ ID NO: 27707 - DNA, 342 bp, Mycobacterium leprae
atgaacaggctggacttcgtcgaccaggcgtcgttgcgcgacgacatcccggccttcagcccgggtgacacgatcaatgtgcacgtcaaggtgatcgagggcgttaaagagcgtatccaggtgttcaagggtgtggtcatccgccggcagggcggaggtatccgcgaaacgttcaccgtgcgtaaggaaagctatggcgttggcgtcgaacggacctttccggtacactcgccgaacatcgatcacatcgagatggtgattcgtggcgatgtccgccgcgccaagctgtattatctgcgtgaacttcgcggcaagaaggctaagatcaaggagaagcgctga

SEQ ID NO: 27708 - DNA, 717 bp, Mycobacterium leprae
atgaaaatcgatattgtcacgattttcccggcttacctagacccgctgcggcaatcgttgccgggcaaggcgattgagtcgggcctggtcgatgtgcaggtgcacgacctgcggcggtggacccatgatgtacaccactcggtggacgacgtgccctatggtggtggtccggggatggtgatgaaagcgccggtatggggggaagcgttagatgaaatctgtttcgacgagacactgttggtgatccccacccccgctggtgcgctgttcacccaggccaccgcacagtgctggagcaccgagagacacctggtgttcgcctgcggtcgctacgagggcatcgatcagcgagtcgttgatgatgcagtacgacgaatgcgagtcgaagaggtttcaatcggtgactatgtgttgccgggtggcgagtcagcggccgtggtaatgatcgaggctgttctgcgcctggtggctggggtgctcggcaatcctgcgtcgcaccgcgatgattcacactcgccggacctgggtcgactcttggaggggccgagctatactcgcccacctacctggcgtggtctcgacgttccgccggttttgttgtctggtgatcatgctcgaatcgccgcttggcgccgagaggcttcgctccggagaactcgtaaacgccgtcccgatttgtcgggggcccggtttgtctgggggctgggtttgtcgtga

SEQ ID NO: 27709 - DNA, 540 bp, Mycobacterium leprae
gtgcatgctcatggtgctttgttggagttgacaatcgggcgggtggtgaaagcgcacggtatcggtggggaagtggtcgttgagattcgtaccgacgatccagcttcccggttctgtccgggtaatatattgcgcgccaaggattttccacgtggtggcccagaacgaagatacaccgtcgtctatgcgcgtgagcacggtgcgcggcttcttgtgcgattggccggagtgagtgaccgtgacgccgccgacgcgttgcggggcagtttgttcgtcatcgattccctcgacttgccgccgatcgatgagccggatacttattacgaccaccagctcgaaggtctgcaggttcgtaccatgatgggacgagacgttggtgtcgttgctgaggtgcttcacactgcggccggtgagttgttggcggtgcgatgtgattccggcgaagtactagtgccgtttgtcggtgcgattgtcaagttggtgtctctagacgacggcatagtcgaaatcgacccgcccaagggcctgctggatctatga

SEQ ID NO: 27710 - DNA, 243 bp, Mycobacterium leprae
atgagtacggtcgtcgttgacgctgtcgagcatgtggtccgcgggattgtcgataatccggacgatgtccgggtggacctggtcatcagtcggcgtgggcgcactgtcgaagtgcatgttcatcccgacgatctgggtaaggtgatcggtcgtggaggacgtactgcaaccgcgttgcgcaagttggtcgccggcatcggtggccgcggtatccgcgtcgatgtggtagacaccgaccagtag

SEQ ID NO: 27711 - DNA, 483 bp, Mycobacterium leprae
atggctgtaaagatcaagctcactaggcttggcaagatccgcaatccccagtaccgtgtcatcgtcgccgacgcgcggacgcggcgcgacggtcgttccatcgaggtcatcggtcggtatcacccgaaagaagagccaagcctgatcgacatcaactctgagcgcactcagtattggctttcggtgggtgcgaagcctactgaacctgttctcaagctgctgaagatcacaggcgattggcaaaagttcaaaggcctgcccggtgccgagggccggctgaaggtcgccccacccaagcccagcaagctggagttgttcaacgccgcgttagctgtcgccgacggcggtcccaccaccgaggccacacggccgaagaagaaggtttcggctaagaaagccgctaaggctgtagaatccgacgctgagggcgccaaagccacgaaagcgtatgcgctggccgagggcgacgagcagtccgagtaa

SEQ ID NO: 27712 - DNA, 1566 bp, Mycobacterium leprae
gtgtttgaatcgctctctaaccggttgactggcgtcatacaggggttgcgtggcaaaggccggctgaccgacgccgatatcgaggccaccacccgcgaaatccggttggcgctgtttgaagccgacgtttcactacctgtggtgcgggcgtttgtgcatcggatcaaagaacgcgctcggggcaccgaagtgtctgctgctctcaacccggcgcaacagattgtcaagatcgtcaacgaagaactgatcggcatcctcggtggcgagacccgccagctggcgttcgctaagacaccgccgacggtagtgatgctggccggcctgcagggatccggcaagacaacgctggctggcaaattggcagtacgccttcgcaggcaaggacacacaccgcttctggtggcctgtgaccttcagcggccggcggcagtcaaccagctgcaagttgtcggcgagcgtgccggggtgccggtattcgccccgcatcctggggcctcgcccgattcaggtcccggtgatccggtcgctgtcgcgtcggcagggctggtcgaagcccgggccaaacacttcgacgtcgtgatcgtcgacaccgccgggcgactgggcatcgacgacgagttgatggcccaggccggggcaatccgggaggccatcaaccccgacgaggtgttgttcgtcctcgacgcgatgatcggccaggacgctgtcaccaccgctgcggcattcggtgctggagtcggcttcaccggtgtggttctgaccaagctcgatggtgacgcccgcggtggagccgctttgtcggtccgcgaggtgacaggtgtgccaatcctttttgccaccaccggtgagaagttggacgacttcgacgtctttcaccctgatcggatggccagccgcatcctgggcatgggagatgtgctgagcttgatcgaacaagccgagcaggtctttgacgccgaacaggccgaggcagccgctgcgaagatcgtcgccggtgaactgacgctagaggatttcctcgagcagatgcttgcggtacgcaagatgggtctaatcggcaacctgttgggcatgctacccggcgcgggtcaggtgaaggaggtactggaacaagtcgatgacaaacagctcgaccggttgcaggccatcatccgcggaatgacgccacaggagcgggccgaccccaagatcatcaacgcgtcccggcgactgcgtatcgccaacggctccggggtgacggtgtctgaggtcaaccaactggtcgaccggttcttcgaagcccgtaagatgatgtcctccgtgctcggcggcatgggtatacccggtatgggacgcaagtctgccacacgaaagtccaagggaggcaaaggcaagaaaagggcacgcggtccgacgtcaccgaaggtcaggagtcctttcgggcctgccaggcccggaatgccggacatgatgaacatgccgccaagcttcccggatctgtcgcagatgccagacggtctcaacgagctgccgcctgggctggccgctttcgacttgtccaaactgaagttcccaggcaagacgtag

SEQ ID NO: 27713 - DNA, 1971 bp, Mycobacterium leprae
atgagcgcacaagtcgaacagctggagtttcaggcggaggcacgccaacttctggacttgatggtccattcggtctactccaataaagatgcatttttgcgggagctgatctcgaatgcctccgacgcgctggacaagcttcggcttgaagcgtttcggaacaaagacttggacccacgtacagttgacacctccgatctgcacatcgagatcgaagtggacaaaaatacacgcattttaaccgtccgtgacaacggcataggtatgacacgcgcggaggtggtggacttgatcggtacactggccaagtcagggaccgccaagctgcgtcagaaattgcatgcggccaaaaatctgaaagacaccgccgcctctgaaggactgatcggtcagttcggtatcggtttttactcgagtttcatggtagccaacaaggtcgaacttctcacccgtaaagccggtgagactgcggccacgagatggtcatcggacggtgaggccacctacaccatcgaatccgtcgacgaagctccgcagggaacatcagtgacgttgcacctcaaacccgaagacttcgaggacgagttgcacgactacacctcggaatggaagatcagggagctggtcaagaagtactccgacttcatcgcctggcctatccggatggaagttgagcgacgcgcgccggccacctcggacggagaaggggcggatggtgaagagcaagtcaccatcgaaacccagaccatcaactcaatgaaggcgttgtggactaagtcaaaagacgaggtctcagaggacgaatacaaggagttctacaagcacatcgcccacgcctgggatgacccactcgaggtgatcgcgatgaaggccgagggcaccttcgagtaccaggcgctgctttttattccttcgcacgctccgttcgacctgtttaactccgacgccaaaatcggcatgcagctgtatgtcaaacgcgtcttcatcatgtccgactgcgatcagctcatgccgatgtacttgcgtttcgtcaaaggggttgtagacgcagaggacatgtcgctcaatgtttctcgagaaatcctgcaacagaatcggcaaatcaatgcgatccgtcgccggctgaccaagaaggtcctttcagcaatcaaagatctgcaggccgaacgaccacaggactaccgcacgttctggacacagttcggcaaggtcctcaaagagggactcatgtcggactccgacaatcgagacacactgcttcacatttcctcgttcgcctcgacacacagcgacgaagaacccaccaccctggcccaatacgtagaacgcatgaaagacggccaagaccaaatcttctacgccacaggagagtcgcgtcagcaagtcatgaattcgccacatctcgaagcattcaaggccaagggctatgaggtgctgttgctgaccgacccggtcgacgaggtttgggtaggaatggcacccgagttcgacggcaagccgttgaaatcggtagctaggggcgaggtggacctcgaatccgaagaggaaaagacagcgcacgaagctgaacgcaaggagcaggagcagaattttgctgggctggtgaactggttgaaagagaccttgagtgatcacgtcaaagaggtacggttatccacacgcctcaccgagtcgccagcctgcctgatcactgatgccttcggtattacgccggcgctggcgcgcatctaccgggcttccgggcaggacgttccgttcggaaaacggattttggaactcaatccaaatcatccactgatcactggcctgcaacaggcacacgagaacggcggtgatgatactcacctgcgtcaactctccgaaactgccgaattgttgtacggtaccgcccttctcgctgaaggcggagcactagagaatccggcaaagttcgccggattgctcgcggatcttctgtcccggtcgatgtag

SEQ ID NO: 27714 - DNA, 1293 bp, Mycobacterium leprae
gtgtcagaaggtttgtggatcgccaccgctgtcgccgccgtcctggttgtcatcgcagccttgattctgggctcggtgcgttaccgtcggcggcggattagcttgatcttttcctctttgagctctgggccaagtgcaagcgaccgttccggcagctacactgcgtcgtcgggtatcacattcagccaaaccgcactgcccgttcagcccgcggaccggattgacaccggagaactgccggcggtgggcgatgacgcgaccgtgcctcgtgactcgccgcgacacacgatctcggacgtattgcttcccgaatctgagctcattacgtcacctgacgagccagaggcggcggtcccgcacattgatgccattgttccacccgaaggccgattggatcggctgcgcgggcgactcgccaggacacaaaatgcgttcggacgcagcatcttgggcttgatcgtcggcggcgatctggatgaggactcctggcaggagctcgaggataccttgctggtcgctgatctgggccccgttgccactgagtcggtgatgtctgcgttgcgcagcaggctgctcaacagcaacgtgcataccgagagtgacgcccgtaccatgctgcgtgacgtattgatcagtgaactgcaacccgatatggaccgctcgattcgagctctaccgcacgctgaccatccggcagtgctgctgatcgtcggtgtcaacggcaccggcaagaccaccacggtcggcaagttggcgcgggttttggtagccgacggccggcgcgttgtcctcggcgcggcggacacgtttcgggcagcggccgccgaccaactgcaaacctgggcttctcgggtgggtgcagagctggtgcgtggtgtcgaaggcgctgacccggcatcagtggcgttcgacgccgtcgacaaaggcatcggtgcgggcgctgatgttgtggtcatcgacaccgccgggcgattgcataccaaggtggggctgatggacgagctcgacaaaatcaagcgtgtggtgactcgacgcgcggcagttgacgaggtgttactggtacttgatgccaccatcggtcagaatgggctgacgcaagttcgggtcttcgccgaggttgtcgacatcactggtgccgtgctgaccaagctagatggaacggccaagggcggcattgtttttcgtatccaacgtgagcttggagtgccggtgaagctggtcgggctgggtgaaggtcccgacgacttggcgccattcgaacccgccgttttcgtcgatgccctgttggagtga

SEQ ID NO: 27715 - DNA, 3612 bp, Mycobacterium leprae
gtgtacctcaagagtctgacgttgaagggctttaagtccttcgcgtcgccgacgactttacgttttgagccgggcattaccgctgtcgttggacctaacggctccggtaagtccaacgtcgtcgatgctctggcgtgggtaatgggggagcagggagccaagacgctgcgtgggagtaaaatggaagatgtcattttcgccggcacgttgtcgcgcgctccgttgggtcgcgcagaagtcactttgatcatcgacaactccgacaacgtgctgccgatcgagtactccgaggtgtcgatcacgcggcggatgtttcgcgacggtgctagtgaatacgaaattaacggcagtagttgccgtttgatggatgtccaggaattgctgagcgactccggcattggccgcgagatgcatgtgattgtcgggcagggtaagctcgatcagatcctgcagtcacggcccgaggaccgtcggaccttcatcgaagaagccgcaggcatacttaagtatcgtaggcgcaaggaaaaggctttgcgaaagctcgatgctatgtcggcgaatctggcccggctcaccgatttgactacggaattacgacgtcagctcaagccgttgagccgtcaagccgaagtggcccgacgggccgcgactattcaggccgatttacgcgacgctcggttgcgattggccgcagatgatctggtaagtcgacaagggcagcgagatgcgatcgtcgaggctgagacgatgatgcgccgtgatcatgatgaggcggctgctcggctggcggtagcgtccgaagagctggcggcgcatgaagctgcgcttaccgagctttcgggacgggctgagtcggtccagcagatctggttcgggttgtccaccctggtcgagcgggtaagtgcaacgattcggatcgccggcgaacgcgcgtaccatcttgatgtcgatccagccacaccgagcgacaccgaccccgacgtgttggaggccgaggcccagcagatggaggtcgccgagcagcagctgctggcggagctggctgtagcacgtacccaattggaggccgctcgtgccgaattggccgaccgcgagcgccacgccgttgaggccgacaaagcgcatctggaggcggtccgtgcggaggcggatcggcgcgaggggttggcgctgctggccggccaggtggagactatgcgggcgcgtatcgaatcgatcgatgatagcgtcgcgcggttgtccgagcgcatcgaggaggttactgcacgaacccagcagattctcgcggagtttgaaaccgtgcagggccgcgtcggtgaactggatcagagcgaggtccaccttgacgaacagcacgaacgggccgtggcggcattgcggttcgctaacgaacgcgtggctgaactgcagtccgctgagcgagacgccgaacgccaggtggtttcgctgcgagctcgtattgacgcgctgacgatgggactcgagcgtaaggacggcgcggcttggctggcacgcaattacagtgacaccgggctcttaggttcgatcgccaagttggtgaaggtgcgccccggctacgaggcagcgctggctgcagtgctcgggcccgcggcagatgcgctggccgtcgatagtttgggcgcggctcgtagcgcactcaccgcgcttaaggaagccgacgcaggccgcgcgaccctcgtcttggctgactggctggcggatgcgggaccggcctgcgttactgggctgcccgatggggctcaacgtgcgctcgatttgattgaggcaccgccgtggctgcagggcgcgttgatcgctatgctgtacggtgtcgtggtggtcaactacctcgccgaagcgttgggcgtggtcgatatctgtccgcagttgcgggtggtcaccgttgatggtgatctggtgggcgccggctgggtgagcggtggttctggccgcagactgtcgacactggaggtcacttcggagatcgataaggctggtgccgagctagccgctgccgaggcacatatggcgcaactgaatgccgcgttgtccggtgcactgtccgagcaggttgcccattccgatgccactgagcaggcattggtcgcactcaatgaatccgacactgcaatattgtcaatgtatgaccagctagggcggctcgggcaggaggttcgcgctgccgaagcagaatgggaaagtctgctagcccagcgcgaggaattagaagccaggcgtgtttcgattctcgaagaggttgtcgaactagaaacccggttgcataacgtcgagcagatccagcatgtgcatgctctcgatgagaattctgcagcggcccggcagctgattgtcgccgcggccgaggaggctcgtggcgtcgaagtggaagccctacttgcggttcggactgccgaagaacgcgtcaatgctgtgtgcgggcgggcgaattcattgcgtcgcgcggccgctgctgagcgtgaggtgcggttgcgggaccagcaagcgcacgccgcacgaatacgcgcggccgcggtagctgctgcggttaccgactgcggtcagttgctggcgtcccggttgacccaggctgtcgacctggcggcgcgacaccgcgatgcactggccaccgagcgtcagcagcgatcggttgcaatagcggctgtgcgctacgaggtaaacactctgagggttcggttggccaccctaaccgattcgctgcaccgcgacgaggtggctaacgttcaggcggcgctgcgtatcgagcagctcgagcagctggtgctggagcagttcggaatagcgccggtggatttaatcgctgagtacggtccgcaggttgcgctactgccgaccgagctcgaaatggctgaattccaacaggcccgggagcgtggtgaacaggtgacttcgcctgctccgatgccgtacgaccgcgctacccaggagcgtcgggccaaacgtgcggagcgtgaactagctgagctgggcagggtcaatccgctggcgctggaggagttcgctgcactagaggaacgctataacttcttgtctacccaacttgaggatgtcaagggtgcccgcaaggatctgctcgacgttgtcgctgaagtcgatgctcgtatcctgcaggtgttcagcgacgcctttgtggatgtggagcgtgaattccgcggtgtctttacctcactgttccccggtggcgaaggtcggctaaggttgaccgatccggatgacatgctcaccactggcatagaagtagaggcgcgtccgtccggcaagaaggttagccggctatcgttgctgtccggtggcgagaagtcgctgattgcggtggctatgttggtggcgatttttaaagctcgcccgtcaccgttctacatcatggatgaggtggaggctgcgctcgacgatgtcaatctgtgtcgcttaattggtgtgtttgagcaactgcgtggccagtcgcagcttataatcattacgcaccagaaaccgacgatggaagtcgctgacacactgtacggcgtgaccatgcagggcgatggtatcactgcggtgatctcacagcggatgcgcggtcagcaggtagagtcgctagtaaccagttcctcgtag

SEQ ID NO: 27716 - DNA, 1347 bp, Mycobacterium leprae
atggatcgacagaaggaatttgtgctgcgcacgcttgaggagcgggacatccgcttcgtgcgcctgtggttcaccgacgtgcttggttacctcaagtcggtcgcgattgctcccgccgagttagaaggtgccttcgaggaaggcatcggcttcgacggatcctcgatcgagggctttgcgcgggtctcggaatccgacaccgtggcgcatccggatccgtcgacctttcagatcctgccctgggctaccaccgccggacaccaccactcggcgcggatgttctgcgacatcactatgccggacggctcgtcatcgtgggcggaccctcgacacgttttgcggcgtcagctgacaaaggccaacgaccttggcttttcttgctacgtccatcccgaaatcgaattcttcctcctcaaggcggggcctgaggacgggtcgatgcccattccagttccagtcgacaacgccggctattttgaccaagcggtgcacgactccgcgttgaactttcgccggcacgcaatcgaggccctggaattcatgggtatctcggtggagttcagtcaccatgaaggcgcgcccggccagcaggagatcgatctgcgcttcgccgacgcactgtcgatggccgataacgtgatgactttccgttacgtcatcaaagaagtcgcgatcgaaaacggcgctcgggcgtcattcatgcccaagccattcgcgcagcaccctggctcagcgatgcacacccatatgagcttgttcgagggtgacgtgaacgccttccacagcgacgacgatccgttacagttgtcggatgtgggcaagtcgttcattgctgggatacttgagcatgcctccgagattagcgcggtcaccaatcagtgggtcaattcctacaaacggctggtggttggcggcgaagcacccaccactgcctcgtggggggcggccaaccggtctgccttggtgagggtgccgatgtacacgccgcacaagacgtcttcgcggcgggtcgaggtgcgcagtcccgattcagcgtgcaacccctacctagcgttcgccgtgctgctggccgctggcttgcgtggggtggagaagggttacgtgctggggccgcaggccgaggacaatgtctgggatctcacgcccgaagaaaggctcgcgatgggataccgagaattgccaaccagtcttgacagtgctcttggtgccatggaggtctccgagtttgtcgcggaagccttgggggagcatgtttttgactttttcttgcgtaataagcgtgcggaatgggctaactatcgcagtcatgtctcgctttatgagctgaagacttacctgtcgttgtag

SEQ ID NO: 27717 - DNA, 861 bp, Mycobacterium leprae
atgtctgagcagaatgttaatgtttatggggctgatccttctacatcctccattcaatcaatacagcgcaccaaaatacgcaccaagcatctccaaaaaatgaaggccgaaggccacaagtgggccatgctgacagcctatgattattcgactgctcgggttttcgacgaagccggtatcccggtgttgctggtgggtgattcagcggccaacgtggtgtacggctacgacaccacggtgccggtttcggccgacgaactactcccgctggttcgcggcgtggtgcggggtgcggggcacgctctggtcgtcgccgacctgccattcggcagctacgaacccggacccactgccgcgctggctgtcgccacccgatttatgaaggagggcggtgcacacgccgtaaaactcgaaggcggccagcgggtagctgaacaaatcgcgtgcctgaccgcagcaggcattccggtaatggcgcacatcggattcacaccgcaaagcgtcaacagcctcggcggtttccgggtacagggccgcggcggcgacgccgaacaaaccgtcgctgatgccgttgccgttgctgaagccggagcattttccgtcgtaatggaaatggtgccgaccgagttagccacccagatcaccggcaaattaaccattccgacaatcgggatcggtgcgggtcttaactgcgacgcccaggtcttagtttggcaagatatggccggtttaagcagcggtaaggtggcacgtttcgtcaagcagtatgctgatatcgctggcgagttgcggcgtgccgcaatgcagtacgcagaggaagtggccagcgcggttttccctgctgaggagcactgcttctga

SEQ ID NO: 27718 - DNA, 1245 bp, Mycobacterium leprae
gtgaatcacaatcattttgtgcctgcaccgcctcgcaggttgccgctcgaactactggacaccgtgcccgattcactgctacgacggctgaagcagtactcgggccggctagctactgaagcggtcacagctatgcaagaacggttgccgttcttcgccgacttggaagcatcccagcgcgccagcgtgacgctggtggtgcagacggcggtggtcaactttgtccagtggatgcaaaacccgcacagtgacgtgagctacaccgcgcaggcgttcgaactggtaccccaggatctggcccgacgaatcgcgttacgccacaccgtggacatggtgcgagtcaccatggagttcttcgaagaagttgtgccactgctggcccgttccgaagagcaattgacggcactcaccgtgggcatcttgaagtacagccgcgacctggcgttcaccgccgccacggcgtatgccgacgcggccgaagcgcgcggcacctgggacagcaggatggaagccagcgtcgtcgacgcggtagtgcgcggcgacaccggccccgagctgttgtctcgcgcggccgcattgaactgggacacgaccgcaccagcaacggttgtggtcggtaccccgacaccgaaccacgacggcccaaacgggcaggtcagcagcgaacgagccagccaggaagtccgcgagatcgcagcccgccacggccgcgcggcgctgaccgacgtacacggtacctggctggtggcgatcatatccggccaattagcgccgacggacaaatttttcagtgacctgctgcacgcgttctccgacggaccggtggtcatcggaccaacagcgccgatgctgactgccgcctaccacagcgcaagcgaggcggtttccgggatgaacgccgttgccgggtggagtggagcgccgcgacccgtgcaggccagagaactcctgccggaacgcgccttaatgggggatgcatcggcgatcgtggcgttgcataccgatgtgatgctgccattagctgatgcagggccgacgctcatcgagacactcgacgcgtatctggattgtggcggcgcaattgaggcctgcgcccgcaagttgttcgttcatccaaacaccgtacggtaccggctcaagcgcattacagacttcaccggacacgatcccaccctaccgcgcgatgcatatgtcctgcgagtggcagcgacagtgggtaaactcaactatccgactcatcactaa

SEQ ID NO: 27719 - DNA, 348 bp, Mycobacterium leprae
gtggccgtcacccaggaagagattattgccggaatcgccgagatcatcgaagaggtgaccggtatcgaaccgtctgagattaccccggagaagtcgttcgtcgacgacctggacattgactcgctgtcgatggtcgagatcgccgtccagaccgaagacaagtacggcgtcaagatccctgacgaagacctcgcgggtctgcgtactgtcggtgacgttgtgacctacatccagaagctcgaagaagagaatcctgaggccgccgaggcgctgcgcgccaagatcgtgtcggagaaccccgaggccgccgcgaacgttcaggcaaggctagaaacagaaagtaagtga

SEQ ID NO: 27720 - DNA, 1251 bp, Mycobacterium leprae
gtgaccatgccttccactgctaatggcggtttccccagtgttgtggtgaccgctgtcacagcaacgacgtcaatctcgccggacatcgaaagcacgtggaagggtctgttggccggcgagagcggcatccacgtactcgaagacgagtacatcaccaagtgggacctgccagtcaagatcggcggccacctcaaggagccagtcgatagccacatgagccgcctggacctgcggcgcatgtcgtacgtccagcggatgagcaagctgctcagcggtcgactatgggagtccaccggcagcccggaggtcgatcccgaccggttcaccgtcgtggtcggcaccggtctgggcggcgccgagcgaatcgtggaaagctacgacctgatgaacgcgggcggaccccgtaaggtgtccccgctcgccgttcagatgatcatgcccaacggcgccgcagcgaccgtcgggctacagcttggggcatgcgccggggtgatgacaccggtgtcggcctgctcgtcgggctctgaggcaatcgcacacgcctggcgccagatcatcatgggagatgcagatgtcgccgtctgtggcggtgtcgagggcccgatcgaggcgctgcctatcgcggcgttctcgatgatgcgagccatgtcgacccgtaacgacgaccccgagggggcatctcggccattcgacaaaaatcgtgacgggtttgtgttcggcgaagccggagccctgatgctcatcgagactgaggagcacgccaaggctcgcggcgccaagccgctggctcggttgcttggtgcaggcatcacctcggacgcctttcatatggtggcacccgcggccgacggcgtgcgagcagggcgggcaatgacccggtcgctggagctggcgggtttgtcggcgaaggacgtggaccacgtcaacgcgcacgggacagcaacgccgatcggcgacagcgcggaggccaacgccatcagggtcgccggttgcgaacaggctgcggtgtatgcgccaaagtcagcactgggccactccatcggcgcggtcggcgcgcttgagtctgtcctgacggtgctggcccttcgcgacggtgtcatcccacccacactgaactaccaaaccccagatcccgagatcgacctagacattgtcgcaggtgaacctcgctacggcgactaccgttacgcgatcaataactccttcgggttcggtggccacaacgtggcgctcgcttttgggcgctactaa

SEQ ID NO: 27721 - DNA, 1422 bp, Mycobacterium leprae
atgacaatcacggccccaaaggtggtgggcaagtccattgatccccgcgatccactactgcgtctgagcaatttcttcgacgatggcagagtcgaaccgctgcacgagcgtaaccagtccggcgtattcgctgcgacaggcaccgtgaacggtttacgcaccatagcgttctgcaccgacggcaccgtcatgggcggcgccatgggtatcgaaggctgcgcgcatatcgtcaacgcctacgacaccgctattgaagagcagagccccatcgtaggcatctggcactcgggcggggcccggttagccgagggagtgcgggcgctgcacgcagtcggacaggtgttcgaggccatgatccgcgcatccgggtacattccgcaaatctcggtggtcgtcggtttcgctgccggcggcgccgcttatgggccagcgctgaccgacgtcgtcatcatggcgccagaaggtcgggtgttcgtcaccgggcccgacgtggtacgcagcgtcaccggcgaagacgtggacatggcttcgctcggcggcccagagacccaccacaagaagtccggggtgtgccacatcgttgccaacgatgaactcgacgcctatgagcgcggccgccggttagtcggattgttctgccagcaaggtcatttcgaccgtagcaaggcagaagctggtgacaccaatatccaagcgctgctgcccgaatcgtcccgacgagcctatgacgtacatccagtcgtgacagcgatcctggatgagaacacgcctttcgacgaattccaggcgaattgggcaccgtccatggtggtcgggctgggccgactgtccggccgcacggtgggcgtactggccaacaacccgttgcgactgggcggttgtttgaactccgaaagcgccgagaaggcagcacgtttcgtacgactctgcgacgcgttcgggatcccgctggtggtcatcgtcgatgtccccggctatctgccgggggttgaccaagagtggggcggcgtggtgcgccgaggtgctaaactgttgcatgcgttcggtgagtgcaccgttccgcgcgtaacgctggttacccgaaagacctacggcggggcctacattgcgatgaattctcgatcgttgaatgcaacaaaggtattcgcgtggccggacgccgaagtggcggtgatgggcgccaaggcggccgtcggcatacttcacaagcgcaagttagccgcagcaccgaacgacgaacgggaagctctacacgacgacttagctgccgagcatgagcgcatcgccggcggcgtggacagtgccatcgacatcggtgtggttgacgagaagatcaacccggcacatacccgcagtaaactcaccgaggcactggcccagtcgcctgtgcgccgcggtcgccacaagaacatcccgctgtaa

SEQ ID NO: 27722 - DNA, 849 bp, Mycobacterium leprae
atgcctgaactgcccgaagtagaggtggtgcggcgcggcctgcaggactatatcgtaggcaagacgattactgcggttcgggtgcaccatccgcgcgctgtgcgccgccacgttgctggaccaactgacctcacgaaccggctgctcggcacccgtattaacggaattgatcggcgcggcaaatatctgtggttcttgctggacacagacattgcgctcgtggtgcacctcggcatgagcgggcagatgttgctggggaccgtgcctcgcgtcgatcacgttaggatctctgcgctgttcgacgacgggaccgtgttgaacttcacggatcagcggaccttagggggatggctgctagccgatctaatgacggtggacggcagtgtgctgccggtgcctgtcgcccacttggcgcgtgacccgttcgatccgcggttcgatgtcgaagctgtagtgaaagtgttgcggtgcaagcattccgagctcaagcgccagctcctcgatcaacagacagtatctggaatcggcaacatttacgccgatgaggcgttgtggcgggccgaagtgcacggcgcgcgaattgctgccactctgacccgtcggcagctggccgcggttctggatgctgccgccgatgtgatgcgcgactcgttggccaagggtgggacttcgttcgattcgctgtatgtcaacgtcaacggcgaatcggggtactttgaccgatctttggatgcctatggtcgtgaaggcgaaggctgccggcgttgcggcgcggtgatgcaccgggaaaagttcatgaaccgctcgtccttctattgccctagatgccaacctcggccccggcggtag

SEQ ID NO: 27723 - DNA, 849 bp, Mycobacterium leprae
atgatgccgagcaccccccgcacctctataccctcaataacccttaacgacgagaacactatgccgttgctcggccttggcgtcgcggaattgtcggaggacgagaccgagcgcgcggttttggcagcgctggaaatcggctgccggctcatcgataccgcagcagcttatggcaacgaagccgcagtcagccgcgcaattgccgcctccggaattccccgcgcccagttgttcgtcaccaccaagttggctacccccgaccagggtttcaccaagtcccaagatgcctgcaacgccagcttggatcgacttggcatggactacgtcgacctctacctgattcactggccggccccgccagtgggccagtatgttgatgcctggggaggcatgatccaatcccgtggcgaaggccatgcccgctcgatcggcgtgtgcaatttcaccgaggagcatttatcggcgattatcgatctcacctttgtcacgccagcggtcaaccagatcgagctacacccactgctcaaccaagacgagatgcgcaaatcaaatgcacagcacaacgttatcacccagtcctacaccccattggttcttggccggttgatggacaattcgaccctgaccgcgatcgccgccgaatatggcaaaacacctgcacaagtactgcttcggtggaacttgcagctgggtaatgcagtagtcttccggtccgccaaagccgagcacattgccagcaacttcgacgtcttcgatttcgaattggccgtcaatcacatggacgcaatgaatgagttgcacgacggcacccggttgcgcccagatccagaaacctacgccggcagctga

SEQ ID NO: 27724 - DNA, 978 bp, Mycobacterium leprae
gtgtgcaaccatgaatgtggggcgttaggggagtctgtaacgcttgagcagctcggtgagttcgcggtaatcgaccggctggtgcgaggccgcaggcagccggctgtggtcgcactcgggcccggcgatgatgcagcggtggtgactgccagcgacggtcgcatcgtggtatcaacagatgtgttggtgcaggatcgccatttccggctggactggtcaacaccgcacgatgtcggccgtaaggcaatcgcgcagaacgcggccgacatagaggcgatgggggcgcgggccaccacattcgttgtgggtttgggagcgcctggtgatacgccggtggcgcaggtggacgcgttggtcgatgggctgtgggacgaggccgggcgcattggtgccggcatcgtcggcggcgatttagttagctgtcctcaatgggtgctctccgttaccgtgttgggcgatcttgacggccgcgcaccagtattgcggtctggggctaaaaacggctccatggttgctgtcgctggcgccctgggtcgctcggctgccggttatgccctgtggcataaagggattgacggattcgatgatctgcggcgccgtcatctggtgcctgagccgccatatggtaagggggttgctgctgcggcttgcggggctcaagcaatgatcgacgtctccgacggtctgatcgccgacctgcgtcacgtcgcgcgggcatccggggtgtcgattgacctatccaccgcggcgctggctgcagaccacgccgcgctgattgcagccgcgaccgcggtgggcggtgatccgtggccgtgggtgctgggtggcggtgaagaccacgccctggtggcctgtttcgccggtacggcactgtctggctggcgcatcatcgggcgggtattcgacgggcctgccagggtgcttgtcgatgggcaggagtggcggggacatgcgggttggcaatcctttggaggttag

SEQ ID NO: 27725 - DNA, 1155 bp, Mycobacterium leprae
gtgaatgtctaccagcggcccttgatgccttggctgccatccggcggccgtgtgcgcgttgccgtcgtattcggcgggcgcagtaacgaacacgccgtctcctgtctgtctgccggcagcatcttgcgcaatctggatcgacagcggtttgacgtggtcgcggttggtatcactccggaagggacgtggatgctcaccgatcccaacccggatgcgctggcgattgccaatagacagcttcccgctgtgagctgcgaatcgggaatcgagttgacgctgccggccgatccacggcgcagcggtcaactggtgtcactttcacacggcgccggccttggggccggagaggtcctgacgtcggtcgatgtggtattcccggtgttacatggtccatatggcgaggacggcaccatccaggggctgctggaactcgctcgtgtgccctacgtcggagctggtgttctggccagcgccgccggcatggacaaggaattcactaagaagctcttcgctgcggagggactgccgttgagcgcgtacacggtgttgcgtccgttgcggccaacgctgcatcggcaggagtgtgagcggttgagtttaccggtattcgttaaacccgcacgcggtggctcgtctatcggtatcagccgggtgtcgagctggggtcaactgccctccgcgattgcctacgctcgccggcacgatccgaaggtgattgtcgaggcggcggttaacggccgcgaactggagtgcggcgtgctcgaaatgccggatggcactgtggcagccagcgcggtgggggaaattcgggtagccggggtgagcggaagcgaggattcgttctacgacttcaccaccaaatatctcgacgacgcagccgagttagatgtgcccgccaaggtggacgatgacgttgctgacgaggtgcgccagctcgcgattcaggcgtttcgggctatcgactgccagggcctggcacgagttgactttttcctaaccgacgacgggccggtgatcaatgagatcaacacgatgccggggttcaccatgacctcgatgtacccaaagctgtgggcggtcagtagcgtggactacccgacgttgctagcgaccatggtggatacggcattggctcggggtgtgggtatgcgttag

SEQ ID NO: 27726 - DNA, 1056 bp, Mycobacterium leprae
gtggagatggccggcatagtggtccgttcagagagtgctgtcgcggtgatgggcgctggtgcatggggcactgcactggccaaggtgcttatcgatgccggcggaccggaggccggagtcgtattgtgggctcggcgaccggatgtcgctgagcggatcaataccacccgatgtaaccgcgcctatctaccgggaacactgcttccgccaggtatccgcgctaccgccgatccagcagatgcgctgcgcggtgcgtcgacggtgctattgggggtgccggcgcagcggatgcgggccaacctcgagcggtggggtggtttggtggccgacggcgcgaccctggtgagtctggcaaaaggcatcgagctgggcacgctgatgcggatgagtcaggtcattgtctcggtaactggcgtggacccggcgcaggtcgcggtgctttcgggacccaacctggctagcgagattgctcaatgccagcccgcagccaccgtcatcgcgtgcagcgacttgggccgagccgtcgctttgcagcgcatgctaagcagtggctactttcggccgtacaccaacagcgatgtcgtcggcaccgagatcggcggggtatgcaagaacgtcatagcgctggcgtgcgggatggctgcgggtgtcgggttcggcgaaaacaccgcggcgacgatcattactcggggcctggcggagatcatccggctggggatggcgctaggcgcccaggttactacgttggccggtctggcgggggtaggtgatttggtggccacctgcacatcgccgcattcgcgtaaccggtcactcggcgaacgcttgggccggggcgagatcatgcagtcgatcttgcacggtatggatggttccgatggcggagacggctacgtcgtcgagggtgtgacgtcgtgcgcgtcggtactcgcgctagcgtccagttatgacgtcgagatgccgctaactgacgccgtccaccgagtttgtcacaagggactctcggtcgagaaggcgatggctctgctgttgggccgcagtactaagtctgagtaa

SEQ ID NO: 27727 - DNA, 603 bp, Mycobacterium leprae
atgaacaaagcagagctcattgacgtgctgacacagaaattgggctcggaccgtcggcaggcgaccgctgccgtcgagaatgtcgttgacaccattgtgcgtgctgtacacaagggcgacagcgtcaccattaccgggttcggtgtgttcgagcagcgtcgccgggctgcgcgcgtggctcgtaacccccgtaccggcgaaacggtgaaggtgaagccgacgtccgtcccggcgtttcgtccgggtgcgcaatttaaagcggttgtggctggcgcacagcgtctcccgttggaaggtcccgctgtcaagcgtggtgtagcgaccagcgctgccaagaaggcagcgattaagaaggctccggttaagaaggcgctggccaagaaggcggcgaccaaggctccggccaagaaggccgtgaaggcgcccgccaagaaaatcaccacggccgtgaaagttccggctaaaaaggcgacaaaagtggtcaagaaggtcgccgccaaggctccggtacgcaaggccacgaccagggcgctggccaagaaggcagcggtgaagaaggctcctgccaagaaggttaccgcagctaagcggggtcgcaagtaa

SEQ ID NO: 27728 - DNA, 1458 bp, Mycobacterium leprae
ttggagatggataacgagaggaaacaagtgggtggcgcccgcaaaccgcgcacgttggccgaaaaggtttgggacgaccacgttgtggtagccggtcagggctaccatcaagatcggggtcccgatttgatttacatcgatctacatttggtgcacgaggtcaccagcccgcaggctttcgatggcctgcgcttggccggccggtgggtgcggcgccccgatttaacagtggccaccgaggatcacaacgtgcccaccgtcgacatcgacaagccgatcgctgacccggtgtcgcgcattcaagtggagacgttgcggcgcaactgcgccgaatttggtgtccggttacacccgatgggcgatatcgagcagggcatcgttcatgtcgtagggccacagttaggcctcactcaaccgggcatgacgatcgtttgcggcgacagtcacacctctacccatggcgcttttggtgcaatcgcgatgggcatcggcacctcggagatcgagcatgtactcgctacccaaacgctgccgttgcgcccattcaagacaatggcggtcactgtcgatgggcggttgcccgccggcgtcacagccaaggacatcatccttgcgttgattgctaagattggcaccggcggcgggcagggctatgtactcgaataccggggcagtgtcatcgaatcgatgtccatggaaggacggatgacgatctgcaacatgagcatcgaagccggtgctcgagcaggaatggtggctcccgacgagactacctacgagttcttacgtgaccgtccgcacgcaccgactggcaagcaatgggatgccgcagtagcctactggcaacagctgcgcactgacgacgacgctgtgttcgacaccgaggtctatctcgatgcgacctcgttgagcccgtttgtcacctgggggacaaaccccggtcaaggagtgccgttggccgcatctgtgcctgatcccgaactgatgattgacgatgttgcccgacaagccgccgagaaagctttggcgtacatggaccttcgcccaggtacaccgatgcgcgatattgcggtcgatgcggtgttcgttgggtcgtgtaccaacggccgcattgaggatctgcggttggtggccgatgtgttacgtggccacaaggtggccgacggtgtgcggatgctgatcgtccccggctcgatgcgggtacgtgcgcaggctgaagccgaggggctcggtgagatttttattactgcgggagcgcagtggcggcagccgggttgttcgatgtgtctgggcatgaaccccgatcagcttgcgcccggggagcggtgcgctgcgacgtccaaccgaaacttcgaaggacggcaaggcaagggtggccgtacacatttggtatccccggccgtcgccgctgccaccgcggttcgcggcactttctctgctccggccgatttgaactaa

SEQ ID NO: 27729 - DNA, 1509 bp, Mycobacterium leprae
gtgactgcagtaacctctgatggtaccccgcaagcagcaaaagtcagggtacgattctgcccatcgcccactggtgttccgcacgtcgggatggttcgcacggccctgttcaactgggcttacgctcgacatactggaggcaccttcgtcttacgcatcgaggacaccgacgccgaccgcgacagtgaagaaagctacctggccctgctcgatgcgttgcgctggctcggcctgaactgggacgagggtcccgaggttggaggaccttacggtccgtaccggcagtcgcagcgcactgacatctaccgcgaggtggtggcaaagttgcttgctacaggagaggcctattacgctttctccacaccggaggaagtcgagaaccgccatcttgctgctggacgcaatcccaagctgggttatgacaactttgaccgcgatcttaccgatgcgcagttctcagcgtacttggcggaaggccgtaagcctgtagttcggctgcggatgcccgacgaggatatcagttgggatgacctggtgcgcgggacaactacctttgctgtgggcactgtgcccgattacgtgttgacccgagcaagcggagatccgttgtacactttggtcaacccgtgcgatgacgcgctgatgaagatcacgcatgtactgcggggcgaagacttactatcgtcgactccgcgacaggtggcgctataccaggcgttgatccgaatcgggatggctgagcgtattcccgaattcggtcatttcccatcggtattgggggagggaaccaagaaactctcgaagcgagaaccgcagtcgaatttgtttgcccaccgtgaccggggctttatccccgaaggtctgctgaactaccttgccttgctggggtgggcgatcgccgatgaccacgacttgttcagtctcgatgagatggtagccgcgttcgatgtggtcgacgtcaactccaatccggcgcgattcgatcagaagaaggccgatgcggttaacgccgagcacatccgaatgctcgactccgaggatttcgctggcaggctacgcgactacttcaccacacacggctaccacatcgctttggatcccgctaattacgaagctggtttcgttgccgcggcgcagttggtgcagacccgcatcgttgtgcttggtgacgcttgggacctgttgaaattcctcaacgatgacgagtactctatcgactctaaggccgctgccaaagaactggatgccgatgccgggccggtgcttgatgttgcctgtgccgtgctggacagcctggtggattggaccactgcgagtatcgaggacgtcctcaaggttgcactcatcgaaggtcttggtcttaaaccgcgcaaagtgtttggcccgatccgggtcgccgccacgggggcattggtcagcccgccgctgttcgaatcgctggagctactcggccgtgctcgcagtctgcagcggctgagtgctgcgcgagcgcgagtcacctcggcctag

SEQ ID NO: 27730 - DNA, 729 bp, Mycobacterium leprae
atgtttgcccgtgagctcgctgagtacccattcggcgagttaaccttcactggccgttcgtggccattagccgatgtccggctactggctccgatgctggccagcaaggtggtctgtatcggtaagaactacgccgatcatatcgtcgagatgggtggccaaacgggactagcttcggcagatccggtgatattcctcaagcccaataccgcgatcatcgggccaaatgttccgattcgactgcctgccaacgcatcacctgtgcatttcgagggcgagttggcactcgtggtgggccggtcgtgcaaggacgtcccggcagtccaggccgtcgactgcattctcggctataccatcggcaacgacatgtcggctcgcgatcaacaacgcgcggatggtcaatggacccgcgcgaaaggacatgataccttctgcccagtagggccgtggatcgtcaccgacctcggtcccctagacccagccgatcttgaactgcgaaccgcagtcaacggcgaagttaaacaacacagccgcacctccctgatgattcacggcatcggtgccatcatggagtggatctcggcggtaatgacattgctgcccggtgatctcatactcaccgggacaccggcaggtgttggtcccgtcgaagacggtgacatcgtttctatcactgtcgaaggcatcggaactcttaccaatcccgtagtccgcaaaggaaagtcgtga

SEQ ID NO: 27731 - DNA, 1002 bp, Mycobacterium leprae
ttgttctacgacgacaatgcagatctgtcgatcattcagcgacgcaaagtcggcgtgatcggatacggcagccaggggtacgcgcactcgctgagtctgcgcgattctggtgtccaggtgcgggtcggtctgccggagggctcgaagtctcggcctaaggccttcgagcagggcctggacgtcgatacccctgccgaggtcgccaagtgggccgatgtcatcatgctgttggtgcctgacactgcgcaggcggacgtctttgaaaacgatatcgagcccaacctccagcctggcgatgctttgtttttcggtcatggactcaacattcacttcgaactggtcaagccgtcgggcgatgtgaccgtcgcgatggtcgcaccgaagggtcccggctacctggtgcgccgccagttcgttgatggcaagggtgtgccttgcctgatcgccgttaaccaagacccgaccggcaccggcgaggcgctggcgttgtcttacgctaaagctatcggcggcacccgtgccggcgtcatcaagactaccttcaaagacgagacagaaactgatcttttcggtgagcaggccgtattatgcggtggtacagaggaattggtgaaggcaggtttcgacgtcatggtcgaagcgggctaccctcccgagatggcgtacttcgaggtgctgcacgaacttaagctgatcgtcgatctgatgtacgagggcgggatcgcgcggatgaactactcggtgtctgacaccgctgagtttggtgggtacctgtcaggtccgcgtgtcatcgatgctgacaccaaggagcggatgcgcggcattctgcgcgacatccaggacggcagtttcgtcaagaagctggtcgccaacgttgagggcggaaacaagcaactcgaagtgctccgtaaggaaaacgccgaacatcccatcgaggttaccggcaaaaagttgcgcgacctgatgagctgggttgaccgccagagcaccgagaccgcataa

SEQ ID NO: 27732 - DNA, 510 bp, Mycobacterium leprae
atggtagggttgccaacgcacaccttgtcggttctggtcgaggacactcccggcgtgctcgcgcgggtggcggcactgttctctcggcgcggtttcaatattgagtcgttggctgtcggtgctactgagtgcaagactatgtcgcgaatgaccatcgttgtctctgccgaggagaccccgctcgagcaggtcaccaagcagctgcacaagttgattaacgtcatcaaggttgttgagcaagaggctgacaactcgctgtcccgcgagctggcgttgatcaaggtgcgggccgaagctggtacccgcagccaggtaatcgaagcggtacacttgttccgcgccagggttattgatgtatcgctcgagtcactgactgtcgaggccactggtgactgcagcaaaattgaggcgttgctgcgtgtgctggagcctttcggcgtacgagaaatcgtccaatcgggagtggtctcgttatctcgcggtccgcgcggtatcggcacagtcaggtag

SEQ ID NO: 27733 - DNA, 1878 bp, Mycobacterium leprae
gtgagcgcaccgaccaagccacacgcccgcccgcagggggcgggtaacagcgtgccaaacaccgtgaaacccgccacgcaatttccctcaaagccagctgtcgcaaaactagaacgcgtttcacctgagcaacttaccggtgctcaatcggtgattcggtcgttggaagaactcgatgtcgaggtcatcttcggaattcccggcggtgccgtccttctggtatatgacccgctgttctactcaaaaaagttacgtcatgtcctggtccgccacgagcagggcgccggccacgcggccagcggctacgcacacgtgaccggcaaggtgggggtgtgcatggcgacttctggtcctggagccaccaatctggtgacaccgttggccgatgcgcagatggactcagtgccggtggtcgccattactgggcaggtcgggcgcagtctgatcgggacggatgccttccaagaggccgacatctccggcatcacaatgccgataaccaagcataactttctggttcgtgccggcgacgatattccccgggtactggctgaggccttccacatcgcgtcgtcgggacggccgggtgcggtgctcgtcgatatcccgaaggatgtgctgcagggccagtgcaagttcagctggccaccgaaaatggacttgcccgggtacaagccgaacaccaaaccgcacaaccggcagatccgtgcggcagccaagctgatcgctgacgcccgcaagcctgtgctgtatgtcggcgggggcgttatccgcggcgaagcgaccgagcagctacgggatttggccgaactgaccggcatcccggtggttagcacgttgatggcacgtggcgcgttccccgacagccatcaccagaacttgggcatgcccggcatgcacggcaccgttgcggcggtggcagcgctgcagcgcagcgatttactgatcgcactgggcactcgctttgacgaccgggtgactggcaagctcgactccttcgcgcccgacgccaaggttatacatgccgacatcgacccggcggagatcggcaagaaccggcacgctgacgtgccgattgtgggcgacgtcaaagctgttattgtagagctcatcgcgatgctgcgccattacgaggtccccggcaacatcgaaatgaccgactggtggtcatatttggacggtgttcgcaagacgtatccgttgagctacagtccacaaagcgacggcactctgagcccggagtacgttatcgaaaagcttggtgaaattgttggcccggaggccgtatatgtcgcgggtgtaggtcagcatcagatgtgggcggcgcagttcatctcctacgagaagccgcgtacttggctcaactcaggcggtctgggcaccatggggtttgctattccggcggccatgggcgccaagattgctcgcccggaggcagaagtctgggcgatcgacggcgatggctgcttccagatgaccaaccaggagttggctacgtgcgctatcgagggcgcgccgatcaaggtggcgttgatcaacaacggcaacctgggcatggtgcggcaatggcaagccttgttttatcaggagcgttactcgcagaccgacctggccacccactcacaccgcattccggacttcgtgaagttggccgaggcgttgggttgcgtcggattgcgttgcgagtgtgaagaggacgttgtcgatgtgatcaatcaggccagggcgatcaacaaccgccctgtggtgatcgacttcatcgtcggcgccgatgcgcaggtgtggccgatggtcgccgctggggccagcaacgacgagatccaagctgcccgcggtatccgcccgctctttgatgacgaaagcgaagggcatgtttga

SEQ ID NO: 27734 - DNA, 1530 bp, Mycobacterium leprae
atgactgttgtttccggggcgtccaaggcttcaggggcggatttgctggattatgatgttgtagtcgcgcggtttgatccggtgttcgggcttgaggtgcatgttgagctgtccactgtgactaaaatgttctgtggctgtgccaccacatttggcgctgaaccaaacactcaggtgtgcccggtgtgtctgggcctgccgggttcgctgccagtgctcaaccgggccgcggtccagtcggcgattcggatcgggctggcgttgaactgtgaaatcgtgccctggtgccgcttcgcacggaagaactacttctacccagacgtgcctaagaattaccaaatatcgcaatacgatgagccgatcgccattaacggctacctcgaggtacctctggaagacgacactacctggcgggtggagatcgaacgggcgcacatggaggaagacaccggcaagctgacccacctaggcagcgagaccggccgcatttacggcgcaacgacgtcgctgattgactacaaccgtgctggcgtgccgttgatcgaaatcgtcaccaagcctattgagggggccggagttcgggcaccacagatcgctcgggcgtatgtgaaggcattgcaagatctgttgcgcacgttggacgtatccgatgtccggatggaccaaggctcaatgcgttgtgacgccaacgtatcgttgaaacctatcggtacggtcgaattcggcaccaggagcgagatcaaaaacgttaattcattgaaaagtgttgaaatggctgtacgctacgagatgcagcgccaaggagccattctggtgtccggaggtcgaatcgcccaggagaccaggcactttcatgaggacgggtacactagcccgggacgcgccaaggagacagcgcaggactaccgatatttccccgaccccgacctagagcccgtcgcgcccagccgcgagctggtcgagcaattgcgtcaaacaataccggagttaccgtggttgagccgcaagaggattcagcaggaatggggtatttccgacgaggtgatgcgagatctcgtcaacgctggcgcggttgaattggtcgccgcgaccgtcaagaacggcgcctccagcgaacaagcacgcgcttggtggggaaacttcttggtgcagaaagctaatgaggcaaacatcaccttggacgagttggccatcactcctgcccaagtcgccgtggtagtggcgttggtcgacgagggtaagctgtccattaggttggctcgccaggtcgtcgagggtgtgcttgccggggagggtgaacccgagcaggttatggttgatcgcgacttggccttggtgcgcgacgactcggtgatgcaggctgctgtcgacgaggctttggccgccgatcctgatgtggcggaaaagattcgtggcggcaaggtggcggcggccggtgcgatcgtaggagcggtgatgaagaccacccgcgggcaggccgatgctgcccgggtgcgtgaactcgtcttggccatttgcgggcaggggtaa

SEQ ID NO: 27735 - DNA, 1032 bp, Mycobacterium leprae
atgaggatcggaattctcacggggggcggcgactgtcctggtcttaacgccgttatccgggcgattgtgcgcacctgtgacgcccggtacggttcgtcggtagtcgggtttcaggacggctggcgtgggttgctggagaatcggcgcatgcagctgtgcaacgacgaccggaatgaccgtctgttagccaaaggcggaaccatgctgggcactgcccacgtgcaccccgacaagctgcgggccgggctgcatcagatcaagcagaccctggatgacaatggcatcgacgtgctcatcccgatcggcggcgaaggcacgctgacggccgcgcactggctgtcgcaggaagacgttcctgtggtcggcgtgccgaagacgatcgacaacgacatcgactgcaccgacgtgacctttggccacgacaccgcgctgacggtggctaccgaagccattgaccggttgcacagtaccgccgaatctcaccaacgtgtgatgctggtggaggtgatgggtcggcatgccggctggatagcgctgagttccgggctggcttccggtgcgcacatgacgctgattcccgaacagcccttcgatgtcgaggaagtgtgctgcctcgtgaaacgacgttttcagcgcggggattcgcatttcatttgcgtggtcgctgagggtgccaagccggtcccaggctcgatcacgttgcgccaaggtgggatggatgaatttggtcacgagcgtttcactggggtggcagcgcaattgggcgctgaggtcgagaagcggatcaacaaggacgtgcgagtgactgtgctgggtcatgtccaacgcggtggtacaccgacggccttcgatcgggtgctggccacccggttcggggttaatgctgccgacgcctcgcacgccggcgagtacggccagatggtgtcactgcgtgggcaagacatcggtcgcgtaccgctggaggatgcggtgcgtcagctcaaattggtgcccgaaagccgttacgacgacgccgccgccttcttcggttaa

SEQ ID NO: 27736 - DNA, 1494 bp, Mycobacterium leprae
atgattggttcactgcacgagatcattcggttggacgcgtcgacgctggctgccaagatcgttgccaaggagctgtcgtcggttgagatcacccaggcctgcctggaccagatcgaggcgacggacgacacctaccgagccttccttcacgtggcggccgagaaggcactgtcggcggcggccgccgtcgacaaggcggtggccgctggcggacagttgtcgtcaacgttggccggagttccattggcgctcaaagatgtgttcaccactgtcgacatgccgaccacctgcggatccaagatcctacagggctggcattccccttatgacgccactgtcaccacgcggttgcgcgcggccggcatcccgatcctaggtaagaccaacatggatgaattcgcgatgggcagctcaaccgagaattccgcttacggcccgacccgcaacccgtggaatgtcgaccgggtgccaggcggctccggtggcggcagcgcagcggcgttggcagcgttccaggcgccgttggccatcggctccgacaccggcggctccatccggcagccggccgcgttgaccgcgacagtcggtgtcaaacccacctatggcacagtttcccggtacggactggttgcttgtgcctcgtcgctggatcagggagggccgtgcgcgcgcaccgtcttagacactgcactgctgcatgcggtgatcgccggccacgatgcccgcgactccacctccgtggaagcagcggtgcccgatatcgtaggtgctgctaaggccggcgagtcgggtgacctgcacggcgtgcgggtaggggtggtccggcagttgcgtggcgagggttatcagtcgggggtgttggcgtcatttcaggccgctgtcgagcagttgatcgcactgggtgcaacggtcagcgaagtcgactgcccgcactttgactacgcgctggccgcctactatctgatcttgccatcggaggtgtcaagcaacctcgcgcgtttcgatgcgatgcgctacgggctgcgggtcggtgacgacggcagccgcagcgccgaagaggtgattgcgctgaccagggctgccgggttcgggccggaggtcaagcggcgcatcatgatcggtgcctacgcattatcggccggctattacgattcctactacagccaggcgcagaaggtgcgcacgttgattgcgcgtgatttagacaaagcttaccgatccgtcgacgtgctggtgtccccggcgacgccgactaccgcgttcagccttggcgaaaaagccgacgatccgctggcgatgtacctgttcgatctgtgcacgttgccactcaacctggctggccattgcggcatgtcggtgccgtccgggctgtcctcggatgacgatctgccggtgggcctgcagatcatggcgcccgctttggccgacgaccgactctaccgggtgggtgccgcctacgaggccgcacgcgggccattgccgtccgctatttga

SEQ ID NO: 27737 - DNA, 300 bp, Mycobacterium leprae
gtgtccccgatctcccgcgatgaggtcttgcacctggcccggctaacccgactggtgttgaccgataccgagttggccagcttctctagtcaactcgacgtcatcctggcccacgtgagccagattcaggctgttgacgtcaccggcgtcgaacctaccgacaatccgctcaaatacgtcaacatcacgcgcccggacgagactgtcccgtgtctgactcagcagcaggcgctggccgaagcacccgaagccatttacggccgctttgttgtccctcagatcttgggggacaacaaatga

SEQ ID NO: 27738 - DNA, 2085 bp, Mycobacterium leprae
gtgagttcccccgaagctgaccctatcggacccgaggtgttgcagcagtggcgaaagctgaccgaagaggtgcgtgaacaccagttccgttactatgtgcgtgacgcgccgatcatctctgacgcggagtttgatgctctgctggacaggctcactgtgctggaggaacagcatcccgagctgtgcacgcccgattcacctacccagctggtcggcggtgctggcttcatgactgatttcgtggcgaccgagcatctcgaacggatgttcagcctcgacaacgccttcagtggggatgaactcaatgcctgggtcactcgcatccgcgcagagatcggtaatgacgcccattatttgtgtgagctcaagatcgacggtgtcgcattgtcgttggtctaccgggatggacgcctgacccgcgccacgactcggggcgatggtcgcaccggcgaagacgtcacgctgaacgcgcggaccatcgaagatgtgccggaacggctgaccgtcagcgatatttacccgctgccagaggttcttgaggtccgcggcgaggtgttcttccgagtggtggactttcaagcgcttaacacgagcctcgttgaggagggcaagaatccgttcgctaacccacgaaacagcgcggcgggctcgctgcgccagaaggatccggcggtcacggctcaccgtaaactgcgaatgatctgtcatggactggggcacatcgaaggctttcgtcccgctacccagcatcaggcttacttagctttacgggactgggggttgccggtgtccgagcatacgacgctggtcaacgacatagctggcgtccagggatgcatcgcatactgggccgaacatcgtcacgaggtggaccatgaaatcgacgggatagtggtcaaaatcgacgaggttacgttgcagcgcaggctgggttccacctcgcgagctccacgatgggccatcgcttacaagtacctacccgaggaggcgcagaccaagctgctcgacatccgggtgaacgtcggccgcaccggtcgggttacgccattcgcgttcatgacgcccgtgaaagttgccgggtcgacggtcgggcaggcgaccttgcacaacccttctgaggtcaaacgcaaaggtgtgctgatcggtgacaccgtggtgatccgcaaggccggcgacgtgattcccgaagttttgggacctgtggttgacttgcgcgacgggtccgaacgtgaatttgtgatgcccacaacgtgtcccgagtgcggtactacgttagcgccagaaaaggaaggcgatgccgacatccgttgccccaatgccaggagctgcccggggcaactgcgagagcgagtgtttcacgtcgctagccgcagcgctctggacattcaggggttgggttacgaggccggtgtggcgttgctggctgcgcaagtgatcactagcgagggcgacctgttcaccctcaccgagaaggccttgttgcgcaccgagcttttccgcaacaaggcaggggagttgtcggcgaatggcaaacggttgctagtcaacgtcgacaaagccaaaactgcaccgctgtggcgagtgctggtggcgttgtcgatccggcatgtcgggccgacggctgcgcgagccttggccaccgagttcggcagcgttgacgcaatcttggccgcgtcccctgaacaactggccgctgtcgagggtgtagggaccaccatcgcggccgcggttaccgagtggttcaccgtcgactggcatcgcgtgattgtcaataagtggcgggctgccggggtgcggatggtcgatgagcgtgacaccagcgtgctgcccacatgcgaagggttgaccatcgtggtcactggttctttagcagggttttcccgtgacgatgccaaggaggcgatcgtggcgcgcggaggcaaggtcgctggttcggtatcgaagaagatcgcctacgtggtcgtaggcgacttgccgggatacaaatatgacaaggcggtcgagctcggggtgccgatcctcaacgaggacgggtttcgcctgttgcttgagcagggacctccggtgcagcaagtcgttgactag

SEQ ID NO: 27739 - DNA, 1077 bp, Mycobacterium leprae
gtgaaagttctcgccgcgatgagcggtggcgtcgactcgtcggttgctgctgcccggatggtcgacgccggacatgatgtggtgggtgttcacctggcgctgtctaccgtctccggtacgctgcgcaccgggtcacggggctgctgttccaaagaagacgtgtcagatgcgcgccgtgttgccgatgtccttgggatccccttttatgtttgggatttcgccgagaagttccaagaagacgtgatcgataattttgtgtctgcgtatgcccgcggggaaacccctaacccctgtgtgcaatgcaatcagcggatcaagttctcggcgctttctgtcagagccttaatgttgggtttcgatacggtggccactggccactacgcgcgactgtccggtgggcgactacgtcgtgctgtcgaccggggtaaggatcaatcctacgtgctggcggtattgactgctcaacagttgcgccacgccgcgttcccgatcggcgacacgctcaagcggcaggttcgtgcggaggccgcccgccgtggcttactagtcgctgataagcccgacagccacggcatctgcttcatcccgtccgggaacacccgtgcttttttgagtgaatgtattgggatacgccgcggcagtgtggttgacgcggatggcacggtgcttgccgagcatgatggagtacacggtttcaccgtaggccaacgcaagggtctgggcatcgtcgggccaggaccgaacggccgtccgcgctatgtgacggcgattgacgccgacaccgcgaccgtgtacgtgggtgacgcggccgacctcggtgtgcatacgctgatcggacgggcgccggtcttcaccgcgggagctgcgccgttgggtcctgttcagtgtgtggttcagattcgtgcacacggtgaaaccgccgttgcggtcgttgagttgattggtgacgagctgtttgtgcggttgtgcgaaccgctgcgcggtgtggcgcgcggccagacgttggtgctgtaccgcttggatccggacggggacgaagtgcttggcagcgccactatagctagcatgtcggcgtga

SEQ ID NO: 27740 - DNA, 738 bp, Mycobacterium leprae
atgacgacgatgtggggtgcaccgcttcatcgccgctggtgtgggtcacggttgcgagatccgctccaggctaagttcctcactttagcctcgctgaagtgggtgctggccaaccgcgcctacaccccctggtatctggtgcgttattggcggctactgaagtttaagttggctaacccgcacatcatcacccgcggtatggtgtttttgggtaagggtgtggagattcacgcgacgcccgaactcgcgcagctcgagatcggacgctgggtgcacatcggtgacaagaacacgatccgcgcgcacgagggctcgttgcgattcggcgacaaagtagtattaggccgggataacgttatcaactgttatctcgacatcgagcttgggtcgtcggcgttgatggctgactggtgttacgtctgcgactttgaccaccggatggatgacatcaacatcccgatcaaggatcaggggatcgtcaagtccccggtccgcattggtccggacacctggatggctgcaaaggtgacggtattgcgtggcacctcagtcgggaggggttgcgtgctgggagcacatgcggtggttcgtggggtaatccctgactattcggtcgcggtcggtgcaccggccaaggtggtcaataatcgaaagctgtcttgggagcaatcggccgcgcagcgcgccgagctggctgctgcattggccgacatcgaacgtaagaaggcggcacactaa

SEQ ID NO: 27741 - DNA, 1095 bp, Mycobacterium leprae
ttggcggccggtccggcacttagcgcgcgcggatatctcgcgatgaacgcgcagacccaggccgggtgttcgctgatggagtgggaaaacaacgacaacggccggcaacgttggtgtgttcggctggtccaaggtggcggcttcggcggtccgttgttcgacggcttcgagaatctgtatgtcggcgaacctgggacgatcttctcgttcccaatgacgcaatggacacgctggcgacagccggtgatcgggatgccgtccaccccccgctttcttggcaatggccaactgctcgtcaccacgcacctggggcaggtattggttttcgacgcgcatcgcggcatggttgtcggtagtccactggacctggtggacggcgttaacccgaccgacccgacgcgtgggttggccgattgcgtatcagcccaacggggctgccctgttgcgtcagcccctgcctattcgccagccagccagacggtggtgctcgacatctggcagccaggcgcaccaaccgcggggctaatcgggctgaagtaccactcaaggcagacgccacttcttgcccgtgcgtggactagcgacgccataggcgccggtgtacttgccagcccggtcttatccgccgacggatcaaccgtctacgtcaatggccgcgaccagcacctgtgggcactgcacgccgccaacgggaaaccgaaatggtcggtgccactggaatttctggcacagacgccgcccacagtcaccccgcagggattgatcgtgtccggcgggggccccgacacccgcctggccgcgttcaaggacgccggtgaccacgcccaacagatctggcgacgcgacgacctcaccccattgtcgacgtcgagcctagctggcgtcagcgtcggctacacggtggtcagcagttcgcccgcagcagacgcacctggcatgtcgttgctggccttcgatccacgcaatggccacaccctcaacagctatccgctaccggcagccaccggatatcccgtcggggtatctatcgccaacaaccgccgggtgataaccgtcaccagcgatggccaactctacagcttcgcgcccacctag

SEQ ID NO: 27742 - DNA, 1236 bp, Mycobacterium leprae
gtgaatacgccacccaaggtgtcggtgctgatcactgtcaccggcgtggatcagccaggtgtgacgtcagcgctcttcgcggtgctttcgcggcacgggggcgaactgctcaacgtcgagcaggtggtaattcggggtcggctcacactgggtgtgctggtgttgtgcccgccggaagttgccgcttataccgcgttgcgagatgacgtgcaagccgcgattcgccgggtcggccttgatgtcacgatcgagcgcagtgacgacttgccgatcatccgggaaccgtcgacccacacgatttttgtgctgggccgtccgattaccgctcgggcgttcggcgctgtagcacgtgaggttgcggcactggatgtcaatatcgacgtcattcgaggcatctccgactacccggttaccgggctggagttgcgagtctcggcgccgttggaagccgcgggatcgctgcggacagctctcaaccgggtggctaccgaggaacatgtcgacgtggcagtggagggttacggtctggcccggcgcatcaaacgcctcattgtgtttgacgtcgattccactttggtccagggtgaggtgattgaaatgctggccgcccgagctggcgcccagggaacggtcgccgcgatcaccgaggccgcgatgcgcggtgaactggatttcgcggaatcgttgcagcagcgggtggccaccttggcgggactgcctgtcacggtggtcgatgaggtggccaatcagttgcagctgatgccaggtgctcggaccactctgcgtacgctgcgacggctggggtttcgttgcggggtggtgtccggaggctttcggcggatcatcgagccgcttgcgcacgagctgatgctggacttcgtcgcggccaatgagttagagatcgtcgacggcatacttactggccgggtggtcggcacaatcgtcgatcggcccggtaaggccaaggcgttacgctacttctcagagcaggctggtgtgccgatggagcagaccgttgccgtcggtgacggcgccaatgacatcgacatgctgacagcggctgggctgggaattgcgtttaacgctaagccggcgttgcgtgccgtcgccgatgcgtcgttgagccatccctacctggacacggtgctttttgtgttgggtgtgacacgcggagagatcgaggccgcggacgcggccgacggcggggtgcgccgcgtcgagatccctcccgactag

SEQ ID NO: 27743 - DNA, 1725 bp, Mycobacterium leprae
ttgacagccgaagcgctctcgtcgggagaactcaaggccatccgtccatacccggcccgcactggtcccaaagggaacctcgtatataagctgatcaccactaccgatcacaagatgatcggtatcatgtactgtgttgcctgcttcatcttcttctttgtgggcggcttgctggcgttgctgatgcgtaccgagttggccgcacctggcttgcagttcttgtccaatgaacagttcaaccagctgttcaccatgcacggcacgatcatgttgcttttctatgccacccctatagtgtttggctttgccaacctggtgctgccgctgcaaatcggtgcacccgacgtggcattcccacggctgaatgccttttcgttctggttgttcttgttcggcgccgccatcgggatggccggtttcatcacaccaggtggggccgccgacttcggctggaccgcctatacgccgttgaccgacgccatccactctcccggtgtcggcggcgacctgtggattatgggtttgattgtcgccggtttgggcaccatcttgggtgcggttaacatgatcaccaccgtggtctgcctgcgcgcgcccgggatgacgatgttccggatgccgatcttcacctggaatatcttggtgacatcgatcctggtgctgattgcgttccccctgctcactgctgcgctttttgggttggccgccgaccggcatctgggagctcacatctacgacgcggccaacggcggagtgctgttgtggcagcacctgttctggttcttcggccaccccgaagtttacatcatcgcgctgccgttcttcgggatcgtctcagagatcttcccggtcttttcccgcaagcccatcttcggctacaccacgctggtttacgcgacgttgtctatcgctgcgttatcggtcgcggtgtgggcgcaccacatgttcgccaccggtgctgttctgctgccgttcttttcgtttatgacgtatttgatcgcggtgccgaccgggatcaaattctttaactgggtcggcacaatgtggaagggccagttgacttttgagacgccgatgttgttttcggtcggcttcgcggtcactttcttgttgggtggtttgactggcgtgttgctagccagcccgccgctggattttcatgtgactgacagctatttcgtcgtagcgcatttccattacgtgctgttcggcactatcgtgttctccacgtttgccggtatctacttctggttccccaagatgaccggtcggctgcttgacgagcagctgggcaagctgcacttctggctgacgttcatcggtttccataccacgttcttggtgcagcactggttgggtgacatgggcatgcctcgacgctacgccgactatctgcccaccgacggcttccagggtttgaatgttgtctcgactatcgggtccttcatcctgggtgcgtcgatgtttccgtttgtgtggaacgtatttaagagttggcgctacggcgaggtggtgaccgtggacgacccgtggggatacggcaactccctggaatgggcgaccagttgtccgccgccgcggcataacttcactgagctgccccggattcgttcggagcgtccggcgtttgagctgcactacccgcacatggtggaacgattgcgcgacgaggcatacgttgggcgccgtcacgccgaggagctcgttgaggtgagtttacactga

SEQ ID NO: 27744 - DNA, 1089 bp, Mycobacterium leprae
atgaagtcacacgtgtcaaaacacagaagaaagagaagattaggtgccatgactaccgtctccgcttacgccgccacgtcggcgaccgaaccgctaaccaaggtcaccatcaaccgccgcgccccgggtccgcacgacgtagcaatccagatcaagttcgccggtatctgccactccgatatccacaccgtaaaagctgagtggggccaaccgaattaccctgtggtaccaggccatgagatcgctggcgtggtgaccgcggtgggcactgaggtcaccaagcacaaggtgggcgaccgcgtcggcgtgggctgcatggtgggctcttgcggtgaatgcagcagctgcctagctggcatcgagcagtactgtaaacggggcgcgacctttacctacaactcgatcggcacagacggccagtcaacacaaggcggctacagccaggcaatcgtcgtcgacgagaactttgtcgtacacatacccgatgcgctaccgctggacgccgccgcaccgctgctgtgcgcgggcatcacgctctactcaccgcttaggcattggaatgctaagccgggcacgcggctcgcaatcatcggtttgggcggtctcgggcacatgggtgtcaagctgggcagaaagatgggctgtgaagtgacggtgctgtcccagtcgctgaagaagatggaggacggactgcagctgggcgccagcaactattacgcaactgccgatcccgacaccttccgcaaactacgtggcagtttcgacctgattttgaacaccgtctcggcgaatctggatctcggcaaatacctgaacctgcttgatgtcaacgggacgctcgtcgagctgggcattcccgagcacccgatgttggtgccggcattcgcgctggcactcatgcggcgcagcctagctgggtcgaacatcggcgggatcaccgaaacccaggagatgatgaatttcagtgctgaacatagtgttacaccggaaatagagctcatcgaaccggactacatcaacgaagcctatgaacgagtgctggcaagcgacgtgcggtaccgcttcgtcataaacatatcaagtttgtaa

SEQ ID NO: 27745 - DNA, 978 bp, Mycobacterium leprae
ttgttgactgggaagatgaagctaattgaccgcgtttcggcgattaattggaactggctgcaagacgacaaggacgccgaggtctgggaccggctgactggaaacttctggctgcccgagaaggtgccggtgtccaacgatctcccgtcgtggggcacgctgactgctagtgaaaagcagctgacaatgcgggtgttcaccggtttgacgctgctcgacacgatccaaggcacggtcggagcggtcagccttattcctgatgcgctaacgccgcatgaggaagccgtctacaccaacattgcattcatggagtcggtgcacgccaagagctacagttcgatcttttccacgctgtgctcgacagcggagatcgacgaagcgtttcgctggtcggaggagaacaacaacctgcagcgcaaagctaagattgtgatggagtactatcgaggcgacgaaccgctcaagcgcaaggtggcctccaccttgctcgaaagcttcctgttttactctgggttctacctgccgatgtactggtcaagtcgggccaagctgaccaacaccgctgatatgattcggctgatcatccgcgacgaagcagtccacggttactatatcggctacaaatttcagcgtggcttggtgttggtcgacgacgccaggcgggcagaactcaaggaatacacctacgaattgctctttgagctctacgacaacgaggtggaatacacccaagatctctacgacagagtcgggttgaccgaagacgtcaagaagttcttgcgctacaacgcaaataaggcgttgatgaaccttggctacgaggcgctgttcccgcgggacgagaccgacgtgaacccggcgatcctgtcggccttgtctcccaacgccgatgagaatcatgactttttctccggctcggggtcgtcgtatgtgatcgggaaagccgtcgtcactgaggacgaggactgggacttctaa

SEQ ID NO: 27746 - DNA, 2082 bp, Mycobacterium leprae
atgttgaatctgtacgatgcggacggcaagatccaattcgacaaggacgtactcgcggcccgccaattcttcctgcagcatgtcaatcagaacacggtctttttccataaccaggacgagaagctggactatctgatccgcgagaattactacgagcgtgaggtgctcgatcagtactcgcgtaactttgtcaagtcgctgctggatcgtgcctacgccaagaagtttcggttctcaacgtttcttggtgcgttcaagtattatacctcttacacgctgaagacgttcgacgggaagcggtatttagagcgcctcgaagaccgggtctgcatggtcgcactcacgttggcggccggtgacaccggcttggccgagaagctcgtcgacgagatcatcgacggccgattccagccagctaccccaacttttttgaactcgggcaagaaacaacgcggcgaaccggtgagctgttttttgctgcgcattgaggataacatggagtcgatcgggcgatcggtcaactccgcgctacagctatccaagcgtggcggaggagttgctttgctgctgagcaacattcgtgagcatggtgcaccgatcaagaacatcgaacaccagtcttcgggcgtaattccgatcatgaagttgcttgaagatgcgttctcgtatgccaatcagttgggcgcccgccaaggcgctggtgcggtgtacctgcatgctcatcaccctgacatctaccgcttcttggacactaagcgggagaatgccgacgagaagatccggatcaagacgctgagcctgggggtgataattcccgacatcacctttgagctggctaagcgtaacgaagacatgtacctgttctcgtcgtacgacgtcgagcgggtttacgaggtgccgttcgccgatatttcggtgactgagaagtattatgagatgctcgatgacgcacgcatccgcaagaccaagatcaaggcgcgggagtttttccagaagctggccgagctgcagttcgagtccggttacccctatgtcatgttcgaggacacggtgaaccgggccaaccccattgaaggtaagatcactcactcgaatctatgctcggagatcctgcaggtgtccacgccgtcgttgtttaacgacgacttgtcgtatgccaaagtgggcaaggacatttcatgtaacctgggatcgctgaacattgccaagacgatggactcaccggatttcgcgcagacggttgaggtggcgattcgcgcgttgactgcggtgagcgaccagacgcacatcaagtcggtgccctcgatcgagcagggtaacaatgattcccacgcgatcgggctggggcagatgaacctgcatggctacttgtcccgtgaaggaatcttctacggttccgaagagggagtcgatttcaccaacatttacttctatacggtgttgtttcacgtgttgctggcttcgaactctatcgcgatcgaacgaggtaccttcttcaaaggtttcgagcggtccaagtacgcgtcgggagagttcttcgacaaatacatcgagcagacgtgggagccgaagaccgataaagtgcgtcagttattcgctgaggcagcgatccgtattccgacccaaaacgactggaagcggctgaaggagttggtggtcgcacacggcatctacaaccagaacctgcaggcggtgccgccgaccggatcgatctcctatatcaaccattcgacgtcgtcgatccacccgatcgtgtcgaaagttgagatccgtaaggaaggaaaaattggccgagtttactatccggcgccctatatgaccaatgacaatctgcagtactaccaggacgcttatgagatcgggtaccagaagatcatcgacacatacgcggcggccacccagcacgtcgaccaagggctctcactgacgttgttcttcaaagacaccgccaccacccgggacgtgaacaaggcgcagatttatgcgtggcgcaagggaatcaagacgctgtattacattcggctgcggcagatggcgctggaaggcaccgaagtcgagggctgcgtgtcttgcacgctgtaa

SEQ ID NO: 27747 - DNA, 417 bp, Mycobacterium leprae
gtgcaggcgcacaacttggtctatttctcttcggtgtcggagaatactcatcgcttcgtgcagaagctgggtgttcccgccatgcggataccattgcatagtcgtatcgaggtcagcgatccctatgtattggtgttgcccacgtatggtggcggccggaccgctccggatcttcaagcaggcggctatgtccccaagcaggtcatcgcctttttgaacaacgagtacaatcgagcactaatatgcggggtggtcgcggccggcaacaccaacttcggcgcagaattttgctatgccggcgatgtcgttgctcgcaaatgcggtgttccctacctctaccgcttcgaattgatgggtaccgaggacgacgtcactgctgtccgagcgggcttggccaatttgtggaaggaacattag

SEQ ID NO: 27748 - DNA, 1872 bp, Mycobacterium leprae
atgacccggtccctggacgaactcgtcactagggtggcctcgaagttaatggctgcaacagcggccaccgcggtcacgatcagcgaaggggtgctggctatcctggtggagcacttcggcgtcgatgtgagttttcttcgtcacaataaccacgatattcacgcgaccaagctgatcgtggaatggccgccgcgtgactacgtgcctgatcctgacccgatcggtgtggtgtatttcgccgacgccgacccggtttttgctatggccgagtatctcaaagaaccggcggttttgcggcccgagccggccaatgccgactatcagcgtcgcatcgaggagggcgcctctgtgccggctgtttccctggcgtgtgttccgttgctgtccggagaaatcaccaccggtgtcctcggattcgttaagtacggcgaccgggaatggcacgacgatgagttgcgcgcgctgcaggcgatcgcaactcttttcgcccagctgcaggcccgcatcgttgccgaagaacaattgcgttacctggccgaacacgatgatctcacagggctgctgaatcgccgagccctgatcgcgcacctcgatgagaggctggccgacggtcagcgcggcccggtgacgttgctgttccttggcctcgatcggctcaaagcggtcaacgattacctgggtcacaatgccggcgaccggctgatcgaggtcttcgccgataggctgcgcgaggctgctgaaagcctaacggttattgcccgtttcggcggagacgagtttgtcgtagtgcccgctgagtcggtgtcggttgatgttgcagagtcgtttgcccatcgcttgcagacgcggcttcaaaagcaagtggtgatcgacggcgaaatactcacccgcaccgtcagcattggtgttgccaccggtcttccgggacgggataccacgtcggatctgctacgttgggctgatcacgcggcgctgtcggcgaaaagcgacggcagcaaggtcgtggttcttgaccacgggatcagcgcacagcatacgctgagaactgaggttgaactgcacttagcagggatgatcgatactgacctggtgctgcactaccttcctgaggtagacatgagtaccggcaaagtcttgggcaccgaggccttggtgcgctggcagcacccgacacgggggttgctatttcccgattcatttatcccagtggcggaatcgattaatctagcaggcaagctgggccggatggtgatgcactcggcatgtgcggaattcagtcgatggcgctcagccggcgtgggacttgatgcgctgttgcgcattaatgtctcgccagtacagttggttgctgaaggtttcgttgacaacgtggctggcactctcgacgagttcggtctcgacggcagcatggtgtgtctggagatcacagagaatgttgtggtccaaaacatcgatgccactcgcaagacacttgccggactcaaggaggtcggagtgcacctggctatcgacgacttcggtaccggttacagcgtgttgacccatttgaaatccctgccggtggacaccatcaaaatcgataagagcttcgtggccgaactgggcagcaacgcaagtgatctagcgatcgtgcgggcgatcatggcgctagccaaggaatttgaactcgaagtcgtcgctgaaggcgtcgagactgccgttgcagcgcaggtgctgctggagttagggtgcaaccgtgcgcagggctttctgctctcacgtcccgtcgacggtgcggcgatggaatctctgctggcaaaaggtgtgatacccatggcgcttggcacatgtcaaagcccggagccgagcgaacaccagatacaccgatcgtaa

SEQ ID NO: 27749 - DNA, 1377 bp, Mycobacterium leprae
atgaccatcagcgtgttcgatctgtttacgatcggcatagggccgtccagctcacacacggtcggtccaatgcgcgccgcagcacgtttcgtcgatggcttagctgccaacggtttgctcgaggacgtgtgcgacatccgtgtcgagttgttcggatcgctggcggcaactggggcaggccacggcaccatgtcggctatcctgttagggcttgagggggagcatcccgagaggcttgatgccgatgacatggtgacccgattggcctgtatgcgcgctgccgggacaatctgtctgggtggattgatcgtgatcaagttcaccgaagccgatgtcgtactgcgtccacagacggtgctggaccggcatcccaacgccatgacgatcgttgctctcgcccgcgacggaaccaagctcgccgccgagacttattattcggtcggtggcggatttgtcgtggcacacggcgatccacccgagggcgcggaatggaccactggtggggtgtcctttggctcggcgggtgagttgttagaattggcggccacgcgaggaatgtcaatctgcgagttgatggccgagtacgagcaaagcctgaggtccgagcaggaggtacgtgccggtctgctaaatattcgtgacgtcatgacgcaatccgttcagcgtggtattgctcagggcggctacctgcctggtgggctgaaagtgcgtcgccgcgcacattcctggcacgagcggctgtgtgccgaggatccgaatcgcgatccagtgttcgccgaggactgggtgaacctggtcgcgctggcagtcaacgaggagaatgccgtgggcggaagagtggtcaccgctccgactaacggtgcggcgggcatcattcccgctgttttgcattatgcacagcattactgtcccgctgggcgggcagacccagacgatacaagtgtgcggtttttgttaactgcgggggcaattggttcgctgtacaaggagcttgcgtctatctccggcgcggaggtcggttgccaaggtgaggtggggtcggcggcttctatggccgctgcgggcttggctgaaatccttggtggcacaccggctcaggtcgagaacgcggctgagattgcgatggaacacagtctcggtttaacctgtgacccgatcgccggtctggtccagattccgtgcatcgaacgcaatgccatctcggccggcaaagcgatcaatgccgctcggatggctatgcgtggcgacggtacccaccgggtgagccttgacgaggtgatcgccaccatgagggcaaccggccgggacatgaatttcaagtacaaggagactgccgcgggcggactcgccctcgcggtcaacatcgtcgaatgctga

SEQ ID NO: 27750 - DNA, 822 bp, Mycobacterium leprae
atggtagctctggacgcacttgatgactggccggttccgactaccgctgccgcggtggtcggacccaccggcgtgttagccgctcgcggcgacaccgagcaggtgttcccgctggcctcagtcaccaaaccactggtggcccgcgccgtgcaaatcgccatcgaggaaggggttgtcgacctcgataccgtggccggtccgcctggctccacgatccgccatctactggcgcatgcatcaggcttggcgatgcactccaagtacgtgatggctccgcccggcacccgtcggatttattcgaattacggctttagggtgctggccgagactgtgcagcgggaggcggggattggattcagccgttacctcaccgaggcggtgttggagccactggcgatgacagccaccaagctagaggatggtacgtgggctgccgggtttggggccacctcgaccgtggccgatctggccgcattcgctaatgacttgctgcgtcctgcgacggtctcggcgcaaattcacgcggaagccacgtctgtgcaattccccgacttggatggcgtcctgcccgggcacggtgtgcagcgtcccaacgattggggactaggctatgagatcaagaattcaaaattaccgcattggaccggcaccctcaactccgcccgaacatacggccatttcggtcaatcaggcggttttatctgggcagatccggaggcggagctagcattggtggtcctcacggaccgcgatttcggtgagtgggcactgcagctgtggccggcgatttccgacgccgtaatatccgagtacgcccgatag

SEQ ID NO: 27751 - DNA, 2277 bp, Mycobacterium leprae
atgactgtgcgtgacgtcggcggccagcaggatagagaaactacattcgtggtcggcagtttcgccgatatcccgctgcgcagcgatcgtgtcgtgtggccaccctccgaagctgcggtcgaaaagcatgttttctcagccgcttcagcacacgggtacacagttgatcaactgcactggcatacgccggaaggtatcgacgtcaaaccggtctacatcgctgccgaccgtgccgccgccgaggccggcggctacccgttgcatagcttccccggtgagccgccttacctgcgcggaccttatccgacgatgtatgtcaaccagccgtggacaatccgtcaatacgctgggttttccaccgccgcagattccaacgcattttaccgtcggaacctggcagccggccagaagggcctgtcggtagccttcgacctggctactcaccgcgggtacgactccgaccatcctcgtgtccagggtgatgtcggaatggctggtgtggcaatcgattctatcctcgacatgcgacaattgttcgatggcatagacctctcagcggtttcggtatcgatgacgatgaacggtgctgtgctgccgatcctggcgctgtatgtggtagcagctgaggaacagggtgttcctccggagaagctggcaggcactattcaaaacgatatcctcaaagagttcatggtccgcaacacctacatctacccacctgagccatcgatgcggatcatatccgatatattcgcctacaccagcgccaagatgccgaagttcaactccatctcgatctctggctaccatatacaagaagcaggcgccacagcggatttggaactggcatataccttggccgatggtgtcgactacatcaaggcgggcttggacgctgggctggacattgacacttttgcgccgcggttgtccttcttttggggcatcgggatgaacttcttcatggaagttgccaaactgcgtgctggccggctgttatggagtgaactggtcgccaaatttggaccccaaagcccaaaatccctatcactgcgcacccattcgcaaacctctggatggtcgttgaccgcccaggacccgttcaacaacgtagcccgcacctgtatcgaggcgatggccgcaacacagggccatacccagtcgctgcacaccaacgcgttggacgaggcgttggcgctgccaacggacttttccgcccggatcgcccgcaatactcagcttgtattgcaacaggagtcgggcactacgcggccgattgacccgtggggaggctcttactatgtggagtggctgacccatcaactggctgcccgtgctcgtactcatatcgccgaggttgccgagcatggcggcatggctgcggctatcagcgacggcatccccaagctgcgcatcgaggaggctgctgcgcgcacccaggcccgcatcgactccgggcgtcagccggtggtcggggtcaacaagtaccaagtcgaccaggatcacgagattgaggtactcaaagtcgagaacagtcgggtgcgtgctgaacaagtggccaaattgcagcagctgcgggcaaaccgggatcagttggcggtcgacgcggctctggccgagctgtctggtgccgctggggcccacggccgtgccggagataatttgttggcgcttgctatcaacgcggcccgggttcaagctactgtcggcgagatctccgatgcgctggagagagtatatgggcgtcaccaagcgaagatccgtaccatcaccggggtctaccgtcgggaagtgggagaagctgggaaggccaccgatatcgcaaacgctacagaactagtcaaaaaattcgccgaggctgatggtcgtcgacccaggattctggtggccaagatgggccaggacggccacgaccgcgggcagaaggttgttgcgacggcattcgccgacctcgggtttgacgtcgatgtcggatcgctgttctccacgcccgaagaggtcgcccgccaggctgccgacaacgatgtgcatgtgataggtgtgtcgtcgctggccgctggccacctgacgctggtgccggcgctccgagacgcgcttgctgacgtgggccggcctgacatcatgattgtggtgggcggcgtgatcccgcctgatgactttgatgagttgtatgctgccggggctactgccatcttccctcctgggacggtgatagcctacgccgcaattggcttgctgcataagctcgccggccggctggggtacactctcacctag

SEQ ID NO: 27752 - DNA, 810 bp, Mycobacterium leprae
atggcaggactgctcgaaggcaaaaggattctggtcagcgggatcatcaccgattcgtcgatcgcgtttcacatcgccaaggtagcccaggaagcgggggcgcagttggtgctgaccggattcgaccggttgcggctgattcagcgtatagccgaccggctgccggacaaggcgccgctgatcgaacttgacgtgcagaacgaagagcacttggccacgctagccgagcgggtgacggccgagatcggagaaggtaacaagctcgacggcgtggtgcactcgatcggcttcatgccgcagaccgggatgggcaccaaccagttcttcgatgcgccctatgaggacgtttccaagggtatccacatctcgacgtactcgtacgcctcgttggccaaggcgctgctgctgatcatgaactctggcggctccatcgtgggcatggatttcgatccgacccgggccatgccggcttacaactggatgaccgtggctaagagcgcgctggagtcggtcaatcgttttgttgcgcgcgaggctggcaagtacggtgtacgctccaatctcgttgcggcgggtcctatccggacactggcgatgagcgctatcgtcggtggtgcgttcggcgaggaggccggtgctcagatgcagctgctcgaggagggctgggatcagcgtgccccgatcggctggaacatgaaggatcccacgccagtcgctaagacggtgtgcgcgctgttgtctgagtggttgccggctactaccggtagcatcatctatgccgacggcggtgctagcacccaactactctaa

SEQ ID NO: 27753 - DNA, 762 bp, Mycobacterium leprae
gtgactgacgccgctgccaaggtctcagcagcccctgggaggggtaaacccgcattcgtgtctcgttcaatactggtcactggcggaaaccgggggatcgggttggcggtggcgcgccgcctggtcgctgatgggcatcgggtggcggtgacccaccgggcgtccgtcgtccctgactggtttttcggcgtcgagtgcgacgtcaccgacaacgatgccatcggtgctgccttcaaagcagtcgaagagcaccaggggccggtggaggtgttggtggccaacgctggtatcacgtccgacatgctgatcatgcggatgagtgaggagcaattccagaaagtcatcgacgtcaacctgaccggtgtttttcgggtcgccaagctggcttcacgcaacatgatcaagcagcggttcggtcgctacatttttatgggatcggtcgtcgggctcagcggtgtacccggacaagcgaattacgccgcatccaagtcgggcctcatcggaatggcccggtcgttggcccgcgaactggggtcgcggtcgatcaccgccaacgtagtggcgcccggcttcatcgacaccgagatgacccgtgccatggactcgaaataccaggaagccgcgctgcaagcaattccgttgggccgcatcggcgcggtcgaggagatcgccggtgctgtcagtttcctggcatccgaggatgccggatacatctcgggcgcggtgatcccggtcgatggcggcctgggtatgggccactga

SEQ ID NO: 27754 - DNA, 1719 bp, Mycobacterium leprae
gtgagtgcgccgatctggatggcgtcacccccggaggtgcactcggcgctgctaagcagaggcccaggatccggtccactgctagtggcagctgaagcgtggcgctcgttgagtagcgtgtacgctgagatggccgacgagctggtcgcgctgttggtggtggtgccggttagctcctgggacggttcggccgccgaggcatatgtgatcgcctatttgccgtatttagggtggctgaggcaagccagcgttgatagcgctgtgatggcagcccactatgaaaccatggccacagcctacatcaccactttggcgatgatgccgacgttggctgagctagccgccaaccgtactgcccacacggtgttggtgaccactaatttcttcggcatcaacactatcccgatcgctcgcaacgaaatcgactacgtgcggatgtgggtcgaggccgccattgcgatgggcacctatcaggaggtctctacggtggtggtggattccgccccggaggccatcgccgccccccagatcatggcaagcgacgcgctggaagccagttccgaccagccgtcgccgacagcccccagccagtcccctcaggtccaaaattggttgcaatggttgcagaagatcggctacaccgacttttacaacactttggttcaaccgctaataacctcgttgacgaaccaccctttcttccaagggatgttttccggatttgatccttggttgccttcgcttggtaatccgcttagtttcctcagccctttcaacattgcgtttgccctaggcactccgatggacataggttcatatgtcggttatttgtcccagaccttcgcttttatcggggccgatcttgcagcggcgttcgcttcgggtaatcctgtgactatcggtttcaccctgctgttcaccaccatcgaagccattggcacgattatcaccgataccatcgcgttggttaagactatgattgaacagtcttttgtgctgctcccgatgattctaccgctgttgaccgctccgttagcggttgccaccgcgggtgcagcgggcagtttcgcgggcttgtcggagctggcgggcctggttggtgtggcaccacccgggttgccgtccgctccgcccgtagcagcggtggccccggtcgtcccgccttcgatgcccaccttagcttcgataccgactccgaccccgatgccggctccagcagcctcgaccgcgccggtcgtcacgccgcctggtccgccgccggttaccgcaccaccgtcggtgaccggtgcgggcgtggaaagcttcggttacctggtgggtcgcctgccgtcgacggccaggggggtggtgggcactagcgtccgacagcagtcatcagcacccgaccgcatcgaagcccctgacgctgcggcaacgccccaggagcaagctcgatcgcggtggcgtcgacgggcaaaggtcacaccgttcgactcgagcggttcgcccaacccgaaggccgcgccgacggcatcggatcaaggcgcaggaactctggggttagccggaactgcccgccaggccagttccggacccgccacaggattggtcactctgtccaacggtacgttcagcgacagtccacgcgcgccaatgttgccgcgaacctggggtgctgacccaactttctgttacaatgcggctgatattggtcctgctggtggctgggacgacgaatga

SEQ ID NO: 27755 - DNA, 546 bp, Mycobacterium leprae
gtgagagttgttttgctgggaccgccgggggcaggcaagggcacgcaagcccaaaggctcgccgagaagcttggtatcccgcagatctccaccggtgaattgttccggcgcaacatcgaaaaagacaccaaactcgggcacgaggccaagaagtacctggacgccggcgacttggttcctgccgacctgaccaatcagctggtggacgaccgtctgaacaaatcggacacggtcgacgggtttatcttggatgggtatccgcgctcgctcgagcaagccaaggcgctgcatgaaatgctggaacgccggggtaccgacattgatgccgtgctggagtttcgcgtgtcgcaggcggtggtgctggagcggcttaaagggcggggccgcgccgatgacaccgacgacgtcgtcatcaatcggatgaacatctaccgtgacgagactgcttcgctgttggagtactatagcagcgaattgaagactattgacgccatcggcaccatggacgaagtgtttgcccgtgcgttgcacgccttgggaaagtag

SEQ ID NO: 27756 - DNA, 1317 bp, Mycobacterium leprae
gtgctctcggctttcatctcgtcgctgcggacagtcgatttaaggcggaagatccttttcacgctgggcatcctcgtgctctatcgcgtcagtgcggcactgccctctccgggcgtcaactaccggcacgtgcagcaatgcattcaagaggccaccgccggcgaagccggggaaatttactcgctgattaacttgttctccggtggtgcgctgctaaagctcacggtaggggtgatgccctatatcaccgccagtatcattgtgcagttgctgaccgtggtgatcccgcgctttgaagaattacgcaaagagggtcaagcaggccaagcgaaaatgacccaatacacccgctatctggctatcgcactagccgtcctgcaagccaccagcatcgtggcgctggcggccaacggtggactgctgcagggttgccaggaggacatcatctccgaccagagcatcttcagtctggtcgtcatcgtgctggtgatgacgggcggtgcggcgctggtgatgtggatgggtgagttgatcaccgaacgtggtatcggcaatggcatgtcgttattgatcttcgtcggtatcgctgcccgcattcccgccgagggcaaacagatcctagatagccggggtggggtcatctttgccgctgtttgcctggccgcactggtcatcatcgttggcgtggtcttcgttgagcagggccagcgccgaatcccggtgcaatacgctaagcgcatggtgggtcggcggatgtatggcgggacctcaacatacctgccgctcaaggtcaatcaggccggcgttattccggtaatcttcgcgtcgtcgttaatctacattccacatctgatcacccagctggtccgcagcggcagcggtggtgtgggcaagagctggtgggacaaattcgtcggcacctacctatcggatccggccgatcccgtttatatcaacatatacttcgggcttatcatcttcttcacctacttctatgtatcggtaacattcaatcccgacgaacgtgccgacgagatgaagaagttcggtggtttcattcctggcattcgaccgggacggccgacggcggactatttgcgttatgtgctaagccgaattacgttgccgggatcgatctatcttggagcgatcgcggtgttgcccaatctattcctgcagatcggcaatggcggcgaggtccagaatttaccgttcgggggaaccgctgtgttgatcatgatcggtgttggcttggatacggtcaagcagatcgagagtcagctgatgcaacgcaactatgaagggttcctgaagtga

SEQ ID NO: 27757 - DNA, 441 bp, Mycobacterium leprae
gtgacgattaagctgcacgacctgcaacctgcgcgcgggtcgaaaactacacgtacccgggtcggccgcggtgaggcctcgaaaggcaagacggctggccgcggtaccaagggtaccaaagcccgtaagcaggtaccagtgacctttgagggcgggcagatgccaatccacatgcggttgcctaagctgaagggattccggaatcgattacggacagaatatgcggtcgtcaatgtcggtgacataagccggctgttccctgaaggcggcacaatcagcgtaaacgacttagtcgccaagaaagctattcgtaaaaactcattggttaaaattctaggtgacggcaagctgactgtcaaagtcaccctgtccgcgcataagttcagcggcagtgcgcgtcacaagatcaccgtagctggcggctctgttaccgagctctaa

SEQ ID NO: 27758 - DNA, 216 bp, Mycobacterium leprae
atggcaagtctgaagattacccaggtacgtagcacgatcggggtgcggtggaagcagcgtgagagcctgcgcaccctgggcctgaggcggattcggcattcggtgattcgcgaagacaacctccaaacccgcgggctgatcgctgtggtgcgtcacctcgtcgaggtggagccggccaccggaggtagtactcctgtgggtggggggagagattaa

SEQ ID NO: 27759 - DNA, 654 bp, Mycobacterium leprae
atggcggcgcagtcagctggcctgctaggtgatagccgcgagggtcgtagccggcgcgagggaggtagccgcggcggtcgcgatcgggaccgtgatggtgagaagggcaactacctggaacgggttgttgccatcaaccgggtctccaaggtcgttaaaggtggtcggcgattcagcttcaccgctttggtcatcgtgggtgacggacacggcatggttggcgttggttatggtaaggccaaggaagtccccgccgcgattgccaagggcgtagaagaggcccgtaaaagcttcttccgggtgccgctgatcgatggcactatcactcaccccgtacagggcgaggcagccgcgggcgtggtgctgttgcgccctgccagccctggtaccggtgttatcgccggcggcgcggtacgtgctgtgctggaatgcgctggggtgcacgatatcctggctaaatccttgggcagtgacaatgcgatcaatgtggtgcatgccaccgtggctgcgctcaagctgctgcagcgtcctgatgaggtggcggcccggcgcggcctgcgatcgggtatgttgcctcggagctgggatcctgcaggcgtggcgggagagcgaagcgttgatcggccagtggggcgcgtgagggaacaggcataa

SEQ ID NO: 27760 - DNA, 366 bp, Mycobacterium leprae
gtgcagtcagtttccgcgattcgtagggtctctcggctgcgtaggcacgcgcggctgcgcaagaaagtgtcaggcacctcggagcgtccacggttggtggtgaaccggtccgcgaggcacattcacgtgcaactggttaacgacgtcaccggcactacggtggctgctgcgtcatcgatcgaggccgacgtgcgcggtctgcaaggtgacaagaaagtccgcagtgtgcgggtcggccaattgatcgccgagcgggccaaggccgctggcattaacacggtggtattcgaccgtggcggatacacctacggtggacgcatcgcggcgctggccgattccgtgcgcgagaacggattgaatttctga

SEQ ID NO: 27761 - DNA, 540 bp, Mycobacterium leprae
atgtcgcgcattggtaagcagccgattccggtccccgccggagtcgacatcacgatcgatggtcaaaacgtcttggtgaaggggcccaagggtactctggatttgacggtcgctgagccgatcatgttggcgcgcaacgacgaaggtgcaatcgtggtcacccgtcccgacaatgagcggcgcaaccgctcgctgcacggattgtcgcgcactttggtgtccaacctggtcaccggtgtgacgcagggttacactgtcagcatggagatcttcggtgtcggttaccgggcccagctcaagggctccaatctggaattcgcgctagggtatagccatccagtggtgatcgaggctcccgagggtatcacgttcgcggttcagtcaccgacgaagttcactatcacggggatcgacaagcagaaggttggtcagatctcggcgaacatccgccgtctgcgccgtcctgacccttataagggtaagggcgtgcgttacgagggcgaacagattcgccgcaaggtcggaaaaacaggtaagtag

SEQ ID NO: 27762 - DNA, 399 bp, Mycobacterium leprae
atgaccatgacggacccgatcgcagattttttgacacgtctgcgcaacgccaattcggcgtatcacgacgaagtgactgtgccgcactccaatatcaaggccaacatcgcccagatccttaagaacgaaggatacatccgagacttccgtaccgaagacgctcgtgtcggcaagtcattgatcatccaactcaagtacggacccagccgggagcgtagcatcgctggtttgcgccgggtgtccaagccggggttgcgggtgtatgcgaagtcgatcaacttgccgcgtgtgctgggcggtctgggcgtggtcatcatctcgacctcctcaggcctgctgaccgaccgtcaggcagccaggcagggtgtgggcggcgaagtcctcgcgtacgtgtggtag

SEQ ID NO: 27763 - DNA, 186 bp, Mycobacterium leprae
atggcgaagaaggcactagtcaacaaagccgcacgcaagccaaaatttacggtgcgcggttacactcgttgcagcaagtgcggtcgcccgcgtgcagtgttccgcaaattcgggctatgcaggatttgcctgcgcgagatggcgcatgcgggtgagttgcccggtgtgcagaagagcagctggtaa

SEQ ID NO: 27764 - DNA, 564 bp, Mycobacterium leprae
ttgagtaccgcagaaaaagtgcagccgcgccttaaacagcgctaccgcagcgagattcgggaggcgctgaacaagcagttcagctacggcaacgtgatgcagatcccgaccgtggtgaaggtcgtcgtcaacatgggagttggtgacgcagcccgggatgccaagctaatcaacggtgcagtcagtgacttggcgctgatcaccgggcagaaacccgaggttcgcaaggcgcggaagtctatcgcgcaattcaagctgcgcgagggcatgccaatcggtgtccgtgtcacgttgcgtgacgaccggatgtgggaattcctggaccggcttacgtcgatcgcgctgccacgtattcgtgatttccgtgggttgtcgcctaagcagttcgacggtgtcggtaactacaccttcgggctggctgagcagtcggtgttccacgagatcgatgtggacaagatcgaccgggttcgcggcatggacatcaacgtcgtcacctcggcgacgaccgacgatgaaggacgagcgttgttgcgggccctcggctttccgttcaaggagaactga

SEQ ID NO: 27765 - DNA, 318 bp, Mycobacterium leprae
atgaaggttcacaagggcgataccgttctggttatcgcggggaaagacaaaggcgccaaaggcaaagtgttgcaggcctacccggcccgtaaccgggtactggttgagggggtcaaccggatcaagaagcatactgcgatttcagccaaccagcgcggagctcaagcaggaggaatcgtcacccaggaggccccgatccacgtttccaatgtgatggtggttgactcagacggcaagcccacccgcatcggctaccgggtagacgaggagaccgacaagcgagttcgtatttccaagcgcaatggcaaggatatctga

SEQ ID NO: 27766 - DNA, 342 bp, Mycobacterium leprae
gtggccgacaacaccggcgccaaggagatcttgtgcatacgagtgctcggcggctcgtcccgacgctacgccagcattggtgatgtcatcgtcggcaccgtcaaggacgctattcctggcggcaacgtcaaacgcggagatgtcgtcaaagccgtcgtggtacgcaccgccaaagagtgcaggcgtcccgacggcagctacatcaagttcgatgaaaacgctgctgtgatcatcaagcctgacaacgatccgcgcggaactcgcatcttcgggccggtcggccgcgaacttcgtgagaaacgattcatgaagatcatctcgctggctccggaggtgctgtag

SEQ ID NO: 27767 - DNA, 384 bp, Mycobacterium leprae
atgatggcagcagaagctaagaccagcgctaaggcagcgccctcggcaaccacagccgctcctaagggaggagctgtcaagggtggcgtatcaaaagacaagggtcccaagcacactccgagtattccgaaggtacgtgggggacgtaaaatgcgcattggctatgtagtgagcgacaagatgcagaagaccattgtggttgaactggaagaccgcatgcgccatcccttgtacggcaagatcattcgtaccaccaagaaggtcaaggcgcacgacgagaacagcgttgcgggcattggtgatcgtgtttcgctgatggagacgcggcctctatcggcgaccaaacggtggcggctggtggagatcctcgaaaaggccaagtag

SEQ ID NO: 27768 - DNA, 246 bp, Mycobacterium leprae
ttgatggcagtgggaatttcccctggcgaactgcgtgagctcaccgacgaggagctgattgagcgactgcgcgaatccaaggaagagttattcaatctgcgtttccaaatggcgacaggccagctcaacaacaaccgacggctacgtacggttcgtcatgagatcgcgcgtgtttacaccgtgctgcgtgaacgggaattgggtctagcctctggacccggtggtgctaatggtgaggaatcatga

SEQ ID NO: 27769 - DNA, 417 bp, Mycobacterium leprae
atgttgattccccggaaagtcaagcatcgtaagcagcaccatccgcgccagcgcggcatcgctagtggcggcacaaaggtgaatttcggtgattacggtatccaggccctcgagcacgcctacgtcaccaaccgccagatcgagtccgctcgtatcgccatcaaccgacacatcaagcgtggtggcaaggtgtggatcaacatcttcccggatcgcccgctgaccaaaaaacctgctgagacccgaatgggttcgggtaaaggctcaccggagtggtgggtggtcaacgtcaagccgggtcgagtgctgtttgagctcagctacccgaatgagcagactgcccgggccgcactcacccgcgcaatccacaagttgccgatcaaagcacgcatcgtaacccgagaggagcagttttga

SEQ ID NO: 27770 - DNA, 846 bp, Mycobacterium leprae
gtgggccagaagattaatccgcatggcttccggttgggtatcaccaccggctggaagtctcgttggtacgccgacaaacagtacgccgagtacgtcaaggaagatgtcgcgatccggcggctgctatccaccggcctagagcgcgcggggatcgccgacgtggagattgagcgcacccgtgaccgggtcagggtggacatccacaccgcccgtcccggcatcgtcattggtcgtcgcggtaccgaagccgaccggatacgggcagatctagagaagttgacctgcaagcaggttcaactcaatatcctcgaagtcaaaaaccctgagtcgcaagcacaattggtggcccaaggggtcgctgagcagttgagcaatcgggtggcgttccgtcgggcgatgcgcaaggctatccagtctgcgatgcgtcaacctaacgtcaagggcatcagggtgcagtgctcgggccggcttggtggcgcggagatgagccgctcggagttttaccgtgagggccgcgtgccgttgcacaccttgcgcgctgatatcgactacgggttacatgaggccaagactaccttcggccggatcggcgtgaaggtatggatctacaagggcgacattgtcggtggcaaacgtgaagtgacagccgtcgcgccggctggtgctgagcgtgcgcgccgcgagcggccgtcgggcacgcgtccgcgccgcagtggcgcggcgggcaccaccgtaactggcaccgacgctggacgggcggtgggtggcgaagaaagcgctgctaccaacattgggcactctgacgacagcgtggttacccacgaaccgcagatcgcggagagctga

SEQ ID NO: 27771 - DNA, 528 bp, Mycobacterium leprae
atgactacgactgaatttccgtcggcgatcgccaaagcacgatttgtgcgagtgtcgccgagaaaggcgcgccgggtgatcgacctggtgcgcggaaggtcggtggcagacgcactcgacattctgcgctgggcgccgcaggccgccagtgagccggtcgctagggtgattgcgagtgctgcggccaacgcccagaacaacaacggactggacccggagactttggtggttgccaccgtctacgctggcgaaggcccgaccgccaaacggattcgtccgcgagcccagggacgcgcgttccgtatacgcaggcggaccagccacatcacggtggtggttgaaagtcggccggtcaaagatcaacggtcggcggcgtcgacgaaggcccgtcgggccgaggccagcaagactgccggcagagccccagcgaaaaaggccggggccagttctggggcaaccaagatgccgcctaagaaggcatccgttaaaacttctgaggcttctgaaacgaagggaggctcagactag

SEQ ID NO: 27772 - DNA, 282 bp, Mycobacterium leprae
atgcctcgcagcttgaaaaagggtccgttcgttgacgaccacctgctcaagaaggtcgacgttcagaacgaaaagaacaccaagcaggtcatcaagacctggtcgcgccggtcaacgattattccggacttcattggtcatacctttgcggtccatgacggacgcaagcatgttccggttttcgttaccgaggcaatggtgggtcacaaacttggcgaattcgcgccgactcgcaccttcaagggacacatcaaggatgaccggaaggccaaacgacgatga

SEQ ID NO: 27773 - DNA, 843 bp, Mycobacterium leprae
atggcaattcgcaagtacaagccgacgacttccggtcgtcgtggcgccagtgtgtctgatttcaccgacatcactcgtacgaagccggagaaggcgttgatgcgttcgctgcacggccatggtgggcgcaacgtccacggccggatcaccactcgccacaagggcggtggccataagcgcgcctaccggttgatcgatttccgccgcaacgacacagacggtgtcaacgccaaggtcgcgcacattgaatatgatccgaaccgcacagcgaacatcgcgttactgcacttcttggatggcaagaagcgatacatccttgctccgcaaggactttcgcagggtgacgtggtggagtcgggtgctaacgctgacatcaagccaggtaacaacctcccgttgcgcaatattcctgccggtaccttgatccatgccgtggagctccggccgggcggtggtgccaagctcgcacgatcggccgggtcgagcatccagttgctcggcaaggaatccagctacgcctcgttgcgtatgcccagtggtgagatccggcgggtcgatgtgcgctgccgcgcgacggtcggtgaggtgggcaatgccgagcaggcaaacatcaactggggcaaagccggtcgtatgcgttggaaaggtaagcgtccgtctgttcgtggtgtcgtcatgaacccagtagaccaccctcacggcggtggtgagggtaagacctcgggtgggcgtcacccggtcagtccgtggggcaagcctgagggccgcacccgcaagccgaacaaatcgagcaacaaactgatcgtccgccgacggcgcaccggcaaaaagcacgcgcgctag

SEQ ID NO: 27774 - DNA, 303 bp, Mycobacterium leprae
atggcaactatcgctgactcccgcgacatcatcctggccccggtcatttcggagaagtcttatgggctgctggacgacaatgtgtacacattcgtggtgcatcccgattcgaacaagacgcagatcaagatcgctatcgagaagattttctcagtcaaggtcgcatcggtaaatacctctaataggaagggtaagtgcaagcgcaccaggactggattcggtaggcgcaagaacactaagcgtgccatcgtcaccctggcgccgggcagcaagtcgattgacctgttcggaacaccagcttag

SEQ ID NO: 27775 - DNA, 693 bp, Mycobacterium leprae
atggcagccaaggttgagaacggttccaatatccggaaaatcgatgtcaagacaccagacggcaaagtcgacggcaccatcgagctgccggctgagctgttcgacgcacccgcgaatattgcgttaatgcaccaggtggtcaccgctcagcgggcagcggctcggcagggtacgcactcaaccaagacgcgcggcgatgtcagtggtggtggtcgcaagccttatcggcagaaggggaccggtcgcgctcggcaggggtcgatgcgggccccgcagttcaccggtggcggtattgtgcacggtcctaaattgcgcgactacagtcaacgcacacccaagaagatgatcgccgcggcgttgcgcggggcgttatccgaccgggcacgcaacggccgcatacacgcagtcaccgaactagtggtgggtaagactccgtctactaagagcgccaaggaattcctgggcacactgacagatcgcaagcaggtgttagtagtcatcggccgtagcgacgagactggtgcgaaaagcgtgcgcaacctgcccggtgtgcatctcctgtcgcccgaccagctcaacacctatgacgtgctgcgcgccgacgacttggtgttcagcgttgaggcgctcaacagctatatcgccgctcagcaagcagccggcacttctacacccgagaaggtttcggcctga

SEQ ID NO: 27776 - DNA, 657 bp, Mycobacterium leprae
gtgatggcgcgaaagggcattcttggtaccaagctgggcatgacgcaggtattcgacgaaaacaacagagtggtaccggtgactgtggtcaaggccggcccgaacgtggtgactcgcatccgcacactggagcgcgatggctatagtgctgtacagctggcctacggcgaaatcagcccgcggaaggtcaacaagccggtgacaggccagtacaactctgcgggggtgaacccgcgtcgttacttggctgaactacgtctggaccacccggacgcggcggctgagtacgaggtcggccaagaactgacggcggagatcttcgccgatgccacgtacgtcgacgtgaccgggacctccaagggcaagggcttctccggcactatgaagcggcacggcttccgtgggcagggcgccagtcacggtgcccaggcagtacaccgccgtccgggttcgatcggcggttgcgctactcctgcccgagtatttaagggcacccggatggctggccgcatgggtaacgacagggtgacggtccagaacttgttggtgcacaaggttgataccgagaacggcgtgctgctgatcaagggtgccgtccccggccgcacgggtgggctcgtcatggtccgcagcgcgatcaaacgaggtgagaaatga

SEQ ID NO: 27777 - DNA, 306 bp, Mycobacterium leprae
gtggcgggacagaagatccgcatcaggctcaaggcctacgaccatgaggcgattgacgcctcggctcgcaaaatcgtcgagaccgtcgtacgcaccggtgccaacgtcgtaggtccggtgccactgccgactgagaagaatgtgtactgcgtcatccgctcgccgcacaagtacaaggattcgcgagagcacttcgaaatgcgcacccacaagcggctgatagacatccttgatccaacaccgaagacggttgacgccctcatgcgtatcgatcttccggccagtgtcgatgtcaacatccagtag

SEQ ID NO: 27778 - DNA, 1191 bp, Mycobacterium leprae
gtggcgaaggcgaagttcgagcggacgaagccgcacgtcaacatcgggaccatcggtcacgttgaccacggcaagaccacattgaccgcggctattaccaaggtcctgcatgacaagttccccaacctgaatgagtcgcgcgcctttgaccagattgacaacgcgcccgaggagcgtcagcgcggtatcaccatcaacatttcccacgtggagtatcagaccgagaagcgtcactatgctcacgtcgacgccccggggcacgccgactacattaagaacatgatcaccggtgcggcccagatggatggtgcgattctggtggtcgctgctacagacggcccgatgccgcagactcgcgagcacgtgctgctcgctcgtcaggtgggtgtaccttacatcctggtcgcacttaacaagtccgacgccgtggacgacgaggaactactcgagcttgtcgagatggaagtccgtgagttgctggctgcccaggaattcgacgaggacgccccggttgtgcgtgtctcggcattgaaggcgctcgagggtgacgccaagtgggtcgagtctgtcacacagttgatggacgctgtcgacgagtcgatcccggctccagtccgcgagactgacaagccgttcctgatgcccgttgaggacgtcttcactatcaccggtcgtggcaccgtggtcaccggtcgggtggagcgcggcgtggtcaacgtgaacgaggaagttgagatcgtcggcattcgtcagacgaccaccaagaccaccgtcacgggtgtggaaatgtttcgtaagctgctcgaccaaggtcaggccggtgataacgttggtctgttgttgcgtggcatcaagcgcgaggacgtcgagcgtggtcaggtggtcatcaaacccggcaccaccaccccgcataccgagttcgaaggccaagtatacatcctgtccaaggacgaaggtggtcggcacacaccgttcttcaacaactaccgtccgcagttctacttccgtaccactgatgtgaccggtgtggtgactttgccggagggcaccgagatggtgatgccaggtgacaacaccaacatctcggtgacgttgattcagcccgttgccatggacgagggtttgcgcttcgcgatccgcgaaggtggtcgcactgttggtgccggccgggtcgtcaagatcatcaagtaa

SEQ ID NO: 27779 - DNA, 2106 bp, Mycobacterium leprae
gtggcacaaaaggacgtgctgaccgatctcactaaggtccgcaacatcggcatcatggcgcatattgatgccggcaagacgacgacgacagagcgcatcctctactacaccggtatcagctacaagattggtgaggttcacgacggtgccgcaaccatggactggatggagcaggagcaagaacgcgggatcactatcacctccgctgccactacttgcttttggaatgacaaccagatcaacattattgacacgcctggccacgttgattttactgtggaagttgagcgttcgctccgtgttcttgatggcgccgttgcggttttcgacggcaaggaaggtgtcgagccgcagtccgagcaggtttggcggcaggctgataaatatgaggtcccgcgtatctgcttcgtcaacaagatggacaagatcggcgccgacttctatttttcggttcgcaccatgcaggagcggttgggcgccaacgtcattcccattcagctacctgtcggctctgagggggactttgaaggtgtcgtcgacttggttgagatgaaggccaaggtgtggagtactgaggccaagctcggtgagaagtacgatgtcgttggcataccgacagatttgcaggagaaagccgaggagtaccgtaccaacctgctcgagaccgtcgcggaaaccgacgaggcgttgctggaaaaatacttcagtggcgaagagctcacggtcgccgagattaagggggcgatccgcaagttgactatcagctcggaggcgtacccggtactgtgcggtagcgcgttcaagaacaaaggtgtccagccgatgctcgacgccgtcatcgactacctgccctcgccgttggacgtgccggcggccatcggccacgtaccgggcaaagaggacgaggagatcgtccgtaagccgtcgaccgatgaaccgttatccgcgctggcgttcaaggtggcgacacatcccttcttcggcaagcttacctacgtccgggtgtactctggcaaggttgattccggcagtcaggtcattaacgcgaccaaaggcaagaaggagcgtctgggcaagctgttccagatgcattccaacaaggaaaacccggtggagactgcgtcagccggtcatatctacgcggtgatcggactcaaggacaccaccaccggcgacactctagccgacccgaataaccagatcgtgctcgagtcgatgaccttccccgacccggtgatcgaggtggccatcgagccgaaaactaagagcgaccaggagaagctcagcctgtcgatccagaagctcgctgaagaggacccgaccttcaaggtgcacttggactccgaaaccggtcagactgtgatcggcggaatgggcgagttgcatctggacatcctggtcgatcggatgcgccgcgagtttaaggtcgaggccaatgtcggcaagccgcaggtggcgtacaaagagaccatccgccgagtcgtggagaccgtcgagtacactcacaagaagcagactggtggttcgggtcagttcgccaaggtcatcatcaaactcgagccgtttagcggcgagaacggcgcgacctatgagttcgagaataaagtcactggtggccgcatcccgcgcgaatacatcccttctgtggaagctggtgcgcgagatgccatgcagtacggtgtgctggccggctacccgctggtgaacttaaaggttaccctgcttgatggtgcgtaccacgacgtcgactcgtcggaaatcgcgttcaaaatcgctggttcgcaggtgctgaaaaaggctgctgcgcaagcacagccggtgattctggaaccgatcatggccgtcgaggtcactacgcccgaggactacatgggtgacgtgatcggcgacttgcactcccgccgcggccagattcaggcaatgaaggagcgcgctggcacgcgtgtcgtgagggcgcacgtgccgttgtcggagatgttcggctacgtcggagacctgcggtccaagacgcaaggccgggcgaactactccatggtgttcaactcgtactccgaagtgccggcgaacgtgtcgaaggagatcatcgcgaaggcgacgggcgagtag

SEQ ID NO: 27780 - DNA, 471 bp, Mycobacterium leprae
atgccacgcaaggggcccgcacccaagcgtccgttggtcaacgaccctgtctatgggtcgcagttggtcacccagctggtgaacaaaattctgctgaaagggaagaaatcgctggccgaacgcattgtttatggtgcgctcgagcacgcccgcgacaagaccggcaccgatcccgtcatcactctcaagcgtgctctcgacaacgttaagccggccctcgaggtgcgtagccgtcgcgttggcggtgcgacttatcaagtgcctgtcgaggttcggccagaccgatcgaccacgctggcgttgcgctggctcgtcggcttctcgcggcaacgtcgggagaagaccatgattgagcgtttggcaaacgagatcctggatgctagcaatggtctcggagcctccgtgaagcggcgcgaagacacccataagatggctgaggcaaaccgggcgtttgcgcactatcgttggtag

SEQ ID NO: 27781 - DNA, 375 bp, Mycobacterium leprae
atgcccaccattcagcagctggtacgcaagggtcgtcgagacaagattggcaaggtcaagactgcggctctgaagggcaacccacagcgtcgcggtgtttgcacccgtgtgtacacttccaccccgaagaagccgaactcggcgcttcgcaaggttgcccgcgtgaagctgacgagtcaggttgaggtcacagcgtacataccaggcgagggtcacaacctacaggaacactccatggtgttggtgcgtggtggccgggtgaaagatctgcctggtgtgcgttacaaaatcattcgcggttcgctcgacacccagggtgtcaagaaccggaagcaggctcgtagccgctatggagccaagaaggagaagagctga

SEQ ID NO: 27782 - DNA, 759 bp, Mycobacterium leprae
gtgctcatcggttcgcatgtcagctccaccgatccgctcgccgcagcggaggttgaaggcgctgacgtagtgcagattttcctcggtaacccgcagagctggaaggcgcccacactgcgtagcgatgccgatgttctgaaggctacggctttgccggtgtacgttcatgcgccctacttgatcaacgtcgcgtcggctaacagccgcgtgcggatcccatcacgcaagatcctgcagcaaacttgtgacgcagccgccgacatcggcgctgctgccgtggtcgtgcatggtgggtacgtcgccgatgacaatgacctcgaggatggtttccaacgctggcgtaaagcactcgaccaactgcaaactgacgttccggtctacctcgaaaacacggccggcggcgatcacgcgatggctcgccgctttgataccatcgcccgactctgggatgttattggtgaaaccggtatcggtttttgcctggacacctgtcatgcttgggcggctggcgaggggctgattcatgttgtggatcgcatcaaggccatcactggtcggatcgacctggtgcactgcaatgattccaaggacgaagcgggttctggtcgtgaccgtcacgccaacttgggtagtggtcaaatcgatgccgagttgctggtagcagcagtcaaggtagcgggtgcgccggtgatctgcgaaaccgccgaggaaggtcgcaaagacgacattgcgttcttgcgcgaaaagaccagcggctga

SEQ ID NO: 27783 - DNA, 3951 bp, Mycobacterium leprae
gtgctagacgtcaacttcttcgatgaactccgcattggcctggctaccgcggaggacattcgtcaatggtcttacggcgaggttaagaagccagagaccatcaactatcgtacgctcaaacctgagaaggatggcctgttctgtgagaagatcttcggacctactcgcgactgggagtgctactgcggcaaatacaagcgggtgcgtttcaagggtatcatctgtgagcgttgtggcgtcgaggtgactcgcgccaaggtgcgtcgtgagcggatgggccatatcgagctggccgcacctgtcacgcacatctggtacttcaaaggtgtaccgtcgcgcctgggctatctgctcgacctggccccgaaggaccttgagaagattatctacttcgccgcgtacgtgatcaccacggtcgatgaggagatgcggcacaacgagctgtcgacgctcgaggctgaaatgatggtggagcgcaagtctgttgaggatcagcgcgatgccgacctggaagctcgtgctcagaaattagaggccgacttggctgcgctggaggctgagggtgccaaggcagacgccaggcgtaagttccgggatggcggtgagcgcgagatgcgccagctccgtgagcgtgcgcagcgtgagctggatcgtttagaagatatctggagcacctttaccaagctggctcccaagcagctgatcgttgacgaaaatctctatcgtgaattggtcgaccgttatggcgaatacttcactggcgccatgggtgcggagtctattcagaagttgatgcaggactttgacatcgaggccgaggctgagtcgctgcgtgaagtgattcgaaacggtaaggggcaaaagaagcttcgggcgctaaagcgactgaaggtagtcgctgccttccaacagtcaggcaactcgccaatgggcatggtgctcgacgctgtcccggtcataccgccggaactgcgcccgatggtgcagctcgacggtggccggtttgccacgtccgacttgaacgacctgtaccgccgggtgatcaaccgtaacaaccggctgaaaaggttaatcgatctgggtgcgcccgatatcattgtcaacaacgagaagcggatgctgcaggagtctgtggacgcgctgttcgacaatggacgccggggaagacctgttacggggccgggcaaccgtccactgaagtcgctgtctgatctgctcaagggcaagcaaggccggtttcggcagaacctgcttggtaagcgtgttgattactcgggccgtagcgtcatcgtggtcggcccgcagctcaagttgcaccagtgtggattgcccaagctgatggcgctggagctgttcaagccgttcgtgatgaagcggttggttgatctcaatcacgcgcaaaacatcaagagcgccaagcgaatggtggagcggcagcggcctcaggtgtgggatgtgctcgaagaggtcatcgcggagcatccggtgctgctgaaccgtgcgcccaccctgcaccgactgggtatccaagctttcgagccgatgcttgtggaaggcaaggctattcagctgcatccgttggtgtgtgaggcgttcaacgccgacttcgacggtgatcagatggcggtgcatctgcctctgagtgccgaagcgcaggccgaggcccgcattctgatgctgtcgagtaacaacatcttgtcacccgcctccggccgcccactggctatgccgcgactggacatggtgactggactatattaccttaccaccgcggtcgacggcgacactggcgcctaccggccggcagccgaggatcgtccagagtcgggtgtgtactcttctccggccgaagcgattatggcggccgaccgcggggtgctttcggtgcgggctaagatcaaagtccagttaactcaggtgcgtccgccggccgacatcgaggctagatggttcggcgccaatggttggcgtccaggagatccgtggatagccgataccacgctgggtcgggtgatgttcaacgaactactgccgctgggctatccgtttgttaacaagcagatgcataagaaagtgcaggccgctatcatcaacgacttagccgagcgctacccgatgatagtcgtcgcgcagactgtcgacaagctcaaggacgccggtttctactgggcgacccgcagcggcgttacggtctcgatggctgacgtgttggttccgccgcgtaagaaggagatcctcgaccactacgaggagcgtgccgacaaagtcgaaaagcagttccaacgtggcgctttgaaccacgacgaacgcaatgaggcgctggtggagatctggaaagaagccaccgacgaggtcggtcaggcgctgcgggaccactacccggtcgacaacccgatcatcacaatcgttgattccggtgccacgggtaacttcacccaaacccgggcgctggccggcatgaagggtttggtgaccaaccctaagggtgagttcattccgcgcccggtcaagtcatcgttccgcgagggtctgactgtgttggagtacttcatcaacacccatggtgctcgaaagggcttggctgacaccgcgttgcgtaccgccgactcggggtacctgacccgtcgtctggtggacgtgtcgcaagacgtcatcgtccgcgaacacgactgccagactgagcgcggcattgtcgttgagctggccgtgcgtgtgcccgatggcagcctgatccgcgagctgtacatcgaaacgtcggcatacgcaaggactttgggcgccaacgcggtcgacgaagctggcaacgtgatcgtcgcgcgtggtgaggacctgggtgacccggagatcgatgccttgctggcggcgggcatcacgcaggtcaaggtgcgctcagtgctgacctgtaccaccggcaccggtgtatgcgctacatgctacgggcgttcgatggctaccggcaagctggtcgacatcggtgaggccgtcggtattgtcgcggcccagtccatcggtgagcccggcacgcagctgaccatgcgtaccttccaccaaggcggtgtcggtgaggacatcaccggtggtttgcctcgggttcaggagctgttcgaggcccgggtgccgcgtggcaaggcgccgattgccgacgttactgggcgagtccgtctcgaggacggtgaacgcttctacaagatcactattgttcccgacgacggtggagaagaagtcgtctacgataagctttccaagcgccaacggctgcgggtgttcaagcacgcagacggttccgagcgagtgctttccgacggtgactacgtcgaggtgggtcagcagttgatggaaggttccgctgacccgcacgaggtgctgcgcgtgcaaggccctcgcgaggtgcagatccatctggtgcgcgaggttcaagaggtgtaccgtgcgcagggtgtgtcgatccacgacaagcacatcgaggtgatcgttcgccagatgctgcgccgggtcaccatcatcgactcgggttcgacggaattcctgcccggctcgttgatcgaccgtgcggagttcgagtcggagaatcgtcgggtggtggccgagagtggcgagcccgctgccggccgtccggtgctgatgggtatcaccaaggcgtcgttggccaccgactcgtggttgtctgcggcgtcgttccaggagacgacgcgggtgttgaccgatgcggcgatcaactgccgcagcgataagctcaacggtcttaaggagaacgtgatcatcggaaagttgatcccggccggtaccggtattaaccggtaccgcaacatccaggtgcagcccaccgaggaggcccgcgcctcggcgtacacgattccatcctacgaggatcagtactacagtccggacttcggccaggccaccggtgctgccgttccactggacgactacggctacagcgactaccgttag

SEQ ID NO: 27784 - DNA, 3537 bp, Mycobacterium leprae
gtgctggaaggatgcatcttgccagatttcggccagagcaagacagacgttagtcctagccagagtcgcccccaaagttcgcccaacaactccgtgcccggcgcgcccaaccgaatttcatttgccaagctccgcgaaccgcttgaggttccggggctacttgatgtgcagactgattcatttgagtggttgatcggatcgccgtgctggcgtgcagcggccgcaagccgcggcgatctcaagccggtgggtggtctcgaagaggtgctctacgagctgtcgccgatcgaggatttctccggctcaatgtcattgtctttctccgatccccgttttgacgaagtcaaggcgcccgtcgaagagtgcaaagacaaggacatgacgtacgcggccccgctgttcgtcacggccgagttcatcaacaacaacaccggggagatcaagagccagacggtgtttatgggcgacttccctatgatgactgagaagggaaccttcatcatcaacgggaccgagcgtgtcgtcgttagccagctggtgcgctcccctggagtatacttcgacgagacgatcgacaagtccacagaaaagacgctgcatagtgtcaaggtgattcccagccgcggtgcctggttggaattcgatgtcgataaacgcgacaccgtcggtgtccgcattgaccggaagcgccggcaacccgtcacggtgcttctcaaagcgctaggttggaccagtgagcagatcaccgagcgtttcggtttctccgagatcatgcgctcgacgctggagaaggacaacacagttggcaccgacgaggcgctgctagacatctatcgtaagttgcgcccaggtgagccgccgactaaggagtccgcgcagacgctgttggagaacctgttcttcaaggagaaacgctacgacctggccagggttggtcgttacaaggtcaacaagaagctcgggttgcacgccggtgagttgatcacgtcgtccacgctgaccgaagaggatgtcgtcgccaccatagagtacctggttcgtctgcatgagggtcagtcgacaatgactgtcccaggtggggtagaagtgccagtggaaactgacgatatcgaccacttcggcaaccgccggctgcgcacggtcggcgaattgatccagaaccagatccgggtcggtatgtcgcggatggagcgggtggtccgggagcggatgaccacccaggacgtcgaggcgatcacgccgcagacgctgatcaatatccgtccggtggtcgccgctatcaaggaattcttcggcaccagccagctgtcgcagttcatggatcagaacaaccctctgtcgggcctgacccacaagcgccggctgtcggcgctgggcccgggtggtttgtcgcgtgagcgtgccgggctagaggtccgtgacgtgcacccttcgcactacggccggatgtgcccgatcgagactccggagggcccgaacataggtctgatcggttcattgtcggtgtacgcgcgggtcaaccccttcgggttcatcgaaacaccgtaccgcaaagtggttgacggtgtggtcagcgacgagatcgaatacttgaccgctgacgaggaagaccgccatgtcgtggcgcaggccaactcgccgatcgacgaggccggccgcttcctcgagccgcgcgtgttggtgcgccgcaaggcgggcgaggtggagtacgtggcctcgtccgaggtggattacatggatgtctcgccacgccagatggtgtcggtggccacagcgatgattccgttccttgagcacgacgacgccaaccgtgccctgatgggcgctaacatgcagcgccaagcggttccgttggtgcgcagcgaagcaccgttggtgggtaccggtatggagttgcgcgcggccatcgacgctggccacgtcgtcgttgcggagaagtccggggtgatcgaggaggtttccgccgactacatcaccgtgatggccgatgacggcacccggcggacttatcggatgcgtaagttcgcgcgctccaaccacggcacctgcgccaaccagtccccgatcgtggatgcgggggatcgggtcgaggccggccaagtgattgctgacggtccgtgcactgagaacggcgagatggcgttgggcaagaacttgctggtggcgatcatgccgtgggagggtcacaactacgaggatgcgatcatcctgtctaaccgactggtcgaagaggacgtgcttacttcgattcacattgaggagcatgagatcgacgcccgtgacaccaagctgggtgctgaggagatcacccgggacattcccaacgtctccgatgaggtgctagccgacttggacgagcggggcatcgtgcggattggcgcggaggttcgtgacggtgatatcctggttggcaaggtcaccccgaagggggaaactgagctgacaccggaagagcggttgctgcgggcgatcttcggcgaaaaggcccgcgaggtccgtgacacgtcgctgaaggtgccacacggcgaatccggcaaggtgatcggcattcgggtgttctcccatgaggatgacgacgagctgcccgccggcgtcaacgagctggtccgtgtctacgtagcccagaagcgcaagatctctgacggtgacaagctggctgggcggcacggcaacaagggcgtgatcggcaagatcctgcctgccgaggatatgccgtttctgccagacggcaccccggtggacatcatcctcaacactcacggggtgccgcggcggatgaacgtcggtcagatcttggaaacccaccttgggtgggtagccaagtccggctggaagatcgacgtggccggcggtataccggattgggcggtcaacttgcctgaggagttgttgcacgctgcgcccaaccagatcgtgtcgaccccggtgttcgacggcgccaaggaagaggaactacagggcctgttgtcctccacgttgcccaaccgcgacggcgatgtgatggtgggcggcgacggcaaggcggtgctcttcgatgggcgcagcggtgagccgttcccttatccggtgacggttggctacatgtacatcatgaagctgcaccacttggtggacgacaagatccacgcccgctccaccggcccgtactcgatgattacccagcagccgttgggtggtaaggcacagttcggtggccagcgattcggtgagatggagtgctgggccatgcaggcctacggtgcggcctacacgctgcaggagctgttgaccatcaagtccgacgacaccgtcggtcgggtcaaggtttacgaggctatcgttaagggtgagaacatccccgagccgggcatccccgagtcgttcaaggtgctgctcaaggagttacagtcgctgtgtctcaacgtcgaggtgctgtcgtccgacggtgcggcgatcgagttgcgcgaaggtgaggatgaggacctcgagcgggctgcggccaacctcggtatcaacttgtcccgcaacgaatcggcgtccatagaagatctggcttag

SEQ ID NO: 27785 - DNA, 393 bp, Mycobacterium leprae
atgtcaaagctctctagtgacgaactgctggacgtgttcaaggaaatgaccttgttggaactttcggacttcgtcaaaaagttcgaggagaccttcgaggtcaccgcggccgctccggtctctgttgccgttgctggtgcacccgcggccggcgaggccggcgaagctgccgaggaacagtccgagttcgacgtcattctcgaaagcgccggcgacaagaagatcggcgtcataaaggttgttcgcgagatcgtctctggccttggcctcaaggaggccaaggacctggtcgacggcgtgcccaagctgctgctggagaaggtcgccaaggaggccgccgacgacgccaaggccaaactcgaggccaccggcgccactgtcagtgtcaagtaa

SEQ ID NO: 27786 - DNA, 534 bp, Mycobacterium leprae
atggctagggctgacaaggccaccgccgttgcaaacatcgccgagcagtttaaggctgcgacggcagcgttgattaccgaatatcgcggcttgacggtggctaacttggccgagctgcgccggtcgctcacgggttcggccagctatgcggtggccaagaacacgctcattaagcgggcggcctccgaagtcggcatcgaggggctcgacgagttattcgccggcccgacggcgatcgcgttcgtcaccggtgagccggtcgatgccgccaaggccatcaagacgttcgccaaggaacacaaggcgctggtgattaagggaggctacatggatggccatccgatgactgtcgccgaagtcgagcgcatcgccgacctggagtcccgtgaggtgttgctagccaaactggccggcgccatgaagggcaccttcgccaaggcgatcggactattcaatgcgccgacctcgcagatggcaaggctcaccgccgcattgcaggaaaagaaagctttcgaaccggcctcagccgaatag

SEQ ID NO: 27787 - DNA, 708 bp, Mycobacterium leprae
atgagcaaaagcagcaaggcttatcgcgctgccgccgtgaaggtggaccgcaccaacctttacactccacttcaggcggccaagctcgccaaagagacgtcgtcgaccaggcaggatgcgaccgtcgaggtggcgatacggctgggtgtcgactcgcgtaaagcagaccaaatggtccgtggcacggttaacctgccacacggtaccggtaagaccgctcgggtcgcagtgttcgccgtcggcgaaaaagcggatgttgccgtagccgcgggagctgatgtggttggtagcgacgatctgatcgagaagattcagggcggctggctggagttcgacgccgcggtcgcgacacccgatcagatggccaaggttggtcgtatcgctcgggtgttgggtccacgtggcttgatgccgaaccccaagaccggcaccgtcacccccgatgtcgccaaggccgttgctgacatcaagggcggcaagatcaacttccgggtggacaaacaggctaatttgcactttgtgatcggcaaggcatcgttcgatgagaagcggctggcggagaactacggcgccgcgcttgaggaggtgcttcggctcaagccgtcgtcgtcgaagggccgttacctgaagaaggtcaccgtgtcgacgactatgggccctggcattccggtcgacccgtcgataacccggaatttcaccgaggagtag

SEQ ID NO: 27788 - DNA, 429 bp, Mycobacterium leprae
atggccacgaaaaagaaagtcgccgggctgatcaagcttcagattcaggcggggcaggccaaccctgctccgccggtcgggcccgcgctcggccagcacggcgtcaacatcatggagttctgcaaggcgtacaatgctgccactgagaaccagcgtggccaggtcataccggtggagatcacggtctacgaggaccgcagcttcacttttgcgctcaagacgccgcctgccgccaagttgctcctcgatgctgccggggtgggcaagggggtggccgagccgcacaagactaaggtcgttaaggtcagctgggatcaagttcgggagattgctgaaaccaagaaggctgacctcaacgccaacgacatcgacgcagccgccaagatcatcgccggtaccgccaggtcgatgggcatcaccgtcgagtaa

SEQ ID NO: 27789 - DNA, 687 bp, Mycobacterium leprae
gtgcaagaggccggtatcgacgagttcgccgcgggtggcggtcacgtggagccggctgcagaggtcgacccggccgccgcgctcaaggcagagctgcgtagcaagccgggcgactggtatgtcatccactcctacgcggggtatgagaacaaggtgaaagccaacctcgaaacccgtgtgcagaacctagacgtcggcgactgcatcttccaggtggaggtgcccaccgaggaggtcaccgagatcaagaatggccagcgcaggctggttaaccgcaaggtgctacctggctacatcctggtgcggatggatttgaccgacgattcgtgggcggcggtgcgcaacactccgggggtcaccggattcgtcggtgcaacgtcgcgtccgtcggcgcttgcgcttgacgacgtggtgaagttcttgttgccgtcggggtcggcaaagaaggacgccaagggtgcagtcagtaccgccgctgccgccgaggcgggtgggttggaacgttcgattatcgaggtcgattacgaggtgggcgaatcggtaacggtcatggacggaccgtttgcgacgttgccagctacgattagcgaagtcaacgccgagcagcaaaagctcaaggtgctggtttcgatcttcggtcgcgaaaccccggtggagctgaccttcagccaagtctcgaagatttaa

SEQ ID NO: 27790 - DNA, 441 bp, Mycobacterium leprae
gtgagcgacgagaggtacgctgccagcgacggcgggggaaccgaagtcggtagtgggacccgcggccggacgaccgtggtcacgaaaccggcaactcgaccgcaacgccctaccggcaagcggtctcggcagcgagcagcgaatgcctcgaatactggggccaacgtcgaggtcgaagagtcgtcgactcaggctgcgattgccaaggaaggcaaggtcaaaaagccgaagaaatcggcggatcgctcggctaacccgatcgtattcatttacaattacctcaagcaggtcgttggagagatgcggaaggttatctggcctaaccgcaaacaaatgctcacttacacctcagtcgtgttggcgtttcttgcctttatggtggcactggttggccttgctgattttggcctggccaagctggtgttgttggtgttcggctga

SEQ ID NO: 27791 - DNA, 168 bp, Mycobacterium leprae
atggcttccagtaccgatgtgcggccgaaaataacaatggcatgcgaggtgtgcaagcaccgtaactatatcaccaagaagaaccggcgtaacgaccccgaccggatggagctgaagaagttctgccgaaattgtggtaagcaccagtcccatcgtgagacacggtag

SEQ ID NO: 27792 - DNA, 318 bp, Mycobacterium leprae
atgccagtggtgaagatcaatgcaatcgaggtatccaccgatgttggcctcgaactggaaaggcggttcgcccaccgcgcgcatgcggtcgagaactctcccggctttctcggctttcagctgctccgcccaatcaaaggcgaaaaccgctacttcgtggtgacacactgggagtccgatgaagcattccaggcgtgggcgaacggtcccgctatcgaagcccatgctggtcacagcgccaacccggtggcggctggttcgtcgctgctggaattcgaggttgtactggacgttgccacaaccagccagacgaactaa

SEQ ID NO: 27793 - DNA, 1071 bp, Mycobacterium leprae
gtgagcctgagtttgggaatcgtgggtctacccaacgtcggcaagtcgacattgttcaacgcgttgaccaggagcaatgtggtggttgccaactatccgtttgcaacgatcgaaccgaatgagggcgtcgtctccctgcctgatccgcggctggccaaactagccgagttgttcggatcggagcgtatcctgccggcccaggtgaccttcgttgacattgccggcctggtaaagggtgcgtccgagggggccgggcttggtaacaagtttctggcccatatccgcgaatgcgacgcaatctgccaagtggttcgggtgttctccggcgacgacatcacacatgtcacaggacgcgtggatccccagtctgatatcgggattatcgatactgaattgatcctggctgacctggacacccttgagcgggctctgccgcggctggagaaagaagctcgcaaccacaaggaacgcaaacccatctacgccgcggcaatcaacgcacaacaggtgttaaacgtcgggacgacgttattcgccgccggtgtagacggatctgcgctgcgggagctgaatctgctgaccaacaaaccgttcctctacgttttcaatgctgacgaggcagtgctgaccgctgccgcatgggtagctgagctgcgccagctcgtcgcgcccgcggatgcggtgttcttggacgccgccatcgaggccgagctggctgaattggatgacgagtcggccgctgagctactcgagtcaatcgggcagaccgagcgggggctcgatgccctggctcgcgccggtttccgcacgctggcgctgcagacttttctgacggtgggaccaaaggaggtgcgggcatggaccatccatcagggcgataccgcgtcgaaggcagccggggtgattcacaccgacttcgagaagcgtttcattaaagccgagatcgtgtcgtatgacgacctgatcgctaccgggtcaatgtcggcagcaaaggcggcaggtaaggtccgaacggaaggcaaggactacgtgatggccgacggcgatgtggtggagttccggcacggataa

SEQ ID NO: 27794 - DNA, 1287 bp, Mycobacterium leprae
  misc_feature (625)..(625): n=g, a, t or c
gtgacggaagcggtgccgactgactcagtcgactcgaaagccagttcacaggtaaattcggccgagaacccgttcccagttcgcgcggtggcgctccggatcgcgggatggatcgacaagctgggcactgtttgggtagagggacaattggcgcaaatcaccatgcggcccaacgctaagaccgtgttcatggtcttacgtgacccggctgccgacatatcgctgattgtgacttgctcgcgcgactttgtgctacgcgcgccggtgaaactagccgaaggcattcaggtagtggtatgcggcaaaccctcattctacatcgggcgcggaacattttctttgcgcctcagcgatattcgcgcagtcggcatcggagagctgctagtacgcatcgatcggctacgccgactgttggactctgaggggctctttgacccacggcttaaacggccgatacccttcctgcccaacatgatcgggatcatcactggccgggccagcgctgccgaacgcgatgtaacaaccgtggctagcgcgcgctggcctgcggcgcgtttcgctatccgcaacaccgctgtccaggggcccaacgcggtgagccagattgtcgaggcgttgcgggaacttgatcgcaacgttgatgtcgaggtgatcgtggttgcccgaggtggtggcagcgtcgaggacctgctgacgttttccgatgaaacgctgtgccgcgcgatcgcagcgtgccgcacgccggtgatcagcgcagtcggtcacgaacccgacaacccgctatgcgatctggtcgccgatctgcgcgccgccacgcccaccgacgccgccaagaaagtggtcccggatgccgctgtcgagcagcgactgatcgaggacttgcagcggcgcagcgcgcaggcactccgcaattgggtatcccgcgagcagcggacgctagtccaactacgcagtcgcccagtgctggctgaaccgctgcggacgctgacgacgcgctccgaagaaattcaccgcgcccagtcggcgattcgccgcgagatcattcggctggtcaccaccgagaccgagcgggtcggtcatctggccacgcagctagccacattgggcccggcagccacgttggcgcgcggctatgccatagtgcaagccttggaagacgggacgcaaaccgttactgcggcagtgctgcggtcagtcgatgatgcacccacaggcaccagactgcgggtgcgggtctctgacggcgccatagtggcagttagtgaaggacgggccgatggtccctga

SEQ ID NO: 27795 - DNA, 987 bp, Mycobacterium leprae
atggaacttgtccgggttaccgaagccggtgccatggccgccggccggtgggtgggccgcggcaacaaggagggcggtgacggcgcggccgtcgatacgatacgggaactggtgaacacagtctcgatgcgcggtgtcgttgtcatcggcgaaggcgagaaagaccatgcgccgatgctgtacaacggcgaggaagtcggcaacggtgacggcccagactgcgactttgcagtcgatccgattgacggcaccacgctgatgagcaaaggcatgcccaacgccatctcggtgctggcggtcgccgatcggggcgcgatgttcgacccttcggcagtgttttacatgaacaagatcaccgttggtcctgacgccgcgcacgtcctagacatcaccgcgccgatcggcgagaacatccgggcggtcgccaaggtcaaagacttatcagtgcgggacatgaccgtgtgcatactggatcggccacgacacgcccagttgatcgacgacgtccgcgccaccggcgccaggatccggctaatcaccgacggcgacgtcgccggcgcaatctccgcgtgccgcccccaatcgggcaccgacatgttggctggtatcggcggcaccccggaaggcatcatcgcagccgcggcgatccggtgcatgggcggggcgatccaagctcaactagcgccacgcgatgacgtcgaacgccgcaaggctctcgacgccggctacaacctagaccggattttgactaccgaagatctggtttccggagaaaacgtcttcttctgcgccactggggtcaccgacggcgatctgctcaagggggtgcgctactacgctggcggctgcaccacccagtcaatcgtgatgcgttcgaagtcgggcaccgttcggatgatcgaggcctaccaccggctctctaaactcaacgaatactccgccatcgacttcaccggcgataacaacgccgcctaccccctgccgtaa

SEQ ID NO: 27796 - DNA, 1281 bp, Mycobacterium leprae
atggtcgcgccgctggctgaagtcgacccggatatcgccgagctactgggcaaagagctaggccggcaacgggacaccttggagatgatcgcttcagagaactttgtgccgcgctcggttctacaggcccaaggcagcgtgctgaccaacaagtacgctgaggggttgcccggccgacgctattacgacggctgcgagcacgtcgacgtcgtggagaacatcgcccgcgaccgggccaaggcgctgttcggtgccgacttcgccaacgtgcagccgcactcgggggcccaggccaacgccgcggtactgcacgcgctgatgtctccgggggagcggctgctgggtctggatctcgccaatggcggtcatctgacgcatggcatgcggctgaacttctccggcaagctgtatgaaaccggcttttatggcgtcgacgcgacaacgcatctcatcgatatggacgcggtgcgggccaaggcgctcgaattccgcccgaaggtgctgatcgctggctggtcggcctatccgcggattctggacttcgctgcttttcggtcgatcgcagacgaagtcggcgccaagctgtgggtcgacatggcgcatttcgcgggcctggttgcggtggggttgcacccgtctccagtgccgcatgcagatgtggtgtccacgaccgttcacaagactcttggcgggggccgttccggtttgatcctgggcaagcaggagttcgccacggccatcaactcagcggtgtttcctggccagcagggtggaccgcttatgcatgtcatcgcgggcaaggcggtcgcgctgaagattgctaccacgcctgagttcaccgaccggcagcagcgcacgctggccggcgcccggattctcgccgatcggcttaccgccgctgatgtcaccaaggccggggtgtcggtggtcagtggtggcactgacgtccacctagtgctggtcgacctgcgcaactccccgttcgacggccaggcagcagaagatctgctgcacgaggtcggcatcactgtcaaccgcaacgtggttcccaatgacccccggccgccgatggtgacctcaggcctgcggataggaacccccgcgctggcaacccgagggttcggtgaagcggagttcaccgaggtcgcggacatcatcgcgacggtgctgaccactggtggcagtgtcgatgtggccgcgctgcggcagcaggttacccgacttgccagggacttcccgctctacgggggacttgaggactggagcttggccggtcgctag

SEQ ID NO: 27797 - DNA, 513 bp, Mycobacterium leprae
atgcccaagcccaccaagggccctcgcctcggtggctcgtcttcgcaccaaaaggcccttctgaccaacctggccgcgtcgctgttcgagcacggccggatcaagacgaccgagccaaaggctcgtgcgctgcggccgtatgcggagaagctaataacgcacgcgaaaaagggcacactgcacaaccgtcgagaggtcctgaaaaagctccccgacaaggatgtggtgcacgccctgttcgcggagatcgggccattcttctccgatcgcgatggcggatacacccgtattataaaggtcgaggcgcgtaagggtgacaacgctccgatggctgtgatcgaactagtgcgggagaagacggtaacgtccgaggccgaccgagcccgccgagttgccgccgcttcggccaaagcagcgcaggcccaagagaagccggctcaagaggaggaggtcgaagccacgtcggacgaggtggcctacaccagcgagcctgacaaggccgccgaacattag

SEQ ID NO: 27798 - DNA, 1044 bp, Mycobacterium leprae
atgctgatttcacaacgccccaccttgtccgaggacatccttaccgacaaccggtcccagttcgtcatcgaaccgttggagccgggattcggttataccctgggcaactcgctgcggcgcacgctgctgtcgtcgattcccggagcggccgttaccagcattcgtatcgacggcgtcttgcacgagttcaccacggtgcctggggttaaggaggatgtcactgagatcatcctgaacctcaagggtctggtggtgtcctcggaggaggacgaaccggtcacgatgtacctgcgcaagcagggtcctggtgaggtcactgccggtgatatcgtgccgccggccggcgtcaccctgcacaatcctggtatgcgcatcgcgacgctaaacgacaaaggtaagatcgaagcggagctcgttgtcgagcgtggccgcggttacgtgccggcggtgcaaaatcgggctttgggtgccgaaatcggacgcatcccagtcgattccatctactcaccggtgctgaaggtaacatacaaggtggatgccactcgggtggagcagcggaccgacttcgacaagctgatcctcgacgtggagaccaagagttcgatcacccctcgcgacgcactagcgtcagcgggtaagacgctggtcgagttgttcggtctggcacgcgagctcaatgtcgaggccgaaggaattgagatcgggccgtctccggccgaggccgaccacatcgcgtcgttcgcgctgccgatcgacgacctggatctaaccgtgcggtcctacaactgcctcaagcgcgagggtgtgcacaccgttggcgagctggtgtcgcgtaccgagtccgacctgctcgacatccgcaactttgggcagaagtccatcgacgaggtgaaggtcaaactgcaccaactgggtctgtcgctcaaggacagcccggacagtttcgacccgtccgaggtcgccggatacgacgtcaccaccggcacgtggtccaccgacggcgcctacgacagccaggactacgccgaaaccgaacagctctaa

SEQ ID NO: 27799 - DNA, 606 bp, Mycobacterium leprae
atggctcgttacactggacccatcacccgcaaatcgcgccggctgcgtatcgacctcgtcggcggcgatcaggcgttcgagaagcgtccttacccgcccggccagcacggccgcgcgcggatcaaggaaagtgaatatctgctgcagctgcaggagaagcagaaggcccgcttcacctacggcgtaatggaaaagcagttccgccgttactacgaagaggctgtgcggcaacctggtaagacgggtgaggaattgctgaagatcctggaaagtcggctcgataacgtgatctaccgtgccggactggcgcgcacccgccggatggcccgtcagcttgtcagccacgggcacttcagcgtcaacggcgtgcatgtcaatgtccccagctaccgggtgtcgcagtacgacattatcgatattcgggacaagtcgctagatacggtgccgttccaaatcgcgcgggagacagtgggtgaccgaccgatcccgagctggttgcaggtcgttggtgagcatcaacgcatcctgatccaccaattgcccgagcgtgtgcagattgaagtgccgctcatcgagcagctgatcgtcgagtactactcgaagtag

SEQ ID NO: 27800 - DNA, 417 bp, Mycobacterium leprae
atgccgccgaagaaggcaaacgcagcgggtcccaagaagggacagaagacccgtaagcgggaaaagaagaatatcccatacggtgctgcgcatattaagagcaccttcaacaatacgatcgtgaccattactgaccagcagggtaacgtcattgcctgggcgtcatcgggccacgttggcttcaaaggatcgcggaaatcgactccgttcgccgcgcagttggctgctgagaacgccgcacgcaaggctcaggagcacggggtgcgcaaggtcgacgtattcgtgatgggcccgggctcgggccgggagactgcgatccggtcgctgcaggctgctggcctagaggtcggcgcgatctctgacgtcaccccccagccgcacaatggctgccgtccacccaagcgcagaagagtctag

SEQ ID NO: 27801 - DNA, 375 bp, Mycobacterium leprae
atggctcgactagtcggcgtcgacctgccgcgcgacaagcggatggaggtcgccctgacctacatctatggtattggacgcacccgtgccaacgaaattttagaggccaccggcattgaacgggacctacggaccagggatctcaccgatgaccagctgacccacctgcgcgactacatcgaagctaatctcaaggtggaaggtgacttgcgtcgcgaggtgcaggccgatatccgccgcaagatggagatcggctgttaccaaggtttgcgacaccgccgcggcctgccggtgcgtggccagcggaccaaaaccaacgcgcggacccgcaaaggccccaagcgcaccattgcaggcaagaagaaggccaggtaa

SEQ ID NO: 27802 - DNA, 114 bp, Mycobacterium leprae
gtgaaggtgaacccgagtgtaaagcccatgtgcgacaagtgcagggttatccgtcggcataggcgggtcatggtgatttgcgtggatccgcggcacaagcagcgacaagggtag

SEQ ID NO: 27803 - DNA, 222 bp, Mycobacterium leprae
atggccaaaaaggatggtgctatcgaggtcgaaggtcgtgtggtcgaacctctgcccaatgcgatgtttcgcattgagctggagaacggtcacaaggtcctcgcccacatcagcggtaaaatgcggcagcattacatccgcatactgcctgaggaccgggtggtggtggagttgtcaccctatgatttgtcccggggacgcattgtgtaccgatacaagtaa

SEQ ID NO: 27804 - DNA, 2397 bp, Mycobacterium leprae
ttggcaggcataccggccacggtcgtccagcgatgtaactcaactaacctggacgatagactacactactctccgttaggggaccgggctaaggaggagcgcaatcccatggccatcatggacacgaacaccgaggtccacacactgtttacgcaggaagtcgccgcaacgcagcaatactttgacgacccacggtttgccgggattattcgcctttatacagcccgccaggtcgtagaacaacgcggcaccatccccaccgattacaccgtggcacgagacgccgcgacagctttctacgctcgcttgcgcgagctattcgcggccggcaagagcgttacgacgttcggcccctattcgccagggcaagcagtcagccttaagcggatgggcatcgaggcgatctatctaggcggctgggcaacctcagctaagggttccatcaccgaagatcccggtcctgatctcgccagctaccccctgagccaggtgccagatgatgccgcggtactggtgcgcgccctgctggctgctgaccgcaatcagcagtacctgcggttacacatgactgaacagcagcgtgccgccactccggcgtatgactaccgcccattcatcatcgccgacgccgacacgggacatggcggtgactcgcacgtacgcaacctgatccgccgatttgttgagatcggcgttccaggataccacatcgaggaccagcgcccgggtaccaagaagtgtggccatcagggcgggaaggttctagtgccttcggacgaacaaatcaagcgcctcaacgccgcccgcttccagctcgacattatgcgggtgcccggcatcatcgtcgcgcgtacagatgccgaggcggccaacttgatcgacagtcgcgccgatgagcgagaccagccgttcttgctgggcgccaccaatctgaagattccttcttacaaggcttgtttcctggcgttggtgcggtgtttctacgagctgggagttaaggaactccatggccatctcctctacgcgttaggcgatggcgaatatgctgctgcgagcgcgtggcttgatcgccaagggattctggcccaggtctccggtaccgtcaatgcttggcaggaaaacggaaagcaatcgatcgacgatctcttcgaacaagttgaatatcggttattggccgcttgggagaaggacgccgggctgatgacctacggcgaagccgtggaagaaatgctccaattcggcgagagcgaaggcgagctgatcggcatgagccccgaggagtggcggcgatttgttgggcgggcgtctctgtacgctgcacgcgaaaaggccaaggaattgggtgtcgaccccggttgggattgcgagctggcgaagactccagaaggctactaccaaatccgcggcggtattcagtatgcgatagccaagtcgttagcggcagcgccgttcgccgacatcctttggatggagaccaagaccgctgatttggccgacgcccggcagttcgccgaggcgatccacgccgagttcccagagcaaatgctggcttacaatctctcgccgtcgttcaactgggataccaccggtatgagtgatgaggagatgaagcgctttcccgaagagcttgggaaaatgggcttcgtcttcaacttcattacctatggcggacatcagatcgacggcgtcgctgccgaggagttcgccaccgcgctgcggcaggacggcatgctggcgttggctcggttgcaacgcaagatgcgcctggtcgaatcgccctaccgcacaccgcagaccctggtcggcggcccgcgtagcgatgcagcgctggctgcgtcctccggacgtacggcgacaaccaaggccatgggcaaaggttcgacccagcaccagcatcttgtgcagaccgaggtgccgaagaagctgctagaggaatggctggcattgtggagtgagcactaccagcttggcgagaaactccgcgtgcaactgcggccacgccgcgccggctcggatgtgctcgaactcgggatctacggcaacggtgacgagcagctggccaacgtcatcgttgatccgatcaaggatcgccgcggccgcagcatccttcaagtgcgcgaccagaacaccttcgccgaaaagcttcgccagaagcgactgatgaccttgatccatttctggctggtgcaccgcttcaaggctgacacggtgatttacgtcactccaaccgaggataatctctatcagacttccaagatgaaatctcacggcatcttcagcgaggtttatcaggaggtgggcgagatcatcgtcgctgaggtgaaccacccgcggcttgttgagctgcttacccccgatcgcgtcgcgctgcggcggttgatcaccaaggaggggtaa

SEQ ID NO: 27805 - DNA, 2301 bp, Mycobacterium leprae
ttgcgtgcgccaaacgggtggaataacttgcccaacaagctgtcggacttttcgacgttagttaattccgccacccgagtggcggcgattaacctcagcgaggtcacccagaccgctgaggtatgtgaggcggtccgtcgagcagcactgtgcacagatggcggtgaggccttgcaacgcaggcaagccgacgccgataacgcacgatatctactgattcggttagcggtcgctgccgcactcttcgtgcccctagcccacctgtcggtgatgttcgctgtgctgcccagcacccacttccccggctgggaatggatgctgaccgcgctggccattccggtcgtgacttgggcggcgtggccatttcatcgagtagcgatacacaacgcacgctatcacggtgcttccatggagacactcatctcgaccgggatcaccgccgccacgatatggtcgctctacaccgtgttcggccatcaccagtccacagagcaccgcggcgtttggcgggcactgctgggcagcgacgccatctacttcgaagtcgccgcaggcatcacggtattcgtgctggcaggtaagtattatacggctcgtgccaagtcacacgcgagcattgcgctgctggccctggcagcgctgagcgccaaggacgccgctgttctgcagcctgacggttcagaaatggtcattccggccaacgaactcaatgagcagcagcgtttcgtggtgcgccccgggcaaacgatcgccgcagacgggctagtcatcgacgggtcggccaccgtcagcatgagcccgatcaccggagaagccaagccagtccgggtgaacccaggcgcacaagtcatcggtggcaccgtggtgcttaatgggaggctgattgtggaggccgccgcagtaggtgacgagacacagctcgccggcatggtccgtctggtcgagcaggcacaacaacagaatgccaacgcccagcggctggctgaccgcatcgcttcagtttttgtaccctgcgtgttcgctgtcgcggccttgaccgctgttggatggctgatcgccgggagcggacccgaccgagtgttctcggccgcaattgccgttctcgtcatcgcttgcccgtgcgcactgggactggcgacccctaccgccatgatggtggcctccggccgcggcgcccaactgggaatattactcaagggccatgagtcgttcgaggccacccgcgctgtggacactgtcgtgttcgacaagaccggtacgctgacaacgggccaattgaaggtcagcgctgtgacagctgcaccgggctggcaggctaacgaagtcctccaaatggcggcgacagttgaatcggcgtccgagcacgccgtcgcgctcgcgatcgccgcgtcaacgactcatcgagaaccagtcgccaacttccgtgcagtacccggccacggagtcagcggcaccgtggccgagcgggcagtgcgggttggcaaaccatcatggatcgcttcgcggtgcaactcgaccacgctagtcacggcccgacgtaacgccgaattgcgcggcgaaacagcggtttttgtcgaaatcgacggtgaacaatgcggtgtcatcgcggtcgccgacgccgtgaaagcttcggcggcagacgctgtcgccgcactccacgatcgtggttttcggaccgcgttgttgaccggcgacaatccagcatcagcggccgctgtggcttcccgtataggtatcgacgaggtgatcgccgacatcctacccgaagacaaggtcgacgttattgagcagctgcgcgaccgcgggcacgtggttgccatggtcggtgacggcatcaacgacgggcctgcactcgcacgcgccgatctcggtatggccatcggccgtgggaccgacgtcgcgattggtgccgccgacatcatcttggtccgcgacaatctcgacgtcgtacccataacactcgacctggccgctgcaacgatgcgcactatcaaattcaacatggtatgggcattcggctacaacatagccgccataccaattgccgccgctggattgctcaacccactagtagccggtgcggccatggcgttctcatcgttttttgtcgtctcaaacagcctgcgattgcggaacttcggggccatactgagctgcggcactagtcggcatcggacagtcaaacgatggcgttgtccaccgcccactcggctccgttcaactgcgtgtagtcctgtggacgcttccccattgcgacccgtcgcacacaggacgggggttaaaccgccgacccatcggtag

SEQ ID NO: 27806 - DNA, 2253 bp, Mycobacterium leprae
gtgacagcttcgcttgtggaggacactaataataatcatgagtccgtgcgacgtattcagctggatgttgcaggcatgctgtgcgcggcatgtgcgagccgggttgaaacgaagctgaacaagattcccggtgtccgcgcatcagtcaacttcgctacccgagttgcgaccatcgatgccgtcgacgtggcggttgatgagctgcgtcaggtgattgaacaggctggatatcgtgctactgcgcacgcggagtctgccgtcgaagaaattgatcctgacgccgactatgcccgcaacctgctgcggcggctcattgtcgctgcgctgctgttcgtgccgttggccgatttgtcgaccatgtttgcgattgtgccgacgaacagattccccggctggggatacctgcttaccgcgttagcagccccgatcgtgacatgggctgcgtggcctttccaccgtgttgcgttgcgcaacgcgcgttatcgggcagcatccatggaaacgttgatttcggctggtatcctagcggccaccggttggtctttgtcgacgatcttcgtcgacaaagagccacggcagactcatggaatttggcaggctatcctgcacagcgactcgatctactttgaggttgctgcgggagtcaccgtctttgttcttgcgggtcggttctttgaggctcgcgccaagtccaaggctggtagtgcattacgagcgctcgctgctcggggtgccaaaaatgtggaggtcttgttgcccaatggagcagaacttactataccggctggagagctcaaaaagcaacagcactttctggtaaggcccggtgagaccattactgccgacggtgtggtcatcgatggcactgcgacgatcgatatgagcgctatcactggcgaggccagaccagtacacgcgtcgccggcaagcaccgtggtgggcggcaccacagtgcttgacggccgcttagtgatcgaggctaccgcagtcggtggcgatactcaatttgcggcgatggtccgtctcgtcgaggacgcacaggtacagaaggcccgtgtgcagcacctcgccgatcgcatcgcggccgtgttcgtgccgatggtctttgtcatcgcaggattggcgggtgcctcttggctgttggctggagccagcccagatcgcgctttctctgtggtgctcggggtcttggtgattgcatgtccatgtacgctcgggcttgctacccccaccgctatgatggttgcctccggcagaggcgctcaattggggattttcatcaagggttaccgagcgctggaaactatcaacgcgattgacaccgtggtcttcgacaagaccggcacgttgacacttgggcagctgagcgttagcacggtaacgtcaaccggcgggtggtgttctggggaagttctggcgctcgcctccgcagtcgaagcggcctctgaacattcggtggcaacggctattgtggccgcttatgcagatccacgtccggttgccgacttcgtcgcgtttgccggatgcggtgtatcgggagttgttgctgagcaccatgtcaaaattggcaagccgtcctgggtaacccggaatgcgccatgcgacgtcgttctcgaatccgcacggagagaaggcgaatcacggggagagacagtagttttcgtatcggtagatggtgttgcatgtggagctgtcgcgatcgccgacaccgtcaaggattcagcagccgacgccatctcagcactgtgcagccgcgggttgcacacaattttgctcaccggtgataatcaggccgccgcgcgtgcggttgcagcacaggtaggaatcgacaccgttatcgccgatatgctgcccgaagctaaggtcgacgttattcaacgactgcgtgatcaggggcacaccgtcgcgatggtcggagacggcatcaacgacggccccgctttggcatgtgccgatttaggcttggcgatggggcgcggtactgatgtcgcgatcggcgccgccgatctcattctggtccgcgacagcctgggtgttgttccggtggcattggatctggcacgtgctaccatgcggacaattcggattaatatgatctgggcgttcggctacaacgttgcggcaatccccatcgcctccagtggtctgctcaatcctttgatcgccggtgctgccatggcgttttcgtcgtttttcgtggtgtcaaacagcttgcggctaagtaattttggtctttcccaaacgtcagactga

SEQ ID NO: 27807 - DNA, 588 bp, Mycobacterium leprae
atgtcattgctatcaattggccaacagttccccgcctaccaactcaccgcgctgatcggcggcgacttatcaaaggttgacgcacagcagcctggtgactacttcaccaccgtctccagtgacagccacccaggcaagtggcgcgtagtgttcttctggccgaaggacttcaccttcatttgtccgaccgaaatcgcggcgttcggcaagctgaacgaagagttcgaaggccgtggagcgcagattctcggagtttcgatcgacagcgaattcgtgcacttccagtggcgtgcacagcacgaggacctcaagcggcttcccttcccgatgctctcggacatcaagcgggagctttctgcggccagcggagcactcaacgccgatggtgttgctgaccgtgtgacgttcatcgtcgatcccgacaacgatatccagttcgtctcggtcaccgcgggttccgtgggacgcaacgtggaagaggtgctgcgggtgctcgatgccctacaatccgaccaactgtgtgcatgcaactggcgcaagggcgacccgactctgaacgcgactgaattgctcaagacgtcagcctga

SEQ ID NO: 27808 - DNA, 1245 bp, Mycobacterium leprae
atggcagccaaacggcggatgcccagagtccacgacctggccccgctgatccagttcaaacggcccaaattcggagcgaccaaacgccgcctcgaggccgcgctgaccattcaggatctgcggtgcattgccaaacagcgcaccccaaaggccgcgttcgactataccgatggcgccgccgaggacgagctatccattaaacgagcccaacaagccttccgcgacatcgagtttcacccggctatcttgcgtgatgtcacgaacgtatgcgccggatgggatgtgctcgggcattcggtcttgttgccgttcggaatcgcgccaaccggattcactcggttgatgcataccgagggtgagattgccggcgcgcgggctgctgctgcagccgggatcccattttcgttatccactctcgccacctctgcgatcgaagatgtagtggccgccgttccgcagggccgcaaatggtttcagctgtacatgtggcgggatcgtgaccgctcaatggcgttggtcgagcgcgccgccgacgcagggtacgatgccctgctggtcacggtcgacgttccggtcgccggcgcgcggttacgtgacacccgcaacggcatgtcgatcccgccggcgttaacactgcgaactgtgttcgacgcgctgccacacccgcgctggtggattgacttgttgactaccgagcctctggcattcgcatcgttagatcgctggtcgggcactgtcagcgattacttaaacaccatgttcgaccccagcgtcacttttgacgatctggcgtggattaaaacccaatggcccggcaagttcgtagtgaaaggaatccagacgctcgacgacgctcgcgccgtcgttgagcgcggtatcgacggtgtcgtgttgtccaatcacggcgggcggcaacttgaccgggcaccggtgcccttccatctactacctacggtggcgcgtgaattcggcaaggacaccgagatactgttagataccggtatcatgtccggcgctgacattgtggcagcaattgcactgggagcccggtgcacactggtcgggcgagcctacctctacgggttgatggccggtggcgaagcgggcgtcaggcgcgcgatcgaaatcctggaaagcggggtgatccgcacgatgcaacttttaggtgtgacctgtttagaggaactctcgcccagacatgtgacgcaactacagcgactgggccccattgaaccaccagcatga

SEQ ID NO: 27809 - DNA, 300 bp, Mycobacterium leprae
atggacgtcatggcagctaccgagtacctcgcccgctcaacgacgttgactagtgttggctggattggttacatcattatcggtggtatagcgggctggatcgcaggcaaaatcgttcaaggcggcggatcgggcatcttgatgaacatcgttatcggtgttgtaggcgcgttgatcggcggctttttactgagcttcttcgttaacaccgctgccggcggttggtggttcactttgttcacttcgatcctaggctcggtgatcctgctttgggttgtcggcagggtacgaaagacctaa

SEQ ID NO: 27810 - DNA, 1452 bp, Mycobacterium leprae
atgagtgcgccggaatcgaagacggccattgcgcagatcggcgtcaccgggctagccgtgatgggttcgaacatcgcccggaatttcgcccgacacggctataccgtggcgttgcacaatcggtcaatcgccaagaccgacacactgctcaaagagcacggatccgaagggaatttcgtgcgaaccgaaacgatccccgagttccttgccgcactacagactccgcgacgggtgctgatcatggtaaaagccggtgacgccaccgatgccgtcatcaatgaactcgccgatgttatggaacccagcgacatcatcatcgacggcggcaattcgctgttcaccgacaccattcgccgcgaaaaagcaatgcgtgagcgtggcctgcacttcgtcggcgccgggatctccggcggcgaggagggtgcactgaacggaccgtcgatcatgcccggcgggcccgccgaatcgtatacctcgctgggcccgctgcttgaggagatttccgcgcacgtcgacggggtgtcgtgttgcacccacatcgggccaggcgggtcgggccacttcgtcaaaatggtccacaacggcatcgagtactccgacatgcagctcattggcgaggcctaccagctgctgcgcgacggattgggcatgagtgcaccgcaaatcgctgacgtgtttaccgaatggaacaggggcgatctgaacagctacttggtagagatcaccgctgaagtgttgcgccagaccgatatcaagaccggcaggccgctggtcgatgtcatcctcgataaggccgagcaaaagggtaccggccggtggaccgtacagtccgccctggacttgggcgtgccgataactggaatagccgaggcggtgttcgcgcgcgcgctgtcgggttcggtgctgcaacgcaaggccgccatcgggctggcctccggcaagttgggcaacaaacccacagatcgcgagacattcatcgaagacgtacgccaggccctgtatgcctccaagattgtggcctacgcgcaggggttcaatcacatccaaaccggtagtaccgagttcggttggaacatcacaccgggtgacttggcgaccatctggcgcggcggctgcatcatccgggcgaagtttctcaaccgcatcaaggaagctttcgacgccgcccccgacctggccagcctgatcgttgcgccgtatttccgcagtgctgtcgaatcggcgattgacagttggcggcgtgtggtgtccacagctacccagctaggtatcccaaatcccggcttctcgtccgcgttgtcgtactacgatgcgctgcgcaccgagcgacttccggccgcactgacccaggctcaacgtgactttttcggcgcgcacagctacggacgcgtcgacgcgcggggcaaattccacacactatggagtgaagaccgtagcgaagttacggtctag

SEQ ID NO: 27811 - DNA, 2859 bp, Mycobacterium leprae
gtgtcggtaccgaactcatcgaacaagcagacctgctttacagcccggcatattggccctaacagcgaggacgttgcgaccatgcttgcagtcatcggcgtcgaatcgctagacgatctggcagctaaggcagttcctagcgacattctcgataatgtcaccgacaccggcgttgcaccgggcctggaccggttgccgccgccggctaccgagtccgagacgctagccgagctaggtgcgcttgctcgtgctaataccgttgccgtatcgatgatcgggcagggctactacgacaccctcacgccagcggtgctgtcgcgcaacatcttggagaacccggcctggtatactccctatacgccgtaccagcccgaaatcagtcagggtcggctggaagcgttgctgaatttccagactctggtcagcgatcttactggcttggagatcgcaaacgcatcgatgctcgacgagggcacagcagcagccgaggccatgacattgatgtaccgtgctgcccgcagtacggcgagccgggtggtcgttgacgtcgacgtgtttgcccagactgtcgcagtgttcgccactcgggccaaaccgttaggcatcgacatcgttgtggccgacctacgcgaaggactaccggacggtgagttctttggcgtcatcacccaacttcccggagccagcggccggattaccgactggaccgctttaatcgcccaggcccacagccgcggcgcattggtcgctgtcggtgccgatctgttagcgctgacgttgattacgccaccgggcgagatcggcgccgacgtcgcattcggtactactcagaggttcggcgtgccaatgggatttggtggcccgcatgctggatacctcgccctgcacactaagcatgcccgtcagctgccgggtcggttggtaggtgtttctgtcgacagcgacggcacaccggcctaccggttggcgctgcagacccgcgagcaacatatccgccgagacaaggcgacaagcaacatctgcaccgcacaggtgctgttggcggtgatggctgcgatgtacgccagttaccatggtgccgagggattgaccggtatcgcgcggcgggtgcatgcacaggcacgcgccctggcggccggtctgtccgcagccggtgttgaggtggtacaccaggcgttcttcgacaccgtgctggcccgggtacccggccggacggtgcaaattcagggcgctgcgaaggagcgcggtatcaatgtctggctcgtggacggcgaccatgtttcggtggcctgtgacgaggccaccaccgatgagcacatcacggccgtgttggcggcgttcgcagcgacgccggcgcgggcgagcttcgccggtccggatatcgcgacccgaacctcggcgttcctgacgcatccgacatttaccaagtaccgcaccgaaacttcaatgatgcggtacttgcgtgccttggcggataaggatatcgctctggaccgcagcatgattccgctcggttcgtgcacgatgaagctcaacgccgccgccgagatggagtcgattacctggcaggaattcacgcgccagcatccattcgcaccagtatcagacacccccgggctgcgtcgtctcattagcgacttggagagctggctggtgcagattaccggctacgatgcggtttccttgcagcccaacgcgggctctcagggggagtacgctggtctgttggcgattcacgactaccacgtcagccgaggggaaccgcaccgcaacgtctgtttgattccgtcaagcgcgcatggcaccaacgccgcatcggcggcgttggtcggtatgcgcgtggtcgtggtgggttgccacgataacggtgacgttgatcttgacgatctacgtatcaagctcagcgagcatgccaaccggctgtccgtgttaatgatcacctatccgtccacacacggcgtctatgagcatgacattgccgagatctgcgcggcggtgcatgacgccggtggtcaagtttatgtcgatggggccaacctcaacgcgctggtcggcctggcccggccgggcaagtttggtggcgacgtcagccacctgaacctgcacaaaacgttttgcatcccgcacggtggcggaggaccaggagtcgggccggtggcggttcgttcgcatttggtctcgtttctgccgggtcacccctttgctcccgaactgccgcaaggtcagccggtgtcgtcggcgccgtatgggtccgcctcactcctgccgatcacgtgggcctatatcaggatgatgggcgccgacggtctgcgaacggcatcgctgaccgcaatcgcctcggccaactacatagcccgtcggctcgacaaatacttcccggtgctgtacaccggcgagaacggaatggtcgcccacgagtgcatcctggacttgcgaccgatcaccaagtcggttggtgtgactgtcgacgatgttgctaaacgcttggcggattatggttttcacgcgcccacgatgagcttcccggtgcccggaacgctgatggtggaacccaccgagagtgagagcctggccgaaattgatgcattttgcgaggccatgatcgccatccgtggcgagatcgcccgcgtcggtgcaggggagtggtctgttgaggacaacccactacgcggcgcaccgcacaccgctgagtgcctgctggcctccgactgggatcatccgtatacccgagaagaggccgcttatccgcttggcaaagcgttccggccgaaggtgtggccgccggtgcgtcgtatcgacggtgtctacggcgaccgcaatttggtgtgctcgtgcctgccggtggaggcgttcgtctga

SEQ ID NO: 27812 - DNA, 1917 bp, Mycobacterium leprae
gtggagttaagaccattctatccatctgtcaactggggctacgcgctgccagactcgttgtggtggatcgccaaggcatgggcgatcagtgccgcttgcgtcgttgtcttggtaatgctcagttttatcacccgctggggtcgccaatactggcggattacccgcggctatttcatcggaccgcagtcggtcggggtgtggctgatgctagctgtgctgctgttctcggtcgtcatcagcgtgcggttgaacgttttgttcagctaccaaagcaaagacttgtataacgcgctgcaagcagccttcgaaggcgccggcgcacagaacgacctggttaaacagtcaggtatgcacggcttttggatgtcgctcggaatcttctccattttggcagtcatattcattgcccgcgtgatggccgacatttatctgacccagcggttcatcatcgcctggcgaatgtggcttaccaaccacctcacaactgactggctggaccagcgcgcctattaccgggaacaattcatcgacaatacgatcgacaaccccgaccaacgtatccagcaagacatcgatatcttcaccgccggcgccggcggcacccccaacggtccctccaacggaacgggcagcacactgttgtttggggctgtcgaatcggtgatatcggtgatttcgttcaccgcgatcttgtggaacctttccggtcggctcgccgtgtttgagttcgaaataccgcgcgccatgttctggatcgtcattgtctacgtgctgttagcaacgatcataacgttctggatcggccgcccattaatcgggctgaactttgccaacgaaaaactcaacgccgccttccgctatgcgttagtgcggttgcgcgacgctgccgaggcggttgcattttatcggggtgaggaggctgaacggaagcaattggagcagcgcttcacaccgattattgacaattaccgcaggtacgtcagccgcactataagattcctaggttggaacgcctcggtaagccagaccattgttccgctaccgtggattcttcaggcaccgcggctgttcgccgggaaaattaacttgggggacgtcggccaaaccgcgaccgcattcggcaatattcacgactcgttatcgttctttcgcaacaattatgccgcatttgcggctttccgggccgcaatcatccggttgcatggactcgtcgttgcaaatgctcgcagccgggagttgccccacgtaacagctaagtcgacgaacgatggtacagttcatgtggtcgctgtcgaggtgcgaacgtcggcaggcgagcagctgattgacccgctcgacctgcaacttaattgcggtagttcactggtcatcactgggcgctccggggtaggcaagaccacaatgctgcgcagcctggccgaattgtggccatacgcttccgggaccctaagccgccccgacggcaagaacgaaacgatgttcttatcgcagttgccctatgtaccactgggcaacctacgcggcgtggtgtgttacccaaatgcgcccgccgacatccctgaagacactgtgcgggacaccctaacgaaggtagccctcaacccgctgtgtgaccggctagacgaagaacgggactgggccaagatactatccccaggcgagcaacaacgcattgcctttgcccgtatcctgctcaccaaaccaaaggcaatattcctcgacgaaagtacgtccgcgcttgacgaagggctggaattcgcactctaccaaatgctgcgaagcgaactgccagactgcatcatcgtcagcgttagccatcggcgcgcagtcgagctgctccacgcacaacagctggaactgcttggcggcggccagtggcgactgggcccagtggaaaaggagccgctgcatgtctag

SEQ ID NO: 27813 - DNA, 960 bp, Mycobacterium leprae
gtgataaagcccacgccagcagcagtcggttcatatgtaacccggcggtgcgatcggctgttcaaatcggccgctgccgcggctggttcgacggtcgtcgccgcgatcctgctgatcgcgatattcctgttgcttcgtgctgtgccctcgttgcgcgcgaaccatgcaaattttttcaccagcgcaaaattcgacaccaccggtgataagaatctcgcgtttggtatccgcgaccttttcatggtgacggtgctgagttcgatatgtgccctggtgttggctgtgccggtggctatcggaatcgcggtattccttacccaatatgttccggcacggctgtcgcgtctgttcagtgcgatggttgatctgctggctgcggtgccatcgattatcttcgggttgtggggggtattcgtgttggcgccgaagcttcagccgatagcggtgtttctcaaccacaacctgggatggctgtttctgttcaaacagggcaatgtgtcgttggctggcggcggcaccattttcaccagcggcatcgtcctagcggtgatgatcctgccaattgtcacctcggtgtcgcgcgaagtgtttcgccacaccccactcattcagatcgaagcagctcaggcgctgggcgcgaccaagtgggaagtggtacagatgaccgtactgccgttcggccgtagcggcgttgccgcggcggcaatgctcggtttgggccgtgctttaggagaaaccctggcggttctgataatcctgcgttcggccgctcgctcgggcaattggtcgctttttgacggtggttacacgttcgcttctaagattgcctccgcggcatcagaatttagccaaccgctgccgaccggagcatatatcgcagcaggatttgcactgttcttcctgacgttcgtcgtcaacgcggtcgctcgcgcaatctccggcggaagggtgaacggataa

SEQ ID NO: 27814 - DNA, 1281 bp, Mycobacterium leprae
ttgttcgttaacctcacttgcctatcggagggtaatggatcgaggggtaaagcgttggcagagagcacccaggccgagcttaaaacgagctggtatttgctcggaccagctttcgtcgccgcgatcgcctacgtcgatcccggaaatgtggcagccaacgtcagctccggcgcacaattcggctatctgcaactgtgggtggtcgtcgtggccaatgtgctggccggcctggtgcagtacctgtcagcgaagcttgggctagtgaccggacagtcacttccccaggcaatcagcaagcaaatgagtcatccgttccgactgggcttttggttgcaggccgaactggtagcgatggcaaccgatgttgctgaaatcgtaggcggggccatcgccttccacatcttgtttagagtatcattgctgctcggcggggtgatcactgggacggtgtcgttgctgctactgatggtgaaggaccgtcgaggccaactcttgttcgagcgcgtcatcactggactgctgtttgtcattgtcgtcggcttcacgtccagtttcttcgtcgcgacgccctcacccgaagacatggtaaacggcctactgccgcgcttccagggaaccgaaagcgtactgctggccgccgctatcataggcgccaccgtgatgccgcacgcggtgtacctgcattccggtcttgccctggaccggcacggacacccccacgcgggccgtagccggcgtcgactactccgcgtcacccgcttggacgtcatcctggcgatgacgatcgccggaatcgtgaatacggcgatgctactagtggccgcgatcaacctgcagcatcatcaggtaaccgcttacatcgagggcacttacaccgccatacaggacaccttgggagcgacgatcgcgatgctgtttgcgatcgggttactcgcctccagtttggcatccgcatcggtgggcgcctatgccggtgccttgatcatgcaaggattgctacagcggtccattcccatgctgatacggcgcttgatcacattgtgccccgcgatcgcgatcctggcgctcggtttcgaccccactcgcgcattggtgctatcccagatagtactgtccttcggtataccgttcgcggtgcttccactggtcaaactgaccaacaaccgcggactgatgggtaacgataccaaccatcccgccacaactgttctcggctgggccgtcgcgatattggttagtctgcttaacgtggtgctgatctacctgaccgtgaccagttaa

SEQ ID NO: 27815 - DNA, 1296 bp, Mycobacterium leprae
  misc_feature (1369)..(1369): n=g, a, t or c
gtggccgacaccgacgacaccgtcactctgaagtatccgggaggcgagatcgatctacagattgtccgtgccaccgaaggtaatgacggcattgcgatcgtcccggtattggccaagaccggttacactacgtttgatgtcggctacggtaacaccgcatccaccaagagttccatcacctacattgatggtgacgccgggattctgcgttaccgcggctatccgattgagcagctcgccgagaagtcgaccttcatagaggtttgctatctgctgatctatggggagttaccagccaccgatcagctggccgaattcacccatcggatccagcgccacaccatgttgcacgaggaccttaagcgattctatgatggcttcccgcgcaacgcgcacccgatgccggtgttgtccagcgtggtcaacgcattgagtgcttactatcaggatgcactggacccgatggacaacggccaagtagagctgtcgacgatccgactcttggccaagctgcccactatcgctgcctatgcatacaagaagtcggtaggccagccgttcctttacccggacaacgcgttttctctagtagagaacttccttcgaatgacttttggtttgccggctgagccctatgagcccgaccctgaggtggtccgggctctggacatgctgtttatcctgcatgctgaccacgagcaaaactgttcgacgtcaaccgtgcgtttggtgggctcgtcgcgagccaacctgttcacctcgatttcgggcggcattaacgcgctgtggggaccgctgcacggcggtgccaaccaggcggtgcttgagatgctcgaaggtatccgcgagagtggcgacgacgttggtggatttgtccaaaaagtaaagaattgccaggccggtgtgaaattgatgggctttggtcaccgcgtctacaagaactacgatccgcgggcccgcatcgtcaaggaacaggctgacaagatcctggtcaaacttggtggcgatgacgatttgctgaacattgccaagggactcgaggaggcggcgctaaccgatgactatttcatcgagcgcaagctttacccgaacgtcgacttctacaccggtctgatctaccgggccctcggttttccgacccggatgttcaccgtgttgtttgctttgggtcggctgccaggctggattgcgcactggcgtgagatgcacgacgagggtgacagtaagattggccgtccgcgccaaatatacaccggctacacagagcgtgactacaccgcaattgaaacacgatag

SEQ ID NO: 27816 - DNA, 432 bp, Mycobacterium leprae
atgcttgacagcgatgcgcggctggccagcgacttatcattggccgtaatgcggctggcccgccaactacggttccggaacccgcaatcgccggtgtcgctgtcgcagctgtctgcgctgacgacgttggccaacgagggcgccatgacgcctggcgccttagcgattcgcgaacgagtccggccaccgtcgatgactcgggtgatcgcatcgttggctgatatggggttcgtggaccgtgagccacaccctgtcgatgggcgacaagtgctggtctcggtatcgcagtccggtgccgaattggttaaggcagcccggcgcgcccgccaggaatggctggtcgagcggctgatgacgctgaatagcgataaacgtgacatcctgcgcaatgccgccgatctgatcttggagttgattgacgaaagcccgtga

SEQ ID NO: 27817 - DNA, 2145 bp, Mycobacterium leprae
atggcagacactgcaattcagtggagtaaggacgccgacggtattgtcacgctgacaatgaacgacccgtccaggtcggccaacgttatgaacgagatttacatcgaatcgatgggcaatgcggtggatcgcattgttgcggaaaaagattcgattaccggtgtggttataaccagcgctaaaaggactttctttgccggcggtgacctcaccgcgatgatcaatactggatcagaagaggccgggcaatgcttcgacactgtcgagacggtcaagaaacaattgcgcaccctggaaacgctgggcaagccggtcgttgccgccatcaacggtgccgcgctgggcggcggtctggagatcgcgctcgcatgtcatcaccggatcgctgccgacgtcaagggcagtcagctcggcttgcctgaagtgacgctggggctgttgcccggcggcggtggggtgacccgcacggtgcggatgtttggcatccagaacgcgttcgtcaacattctgtcacagggcacccgctttaagcctgccaaggctaaggagatcgggctggtcgacgagctgttgtcaacagtcgaggagctggtgcccgcggctaaggcgtggatcaaggccaacccggaagcgcacgagcagccgtgggacaagaagagctacgagatgcccggtggtactccgacctcgccagggttggcggccattctgccgtcattcccgtcgctgttacgcaagcagctcaagggcgcgccgatgccggccccgagggccatcttggccgccgcggtcgagggcgcgcaggtcgacttcgacaccgccagccgtattgagagccgctacttcgtttcgctggtcaccggccaggtcgccaagaacatgatccaagcgtttttcttagatctgcagcacatcaattccggtgggtctcgacccgacggcattggtaaaaccccgatcaagaagatcggtgtgctgggtgcgggtatgatgggcgccggtatagcctacgtctcggccaaggcgggctacaacgtggtgcttaaggatgtgagtcttgaggccgcgcagaagggcaagagctactcggagaagctggaagccaaggcgctagagcggggccgcactacgcaggagaagagcgacgttctgctggcgtgcatcgccccgacaggcgaccctactgatctcaagggcgttgacttcgtgatcgaagccgtcttcgagaaccaggaactcaagcacaaggtgttccaggagatcgaagacatcgtcgaccccaatgcggtactcgggtcgaacacctcgacgttgccgattaccggtctggcgaccggcgtcaagcggcaggaggactttatcgggatccacttcttctctccggtcgacaagatgccgctggtcgaaatcatcaagggcgagaagacctcggacgaggcactggcccgggtgttcgactacgccctggctattggcaagaccccgattgtggtcaacgacagccgcggcttcttcacttcgcgggtgatcggcacttttgtcaacgaggcgctggcgatgctcggtgagggggtggaaccatccagcattgaacaggcaggtgcgcaggctggctacccggcgccgccgctgcagttgtccgacgagctgaatctggagctcatgcacaagatcgcgatcgctacccgcaagggtgtcgaggatgccggcggcatgtatgagtcgcacccggcagaaaccgtggtggagaagatgattaagctcggccggtccgggcgcttgaagggtgccggcttttacgagtacgttgacggcaagcggtccgggttgtggctcggtctgcgggagacgttcaagtcgggctcgtcgcagccgccgttgcaggacatgatcgaccggatgctgttcgccgaggcgctggaaactcagaagtgcctcgatgagaacgtgctgacgtccactgccgacgccaatatcgggtccatcatgggtatcggtttcccgccgtggaccggtggcagcgcgcagtttatcgccggctactctggcccggccggtaccggccagcaggccttcgtgtcccgagcccgtgagctggtggccaagtacggcgatcgctttctgccgccggagtcgctgctatag

SEQ ID NO: 27818 - DNA, 1017 bp, Mycobacterium leprae
atgtcagccgagctgaccgacctacagctgctgcacgagctcgaaccggtcgtggagaagtacatgaaccgtcatgaacgcctacacaagaactggaatccgcacgactatatcccgtggtcggatggcaagaacttctacgctctcggcggtcaggattgggaccccgagcagagccagctctccgatgtcgcccaagtagcgatggtacagaacctggtcaccgaggacaacctgccgtcgtatcaccgagaaatcgcgatgaccatgggcatggacggtgcatgggggcagtgggtcaaccgctggacagccgaggaaaaccggcacggaatcgcgctgcgcgactatctggtggtgacccgcgcggtcgatccggtggagctagagaaactacgcatcgaggtagtcaaccggggtttcagcccgggccagaatcaccaaggcggactcttcgccgacaccctgttcgactcgatcctctacgtcacattccaggagctggctacccgcgtctcgcaccgcaacacgggtaaggcctgcaacgagacgatcgctgaccagctgctcgctaaaatatcgagcgatgaaaacctgcacatgatcttctaccgggacgtcagcgaagctggcatagagctcgcacccaaccttgcgatcaaggcactgcacaagatcctgcacaactttaagatgccgggattcctggttcctgagttccggcgtaaggccgtgataattgccgtcggtggcgtctacgacattcggatccaccttgacgaggtggtcatgccggtgctcaaaaaatggcggatcttggagcgcgaagacttcagcggcgagggtacacggttgcgtgacgaaatcggcgagcatcttacagagcttgaggccgcgtgcgacaagttcgaagtctccaagcagcgctacattgaacgcgaagcccgccggactgagaaaatcaccgcacgcaaggtgctatctaccgaaggcacgctgaggatgagtgggcggtag

SEQ ID NO: 27819 - DNA, 1155 bp, Mycobacterium leprae
gtgttggctccgatggccggagtaacgaacgtcacattccggacactgtgccgtgaatttggttcaacgcgtggcaacctgctgcgcccagctccaccgcacttgcgatcgccactagaacaatcgcaggtaggcaccatcagcggactgtacgtctgcgaaatggtgaccgcgcgtgcactagtcgagcgaaatgcagtcacgatacacatgaccacgttcgcaccggacgagtcgccccggtcgttgcagctctacaccgtggacccggctaccacgtacacggccgccaagatggtcgctgacgaaggtttggccgatcacatcgatatgaatttcggctgcccgatgcccaaggtcaccagacgcggcggcggggcagcgctgccatacaaacggcgactgtttggccagatcgtcgctgccgctgtgcgtgctaccgaaggcaccaaaataccggtgaccgtcaagttccgcatcggcatcgacgacgagcatcacacccacctagatgccggccgtatcgccgaagctgagggcgcagccgcggtcgcattgcacgcccggacggcggctcaacgctactccggcaccgctgattgggcacagatcgcccaactcaaacagcaggtaaggacgattcctgtgctcggcaatggggacatctacgacgcgagcgacgcgctggccatgatggccgtcactgggtgcgacggcgtggtcatcggccgcggctgcctgggccgtccgtggctgttcgccgagctgtcggccgcgttcaccggcagacctgcccccgccccgcccacactcggcgaagtcgccgaaatcgtccgtcggcacggcaaactgctagtcgcccatttcggcgaagacaaaggcatgcgcgacatccgcaaacacatcgcgtggtacctgcacggctttcccgccggatccgaattgcgaaacgcactggcactggtcaaaacgctcgatgaacttgactgcctattaaaccggttggacggagctgttccgttcccggatgccgcgatcggaccccggggtaggcagggttcacccgcctgggtggcattgcccgacagctggctgactgaccctgacgactgcacagtgccgatcggcgccgacatcatggaatctggtggctga

SEQ ID NO: 27820 - DNA, 777 bp, Mycobacterium leprae
gtggccaagagattggatctcaaaggcgtcaacatttattacggatcttttcaagcagttttggatgtgtcgctggcggtactgcccagaagcgtgacggcgttcatcggagcctcaggctgcggcaagacgacggtgttgcgcaccttaaatcggatgcatgaggtcgtccctggcgcccgtgttgagggcaccgtgttactcgacgatgaagacatttatgccccgggtatcgatcccgtcggtgtgcgacgggcgatcgggatggtgttccagcggcccaacccgttccccgccatgtcaattcgcgataacgtggtggccggtttgaagctgcaaggcgtgcgtaatcgtaaggtgcttgatgataccgcagaatactttttgcgcggtacgaatctgtgggatgaggtcaaggaccgattggataagcctggcggtggactgtccggggggcagcagcaacggctgtgtatcgctcgggccattgccgtgcaaccagacgtgttactcatggacgagccgtgctcctcgctcgatcccatttcgacgatggctatcgaagaactgatcggtgaattgaaacaggagtacaccattgtaatagttacccacaacatgcagcaggcggcgcgggtgagcgatcagactgcgttcttcaacttggaagccgtaggaagacccggccggctggtggagatagatgacaccgagaaaatcttttccaatccgaccgaaaaggccactgaggactacatctccggccgcttcggctag

SEQ ID NO: 27821 - DNA, 954 bp, Mycobacterium leprae
gtgcatagactcagggccgcggagcatccgcggccggattatgttcttctgcacatcagcgacacgcatcttatttcggacggctctctctacggggcggtcgacgccgacagccggctcggcgaactgctcgagcagttaaagcactcccaactgcgtcccgacgcaatcatctttaccggcgatttggccgatcggggcgagccagaggcataccgaaagcttcgatgcttggttgagtcgttcgctaccgagctggatgccgaactcttctgggtgatgggcaaccatgataaccgggtagcattacgcacgttgttgctggatgaggcgccctccatggcgccgttggatggcgtacgcagggtcgacggactacgggtcatcaccttggatacgtcggtgccgggacgtcattacggagaaatcagtgcatcgcaattagattggcttgccgacgagttgacaacctcagcaccggatggcaccatcctggccttacaccatccgccgattccaagtgtcttagacatggccgtaacggtggaactacgcgaccaggcttcgcttgggcgggtgctcaagggtagcgatattcgtgccattttggccggtcacctgcattactcgacgaatgccaccttcgtcggaattccggtatcagtcgcctcggcgacctgctacactcaagatctaacagttgtcgccggcggagcgcgcggtcgagatggtgctcagggctgcaatcttgtgcacgtctaccaagatacagtggtgcactctgttattccacttgggatcggaaacatggtgggcacctttgtttctcctgcgcaggcgcgacgcgatatcgccgaaagcgggctgtttatcgagccgtctgggcgggattcgctgtttgcccatcctccaatggtgctgacaccgtcggtgacgcaaagtcttggcgattga

SEQ ID NO: 27822 - DNA, 2265 bp, Mycobacterium leprae
gtgattgacaccgttgaatatgctgctaccacccccgaccagccgcaaccgtttgctgagctgggcctcagagaggacgagtaccagcgagttcgcgaaattctaggtcggcgacctacggacaccgagctggcgatgtattcggtgatgtggagtgagcactgttcgtacaagtcttccaaagttcacctgcgttacttcggtgaaaccaccaccgaggagatgcgtaccggaatgctggccggtatcggtgaaaatgctggtgttgtcgacatcggtgacggctgggccgtcactttcaaggtagaatcgcacaaccacccttcttatgtcgagccgtaccagggggccgcaaccggcgtcggcggcatcgtacgtgacatcatggcgatgggcgcgcgacctgtcgctgtgatggaccagcttcggttcggtgctgccgatgcgctcgatacccgccgcgtgctggatggcgtggtccgcggtattggcggctacggcaactcgctgggcttgcccaacatcggcggcgagactgtcttcgactcgtgctacgacggcaatcctctggtgaatgcgttgtgtgtcggggtgttacgccaggaggatcttcatttggcgtttgcctcgggtgcgggtaacaagatcattctgttcggcgcgtgtaccgggctggacggtatcggcggggtctcggtgttggcgtcggacaccttcgatgctgaaggagcgcggaagaaactcccgtcggttcaggtgggtgacccctttatggaaaaggtactcatcgagtgctgtctggaattgtatgctggcgggctggtgatcggcatccaagacttaggaggtgcaggattatcttgtgccacttcggagttggcatcagctggggacgtcggaatggcgattcaactcgacaccgtcccgcgccgcgcgaaggatatgacgcccgccgaggtgttctgcagcgaatcgcaggagcgcatgtgcgcggtggttgcaccggagaacgtggacgccttcttggcggtctgccgcaaatgggaggtgctggccacggtgattggtgaggtcaccgacggcgaccgactacggatcacctggcacggcgagacagtcgtcgacgtgccaccgcgcaccgtggcccatgagggaccggtgtatcagcgacccgtctcccgccccgaatcacaggaagccttgaacgcggattcatcgaaaggattgccgcgaccggttagcggagacgagctgcgtgcgactttgcttgcactgctgggtagtccgcacttgtgcagccgggctttcatcaccgagcagtatgatcggtatgtgcgcggcaacaccgtcttggccgagcatgccgacgctggcgtgctgcgtatcgacgagtccaccggccgcggtattgcgttgtcgaccgacgcgtctggacgctatacccggctagatccctatgccggtgcccaactggcgctggccgaggcgtaccgcaacgtggctgtcaccggtgccaccccggtcgcggtgaccaactgcctcaacttcggttcacccgaagatccaggagtgatgtggcagttcgcgcaggctgtgcgggggctggctgatggttgtgcggccctgaagattcctgtaaccggcggcaacgtcagcttttacaatcaaacgggggcggtggcgatcttgcccacgccggtggttggggtgctcggcgtcctggataacgtggctagacgtatccacacgtccttaggcactgaacctggagagattctgatgttgctgggtgacacctatgacgagttcgacgggtccgtctgggcgcaagtgatggctggccacctgggtgggctgccgcccatggtggacttggcgcgtgagaagctgctggccgaggtgctgagttcggcgtcgcgcgacgagctggtatcggcagctcatgacctgtccgaaggcggcctcgcccaggctatcgtggaatcggcgttggcgggtgaaactggttgccgtatagcgcttcccgaagatgctgatccgttcgtgatgctcttttccgaatcagcaggtcgggtgctggtagctgtgccacgccccgaagagagccggtttcggtcgatgtgcgaggcgcgaggtttgccagctatgcgtatcggtgtggtcgatcagggttcggactcgatagaggttcggggtcaattcaccgtgtccctggcagaactgcgtatgacgttcgaggcggtgctgccgcgatttttcggataa

SEQ ID NO: 27823 - DNA, 1419 bp, Mycobacterium leprae
gtgagcattccgaatgttctagccgcccgatacgccagcgctgaattggtcgcgatatggtctccggaagccagggttatcgcggagcggcagttgtggctggccgtgctacgagcacaggcggaactgagtgttccgatgcctgttaaagcgatcgccgactacgagcgggtgcttggcgaggtcgatttggcttcgatcgccgcccgcgaacgtgtgttgcgtcacgacgtcaaggcgcgcatcgaggaattcaacgcgctggccggccatgagcaggtacataaggggatgaccagccgcgacttgaccgagaacgtggagcaactgcagatccggcggtcgttggaattggttttctgccatggtgtggccgtagtagcacggctggccgaatgcgcggtgtcctatcgcgacctggtgatggccggacgcagccataacgttgccgcgcaggccacgacattgggcaaacgcttcgcgtccgcgacgcaggaaacactgatagcgttgactaggctgcgcgagttgatcgaccgctacccactgcgcggtatcaagggcccgatgggtaccgggcaggacatgctcgacctgcttggcggtgacgctgcggcgctagcagaacttgagcaaagaatagctgaattcctaggattcacaaaggttttagccagtgtcgggcaggtatatccgcgttcactagaccacgatgtgatttcagcgttggtgcagctcggtgccggctcttcctcgttagcgcacaccatacggttgatggcaggtcacgagctcgttaccgaaggctttgcaccggggcaggttggctcgtcagcgatgccacacaagatgaacagccgcagctgtgaacgggtcaacggtctgcaggtggtgttgcgcggttacgccgcaatggcagccgaactagctggcgcgcagtggaacgagggcgacgttttctgctcagtagtacgtcgagttgctttgccagacagcttctttgccatcgacggccagatcgagacgtttttgacggtgctcgacgagtttggtgcttacccggcagtgatccgccgcgagctggaccgctatttgccattcctggccaccaccaaggtgctgattgcggctgtgcgtgctggtatgggtcgcgaggccgctcaccacgtgattcgcgaacacgcggtggcgacggcgctggccatgcgggagtgcggtgccgagcctgacctgctggaccggttggctgccgatgggcggttgccgctggaccgagcggcgctagacgccgcgctggccgacaagaaggcgttcaccggcgccgcggcagaccaggtagacgaggttgtcgcgatggtcgacaagctagtgggccgctacccggaagcagccaagtacacgccgggtgctatcctgtga

SEQ ID NO: 27824 - DNA, 1245 bp, Mycobacterium leprae
gtgaacatcaatttgttcctcttgatcattgtcgtgatcacggcactggccttcgacttcaccaacggttttcacgacaccgggaacgccatggcgacctcgatcgccagtggtgcgctcgcaccaaaggtggcggtgttcttctctgccattttgaacctggtcggcgcgttcttgtctaccgcagtcgcagccacgattgccaaggatctgatcgaggcggatctggtaacgctggaactggtgttcgccggcctggtcggcggtatcgtctggaatttgctgacctggcttctcggtatcccgtcgagttcctcgcacgcactgattggcggtatcgtcggcgccaggatcgctgctgtcggcggtcacggggtgatctggagcggtgtcatatccaaggtgattattccggccattattgccgcgttgctggccatcgttgttggggcggtggccacctggttggtctacgcgatcactcgcagtgttccagctatgagcaccgacaccaggtttcggcgcggccagatcggctcggcgtcgctagtttcacttgcacacgggaccaacgacgcacagaagacgatgggcgtgatcttcctggctctgatgtcctatggaacagtcagcaagaccgcttccacgccgccgctgtgggtgatcgtgtgttgcgctatagccattgccgcgggtacctacctgggcggctggcgaatcatccgcactttgggcaaggggatggtggagatcaagccaccgcaaggaatggccgccgaatcatcctcggccgcggtcattctgttgtccgcacactttggttacgcgttgtccacgacccaagtctgcactggttcggtgctgggcagcgggttgggcaaacccggcggcgaggttcggtggggcgtggctggtcggatggccaccgcgtggctggtcacgcttccgttggctggttcggtgggagcagtcacctactggatcgtgcatctaatcggtggttatcccggcgcggtcatagggttctcgctgttggtcgcggcctctgtcgccatctacatccggtcgcgtaaggtcaaggtcgaccacaagaacgtcaatgaaaactgggaaggcagcttgaccgctggactcgacggttcggacgaacataagccacactctgatgtgggccctaaattgagtgctaccctgcctcgctaccgctctagtcaccacacggttggcgtaaggaacgcctcttga

SEQ ID NO: 27825 - DNA, 717 bp, Mycobacterium leprae
ttgcctcccggtagcgtcgacgtcgtgagtcgcgctgccctggacaaggacccccgggatgtcgtagcgatgttcgacgacgtcgcccaccgatacgatctgaccaacactgtgctgtcgctgggtcaagatcggtactggcgacgagccacgcggtcggcgctgcggattgggcccgggcagaaagtgctggacctggccgcaggcacggcggtgtccacagcggaactgagtaaatccggcgcctggtgtgtggctgcggatttttcggtcaggatgctagcaaccggcggtgcgcgaaaggtacctaaggtggccgcagatgccacccaacttccctttagcgatggtgtattcgatgcagtcactatcagtttcgggttgcgcaatatcgccgactatcaggcggcgctgcgcgagatggcccgcgtcacccggcccggcggtcaattagtagtgtgcgagttctccacacccaccaatgcgctggtcgccaatgtctacacggaatacctgatgcgggcactgccgcaagtggcgcgactggtgtctagtaatcccgatgcctacatctacttggcggagtccatcagagcctggcccgatcaggttacgctggcctgccagctgtcgcggaccggttgggcgtcgccgcgctggcgtaacctcaccggcggaattgtggctttgcatgcagcagataagccggtgcggtaa

SEQ ID NO: 27826 - DNA, 1227 bp, Mycobacterium leprae
gtgagggtggagactagcgcagacgtggtagtggtgggcgccggaccagcggggtcagctgcagccacctgggcggcacgcgccggtaatgatgtaatcgtcatcgattcggtttgctttcctcgagacaaggcctgcggtgacgggttgactccgcgcgcggtcgctgagctgaaacggctagggctggacgactggctaaatacccgcatccgacatcgcggtctacgaatgagcggctttggcggcgaagtggaagtggattggcccggcccgtcgttcccgtcaaccagcagtgcggtgccacgactagaattagatgaccggatacgtaaggtcgccgagaattccggggcccgcatgttgctcgggactaaagctgtctcggtttaccatgattcatcgagacgggcagcatcagtgacgttggccgacggcaccgaggttggctgccgccagttaattattgccgacggggcccggtctccgctgggtcgcaagctaggccggagctggcatcaaaagaccgtgtacggcgttgctgcccgtgggtacctgaccactccgcgcagcgacgacctctggctgacatcgcatctggaactacgttcccccgacggagccgtgctgcctggatacggctggattttcccgctgggcaacggcgaggtgaatatcggcgttggagcgttgtcgacatcaaagcggccagccgacctggcgttgcgatcgctgatctcgtactatacagatctacgccgtcacgagtggggcttttccggccaaccgcgggcggtctcgtcggcgttgttgccgatggggggcgctgtttccggagtagccggaccaaactggatgctcatcggtgatgctgcagcgtgcgtcaacccgctcaacggcgaaggcattgactacggtctagaaacaggccggctggccgccgagctgctggacttgcgcgatttgtcgtacgtgtggccttcgctgctgcagcagcattatggtcgcggattttcggtcgcacgccggctggcgttgttgctgaccttcaaacggtgtctgcccgcgatcggtccgagcgcgatgcgctctacttcactgataaccatagccgtgcgggtgatggccaatctggtcaccgacgacgatgccgactgggtggcgcgggtgtggcgaagcggcgggtgggcatcatggctcgtcgatcgccgaccaccgttcagctag

SEQ ID NO: 27827 - DNA, 993 bp, Mycobacterium leprae
atggtggtagcgggcattaatttcggagacgctgcgtttgcggcgactgtacaagacagggtagtgaggatcgagcaactcatggatgccgagttgcgagacacggacgaggtgatgaccgagtcagtactacacttgttcgcagccggtggtaagcggttccgaccgctgtttacagtgctatccgcccagatcggaccccggcccgacgctccagaagttataatagccggtgcggtcattgaactggtccacctagcgtcgctttaccacgacgacgtgatggacgaggccgaggtccggcgcggggcgcccagtgccaacctgcgatggagtaacagcgttgccattcttgccggcgattatctatttgctacggcgtcgcggttggtatcacagcttggactggatgctgtgcggattatcgctgacacgtttgcccagctggtgaccgggcagatgcgcgaaacccgcggtgtgccggaaggtgcagattcgatcgagcagtacctgaaggtggtgtatgaaaaaacgggttgtctgatcggctcggctggtcggcttggtggtttgtttgctggcgcacacgccgagcaggtcgagcggctgagccgactcgggagcatcgtgggcaccgcgtttcagatttccgacgacatcatcgatatcgacagcgactacaccaagtccggcaagcttcccggcacagatgtgcgtgaaggcgtgcgcactttaccgatactctatgcgctgcgtgagaccgggcccgatagcgagcggctacgagcactgttggccggacccgtcgacaacgacgcagaggtagtcgaagcactagcgctgttgcgggcgtcgcccgggatggcgagggccaggcaagtgttggcgcattacgcggaccaggccagtggcgagctggctcagttgcccgacggccccagtcgggatgcgctggcgactctggtcgactacacaaccaaccggcacggttag

SEQ ID NO: 27828 - DNA, 1491 bp, Mycobacterium leprae
ttgcgatccgctatccggtatgacttgcccgcgtcacttgtagtgttcctggtagcgctcccgttgtccttgggcatagcaatcgcctcggacacaccggtgctcgcgggcctaattgccgctattgttggagggatcgtcgctggagccttgggtggatcaccactgcaggtcagtggtcctgcagccgggctgacagtcgtcatagccgatctgatctccgatttcggttggggagtaacgtgttttatcactgtggcagcgggtgttctgcaagtactgctggggcttagccgcgttgcgcgagccgcactggcaatatcgcccgtcgtagtacacgccatgttggccggtgtcggcatcacgatcgcacttcaacaggcccatgtactgctcggcggaaaatcgaaaagcactgcttggcacaacgccattggcttgccaagtcaaatcctgggtgcgcaccggcctggggtcattcttggtgtattagtgataactatattgattgcctggcggtgggttcctgcccgagtggcccggatccctggcccgctggtcgcgatcgtggtcacgacgcttgtctcggtggtgttcccgttccatgtgtcgaggattcaggtcgacaacaggtcttcgctggatgtcttgcagctgccgaagcttcccgacggtcactggggcgccgtggtgttaggcgtgatcacagttgcgctcattgccagcgtcgagagcctcttgtcggcggtttcactcgacaaaatgcacaacgggccacgcaccgacttaaaccgcgagttgatcgggcagggcgctgcaaacatagtgtccggagcgatcggcgggcttcccatcaccggggtaattgtgcgcagttcaaccaatgtcatcgcgggtgcgaaatcccgcgcttcgtcgatcatgcacggaatttggatcctgcttttcacgattccgtttgccgggttggttgaccagatcccctctgcagcacttgccggactactcatagtcgtcggagttcagctgttgaaacctgcccacatcgaaaccgccttgcggaacggggatctcgccgtctacctggtgacagccgtctgcgtggtatttctcaatctcctgcacggcgtaatgataggactcgccgtggctatcgcgttgaccggatggcgggtgatacgagcgagggtcgaggcccagcccgttggtgacgagtggcacgtcctcgtcgcgggagcgtgcacattcctagctttgccccggcttacccgcgtactagcttctgtccctccctgcacgcgggtcacggtcaatatttcagtaaattacctcgatcacgccgcgcatcaggcgattcacgactggcagcgacaacatcacgccaccggtggaacggttcacatcaatggtgtggtcgagaccggtcacttttctcgctgcgccatgggtgacttgatcggacccgaacagcagccagaggccgctgcgtaa

SEQ ID NO: 27829 - DNA, 975 bp, Mycobacterium leprae
atggcaatgtcgaacccgtcggtgacccgtatcgccgggccatggcaccatctggacgtgcacgccaacggcatccgattccacgtcgtcgaggcggtgcccacccagccagccggccaggactgcgccccttcggctacggcacgaccactggtaatgctgctgcatggtttcggttctttctggtggtcctggcgtcatcagctacgcggcctgaccgaagcgcgactggtcgcggtggacctgcgtggctacggtggcagcgacaaaccgccccgcggctatgacggctggacacttgccggcgacacagccgggctcatccgagcactggggcactcatcggcgacactggttggccacgccgaaggcgggcttgcgtgctgggccaccgcgctgctgcacccacggctggtgcgcgccattgccctgatcaactcaccgcacccagcagcgttacgacgatcaatgctgacgcaccgtaatcaaggttacgcactgctgccgacgttgctacgctaccagttaccaatttggccggaacgtttgctgacccgcaataacgcagcggagatcgaacgcctagtccgcagtcgcagcagtgccaaatggcaagcttgcgaggatttcgcggtcacgatcgaccatttgcgtatagcgatccagattccggctgccgcgcactgtgcactcgagtatcagcgttgggcagtgcgtagccagctacgtaacgaaggccgtaaattcatgaaatcgatgtctcgaccattcagcgtaccgctgctgcacgtacgcggcgacgcggatccctacctgctagccgactcggtggaccgaacacggcgctatgcaccgcacggacgctacgtatccgtttccgacgcaggacatttcagtcacgaagaagcaccagaggaaattaacagatacctgacgcggtttctcaagcaggttcacgggccccggctcagctga

SEQ ID NO: 27830 - DNA, 801 bp, Mycobacterium leprae
gtgccggtgagtgctggatgtactgcccgcgtgcaggggacggttcctctggtgtttgacgtcggaccgtcctggctgcgtccgctggttgacaacatcgctgtgatgccgggtgtatatcagcgtcttctaccggcagatgtgctggcaatagtgaccgcggccagggcgataccatcggtggctttgcgccgcgacgggcgtgaggctgctgtactggtgctgttctcgggtccggaatctgggccgccggacggtggtgcgcccgacgacgccgatctgttgctgactgtgcgggcgtcgacactgcgtcaccatgcggggcaggcggcattccccgggggtgcctccgatcccaccgatgacgggccggtcgcgaccgctcttcgcgaagcacacgaagaaaccgggatcgacctcgccaggctccatccattggccacattggagcggatgtttattgcgccttcacggttccatgtggtgccggtgttggcctactcggctgatcccgggcctgtggctgtcgtgaacgaggccgaaacggcgatcgtggcgcgggttccgttgtgtgccttcattaatccggccaaccggctgatggtgtaccgtcgtgcccatggccaccgctggtacgggccggcgttcctattgaacgatatgctggtgtggggattcactggccaggtgatcgctgcgatgctcgacgtcgccggctgggctcaatcctgggacgtcaccgacgttcgcgaggtgggcgaggcgatggcgctggtcgatagtcagggagatccgcgatga

SEQ ID NO: 27831 - DNA, 993 bp, Mycobacterium leprae
ttgatccgcaccggtgccttagtgctcagctccgcagccacaggggtcggttatgcctcgatcgtcgagcgcaacgcgttcgtcctacgtgagctgaccattccaatcttgacgccgggctccacgccattgcgagtactgcatatcagcgatatccatatgatgccccaccagcgtcgcaaacaagcctggctccgcgacctggccacctggcaacccgacctggtagtcaacaccggtgacaacttggcgcatcccaaggcagtacccggggtgatccaagcattgggcaatctgctgtctcggccaggtgtctttgtgttcggcagcaatgactacttcggaccacacctaaagaatccggtgaactacctgaccaacccgacgcaccgggtccgtggtaaaccgttgccgtggaaggatctgcgggcagcgttcactgaacgcggctggcttgacctgacccacacccgtcgcgagttcgaggtagctggactgcacattgccgccgcaggcgtggatgacccgcacatcagccgggaccggtacgacacaattgcaggccccgccagcccggttgcgaacctgcgactggggttgacccattcgccggaaccgcgggtgctggatcgcttcgccgccgactgctaccagctggtgatggccggccacacccacggcggccaattgtgcctgccgttctacggagccctagtcaccaactgtggcctggaccggtctcgggcgaaggggctatcacgctgggatgcggatatgcggttgcatgtctccgcgggaataggcacctcaccgcttgcgccaatgcgattctgctgccgacccgaagcaaccctgctgacgttgatcgccaccccgatgggtagtcgagtcgagagtcccgtaagaaccggggccgttcgcaaccaacagctgcagtgcgttgaacgggcacatcgagatagcgggccacgacctcccacgcaactggactga

SEQ ID NO: 27832 - DNA, 1527 bp, Mycobacterium leprae
ttggccgagttcgctgaattcatagccgccatcgaccagggcaccaccagcacccgctgcgtgattttcgatcataatggtgctgaggtggcccgccaccagcttgagcacgagcaaatcttgccccgctccggctgggtcgaacataatcccgttgagatttgggaacgcaccgcgtcagtgctgatgtcggtgctgaacgccactaatttgtcagctaaagatattgcagcgcttggaattactaaccaacgtgagactaccctggtgtggaatcggaacaccggaaggccgtattgcaatgcgatcgtttggcaagacacccgcactgaccgtatcgcggtcgcgcttgaccgagatggccgcggagaggtgatccgccgcaaagccgggttgccgccggcgacctatttttccggcgggaaattgcaatggatcttagagaacgtcgacggggtaggcgccgctgctgaaaacggtgaagcactcttcggcacccccgatacctggttattgtggaatctgaccggtggtccgcggggtggcgtacacgtcaccgatgtgaccaacgctagccggaccatgctgatggacttagagaagctggattgggacgacgagctgttgtcgtttttttccatccctcgggcgatgttgccggcgatcgcgtcgtcttcaccgctgcagccctacggtgtcactttagcggacggacccgtcggtggtgaagtgccgatcacaggagtcttgggcgatcagcatgcggcgatggttggtcaggtgtgtctagacgcgggggaagcgaaaaacacttacggcaccggcaattttttgctgcttaacaccggtgaggctatcgtgagatccggtaacggcctgttgaccaccgtttgctatcagttcggggatgccaaacccgtctacgcgcttgaaggttcgatcgcggtgactggctcagcggtgcagtggttacgtgatcagttgggcatcatcagcggcgctgctcaaagcgaatcgctggcccgtcaggtcgttgacaatggcggggtgtacttcgtaccggcattttccgggttgttttccccgtattggcggtccgatgcacgaggcgcaattgtggggctatcacggttcaacaccaacgcgcatctggcccgcgcgacgttggaagctatctgttatcagagtcgggacgtggtggacgcgatggcagcagattctggtgtgcgccttgatgtcttgaaggtcgatggtggtatcaccagtaatgacttgtgcatgcagattcaggccgacgtgctgggcgtggacgtggtacgctcggtagttgctgagactactgcgctgggctctgcctatgcggcgggtctagcggtcgggttttgggctggtccgtcagatctacgggccaattggcaagaggataagcgttggacgccgacgtggggcgaggaccagcgtgccgcggcgtatgcgggttggcgtaaagccgtgcagcggacgttggattgggtcgatgtgtcctga

SEQ ID NO: 27833 - DNA, 1056 bp, Mycobacterium leprae
atggctaccagaggtttggcaatcggggtagtgggtgccactggccaagtcggccacgtgatgcgcacactgctcgaacagcgcgatttccgggccgattccgtgcgtttttttgcctcagctcggtcgcagggtcgtaagttggccttccgcggtcagaaaatcgaggtggaagacgctgagacggccgaccccaccggtctagacatcgcgttgttctctgccggtgcatccatgtctcgggtgcaggcgccgcgcttcgccgccgctggagtgacggtaatcgacaattcgtcggcgtggcgcagggatgcgcaagtgccgctggtggtgtccgaggtgaactacaacagggatgtccgggacgcttttccgctgcccaagggcatcattgctaaccccaactgcaccaccatggtctcgatgccggtgctcaaggtgctgcacgacgaagctcagttgttgcgcatggtggtgtcgtcgtatcaagcggtctctggcagtggtctggctggggtagccgagctggccgctcaggtgcgtgcggttatcgacgttgctgagcaactaatacacgacggtggtgtcgtgcaattccccgcgcccagcaagtatgtagcgccgatagccttcaacgtggtgcccctggccggatcgctggtggacgacgactcaggagagacggatgaggaccagaagctgcgctttgagagctgcaagattctgggcattcccgacctattggttagcggtacctgtgttcgggttccggtgttcactgggcattcgctgtcgatcaatgccgaattcgcccggccactgtcgccgcaacgagcccgcgacctgctgggcggtgctccgggcgtgaagctggtcgatgtgccgacgccgttggcttccgctggtgtcgacgaatcactggtcggccgcatccggcgcgacccgggggtacccgacgggcgtggcttggcactgttcgtctctggtgataatttgcgcaaaggcgcggcgctcaatgcgatccagatcgccgagttgctagccacgcagctatga

SEQ ID NO: 27834 - DNA, 1266 bp, Mycobacterium leprae
gtggcgcttgtcgtgcagaagtatggtggatcctcggtggccgacgccgatcggattcgccgtgttgctgagcgcatcgttcagaccaaaaaacagggcaatgacatcgttgtggtggtttccgcaatgggcgacaccaccgacgacctgctagacctagcgcagcaggtatgcccggagccgccggcccgcgagttggacatgctgctgaccgcgggggagcgcatctccaatgcgctggtggccatggctatcgaatcattcggtgcccaggcacgctcgttcaccggttcgcaagctggcgttatcaccaccggcacccacggcaacgccaaaatcatcgatgtcaccccgacccggctgcagttcgcgctcgacgaggggcgaattgtgttggtcgccggattccagggcgtcagccaagacacccgcgatatcaccacgctgggtcgcggcggctcggacaccaccgcaattgccatggccgcggcattaggcgccgatgtatgcgagatctacaccgacgtggacggtatcttcagcgccgacccacgggtcgtgcacaacgcccgcaagctcgacaccgtgaccttcgaggagatgctcgagatggcggcttgcggcgctaaggtgcttatgttgcgctgcgtggaatacgcacgccgccacaacattccggtgcacgtccgatcgtcgtatgcggacaaaccaggcaccgtcatcgttggatcgatcaaggacgtacctatggaagaccccatcctgaccggagttgcgcacgatcgcagcgaggccaaggtgaccatcgtcgggatacccgacatcccgggttacgcggccaaagtgtttcgcgctgtcgccgacgctgatgtgaacattgatatggtgttgcaaaacgtatccaaggtcgaagacggcaagaccgatatcactttcacctgctcccgcgatagcgggcccatcgcggtggccaagctgggctcgctcagagacgagatcggcttcacccagctgctctatgacgatcacatcggcaaggtatcgttgatcggagccggcatgcgcagtcaccctggggtcacggcgaccttctgcgaagcgctggctgctgttggggtcaacatcgagctcatctccacctcggaaatccggatatcggtgctgtgccgcgataccgaactagacaaggccgtctttgcgttgcatgaggcgtttggactcggtggcgaggacgaggtgacggtgtacgcggggacggggaggtaa

SEQ ID NO: 27835 - DNA, 1236 bp, Mycobacterium leprae
gtgtttaccgtccgcgcacgtctagccctggccgccggagcaagcgcgcggtggacatcacgcattaccggacgcggagctgggacaatgatcggcggcctggtagcgataaccttggaccgctcaattctcagccagctgggagcgggccggcgcaccatcgtcgtcaccggcaccaacggcaaatcaacgaccacccggatgactgtggatgcgttgagcacactggcccctggctcagtggcgaccaatgctgaaggcgccaacatggacgctggcctagtggccgcgctagctgcgaatcgtgccgccacactcgcagtactcgaggtcgacgagatgcatgtgccgcgcgtcgccgatgccctcacgcctcacatcgtcgtactgctcaacctgtctcgtgatcagctggaccgcgtgggcgagatcaacgtgatcgaacgcacgctgcgcaccggcctggcccggcacccgacggcagtcgtcatcgccaattgcgacgacgtgctgatgacctcagtcgcctacgacagtccgaacgtggtttgggtggccgcgggcggcacctggtcgaacgactcagtcagctgcccccgcagcggcgaagtcatcgtccgcaaaaatagacattggtattccaccggcgctgatttcaagcgacccagcccacactggtggttcgacgacaacaccctgtatgggcccgatgagttggcgctgccgatgcggctggcgctgcccggctcggtgaatcgcggcaacgccgcccaggcggtggccactgctgtcatgctaggtgccgacgccacaacagcagtagcagcagtgtccaaggtcgacgaagtcgccggacgataccggagcgtacggatcggcgaacacaccacccggatcttgctggctaagaatccggcgggctggcaggaggcgctgtcgatggtggacacacaggccgccggggtggtcatctcgatcaacgggcaggtacccgacggcaaggacctgtcgtggttgtgggatgtgcgtttcgaacacttcgagaagattcccgtggtagccgctggcgaacgcggcaccgacctagctgtgcgcctgagatatgcaggcgtggaacacactctggtgcacgacaccgtagccgcgatcgcctcgtgcccacccgggcaggtggaggtcgtcgccaactacaccgcgttccgtcagctacaacgcaggttggcgcgtcatggctga

SEQ ID NO: 27836 - DNA, 693 bp, Mycobacterium leprae
gtgcggatcgggctggtgttgcccgacgtcatgggcacctatggcgacggcggcaacgccgtggtgctgcgacaacggttgctgttgcgaggcatcgctgccgaaattgtcgagctgacgctcgccgatccggtgcccgagtcgctggacctgtacacgctaggcggcgcggaggactacgcacagcggctggccacaagacacctgctgcggtatccgggcctgcagcatgcagccagttacggcgcacccgtgctagcgatttgtgcggctgtacaagtgctcggccaatggtacgagacagcgtctagggaacgagtcgacggggtgggtttgctggatgtgactaccgcaccgcaagatgtgcgcaccataggcgaactggtcagcacgccgttgctgaccagcttgaaccaacgcctgagcggcttcgaaaaccaccgcggtggcaccgtgctcggcccagctgcgacgccactaggcgcagtggtcaagggagcgggtaaccgagttggtgaccacttcgacggcgtcattcagggcagtgtgatggctacctacatgcacggaccatgtctggcccgtaaccccgaacttgccgacctactgttgagtaaagtggtaggtgagctggcgccactagagctacccgaggtggagttgctgcgccgcgagcgactggcggctcgttag

SEQ ID NO: 27837 - DNA, 612 bp, Mycobacterium leprae
gtgtttgaggggccggtccagaatctgattgacgagcttggcaagctgcctggtattggacctaaaagcgcgcagcgcatcgcctttcacctgttatcagtggaaccgcaagatatcgaccggttgacagccgtgttggtaaaggttcgcgatgacgtgcggttctgtacggtgtgcggcaatgtatctgacgacgagcgatgcagaatttgttctgatacccgtcgagatgcatctgtggtgtgcgtggttgaggaaccgaaagatgtccaggccgtggagcgcacccgcgaattccgcggccgctatcacgtgttgggcggtgcgcttgatccgctatccggaattggtcccgagcagctgcggatccgcgagttgctaagccgcatcggtgagcgggtcgacgatgtgggcattacagaggtgatcattgccaccgaccccaataccgagggtgaggcaaccgccacctatttggttcggatgctgcgcgatatgcccggcttgaccgtgacgcggatcgcgtccggcttgccgatgggcggcgacctggaattcgccgacgagctgacactcggccgtgcgctgaccggccggcgaacgatggtctga

SEQ ID NO: 27838 - DNA, 351 bp, Mycobacterium leprae
atgcaacccggaggtgatatgtcggcgctgctcgcccaggcgcagcagatgcagcagaagctactggaaacccaacaacagctcgcgaacgcgcaggtgcatggtcagggtggtgggggcttggtcgaggtcgtcgtcaaaggcagtggagaagtggttagtgtcgctatcgatcctaaagtcgtcgaccctggcgatattgagaccttgcaggacctgatcgtcggcgcgatggctgatgcttctaagcaagtcaccaaactggctcaggagcgtttgggagcgttgaccagcgccatgcgtccgacggcaccgccaccgaccccaccgacttacatggcaggaacctga

SEQ ID NO: 27839 - DNA, 1836 bp, Mycobacterium leprae
gtgactctgtaccgcaagtatcgaccggcagctttcgctgaggtggtggggcaagaacatgtcaccgagccgctgtctatcgctttggaagccggaaggatcaaccatgcttacttgttctccgggccgcgtggctgtggaaagacctcttcggcgcgcattctggcgcggtcgcttaattgtgcgcaggggaccacggccacgccgtgtggtgtatgcgaatcatgcttgtctttggcgcccaacgcgcccggccacatcgacgtggtggagcttgacgccgccagccacggcggcgtggacgacactcgtgagctgcgcgaccgcgcgttctacgcgccggcccagtcacggtaccgtgtgttcattgtcgacgaagcgcacatggtgaccaccgccggctttaacgcgctactcaagatcgtcgaggaaccgcccgaccacttgatcttcatcttcgccaccaccgagccggagaaggtgctgccgacgattcgatcgcgcacccatcattacccatttaggctgctgtcgccacgcaccatgcgggctttggtcgggcgcatctgtgcgcaggagggcgtcgtcgtcgacgatgcggtgtaccctctggtcatccgggccggtggaggttccccccgggacacgctgtcagtgttggatcagctggtggctggcgcggaaggcgagcacgtgacctaccagcgggcgctgaagttgctaggtgccaccgacgttggacttatagacgacgctgtcgatgcactcggggctcacgatgcggcagcattgtttggtgcggtcgaatcggtgattgatgccggccacgatccacggcgttttgctactgatttgctagagcgattccgcgatctcatcgtcctgcaggcggttcctgatgcggcagcccgtggtgtggtggatgcttcggaggatgtgttagaccggatgcgggagcaagctgtccgaatcggaccggcgacgttgacccgttacgccgaggtggtacactccgggttgggggagatgcgtggtgcaacggcgccgcgtctgcttctcgaagtggtttgcgcgcggctgttgctgccttcggccacggacgccgagtcggcattgctgcaacgggtcgagcgaatcgagacccggctgaacatgtcgatccccgctgccagggcagcatacccgcttcagtcagcgcccgccgagaaggctgcccaacctagtctccctcaccagcctttcctggcttccccggattcccagcccgctccggatgctcagtcttccaaactggctacgccacaggctgccgctgaaccaacccctggcatgggtgcacccaatgcggccgcggtacgaaccatgtggtcgacggtgcgtgagaaggtgcgccagcgcagccgcactaccgaggtgatgctggcgggcgcgaccgtccgcgcggttgaggacaacaccttgattttgacccacggatcggcgccactggccaagcggctgtctgaacagcacaacgtagatgttatcgccgaagcgctcaaagacgcgctgggtgtgaactggcgggtgcgatgcgaggccggcgtacccgtgcctgctgtgggtgcactacccgcttgcgagggaatggttgcgctgcctacccaggagaaagttcctgtccttgacgtggcttctgcccagcagtatgaagatgagggcatgctagctgaacccgggcgtagagacctgtcagcaccgcgtcccgacctggaagaggttgcgctcgaactgttgcaaaacgaactgggtgcccgccgtatcgataaatggctgactgacgcggttgaagactaa

SEQ ID NO: 27840 - DNA, 831 bp, Mycobacterium leprae
atgatcactatgataagtcaaacagtaggactggtacccgcgagcttgcagtacccgaacaattctgttcgggcgctcgtttcgcagactttgttgcagaccaagcggttactcactcggtgggcgcgcgattatgtcaccatcattggtgcgctcgtgttgccgattttgtttctggtggtgttgaacatcgtgctgggtaatctggcttacgttgtaacttacgacagcgggctatacagctttgtgccactaatcacccttggcgccgcgatcactggttcaacattcgtcgctatcgaccttgtgcgcgagcgttccatcggtctgctttcccgactatgggtgttgcccattcatcgggcatcgggtttgcttgctcgaatcctcgcaaacacaattcggactttcgtcaccacccttgtgatgctggttactggggtgatactcggtttccggtttcggcaaggtgtgattgcaagccttatgtgggttagtgtcccggtgatatttggtattgccatcgccgttatggtgactaccgtggcgctttacacagagcaaacattcgtggttgaagcggttgagttggtgcaagcaatcgcggtctttttgtccaccggtctggtaccactaaaccagtatccaggatggattcagcctttagtcgctcatcaaccggtgagctacgctattgcggcgatgcgcggattatcgatgggggggccagtcttagcttcgatggttgctatgctggtgtggaccgcaggcatttgtgcctcctgtgcggtacccctgggagtcggctatcgacgggcgtgtacgcattga

SEQ ID NO: 27841 - DNA, 1404 bp, Mycobacterium leprae
gtgactcactatgatgtcgttgtgctcggagccggtccgggcggatatgtcgctgccattcgtgctgcacagctcggcttgagcacagcagtcgtcgaacccaagtactggggagggatctgcctcaacgtcggctgcatcccgtccaaggtgttattgcacaacgccgaactcgcacacatcttcactaaagaggcgaagactttcggcatcagcggcgatgccagcttcgactacgggattgcctacgaccgtagccgcaaggtgtccgagggtcgcgtcgccggcgtgcacttcctgatgaagaaaaacaagatcaccgagatacacggctacggcagattcaccgacgccaacacgttgtccgttgaattgtcggaaggcgtccctgaaactccgctaaaggtcacgttcaacaacgtcatcatcgccaccggcagtaaaacccggctggtgcctggcacgttgctgtcgaccaacgtgattacctacgaggagcagatcctgacccgggagcttcccgactcgatcgtcatcgtcggtgcaggggccatcggtatagaattcggctacgtcctgaagaactacggtgtcgacgtgacgatcgtggaattcctgccgcgcgcgatgcccaacgaggacgccgaagtgtctaaggagatcgagaagcaattcaagaagatgggcatcaaaatccttaccggaaccaaagtggagtccatctctgacaacggttcgcatgtcttggtggctgtcagcaaggacggacaattccaggaactcaaggccgacaaagtgttgcaggccatcgggtttgctcccaacgtcgacggttacggactggacaaggtcggggtagctttgaccgccgacaaggcggtcgacatcgatgactatatgcaaaccaatgtttcgcacatctatgccatcggcgatgttaccggtaagctgcagctggcccatgttgccgaagcccaaggggtggttgcggccgaggctatcgccggcgcagagactttggcgctcagtgactaccgtatgatgccacgcgcaacgttctgccagccgaatgtggccagcttcgggctgaccgagcagcaagcccgagacgggggttatgacgtcgtagtcgctaagttcccgtttactgccaacgcgaaagcgcacggcatgggtgaccccagcggtttcgtcaagctcgttgcggacgccaagtatggggagctgttgggcgggcacatgatcggccataacgtgtccgagttactaccggagctcacgctcgcgcagaaatgggatttgacggccaccgagctggttcgcaacgtgcatacgcatccgacgctgtcagaggcgctgcaggagtgctttcacggcctaatcggccatatgatcaacttctga

SEQ ID NO: 27842 - DNA, 858 bp, Mycobacterium leprae
gtgcgcgagacaagcaacccggtatttcgttcgttgcctaagcagaggggcgggtacgcccggttcggtactgatgcggccccgatgcagcaggggtactatcaacccgatccatatgccgcgactccctaccaggagactcgtgcttatcaggtttcgcggccactgaccatcgacgatgtcgttaccaggaccggcatgacgctggcggtgttggtggtctcggccatcgtctctttcttcctggtggcatcgaatttcgcactagccaccccgctcaccttggccggcgtttttggcggcttggcgatggtgctggtcgctacctttgggggcaaacagaacagcccggcaatcgtgttaagttacgctgtactcgaggggctgttcctcggcgcggtttcgttcctcttcgccaactttcaggtatcgacagtcaacgctggagtgttgatcggggaggccgttctaggcaccttcggggtgttctttggcatgctcgtcgtctacaagaccggagccatccgggtcaccccgaagttcacccgaatgctggttgcgggaacattcggtgtgctagctttgatgctaggcaattttgtgctggcgatgtttggtttgggtggcggaacaggtctaggtttgcgcagcggcggaccggtggctatcctcttctcactggcgtgtatcggcatcgcggcatttggctttcttcttgacttcgatgcggctgaccagatgatccgcgcgggggcgccggagaaggcggcgtggggtattgctctgggcttgaccgtaacgttggtctggctatatgtcgagatcctgcgtctgcttagttatctacagaacgactag

SEQ ID NO: 27843 - DNA, 984 bp, Mycobacterium leprae
atgaacactctgcacgtcaacatcggcctggcgtgctactccgactgggcgttcacctcggccgtggtggcgttggtggtcgctctgctactgttggcttacgagctagcgtacgttggcagccgccggttagacaaccgcacgcgggtggtgcccgggtcggtcgccgccgacagcgggacccccggtatcgtggtggactctctgcaacggccgttcggcgaacgtgtcgggcaggctgggttggccgtggcctaccttggcatcggtctcttgctagcgtgcatattgctgcgcggcctggccaccctgcgtgtgccttggggcaatatgtatgagttcattaacctgacctgcttctccgagctggtcgccggcgcgatcgtgttgcgtcggcgacagtaccgcccgctgtgggttttcttgctggtgtcggtgttgatcctgctcacgatttccggtcggtggctctacgccaacgccgcaccggtgatcccggcgctgcagtcctactggctgcccatccacgtgtcggtggtcagcctcggctcggggattttcctggtcgccggcatcgccagcatcttgttcctgctgagcacctcgcggctggtggcctccgaccccgaaggtgcaaaggcactggcccggctggtgcggcggttccctgacgcacagaccctggaccggatcgcctatcgaacgacgatctttgcgtttccggtgtttggtttcggggtgatctttggtgcgatctgggccgagcaagcctggggcaggtactggggctgggatcccaaggagacggtttcttttgttgcgtgggtagtatacgcagcttatctacatgccaggtcgaccgcgggatggcgggacaggagggcggcgtggatcaacgtggtcgggtgtgttgctatggtcttcaacctgtttttcgttaacctggtgactgtaggtctgcattcgtatgcgggagtggactga

SEQ ID NO: 27844 - DNA, 789 bp, Mycobacterium leprae
atgaccggcttcaccgagattgccgcagcgggaccgctgttggtggcgctaggggtgtgtatgctagcggggctggtgtcgtttgtctcaccgtgtgtggtgccgctggtgcctggctacctctcgtatctggcggcggtcgttggtgtttctcacgaagagacgcagccaggggccggtgtgatcaaaaccccacctgccgccagatggcgggtggcaggatccgcggtgctgttcgttgctgggttcaccacggtgttcgtcctcgacaccgtcgccgtcctggggatgaccactgtgctgaccacccatcaggtgctgctgcagcgggtcggaggtgtgctgaccatagtgatggggctggtgttcgtgggtttgctccctgccttgcagcgccaggttcagtttagcttgcggcagttgacgacggtggcgggggcgccggtgcttggcacagtatttgcgctcggctggacgccgtgcttagggccgacgttgagtggggtaatcacggttgctgcggccaccgacggcgtaaatgtgacgcgcgggattctactggtaattgcctactgcatgggcttaggaatcccgttcgtgctgttagcgtccggttctgcgcaggcggtggccggcttgaggtggttacggcaatacggccgggccatccaagtctttggcggcatgctcctgatagcgatcggtgcggcactgatcgccggggtgtgggatgactttgtttcgtggctgagggatgccgtcgtcagtgacatgagggtgtcgatttga

SEQ ID NO: 27845 - DNA, 990 bp, Mycobacterium leprae
gtgagcgtcagtggttacccgcggcaccggccgcgccggcttcgctcaacccccgcgatgcgccgcctggtggcgcagacttctctggagccaaggaatttggtgctgccgatgttcgttgctgacggtattgacgagctgcggccaattgcttccatgccgggtgttgtgcagcacacccgggattcgctgcgtcgcgctgctgtcgctgccgtcgatgccggggtaggtggattgaacctgtttggcgtgccccgcgaccaggataaggatgcaactggctcggctggggtagatcccgatggcatcctcaatgtcgctcttcgcgatctggccgaggatctcggtgatgccaccgtgttgatggccgacacctgtctggacgagtttaccgaccacgggcactgcggcgtcctagacgggcagggccgagtggacaacgacgccaccgtggcacggtatgtggaacttgctgtggcacaagcggaatccggtgctaacgtggttggtccgagcgggatgatggacggccaaataggtgcgctccgagacggacttgacagtgcaggctatgccgacgtagcgatcctggcttacgctgcgaagttttcttcggcgttctacggaccattccgcgaggcggtgagctgcagcttgtccggtgaccgacgcacctaccagcaggaaccaggcaatgcccgcgaggcgttgcgcgaaatcaagttggatctcgacgagggtgcagacattatcatgatcaaacccgcttcggggtatctggacgtcgttgctacggcagccggtgtttcgccggttccggtagctgcctatcaagtctcgggggagtacgcgatgatttgcgctgcggccgcaaacaactggattgacgaacgtgccgctgtgctggagtcgttgacaagtatccggcgcgctggggcggatatcgtgttcacctattgggccgctgatgtggcgtgttggctttcttga

SEQ ID NO: 27846 - DNA, 1692 bp, Mycobacterium leprae
gtggtgggagcgacaatgacgacgcgagggcgtaagcttagaccaggtcgcatcacatttgtgggcgccggtccaggagccccagggttactaactgctcaggctgtagcggtgctagcaaacgccgcccttgtttttatcgaccccgatgtacctgaaccggtgctggcgctgattggcaaggacttgccaccggtctctggtccggcgcctgccggtccggctgccgtgaccgccggcagggctgctgacggtaccctcgagggggatcactaccaagccgcaccgatggtcatgtccggaggcgccgacatccgccctgcgttgggtgaccctactgaggtcgccaaaacgctgaccgccgaggctcgttccggtgttgatgtggtgcgcttagtggcgggtgatccgttgacggtggacgcggtcatagccgaggtgaacgctgtggcacgcaccaatctacaaatcgagatcgtgcccggcttggtcaccagcagcgtcgtaccaacctatgccgggctacccttgggttcgtcgcacacggtggctgatgtacgtggcgacgtggactgggaagcgctagccgcggctcctgggccgttgattctgcaagccaccgcatcacatcttgccgacgcggcgcacatcttgatcgaccacgggctggacgacgccacaccctgcgtggtgaccgctcagggcacgacctgccagcaacgttctgtcgaaaccacattggagggattggctgactcggctgtcctggtcggcaccgataccgcaggcccgctgaccgggccgctggtggtgaccataggcaagacggtgaccagtcgagctagactgaactggtgggaaagccgtgcactctacggctggaccgtgttggtaccgcgtaccaaggaccaggccggcgagatgagcgagcggctgacgtcgtacggtgcgttgccggttgaggtgccgaccatcgctgtcgagccgccgcgcagtcccgctcagatggaacgtgctgtcaaggggctggtcgacggtcgtttccaatgggtggtgttcacctccaccaacgcggtgcgcgcggtgtgggagaagtttggcgagttcggtctggatgcccgcgccttctccggggtgaagatcgcctgtgtcggagaagcgactgccgacagggtccgtgcattcgggatcagcccggagctggtgccggctggggaacagtcttccctcggtctactggacgaattcccgccttatgacagcgttttcgacccggtgaaccgtgttttgctgccgcgcgctgacattgccaccgaaaccctggctgagggactgcgcgggtgtggctgggagatcgaggacgtcaccgcttatcggacggtgcgggcggcaccgccgccggcggccacccgggaaatgatcaagacgggtggcttcgatgcagtgtgcttcacctccagctccacggtgcgtaacttggttggtattgccggcaaaccgcacgcgcggacggtcattgcctgcatcggacccaagactgctgagaccgcttccgaatttggtttgcgggtggatgtccagcccgaaaccgccgcggttggaccgttagttgatgcgttggccgaacatgtcgctcgactgcgcgccgaaggcgcgctgcctccaccgcgcaagaagagccgcaggcgctag

SEQ ID NO: 27847 - DNA, 957 bp, Mycobacterium leprae
ttggcccacgtgatccggataggcactcggggtagcttgttagccaccactcaggctgcgctcgttagagacgctctcatagccaacgggcatcctgcggagttggtgatcgtcaataccgcgggcgatcagtcgtctgcgtctatcgacagtctaggtgtgggcgtcttcaccaccgcattgcgtgcggctatcgaagagggctgcgtcgatgctgcggtgcactcgtacaaggatttgccaactgctgacgatccgcggttcacggtagcggcgattcctccacgaaatgacccccgcgacgcagtggtaactcgcgatgagctggttcttgctgaattgccggctggatcgctggtaggcacgtcatcgccgcggcgggcagctcagcttagggcattgggtctcggtttggaaattcgccccctacgaggcaacctagataccaggttgaacagggtaagcagtggcgatcttgacgccatcgtggtggcccgggccgggttggcccggctgggccgcctcgatgaagtcaccgagacgttagatccggtgcagatggtgccagcaccggctcaaggcgcgatcgcggtcgaatgccgcgctggtgacagtcggttggtggcggtgctggcggcgttggacgatgccgacacacgtgcggcggtcaccgcggagcgagtcctgctcgccgaactggaggccggctgctccgcaccggtgggcgcgatcgctcaagtggtcgagtccatcgatggggaaggccgcgtcttcgaagagttgtcgttgcgcggctgcgtggcggcgttggacggatccgacgtgatccgcgcgtccggcatcagcacgtccggtcgggcgagcgagcttgggctagcagttgccgtggagctgtttgagctgggtgcccgggagctgatgtggggagcgcggtcagaccgggcgcgaggaagttga

SEQ ID NO: 27848 - DNA, 1404 bp, Mycobacterium leprae
gtgagcatcttgctcttcggggtttcgcaccgcagtgcgccggtctctgtcttagaacaactcagcctggacagatccgatcagatcaagatcgtcgaccgggtgctgcagtccccgctggtgaccgaggcgatggtgctgtcgacctgtaaccgtgtcgaggtttacgccgtggtggaagcgttccacgcgggattatcagtgattgggcaagtgctgtcggaatactccgcgatgtcgatcggggacctgaccaaatacgcttatgtacgctacagcgaggctgctgtcgagcacttgttcacggttgccagcggtctggattcagcggtggtcggcgagcagcaggtgctgggtcaggtgcgtcgcgcgtatgccgccgctgaggctaatcgcacggtaggccaggtgttgcatgaggtggcccaacgagcgttgtcggtgggtaagcgggtgcattccgaaactgccattgacgctgccggggtctcggtggtgtcggtcgcccttggcatagctggacgcacattgggcgggctggcgggccggatcgcggtggtgattggcgctggcgcgatgggtgcactctcgtcgtcgtacctgacgcaggccaacgtcggacgtatacatgtactcaaccggtcgttgtctcgagcgcggcggctggccggcaagatcggtgaatcgggcgtgccggccgacgtgtggactcttaatcaccttgacgaagcattggcggacgctgacctagtggtcagctgtacgggggcggtaagccccgtggtttcgctggctgacgtgcatcatgcattggccgctatgcgccgtgacgaaacgactcggccgctggtgatatgcgatttgggcatgccgcgtgacgtggatccggctgtggccaaactgcccggcgtttgggtcgtcgatgtggaaggcgtgcagcgtgaaccgtcggcccgtgccagtgccgccgacgtcgatgccgcgcgccgcattgtggcggctgaagtggccacatatctgactaggcagcggatggccgaggtggccccgacggtgacagcgttgcgtcagcgagctgccgatgtggtcgaagcggagttactgcgcctagaccaccggctgccagggctggaaagcgctcagcgcgaggaggtggcacgcaccgtgcgacgggtggtggacaagctgctacacgcgcctaccgtgcggatcaagcagcttgccagtgctcccggcggtgacagctacaccgaggcgctgcgtgagcttttcgagcttgatcagaccgctgtcgacgcggtcgccaccgcgggtgaattaccagtgatggtaagtgggttcagcgataccactaggtacggcacaagccctgcccagagcagctcaaaatatcacgccgagtag

SEQ ID NO: 27849 - DNA, 1326 bp, Mycobacterium leprae
gtgttctcggctctgttgttggccggggtattgtccgggttggcgtttgttgttggtattgtggcaggaatccggctgtcgccgcgactaatcgaacgccggcaaagactggctaacgaatgggcgggcatcactgttttgcagatgctgcaacgcatcatcgcgttgatgccgctaggtgctgcggtggttgatacctatcgtgatgtagtttacctcaacgaacaggccaaggagctaggactcgtgcgcgaccggcagctcgatgaccaggcctggcgggcagcacagcaggcgctgggcggtgacgatgtcgaatttgacctgttgcccggaaaacgcccggctgcgggccggtctgggttatcggtgcacggccacgctcgactgctaagtgagaaagaccgccggttcgccgtggtcttcgtccacgaccagtccgactatgtgcgcatggaggcggctaggcgtgacttcgtagccaatgttagccacgagctcaagaccccggtcggcgccatggccttgctagctgaggctctgctggcatcggcggatgacgccgaaaccgtgagccggttcgccgagaaggtgctcatcgaggccaatcgattaggatacatggttgctgagctcatagagttgtcccggctgcagggcgccgagcggctgcctaacgtaacggacattgacgtcgatatcatcgtgtccgaggcgattgcgcgccataaggtggccgccgacaccgctgctatcgaggttcgcaccgatccgcctagcggtttgcgggtattgggcgaccaaactctactggttaccgcgctagccaatctggtgtccaacgcgattgcctactcgccgggtggttcgctggtgtcgatcagccgtcgccgtcgtggcgacaatatcgagatcgccgtcaccgaccgcggcattggcatcgctcttgaagatcaggagcgggtcttcgaacgcttcttccgcggagacaaggcgcgctcgcgggctaccggtggcagcgggctggggctggccatcgtcaaacacgttgccgccaaccacaatggcagtatcggtgtgtggagcaagccgggaaccggatctacgttcaccctgtctattccggcggccatgccgctttaccaggacaacgatgagcaatccgggcaaccccggggctgcgatatgtggctcaataggccgcaacgagaggaagaagagtttaagtcgatgacacccgcgcaggcgatgatgcagagcgaagtgacgagagggaatgtgaatgataagtgtcctgattgtggaggacgaggaatcgctggctga

SEQ ID NO: 27850 - DNA, 1104 bp, Mycobacterium leprae
atgaaacggagcgctgtcggttcgttctttgccggcgcgcatgtcgcagaggcggtgtcacttgcgccgttgaccacgttgcgggtcggtccggtcgcccagcgggttataacgtgcgccagcactgaacaggtagtcgacgttatacggcagctagacgcaccagccggcggcaggggagctgggccgctgctgatatttgctggcggctccaacctggtgattgccgacacgctggccgacttgactgcggtgcgcttggccaatgccggcatcactatcgacggcaacctagtgcgtgccgaggctggcgcggtctgggacgacgtggtggttagggccatcgagcacgggctcggtgggctggaatgcctgtctggtatccccggatcggctggggccactccggtgcaaaatgtgggtgcctacggcgcagaagtgtctgacacaatcactcgggtccggctgctggagcgcagtagcggctcggttcgttgggtctccgcctgcgagttgcgttttggttatcgtaccagcgttttcaagcaagccgacccgtcagggtcgcaaccgcctgctgtggtgctggaagtcgagttcaagctcgatgcatcggggcagagcgcaccgttgcactatggtgagctggtggccacactcgacgcgactagtgggcagcgcgccaacccacacgcggtgcgcgaggcggtgctggcgctgcgtgttcgcaagggtatggtgctcgatgcggcagaccatgacacctggagtgtcggatctttctttactaatccggtagtagcgccggacgtttaccgtcagctagccaagatggtggacgggccggtgccgcattatccggcgcaggacggcgtcaagctggccgctggctggctggtggaacgggccggcttcggtaagggttatcctgatggtgcagctccatgccggctttccaccaaacatgtgcttgccttaaccaaccgcggtgccgccaccgccgaagatgtggtaactctggcccgcaccgttcgtaatggggtcctagaggtgtttggtatcacactcgaacctgagcctgcactggttgggtgcgtgttgtag

SEQ ID NO: 27851 - DNA, 681 bp, Mycobacterium leprae
gtgcagggccaacctactcggaaacagttggcggcgctggttgaccataccctgctcaagtccgaggcgacccatgctgatgtggctgctcttgttgccgaagctgttgagctgggcgtctacgcggtgtgtgtctccccgtcgatggtgccggccgccgtcgaagccggtgcgggtggtttgcgggttgctacggtggtcgggtttccgtcgggcgagcatgtgtccattgtcaaggcgcaagaggcagttcaggccgtagcatccggtgcaactgagatcgacatggtcatcgccgtcggtgctgcgttggctggagacctcgatgcggtgcggtccgatatcgagatggtgcgctccgctatagccggtgtcgtactcaaggtgattgtggagtcggcggtgctgttgggccaggcaaacgaacgtacgctggctgaagtgtgtcacgtcgcggaagccgccggcgcggacttcgtcaagacctcgactgggtttcatcccgctgggggagcgtcggtgcgtgctgtcacgctgatgaccgaggccgtcgggggccggctaggggtcaaggccagcggcggcatccgtaccgccgttgacgcgatcgcactgctggacgctggtgccacgaggctgggcctgtcttccactcgagaagtgctggatgggctcagctaa

SEQ ID NO: 27852 - DNA, 864 bp, Mycobacterium leprae
gtgagtgatgcagcgatccagcgagtaggggttgttggggcggggcagatggggtcgggcatcgctgaagttgctgttcgtgccggtgttggcgtgacggtgtttgaaaccactgacacgttagtcaccgcaggacgcaaccgcattgtgaagtccttggagcgtggcgttagcgcaggcaaggtgacagagcgcgagcgcgacagtgcccttggccatctggtcttcaccacagacctgaatgacttggccgaccggcaattggtgattgaggccattgtcgaggacgaggctgtcaagacgaaggttttcgccgaactcgaccgagtcattaccgatcccgatgcggtgcttgcgtcgaacacctccagcatcccgatcatgaaaatcgctgcggccaccaagaacccacaacgagtcctgggcctgcacttcttcaacccagtaccagtgctacccttggtcgaattggtcagcacgttggtcaccgatgaagccgctgccactcgtgccgaagagtttgccagcggagtacttggcaagcaagtggtgcgctgctcggaccggtctggttttgtggtcaatgctctactggtgccttatttgttgtcggcgatccggatagtcgaagctgggtttgccaccgtcgaagatgtcgacaaggctgtccttgccgggctgtcgcacccgatgggcccgctgcggctctccgatctcgttggcttggacaccctaaaactaatcgcggacaagatgttcgaagaatttaaagaaccgcactacggtccgccgccgctgttgctacgtatggtcgaggcgggcctgctaggtaaaaaatcgggtcagggtttctatacgtactga

SEQ ID NO: 27853 - DNA, 540 bp, Mycobacterium leprae
gtggccgaacttgaccgaaaggagttggctgatctggtgcgccggctgtcggtagtgcaagggtgcgtcacgctgtcgtcgggcaaacaggccgaccactatgtcgatttgcgccgcgccaccttgcaccaccgggcctcagcgctgatcggccggctgatgcgcgaacttacaaaagactggaactacacggtggtcggcggcttgaccttgggtgccgaccctgtagcgatagctatcatacactcgcctgggcgtccgatcgacgcgttcgtggtacgcaagtacgcgaaaacccatggtttacaacgtcttatcgagggatctgaggtatctggtcagcgtgtgttggtggtggaggacacgagtacgaccggggcttcggcactgacagcggtgcgcgcggtacaagacgcgggcggcgacgtggttggcgtggccaccgtggtggaccgcggtaccggcgcggccgaggccatcaaagctgaaggactgctctaccgtagcgtgctgggccttgccgatttgggactgggctag

SEQ ID NO: 27854 - DNA, 2547 bp, Mycobacterium leprae
gtggactctttcaacccgaccaccaaaatgcaggtggctctaacttcagcgctgcaggcagcgtcgtccgcaggtaatcccgagatcagacctgtgcatttgctattggcgatgctcatgcaaaacgacggaatcgccgcaccgttgttggagactgtcggtgtggagcccgacatcgttcgcaatgaggcacagcggctcctggagcgattaccccaggccagcggctgcagctcgcagccgcagttgtcgcgagagtcgttggctgccatcaccaccgctcagcagctcgctaccgagatggacgacgagtacgtgtcgaccgagcacctgatgctagggttagccatgggcgactccgatgtcgcgaagctgcttaccgggcacggtgcctcgccgcaggtgttacgggaggcgttcgtcaagatacgtggcagtgcccgagtcactagctccgatcccgagttcacctatcaagcgttggagaagtactccacagatctgaccgcccagtccggcgaaggcaaacttgacccagttatcgggcgcgacaacgagatccgtcgtgttgtgcaggtgctgtcccgtcgcaccaagaacaacccggtgcttatcggcgagcctggtgtcggcaagaccgcgatcgtggagggcttggctcagcgcatcgttgccggcgatgtgccggagagcctgcgtgacaagaccttggtagcgctggatctcgggtcaatggtggctggcgccaagtatcgcggcgagttcgaacaacgactcaaggtcgtgctcgacgacatcaaattctctgctggacagatcatcacgtttatcgatgagttgcacactatcgtcggagccggtgcgactggtgagtcggcgatggatgctggcaacatgatcaagccgatgctggcccgtggcgaattgcgcctggtcggcgccaccacgcttgacgagtaccgcaggtacatcgagaaggatgcagcgctggagcggcgcttccagcagatcttcgtcggcgagccgtcggtggaggacactgttggcatcctgcgtgggctgaaggaccgttacgaggtgcaccacggtgtgcgcatcaccgactctgctctggtagctgcggcagccctctccgaccgttatatcaccgcccggttcctgccggacaaggccatcgacctggtcgacgaagcggctagccggttacgcatggagatcgactcgcggcctgtcgagatcgacgaggttgagcggctggtgcgtcgcttcgagatcgaagagatggctcttgtgaacgaagaagacgaagcatccaaggagcgtttggagacgttgcgtgcggaactggctgaccagaaggagcggctcgccgagctaaccgcgaggtggcagaatgaaaagaacgcgatagatgtcgtccgagaacttaaggaacagttggagacgttgcgcggggaatccgagcgtgctgagcgtgacggtgacctggccaaggccgctgagctgcggtatgggcgcatccccgaggttgaaaagaagctggaagcggcggtgccgacggcccaggcccgcgaggacgtgatgctcaaggaagaggtcggtcctgacgatatcgccaacgtggtgtcagcgtggaccggcataccggctggccggttgttggagggcgagaccgccaagctgctgcgtatggaggacgaactgggcaagcgtgtggtcgggcagaagaaggcagtgcacgcggtctctgacgcggtgcgacgctcgcgggccggggttgccgaccctaaccggccgaccggctcgtttttgtttcttggcccgaccggtgtcggcaagaccgagctggccaaagcactggctgatttcctgtttgacgaccagcgcgcgatggtccgtgtggacatgagcgagtacggtgagaagcattcggtggcccgtctggtgggtgcaccgcccggctacattggccacgatcagggtggtcagctgaccgaggcggtgcgccgacggccttacacggtggtgcttttcgacgaggtcgaaaaggcccactcggatgtcttcgatgtgctactgcaggtgctcgacgaaggccgtttgactgacgggcagggccgcacggtcgactttcgcaacacgatccccatcttgacctccaacctggggtcgggcggcagcgaggagcaggtaatggcagcggtgcgctcggtgttcaagccggagttcatcaaccgcctcgacgacgtactgatcttcgacgggctcaaccccgaagagttggtgcggattgtcgacattcagcttgagcagcttggcaagcggctcgcgcagcggcggcttcaactggaggtttcgttgccggctaagcgctggttggcacagcacggcttcgatcctgtatacggcgcccggccattgcgtcgactggtacagcaagcgatcggcgatcaattggctaaaatgctgctggccggcgaggtgcatgacggggacacccttccggtcaacgtcagacccgacggggaggcgttgatcctgggctga

SEQ ID NO: 27855 - DNA, 1863 bp, Mycobacterium leprae
atggctcgtgcggtcggcatcgacctcgggaccaccaactccgtcgtctccgttctggagggtggcgaccccgtcgtcgttgccaactccgaggggtcgaggaccactccgtcaactgtcgcgttcgcgcgtaacggcgaggttctcgtcggccaacccgccaaaaaccaggcggttactaacgtcgaccgcaccatccggtctgtcaaacggcacatgggcagtgactggtccatcgaaatcgacggcaaaaaatacaccgcgcaggagatcagcgcccgcgttctgatgaagctgaagagggacgctgaggcttacctcggtgaggacatcaccgatgcagtcatcaccacaccagcctactttaacgacgcccagcgtcaggctaccaaggaagccggccagatcgccggtttaaacgtactgcgtattgtcaacgagccgaccgccgccgctctggcctacggtctagacaagggtgagagagaacaaaccatcctggtgttcgatctgggtggcggcaccttcgatgtttcgttgctggaaatcggcgagggcgtggtcgaagtgcgtgccaccagcggtgacaatcacctcggtggcgacgattgggacgaccgtattgtcaactggctcgtcgacaagttcaagggcactagcggtatcgatctgaccaaggacaagatggctatgcagcggctacgtgaggctgccgagaaggccaagatcgagctcagctcgagccaaagcacctcggttaacttgccctacattaccgtcgattcagacaagaacccgctattccttgacgagcagcttattcgcgccgaattccaacgcatcacccaggatttgctggaccgcacccgtcagccgttccagtcggtggtcaaggacgccggtatttcggtttctgagatcgatcacgtcgtgctggtgggcggttcgacccggatgcctgcggtgaccgatcttgtcaaggaactcactggtggcaaggagcccaataagggtgtcaaccccgatgaggtcgttgctgttggtgctgcgttgcaggccggtgtcctcaagggtgaggtgaaagacgttcttttgcttgatgttacaccactgagcttgggtatcgagaccaagggtggcgtgatgaccaagctcatcgagcgcaataccacgatccccaccaagcgctcagagaccttcactactgccgacgacaatcagccgtcggtgcagatccaagtctaccagggtgagcgcgagatagcttcgcacaataagcttctcggctctttcgagctgaccggtattccaccggctccgcgcggtgtcccgcagatcgaggtcactttcgacatcgacgccaacggcatagttcacgtcactgccaaggacaagggcactggcaaggagaatacgatcaaaatccaggaaggctccgggctgtccaaggaagagatcgatcggatggtcaaggatgctgaggcgcacgctgaggaggaccgcaagcgtcgcgaggaggccgacgtccgcaaccaggctgagacgctcgtgtaccagacggagaaattcgtcaaggaacaacgggaaaccgagaatggttcgagggtgcctgaggataccctcaacaaggtggaagccgctgtggcagaagctaagacggcgcttggcggtaccgacatttccgcgataaagtcggcaatggagaagctgggtcaggactcccaggcactggggcaggcgatctatgaggccacccaggctgcgtcgaaggtgggcggcgaggcttccgcgcctggtggctcgaactctactgacgatgtggttgacgcggaggtggtcgacgacgaacgggagtccaagtga

SEQ ID NO: 27856 - DNA, 2643 bp, Mycobacterium leprae
gtgaccacgcagatgctgatcagaatggtgctaggcctgagtatgaccgcggtcgtgctgctgttcgcggcacgtcgcgtcttgtggctatacaagctgaccatgtccggtcaaccggccaacggacgcaccgacgagctaggcacccgaatctggacgcaaatcaccgaggtcttcgggcaacggcgactgttgcagtggtcactgccaggtttgacgcacttattcaccatgtggggcttcttcatcttacttacggtctacatcgaggcctacggcgtgctattccagccgaacttccacctcccgatcatcggccgctggaacgcgataggcttccttcaggacttttttgcgctagctgtactgactagcaccgtcacgttcgcgattatccgcatgcgtaacgagccaaaagaatacggccgcaagtcccgcttctacggatcccataccggcggtgcgtggttgatcctgttcatgatcttcaacgtgatttggacgtatgccgtttttcgtggggcatcggtcgatgcactcggcgaggcgttcccttacaacagcggcgcattcttctcgcacgccatagccgcagtgctgtatccgttgggtcaaggtgctaaccagatcatcgaaaccgttgcgctgttgctgcacataggcgtcatgctggccttcctgctgatcgtgctgcactccaaacacctgcacattttcctagcgccgatcaacgtcacgtttaaacggctgcccgacgggctgggcccgttgatgcccatggaatcggacggcgaaccaatcaacttcgaggatcccagcgaggacgctgttttcggtcgcggcaagatcgaggatttcacctggaaagccatgctcgactttgccacctgcaccgagtgcgggcgctgccagtctcagtgtccggcctggaataccggcaaacccctgtcgcccaagctcgtaatcatggacctgcgcgaccactggatggccaaggctccctacatcctgggagagaaaacagcagaaaagctggagggtctcaacctcgagacgaccaaagacaagagccgccatgtgccggaatccggattcggccgggtgcctggacacgggcccgaacaggcgactcgtccgttggtcggcactgccgaacaaggcggagtgatcgatcccgacgtgctgtggtcctgtgtcacctgcggcgcctgtgtcgagcagtgtccggttgatattgagcacatagatcacattattgatatgcgtcgctaccaagtaatgatggagtcagagttcccctccgagttgtccacgttgttcaagaacctggaaaccaagggcaacccgtggggacaaaacgctggagatcggaccaactggatcgacgaggtcgatttcgacgtaccggtctacggggaggacgttgacagcttcgacggctacgaatacctgttctgggtcggctgtgccggagcctacgacgacaaagccaagaagaccactaaagccgtcgccgaactgctggccatcgccggggtaaagtacctggtgctaggcaccggcgaaacgtgcaacggcgactcggcgcaccgctcgggcaacgaattcctgttccaacagctggccgcccaggccgtcgagatcctggatgggcttttcgagggtgtgaatagcgtcgaccgcaagattgtcgtcacctgcccgcactgcttcaacactatcggcaaggaatatcgacaactgggcggcaactacactgtgctgcaccacactcagctgctcaactggctagtgcacgacaaaaagctggtcccggtcacgccggtgtcccaagacatcacctaccacgacccgtgctatctaggccggcacaacaaggtgtacgaggccccgcgtgaactggtcagggccgcgggagccaacttcaccgaaatgccacggcacgccgagcgcagcttctgctgcggcgcaggaggcgcgcgtatgtggatggaagagcacatcggcaagcggatcaaccacgaacgcgtcgacgaggcgctagccaccaacgccaccacgatcgccaccgcgtgcccgttctgtcgggtgatggtcaccgacggtgtcaacgaccggcaggaagaagccggtcgcagcggcgtcgaggtgcttgatgtggcccaggtactactcggctcactcgactacgacaaggcgaaactgccggcgaagggcacggccgcagcagagatcaccaaaactgccggactttcccccgccaaacccactgagtctgaggcgccagcgccggagaagagcacccaagctgcagcatcagccgcacccgccaaaggaataagactggccgccggagccaagcaacctgacgccaaaaaaccagtatctcaaaccacgtcagctaaagcaaccgaggcaccggctgccacagtacccgttaaggggctcggtatagctggtggcgccaagcgacccggagcgaaaaaaagccctgaccaagccgaaactcccgcacccaccgagtcgaaatcggaagcaaagccggaaccgtctgaccatgccgatggcaacccggctccgccaaccgcgcccgtcaaaaggctgggcatcacacggagcgcacgtccgccgggcaagcactga

SEQ ID NO: 27857 - DNA, 1647 bp, Mycobacterium leprae
gtgaccaagcttcggcactaccttgagcgtggcgccgccgaggtacattacctgcgcagcatcttcgaatcgggcgcgctcgggttcgagccgccgctcacctacgccgcaatggccgtcgctatgagaaagtggggcgatctcgccatgctgccggcgatgccggctaggcgctctccacaccgcgcggcgctcatcgacgaagaggggacactaacctacaaggagttagacagggcagcccacgcgttggccaatgggctaattgccaagggagtccgcggcggggacggcatcgccatcttggcacgcaaccaccgctggtttgtcatcgcgaactacggctgtgcgcgagtgggcgcccgcattattttgctcaatagcgaattctctggcccgcaaatcaaagaggtgtcggagcgcgagggagccaaggtaatcatctacgacgacgagtacaccaaagttgtcagcaaagccgaaccggcactcggcaaattgcgggcgctcggcgtcaacccagacgaagaggaaccgccgggcagcaccgacgagacgttagcggagttaatcgcgcgcagtagcagcgcgccagccccgaaggtacgtaagcgcgcctcgatcatcatcctgaccagcgggacgaccggcacccctaagggagccaaccgcaatacccccgcatcgcttgcgccactcggtggcatcttgtcgaaggtcccgttcagggcgcacgaggtgacgttgctgccggcgccgatgttccacgctctggggtatctgcacgccacgcttgcgatgttcctggggtcgacgctggtgctgcggcgccggttcaagccggcgacagtgctcgaagacatcgaaaaacaccaggcaacagccatggttgtggtgccggtcatgctgtcgcggatcctcgacacgctcgagaacttggagaccaagtccgatttgtccagcttgcgtgtcgtgttcgtatctggatcgcaactgggtgccgaactagccacacgcgcgctcgaggaactcggccccgtcatctacaacatgtacggttcgaccgagatcgcgtttgccacgatagcaggacccaaggacctgcaaatcaactcggcgacagttggtccggtagttaagggcgtcaaggttaagatccttgacgatagcggcaaagaagtgccgcgaggccaggttggtcggatcttcgtagggaacgccttcccattcgagggttacactggcggcggtggcaagcagattatcgatggcctgttatcgtcgggcgacgtcggctacttcgatgagcatgacttgctgtatatcagtggccgtgacgatgagatgatcgtttccggcggcgagaacgtgttccctgccgaagtcgaggatctgatcagcgggcatcctgaagtggtggaggccaccgcgatcggtgttgacgacaaggagtggggcgctcggctgcgtgcattcgtggtaaagaagcaggacgccactattgacgaggacgcgatcaaagcctacgttcgcgatcacttggcccgctacaaggtgccgcgagaagtgatcttcctcgaagagctaccgcgtaaccccaccggcaaggtcctcaagcgcgaactccgcgatttcgaggttcattaa

SEQ ID NO: 27858 - DNA, 1374 bp, Mycobacterium leprae
atgctcggagagacacggagattacaagtggcccctgcaagttctgtggcaagtgacaagactattcagaggaccacgttcgctaagcaaagagtcgccgtgttgggcggcaataggatcccgttcgcgagatcaaatggcgcctatgccgaagcgtccaaccaggacatgttctccgcggctctaagtggtctggtggaccgattcgggctggccggcgaacgattggacatggtgatcggcggtgctgtgctcaagcacagccgcgacttcaacctgatgcgtgaatgcgtgttggggtcgcaactgtcgccatacacacctgcgttcgacctgcagcaggcttgtgcaactggtctgcaggcggcgattgtggcagctgatggcattgcagctggccgctatgaggtggccgttgccggcggagtcgacaccacttcggacgtgccgatcagcctgggtgacaacctgcgccgcaacctgctgaagctgcgccgatccaaatccaacgtgcaacggctgaagctggtgggcgcattgcctgccaatatcggggtcgaaatccccgccaacagtgagccccgcactgggctgtccatgggagaacacgccgccatcaccgccaagaaaatggggatcaagcgggtcgatcaagacgagctggctgccgctagccatcgcaatatggcctccgcttacgatcggggcttcttcgacgatctggtcacgccgtttctggggctctaccgcgatgacaatctacggcccaactctcatgtggaaaagttagccacgttgcgcccggttttcggagttcaggccggtgatgcgacgatgacggcgggaaattctacttcgctgaccgacggcgcttcggtagcgttgctcgccaccgagcaatgggttgctgcgcattcgttgaccccgtttgcttactgggtagatgcggagatcgccgcggttgattacgtcagcggaaatgacggcctgctgatggcgccgacttacgcggtacctcggctgttagcccgcaacgggctgagctttcaggatttcgacttctacgaaattcacgaggcatttgcctcggtggtgctggcgcatttgcaggcgtgggagtccgaggagtattgccggcagtgtctgggcctcgataccgctcttggcccgatcgaccggtccaagctcaatgtcaatggttcatcattggctgccggtcatccctttgctgccacgggtggacgtatccttgttcagactgcaaaacaacttgctgagcagaaggcaacgcaaaaaggttgcgggccgatgcgggctttgatttcggtctgtgccgccggcggccaaggtgtagctgtgattctggaggcttga

SEQ ID NO: 27859 - DNA, 1164 bp, Mycobacterium leprae
atggcttttccgcgcactctgattgtgcttgctgccgcctcggccctggtggtgacttgtggccacgatgttgcacaggctcctgactcggcgtcgatcgtagccggggagcttaccgccgccgcgctgacaccggcgtgcgtcgatctcccggcatctgtgccggggaccctgtccacccgcgacaagctggcccagctgctgatggtaggcgtacgtgatgcggccgatgccaaggccgttgtcaccgatcaccacgtcggcggcatcatgatcggcagctggacagacttgtcgatgttgatcaacggcgcgctgacagacatcgcccgcaatccgggaccgctgccgctggcggtcagcgtcgatgaagaaggtggtcgggtgtcgcggttgaagtcgctgataggtatggcgccttcggctcgggtgctggcacagaccagcactgttgaccaggtctacgacatggcgctggaccgtggtcacaagatgcgcgatttggggatcaccatcgatttcgccccagtcgtcgacgtgaccgacgccccggacgacagcgttatcggtggccgctcatttagctcggacccggccgtcgttacagcctacgctggggcgtacgcgcggggtctgcgtgacgctggcgtgctgcctgtactcaaacattttcccggtcatgggcatggttcgggagattcgcacactggcggtgtcaccacgccgccgctgcaagacctgcaaaccaacgacttggttccttaccggacgttggtggccgatgccccggtcggagtgatgctcggtcatctggacgttcccgggctgaccggtgacgacccagcgagtttgagccccgccgcggtgcagttgctgcgcactggcgctaactacggggccccacctttcaatggtccggtctttagtgacgatgtgtccagcatggctgcgatttctgaccgctacgggctggctgacgctgtgctacgcaccttgcaagctggcaccgacatcgcgctgtgggtcagcacccagacagtgcctgcagtcttggaccggctagagaaggtggtatccgcgggcgaattagcgatgtcggccgtcgacgcttcagtcgtgcgggtagccaccataaaaggtcccggcccggggtgcgggcgctag

SEQ ID NO: 27860 - DNA, 1374 bp, Mycobacterium leprae
atgtcgatcgccaccatcaacccggccaccggcgagacggtcaagacctttacaccgacaacccaggatgaagtcgaggatgcgattgctcgcgcctatgcgcggtttgacaactaccgtcacactaccttcactcaacgggccaagtgggctaacgccaccgccgacctgctcgaagctgaagccaaccaatccgccgccctgatgaccctcgaaatgggtaagacgctgcagtcagctaaggatgaggcaatgaagtgcgccaagggttttcgctactacgctgagaaagccgaaacgttgctcgcagatgagccggccgaagccgccgccgttggtgcgtcgaaagcattagcccgttaccagccgctcggtgtggtactggctgttatgccgtggaactttccgctgtggcagactgttcggttcgctgcaccggcgctgatggcaggcaacgtcggcctcctaaagcacgcgtcaaacgtgccgcagtgcgcgttgtacctcgccgacgtcattgcccgtggcggctttccggaggactgtttccaaacgctgctcatctcggccaatggtgtcgaagccattctgcgtgatccccgggtcgcggcggccaccctcaccggtagcgaaccagccggccaggcggtcggcgccattgcgggcaacgagataaagcccactgtgctagagcttggcggcagcgaccctttcatcgtgatgccctcggcggatttggatgcggcagttgccaccgcggttaccggacgggtgcagaacaacggccaatcctgcatcgccgccaagcggtttatcgcccatgccgacatttacgatgagttcgtcgaaaaattcgtcgccaggatggaaacgctgcgagtgggtgaccctaccgacccggacaccgacgtcggtccgctggccactgagtcgggccgcgcccaagtcgaacaacaagtcgacgccgcagcagcagcaggcgcagtgatccgttgcggcggtaaacgtcccgaccggccggggtggttctacccaccgaccgtgattaccgacatcaccaaggacatggcactctacaccgacgaggtctttggtccggtcgcctcagtatactgtgccacaaacatcgacgacgccatcgaaatcgccaacgctaccccctttgggttgggttccaacgcttggacgcagaacgagtccgagcaacgacacttcatcgacaacatcgtcgccgggcaggtcttcatcaacggtatgacggtatcctatcccgaattgccgttcggcggtatcaaacggtcaggctacggccgagagctgtcgacccatgggatccgtgagttctgcaacatcaagacagtttggatcgcatag

SEQ ID NO: 27861 - DNA, 1398 bp, Mycobacterium leprae
atgtctcaaccgcagccacgacacgccccgttcgcacctacccgtgatgcaaaagcgatacggactgtgcggttctgggcgtcaccgatcgtcatcacgttgtcgctcatgtcggcactggctgcgctgtatctgggcggaatcttgaatccgacaaccaacctgcagcatttccccctcgctgtggtgaatgaggatgccgggccagcgggtgcacagattgtcgagggcctgctagccggattggataagaacaagttcgacgtccgcgtggtttcctgtcgagaagcacagcagctgctggacagcgctggggtgtatggctcggcggtcataccgccgagcttttcatctcagctgcgggatttcgggaccagcgcggttctgcccacccatgcagataggccggtaatcatggtctcaaccaacccacgtgcaggcgcgctgggatctagtatcgccggacagactcttacccaggcgattactatggtgaatagcaaagcgggccaacgacttacagctgaggtagcagctcaaaccggcggggcacacctgaccggagcggcggcactaggtctgaccagtccaatcgatatcaaattagccatttacaacccgttgccaaatggcactggcaacggcctatcggctttctactacgcccttttgctgctgctaacaggttttaccggcagcattgtggtcagcacgctggtagactcaatgcttggctacataccgaccgaggttggaccggtgtatcactacgccgagcagatcaatatctctcgcttccacacactggtagtaaaatggggtctgatggtggtgctggccctgatcacatcggcggtctacttggccatcgcccacggacttggcatgcccattccgctcggctggcaattgtggctctacggggtatttgcaatcagcgcggtgggtatcacgtccagctcgctgatcgcggggctgggctcgatgggtctgctggtcagcatgtttatcttcatgattctcggattaccgtcggcaggcgccacggttccgctggaggcggtaccgccgttctttcgctggctgtctgaattcgagccgctgcaccagttgtttcttggcgttcggtcgctgctgtatctcaagggtcatgcggattccggtatgtcgcaagcattgttcatgacggctctaggcatggccattgggctgttgttgggtggtgtcgttacgcgcatctacgaccgtgggggctgccaccggattccaggggcagtcgggatggcgatcgccgaatggcaccaagcgcaacaccaagcgcgcttaagaccaaacaaaagtggcaagcgaccaaacgtaattccaacgcagccgaagtgtcatctgcctgttatttaa

SEQ ID NO: 27862 - DNA, 840 bp, Mycobacterium leprae
atgactatcactcgcactgagcggaatttttacggcgtcggcggcgtacggattgtctatgacgtatggatgccggacacgcgcccgcgagcggtgattatactggcccacggtttcggcgagcatgcccgccgctacgaccatgtcgcccattactttgccgcagcggggttggccacctacgcgcttgacctccgcggacatggacgttcggccggcaaacgagtcctggttcgagatttatccgagtacaacgctgacttcgacatcctggtcgggatcgccacccgcgaccatcctggcctcaagcgcatcgtggcggggcacagtatgggtggggcgatcgtattcgcttacggtgtagaacgtccagacaattacgacttgatggtgctatcggggccagcagtggcggcccaagacatggtgtcgccgctgcgcgcggtggtcggcaaggggctcggactcgttgcacccgggctgcccgtacatcagcttgaggtcgatgccatatctcggaatcgcgcggtggtagcagcctacaaagacgacccgttggtgtatcacggcaaggtcccggctggtgttgggcgcgtgatgttgcaggtcggcgaaactatgacccgccgggcaccggtgctgaccacgccgttactggtagtgcacggttcagaggaccggcttgttctggtcgacggtagccaccgtttggtcgaatgtgtgggatccaccgatgtcgagttgaaggtctaccctggattatatcatgaggttttcaatgagccggagcgtgaccaggtgctcgaggatgtggtttgctggatcttgaaaaggctctaa

SEQ ID NO: 27863 - DNA, 1695 bp, Mycobacterium leprae
atgatgccccctgacatcaaaccccgcagccgcgacgttaccgatggcctggagaaggccgctgctcgtggcatgttgcgcgcagtcggcatgaacgatgacgacttcgccaaggcgcagatcggagttgcgtcatcatggaacgagatcacaccttgcaatctctcgctggaccgcctggccaaggcggtcaaggagggggtattctcggccggcggttatccgcttgagttcggaacaatttcggtttccgacggcatctcgatggggcaccaggggatgcacttctcgctggtgtcgcgcgaggttatagcggacagcgtcgaaaccgtaatgcaggccgagcgcctcgacggctcagtgcttttggctggctgcgataaatcactacccggaatgctgatggccgccgcacgtctcgacctcgcgtcggtatttctctacgccggctcgatcttgcccggacgaaccaagctctccgacggcaccgaacacgaagtcacgctcatcgacgcattcgaagcggtcggcgcgtgttctcgcggattaatgccccgcgctgatgtcgacgccatcgagcgggcgatctgccccggcgagggggcatgcggtggcatgtacactgccaacactatggccagcgcagcagaggcgctgggtatgtccttgccgggcagcgctgcgccgccggcaacagaccgtcgccgtgatggcttcgcgcggcgtagcgggcaggccgtcatcgaactgctgcgtcgcggtataaccgctcgcgacatccttaccaaggaagcgtttgagaacgcgatcgcggtggtgatggcgttcggtggctcgaccaacgcgatcctgcatctactggccattgcccatgaggccgacgtcaccttgtcgctcgaggacttcagtcggatcggatttaaggtgccgcatatagccgacgttaagccgttcggccggcacgtgatgttcgacgtcgaccacatcggtggtgtgccggtggtaatgaaagcacttctggacgcaggtctactgcacggtgattgcctgacggtgaccggtcagacgatggccgagaacctagcctccattgccccgccagacccggatggccaggtgatccgcacgttgcataatccaattcatccgacgggaggcattacgatcctgcgtggatcgttggcacctgatggcgcggtggttaagacggctggactcgactccgatgtgttcgaaggaactgcaagggttttcgacggagaacgggccgcgttggacgcactcaaggacggcaccatcgccaaaggcgatgttgtggttatccgctatgaaggcccgaaaggcggcccggggatgcgcgaaatgctagccatcaccggtgccatcaaaggtgccgggctaggcaaagatgttctgctacttactgacggcaggttctctggcggaacgaccggcttttgcgtaggacacatcgcgccggaagctgtcgaagcgggaccaatcgcattcctgcgtgacggcgaccgggtcctgctagacgttgtcggctgctccctcgatgtgctggtcgatccagtcgaattttcctctcggaaaaaggatttcattcctcctgcgccacgctacaccaccggtgtgcttgccaagtacgtcaagctcgtcagttcggcgacggtcggcgcggtctgcggttag

SEQ ID NO: 27864 - DNA, 408 bp, Mycobacterium leprae
atgctagatcatcggcgatcgcgccgaagttggcaaccaaggtcgatcgtaagccagatgttgagcgcggtattaggttggcttggcgagggactgaatgaggatacggtgcgggaagatgacaatcgctacggatattcgcagcagaagggcaactacgctaaaagactgcgacgtatcgagggacaagtgcggggcatcgcgcgtatgattgatgaggacaagtattgtatcgatatcctcacccagatcagcgctgtcagtaatgcattgcggtcggtggcgcttaatctactcgacgaacacctggaatactgcgtcagccgtgccgtcgccgagggaggcagtgaggccgaggacaaatttgccgaagcctcggccgctatcgcacgccttgttcgttcctga

SEQ ID NO: 27865 - DNA, 1104 bp, Mycobacterium leprae
atgacagaagcgcaaacgacggttggagtggtcgccgagtccggttccgacgagcggcgcgtcgctttggtgccaaaggcagtagcgtctctagtgaacagcggtctagcggtcgtggtcgagtccggggcgggcgaaggtgcattgcttcccgagcagctctacacagaggccggcgctcgcatcggggacgcgtgggctgccgacatcgtcgtcaaagtggcgccgccggctgcagccgaggtcggccgactgcgccgcgggcagacgctgatcggcttccttgcgtcccgcaatgccgacaactggatcggcgagttgaaacgagctggtgtgcaagcgttcgcgctcgaggcaatcccgcgcatctcgcgtgcacaagtgatggatgcgctgtcgtcgcaggctaacgtgaccgggtataaagcagtgttgcttgcggcttctgagtctacccgatttttcccgatgctgacgacagctgcaggaacggtgaagccggccatcgtgctggtgctcggcgtcggggtggcaggtttgcaagcgctggcgacggccaagcgccttggcgcgcgcaccaccggctacgacgtgcgtcctgaggtggccgagcaagtccggtcggtgggtgcccagtggcttgacgtaggaatcgaggcttccggtgcgggcggatacgcccgtgagctcaccgccgacgaacgcgctcagcaacagaaggcattggaaaaggcgatcagcggattcgacgtggtgattaccacagcgctggtcccgggcaagccggcaccgcggttggtgaccgctgcggcggtggaggcgatgaagcctggcagcgtggtggtggacctcgcgggggaaaccggtggcaattgcgagctcactgaacccgggcagacggtgatcaagcatgatgtcactattgcggcgccgctgaatctgccggcaacgatgcctgagcacgccagcgagctctacagcaagaacatcaaggcgctgttggacctactaataaaggatggcaagtttgccccggactttgacgacgaagtcgtcgcggagtcatgtgtgactcgcgatcgagaggactccatagatgtatga

SEQ ID NO: 27866 - DNA, 1002 bp, Mycobacterium leprae
atgaagttcttgcagcagatgcgaaagttgtttggcctggcggcaaagtttccggcacggctgaccatcgcagttatagggactgccctgttggccggccttgtcggtgtcgtcggcgacacggctatagcagtagcgttttctaagccgggtcttccagtggaatatctgcaggtgccatcaccgtctatgggccatgacatcaagatccagttccagggcggcgggcaacatgcagtgtacctgctcgacgggctccgggcccaagaagattacaacggttgggacataaacaccccggctttcgaggaatattaccattccggcttatcggtgatcatgccggtcggcggacagtctagcttctacagcaactggtaccaaccgtcgcaaggaaacggtcagcactacacctacaaatgggagacgttcttaacccaagaaatgccctcgtggctacaagccaacaagaacgtgttaccgaccggtaacgcggcggtgggcctgtcgatgtcgggcagttccgcactaatcctggcctcgtactacccgcagcagttcccctacgccgcctcgttgtcgggcttcctcaacccatccgagggctggtggccgacaatgatcggcttggcgatgaacgactcgggcggctataacgcaaacagcatgtggggcccgtccacggacccggcatggaagcgcaacgacccgatggtgcagattccacggcttgtcgccaacaacactcggatctgggtgtactgcggtaacggcgcaccaaacgaacttggcggcgacaacataccggcgaaattcctggaaagcctcacgctaagcaccaacgaaatattccagaacacctacgcagcctcgggcggacgcaacggagtgttcaatttcccacccaacggaacacactcgtggccgtactggaatcaacaactggttgccatgaaacccgacatccagcaaatactcaacggcagtaacaacaatgcctga

SEQ ID NO: 27867 - DNA, 933 bp, Mycobacterium leprae
gtgctcttccgtcaactggagtacttcgtcgcggtagcccaggagcggcacttcgccagagcggccgaaaggtgctacgtttcgcaacctgcgctctcatccgcgatcgccaaactcgaacgtgagctgaacgtcacactgattaaccgggggcacagctttgagggcctaacgcccgaaggggagcgcctggtcgtgtgggccaagcgtattctcgccgaacacgatgcattcaaggcagaggtgcatgcagtgcggtccgggatcactggtacgcttcgattaggcacggtgcctactgcctcgacgacagcgtccctggtcctctcggctttttgttcggagcacccattgataaaagtgcaaatctgctcccgactgcctgtcactgaactgcaccgacggctgggcgattttgagctcgatgccgtcatcgtacactccgcgcctgacgacactcacgctgtggacctggtgccgctttaccatgaacattacgtgttggtatcgccggcggatatgttgccgcctggggcgtcggtgttggcatggccagaagcctcgcagctgccgctggctttactcacgcccgacatgcgagaccgccagcttattgatagggcctttgctggtcacgcgatcactgctaccccgcaagtagagaccgactctgtcgcttcgttattcgctcaagtggcgactggaaattgggcgtgcattgttccgcacacctggctgtggacgacgccgataggcgcagagatccgtgcggtagaaatggttgatccggttctgaaagccgacgtcgcactcgccaccaactccgccgggccaggttctccggtagcccgtgcgctcgtcgcatccgccaagcaactggcgttgaacgaattttttgaagctcagttagcgggaatcactcgtagacgctga

SEQ ID NO: 27868 - DNA, 2001 bp, Mycobacterium leprae
gtgcggcgtgttggtctgctgaggatttggaaccaacccgagcggcgtaacggcattccagcgctagatggtcttcgtgcgatagcggttgcgttggtgctcactcagcacggtggcattcccggcctgagcggcggattcatcggcgtcgatctcttttttgtcctcagtgggtttctgattacgtcgttgctgcttgacgagctgcgacacacggggcgtatcgacgctatcaacttctggattcggcgtgcatgccggctactgccagctttggtgttgatggtgctcaccgtaggcattgctcgcgaactttttccgtaccaggcgctcaccaacttacggaacgatgcgatagcaacgtttttgtgggtagcgaattggcgcttcgtggtccataaggccgactatttcacacaaggtacgcctccctcgcccctgcagcatgcctggtcgcttggggtggaggagcagtactaccttgtctggccactgctgttgatcgcggtaactttactgttggccgcgagggccaggcggcgttgccgctacgcgaccctcggtgccgttagattggctgtctttgtgctcgcctcattgggagccttagcttctgccacagtcgccatcgcccgtgtttgcgacgttacacgcgaccgcatctatttcggcaccgatacccgtgcgcaagcgttgctggttggcgccgcggcgtcggctctgctggttcgggattggccgtcgctaaaccgtggttggtgcttgattaggactcggtgggggcagttgatcgctcggttcctaccggtccttggtctggcagggttggcggcggctacacactatgcaacgggaggggccggtgacttccgtcacggcctgctgatcggggtcgcaattgcggccgtcatcgtgatcgcgccggtggcattggaacagcgtggaacggtggcccgcctacttgcattgcgcccgctggtgtggctgggcactatttcgtacggcatttacttgtggcactggccgattttcctggcgctcaacggcgagcgcaccgggtggtccggagtcccactgtttgcctctcggtgttctgcgacagtggcagtggcggcagtatcctggtggttgatcgaacaacccattcgccactggcgaccggtacgagtgccgttattgccgttggctgcggccactgtcgctagtgccgctgcggcgacgatgtgggtgattccggtgggaaccgaaacgggtttgcgtgatattgctctgccgccggaagtgtcgacggtagcggccgtatcaccgtccccgccgagaggaaaactttcgagtacgcgagatcctaaccagccttttactgttgcggtatttggtgattcgatcgggtggacttggatgcactatcttccgccgacgccaggattcgcctttatcgaccacaccgtcatcggctgcagtctggtgcgtggcacgccgtatcagtatattggccaaactctggagcaacgaccagaatgtgataactggcccatcaggtggtcgactcagatcaacaaagatcatccaaatgtcgcactgctgattataggtcgctgggagacggtaaaccgcgttaacgaaggacagtggacacacatcggcgatccaactttcgactcttacctcaatgcggagctgcagcaagcactgaatatcctgggctcctctggtgttcgagtggtcgttgccacggtgccatacagccgcggcggcgaaaagcctgatggtcagttgtatccagaagaccaaccggatcgagttaaccagtggaacaccatgttgcgcaatacagttagtcaacattcgaacgtacagatcctcgatctgaacaaaaagctatgtccggacggtgtttacaccgctaaggtcgacggaattaaggtgcgcagcgacggtgtccacctcactccggaaggcgtcaaatggttgacaccttggctagaagaatctttgaagtag

SEQ ID NO: 27869 - DNA, 4830 bp, Mycobacterium leprae
atgaagattccgcatgtgaccgaccccgtaagcaatatggtcggcggcatggcgcaggtggtgcgggccagtacgcatgccgccaccggcgctgtcaacacgatgcagatgctggccagcccggtcgccgagttcgcttggccggtggtgcaatcggtagctaaatccaccggccgagcgctcggtacgggccattcaccgaattttgcgaaccgggtcgatccaccggtgcgctggcacaacggtcagcgtgtacacctagacctggatccgctgctaccgttcccccgctggcatgagtacgcagcagtagtagaagaaccggttcgtagaattccaggggtggctaagggccatgtcgagggctcattgggacggctagtaatcgaactagacaagaacgcggatagcgacgttgtcttgggcaaagtgcgtgacgtggttattgccctggccgccgacttagcattgacaggggcgagatcggcccccaaggttgctccatttgccgacccaggtaatccgctggcaattcttatgccgctaaccgccgcggtaatggaccttgtcgcgttgagtgccgcagtgaccggctgggtcacccgactgcccgccgtaccgcaaactatccgggccgcggcggctctcgtcaatcatcaaccgcgcatggtgtcactgctggaatcacgactgggtagggtcggcaccgatattgcactcagcattacaacagcggcggctagcgggctgacccaagcggtaggcacaccactgctggatctggcgtgccgtggcctgcaactctccgaagcggcggctcaccagcgcgtgtggcgagatcgagagcctcaactggcctcacccaagcggccacaagcgccggtggtccccgtgatctcgtcggcaggggaaaaatcgcatgccgcaggccacaactggacagccgcagcgtcgaatgaagcgtcgcacctcgtggtcggcggatcaatcgacgccgcaatcgacaccgcaaaagggtcgatgaaaggacctgtagagagctatgtcgattcagcggcaaacggttcgttgattgccgcggcgagtgctttgctcgcgggcggtggcaccgaagacgcggccggcgcgatcctggccggggtgccaagagcggcgcatatgggccagcaagcgttcgcggcgacactgggccgcggactggccaacgccgggcaactggtactcgatccgggtgcgctgcgccgcctggaccaggtcaaggtggtcgtcatcgacggggccgcattgcgcggtgatcaccgcgcggtattgcttgcccggggaaatacgcccggctgggacgacgaccgtgtatatgaggttaccgacgcactgctgcacggcgagcgggcacccgagcccgatcccgacgagtcaccggccactggagcgcggctcagatgggttccgttgcaggggccgtcggcaacacccgtacagggccgcgagcacgcggatctggtggttaatggcgagtgcgtcggcggtgtcgacgtcggatgggaagtcgacccctatgcgatcccgctgctgcagaccgcacaccgaaccggggcacgcgtagtcttgcgtcatgtagctggcacagaagatctctccgccagcgtcggcgcgacgcatccgcccggtacaccgctgctgaagttggtacgtgagctgcgcaccgatcgcggaccggtgttactgatcaccgccgtgcaccgggacttcgcatcgaccgacacgctggccgcactagccattgccgacgtcggggtagccctggacgatccccatgcagctacaccgtggaccgcggacatcatcactggcactgatctggcggccgcagtgcggatcctgtctgcgctgcccgtggcccgttcagccagtgaatcttcggtgcaccttgctcagggcggtactaccctggcagggctgctgctgatcaccgcgagcgctggtagcaaatccgctagcccaattactttgcggcgctggtttagtccggtcaatgcggccgcagcgaccgcattggtgactggcgtcgtctcagccagcaaggtgctccggctgccggaccctaccccgcaaccgctgaccgcctggcacgcgctggaccccgagatcgtttactcacgattggccggcgtcacacaaccgttagccgttgagcccggtacccccgattggcgacgtcgtctcgacgatctgtcctacacccgggcgctgtcaccgctgcgcaaaccagtaaccaaactggctcggctggcgagcgcgacccggcaggaattcgccgatccgctgactcccatcctggcggtcggagcagctgcgtcggcgatcgttggcagtaatatcgatgcccttttggtcgcgggcgtgatgacggtcaacgcgattaccggtggcgtgcaacggttgcgggccgaggcggccgccgccgagctgttcgccgagcaggatcagttggtgcgacgcgtcgttgtcccggcggtggcaacgacccgtcgtcgattggaggctgcacagcacgccacacggacagtcacggtgtccgccaagtcgctgcgagccggtgatgtcatcgacctggctgctccggaagtggtaccggcagatgctcgcgtgttggtagccgaagacctcgaagtcgatgagtctttactcaccggggagtcgttgccggtggacaagcgagtggaccccgtcgccatcaacgacgccgaccgagcgagcatgctgttcgaaggcagcgcgatcgtggcaggacatgcccgcgcgatcgtggtggccaccggggtcggcacagccgcacaccgcgcgatctcggctgtcgccgacgtggaagtatcagccggggtgcaagcacggctgcgggagctgaccagcaaggtccttcctctgacactggccggtggcgccgcggtgacgggtttggctttgctacgccgcgcatcactgcgtcaagcagtcgccgatggcgtcgcaatcgccgtggccgctgtcccggagggtctgccattggtggccaccctctcccagctcgccgcggcccagcgtttaacggcgaagggggcgctggtccgatcgccccgcacgatcgaagccctgggccgcgttgacaccatatgtttcgacaagacaggtacgctcaccgaaaatcgactgcgtgtcgtctgtgcggtgccgaacacgaggatgccacacgatccacttcccgacatcaccgatccgcactctgctgcggtgctgcgggacgccgcgcgggcgtccacccaaccccacgacgggcaaggccacacgcacgccaccgatgaagcgatcctcacggcagccagttcgcttaacagccataccgattcgacttggagcctaattgcggaggtaccgttcgagtccagtcgcggttatgccgccgcgatcggcataaccggcaatggtaaggcgccgatgctgatgctcaagggcgcccctgaaaagatcctgccgcgttgccggttcgccgatccagaggccgacgttgctcacgcagagtccttggtgcgccacctcgccgagcaaggcctgcgcgttttggcggtcgcgcaatgctcctggggccacgacaccaccgacgataacgacaccgatgctgatgccgtcgacgctgccgcgcatgacctcgagctggtcggctatatcggactagcggacaccgcacggccatcctcgcgtccgttgatcgaagcgttggtaaccgccggccgcaacgtggtactgataaccggcgatcaccccatcaccgcacgggctatcgcccagcagttgggtctgcgctcggatgcacgggtagtgaacggcaccgaacttatcggcctcgacgaggacgcatgcgccgaacttgccgccgacgtgcaggtcttcgcccgagtcagtccggagcaaaaggtgcagattgtggcagcgttgcaacgctgcgggcaagtgacggcgatggttggtgacggtgccaacgacgccgctgccatccggatggccgatgtgggcatcggcgtgagtggccgcggttcttcagccgcccgaggagccgctgacatcgtcttgaccgacgacgatctgggtgtactgctcgatgccctggtcgaaggccgcagcatgtgggcaggcgttcgtgatgcggtcacgattctggtcggaggcaatgtcggcgaagtcgtctttactatcattgggacggtattcggtgctggtcgggcgccggtgggaacccgtcaactactgttggtgaacttgctcaccgatatgttccccgcgctttcgatcgctgttacctcgcaatacgaagaacccggcgaggacgaatatcaaaccgacgaagaggcagacgaggcgcgacgaacacaccaacacgaggtactgaccggacctacgccctcgctcgacgcgccactgatgcgacagatcgtcaaccgtggtgtggtcacggccgccggtgcgaccacagcctgggctatcgggcgctggacgccgggtaccgaacgacgaacggcgacaatgggactgaccgcattggtgacgacgcagctggcacagaccctgctcacgcgccgacacagcccgctcgtcgtagcaaccgcactaggcagcgcgggtgttttgatcggtatcattcaaaccccggtaatcagtcagtttttcgggtgcacaccgcttgggccaatagcctggtcaggagtaataactgccacagcaggagccaccgcagtctcggtactggcaccccagtggttaaacaaagcttttggtatcgcgcaactcaatcaggagtga

SEQ ID NO: 27870 - DNA, 2682 bp, Mycobacterium leprae
gtgatacggtatatggtatccacagaaatggcactgagcaacagtgcatcgtcctcggcgcgtttcaatcactctgacgccgaccgactgctagacgggtaccgcgccgcccgcgcccagaaagttctgttcgacctacactctgccggcacggccggcccgggaatcggctacgatgaattcgtcgacgactctggctacgtgcgacctagctggaccgagttggcggatgcgatcggcggccgaggtcgggccggactgcatcaattgcgttcggtgatgcaccgactaatctacaacgatggcattacctacaccgggatcgacccaggagcgctcaccaatgaccacggtgtggtgccggggctctggcggctagactcgttgccgctgttggtctctgcgaccgattgggaggtattagaagccgggctgattcagcgctcacgcctactcgatgccgtactcacagacctgtacgggccacgccgcttgctaaccgacggcgtgctgccgccagaactgctgttcggccaccctggctacgtgcgtaccgaccacggcatcgaggttcctgggcatcaccagctcttcatgcacggctgtgacctcagccggttgccagacggcgggttccagatcaacgccgactggacgcaagcgccctcgggggccggatatgcgctggcggaccgacgtgtggtcgcacaagcacttcctgacctctacgaaacgatcgggccgcgaccgactacaccgtttgctcaagcactgcggttggcactgatagacgcagcacccgaggtcgctcaggacccagtagttgtagtgctgagcccgggaatttactcagaaaccgccttcgatcaagcgtatctcgcaactttgctgggtttccaactggtagaaagctcggatttagtggtgtgcgacggcaaggtgtggatgcgttccttgggcacacttaaacgcgtcgacgtggtactgcgccgcgtcgacgcggactatatggaccccctggatcttcgtgccgattcgctgttaggcgtggccggtttggtggaggcacaacatcgcggaacggtgaccgttgttaacacactaggcagcggcattctagaaagcgcagggctactgcggttcttgccccaactctccgagcgtttactcggagaaaccctattgctgcccagcgcacccgtctactgggcaggaatcgacagcgaacgcttgcacctgctgacgaatttgtcgtcgctattaatcaaatccaccgtaggcggaaaaaccattgtaggaccatcactttcgtccggacaactgactgaaatggctgctcgaatcgcagctaagccgtggcagtgggtaggccaagaactgccgcaattctcaactgcacccacagatcatgatggcgtgttgtcaccggctagcatcggtatgcgagtgttcacggttgcccaacgcagcggctatgcaccgatgatcggcggtctagggtatgccctggcatctggaattgatgcctactctctgaaaaaagttgcagcaaaagatatttgggttcttccaacggagcgcgcacgcaccgaggcgataacccattcattattggagtcgccgccaatgacgggaacaggcaccttgggggtgagctcgccgcgggtactgtccgacctgttttggatggggcgctatggtgagcgcgccgaaaacatggcacggttgctcattgtcacccgcgagcactaccacgattcccggcaccgccagaacacggaagaaaacgcgtgcttgccggtgctgatagcggcgcttggtaagatcaccgggaccgacaccggatccggtggtcaggctgacgtgatagccgttgcgccctcgacattgtggtcgctcactaccgaccgtaatctgccagggtctctggtgcagtcggtggacgggctagtattggcagcaagagcggtgcgcgcccaattgtcccgcgacacctggatggtgctcagtgaagtagagcgcgctatggtgcacgagaccgagccgccggagtcgttggtcgagggcgacgccctgctggcgtcggtgcaagcacggacacttgctggcatgctgacactgtccggattagccggtgaatcgatggtgcgtgatatcggctggaccataatggacatcggaaagcgcatcgaacgcgggctggcgttgaccgccttactgcatgccacgcttaccgacgtccgtagccccgcggctgagcacagcatcatcgagtcaatcctggtaatttgtgagtcatcggtcatctaccagcgccgcacggtaagcacgatcgatgttgccgttgtcgctgagctcatgctgttcgacgcgacgaacccgcggtcactggtgtatcaactggatcggttacgcgtcgatctcgctgaccttccgggctcgtcgaggtcatcactcccggagcggatggtggccgagatgagcacccggctgcgccggtccgctcccgctcagctgaaagaggtcagtgccgacgggcgccgctatgtgctggctgagctactcgccgcggtcgacaccgcgttgcgtgacttggccgacgcgatcaccgcaacccaattggcggtgccctgcggcatgcaaccactatgggggcctgacaatcgacaaaccatgtcgtaa

SEQ ID NO: 27871 - DNA, 1815 bp, Mycobacterium leprae
atggcggtcgtcgatgatctggcgcactcaggtatggatgcagttccacccagtgaagattttggccgtcagccaccgcaggacctagccgcggagcagtcggtgttgggcgggatgctgctgagtaaggatgccattgctgacgttctcgagcggctgcgttctggtgacttttatcgtccagcacaccagaatgtttacgatgcgatcctagatctgtacgggcgaggagagccggccgatgcggtgacggtggccgccgaattggaccgccgcggattgttgcgcaggatcggtggtgcgccgtatctgcacactctgatctcgacggtgccgactgccgccaatgcaggttactatgcgggcatcgtcgctgaaaaggcgctgctgcgtcgactggtggaggccggcacacgggtggtgcagtacggttacgccggcgctgagggtgccgacgtggccgaggtggtcgaccgcgcgcaggcagaaatctacgacgtagccgagtgccggctttctgagaactacgtaccgctcgaagatctactgcagccgacgatggatgacctcgatgccatcgcttccaatgggggtatctcgcgtggcgcgccgactggcttcaccgaactcgatgaggtaaccaacggtttgcatccgggacagatgatcatcgtggcggctcgtccgggtgtgggcaaggcgctcgcgctggacacgccgctgcccacaccgactggttggacggcgatgggtgatgttgccgtcggtgacgagttgctggccgttgacgaagcaccgacgcgcgtggtggccgcgaccgaggtcatgctgggccggccgtgctacgagatcgagttctccgacggtaccgtcattgtcgcagacgcccagcaccaatggccgacgagttacggtatccggacgtcggctcagttgcgttgtgggctggacattattgctgcggccgggtcgacaccgcgccacgctgggcgactgaccacggctgcattcatggctccggtgctgtgcatcgactcagtgcggcgggtgcgcagcgttccggtgcggtgtgtcgaggtggacaatgctgctcatctgtatctggctggtcgagggatggtgccaacgcacaactcgacccttgggctggacttcatgcggtcgtgttcgatcaagcatcgcctggcgagcgttatcttctctctggagatgagtaagtccgagatcgtgatgcggttgctttcggcagaggcgaaaatcaagctcgccgatatgcgttcgggtcgaatgaccgacgatgactggacacggctggcgcggcggatgagcgaaatcagtgaggcgccactgtatatcgacgattcaccgaacctgaccatgatggagatccgtgccaaggcgcgccggctgcggcaaaagacaaacctgaagctagttgtggtcgattacctgcagttgatgacgtcaggcaagcggttcgagtcgcgacaggtggaagtctcggagttctcccgccatcttaaattgttagccaaagaacttgagctcccggtagtggcgatcagccagctgaaccgtagtcccgagcagcgcaccgacaagaagccgatgttgtctgatttgcgggagtcgggaagcctagagcaggatgccgacgtcgtgatcttgctgcaccgtccggatgcctttgatcgcgacgatccgcgtggtggcgaggcggacttgattctcgccaagcatcgtaacggcccaaccaagacagtcactgtcgcgcatcaattgcacttgtcgcgattcaccaacatggcaaggtaa

SEQ ID NO: 27872 - DNA, 459 bp, Mycobacterium leprae
atgaagctgattctgacggctgatgtcgaccatcttggttccgtcggtgacactgttgaggtcaaggacgggtacggtcgaaactttttgctcccacacggtctggcgattgtcgcttcgcgcggtgcccagcgacaggctgacgagatccgccgcgcacgtgaaacgaaggcgatgcgtgaccgcgagcacgccaacgaaatcaaggtggcgatcgaggcgttgggctcggtttcgctgccgatgaagacggtagctgactccggcaagctgttcggctccgtgactgccggtgatgttgtcgccgctataaagaaggcgggcgggccaaacctcgacaagcgaatcgtgcggctacccaaaacccatatcaaggccgtcggcacgcatccggtatcggtgcatttacaccctgaagttgatgtcgtggtgttactcgacgtcgtcgcagcgagataa

SEQ ID NO: 27873 - DNA, 255 bp, Mycobacterium leprae
atggccaagtccaccaagcggcgtccagcaccggagaagccggccaaagcgcgtaaatgcgttttctgcgccaagaagaaccagcaaatcgactacaaggacaccacgctactgcggacgtacatcagtgagcggggcaagatccgggcccgtcgggtcactggtaactgcgtgcaacaccagcgcgacatcgcgatcgcggtgaagaacgcccgcgaggtggctctgctgccctttacctcctcggcgcgataa

SEQ ID NO: 27874 - DNA, 507 bp, Mycobacterium leprae
gtggctggcgacaccaccattaccattgtcggaaatttgaccgctgaccctgagttgcggttcacttcgtccggtgctgccgtggtgaacttcactgttgcatcgacaccgcggatctatgatcgtcaaagcggtgagtggaaagacggcgaggcgctgttccttcggtgcaatatttggcgggaggctgcggagaacgtggccgaaagcctcacccggggggcgcgggtgatcgtcaccggtcggctcaagcagcgttccttcgagacccgcgagggcgagaaacggacagttgtcgaggtcgaggtcgatgagatcggcccgtcgcttcggtatgccaccgccaaagtcaacaaggctagccgcagtggtggcgggggcggcggcttcggcagcggatcccgtcaggcgcctgctcaaatgagtggcggagtaggtgacgatccgtggggcagtgccccaacctcggggtccttcggcgtcggtgacgaagaaccccccttctag

SEQ ID NO: 27875 - DNA, 291 bp, Mycobacterium leprae
atgcgtccatacgaaatcatggtcattcttgaccccacgctcgacgagtgcactgtcggtccgtctttggagacgttcctcaacgtcgtccgcaaggacggtggagctatcgataaggtcgacatctggggtcggcgccggctggcctacgagatctccaagcacgctgaaggcatctacgttgtcattgatctgaaggctgcgccggcaacggtatccgagcttgaccgccagctcagcctcaacgagtcggtgttgcgcaccaaggtaatgcgcactgacaagcactag

SEQ ID NO: 27876 - DNA, 2127 bp, Mycobacterium leprae
gtgcctggatcgcggttaaatcggacatggctcctacacctcaaccggcaggtgaactggcgctgggtgcggtattcattgtatctcgctgtggtggtgttgttgttgttaccgatcgtcactttcaccatgacctacttcatggtgaaagttcccaggccaggtgacattcgtactaaccaggtctcgacgatcctggccaacaatggcttggagatcgccaaaattgttccacccgaaggtaaccgggtcgatgtcaacctcagccaagtaccggtgcatgtacgccaggcggttattgctgcagaggatcgcaacttctattcaaacccggggtttgacttcagagcctctgtgcgagcggtgcaaaacaacctcttcggtagcggcgatctgcagggcgggtcaactatcacccagcagtatgtgaagaatgcgttagtcggttctgcacaacacgggtttgacggtttaatgcgcaagacaaaggaattggtcatcgccatcaaaatgtcggacgcatggtctaaagacgatgtgctacaatcttatttgaatataatatacttcggtaggggagcctacggaatttcagctgcggccaaggcctattttgacaaacccgtggagcagctcacctgctccgagggggcactgttggcggcgctaattcggcggccgtcggtcctagacccggctatcaatctcaagggtgttacggcccgttggaactgggtgctggacggcatggtggacatcaatgctctgtcgccgaatgaccgctcggtacagctgtttcccgctaccgtgccgcctgaccaggctcgtgcgcagaatcagaccaccggacccaatggactcatcgagcgtcaggtggtcaaagagctgttcgaactattcaacatcgatcggcaaaccttgaacacccaggggctgcaagtcattaccaccatcgatccgcaggctcaacggatagttgagaaggcggtatcgaaataccttgacgggcaggatcccgacatgcgtgctgccatcgtttcgatcgatccacataacggtgcgatacgcgcctactatggcggtgctgacgccaacggttttgactttgcccaggctgggctgcaaaccggctcttctttcaaggtatttgcgctcatcgccgcgctcgagcaaggtatcggtctgggctatcgggtcgacagctccccgcttactgtcgatggtattaagatcaccaacaatggagacgagagttgtggaaattgcaatatcgctgaggcgctcaagctctcgttgaacacctcctattaccgtctgatgctcaaacttaagaatggaccgcaggctgttgcggacgccgcgcaccaagctggtatcgtgagcagcttccctggtgtagcgcacaccctgtcagaggatggtaaaggaggaccgcccaacaacggaatcgttctgggccagtacgaaacccgcgtgatcgatatggcatcggcatacgccacgttggctgcgtccggcgtctaccaccgaccgcacttggtgcaaaaagtcgttaatgctgagggccgggtacttttcgacgccagcactgcggacaacagcggcgaccaacgcatcgccaaagctgtcgccgataacgttactgcggcgatgcagccgattgccggttattcgcgtggccataacttagctggcgggcggccgtcggcagccaaaacaggcacggtgcagctgggcgataccaccgctaacaaggatgcttggatggtcggttacacaccttcgctgtcgacggcggtgtgggttggtaccgtcaaagacaatgtgccgctgataaccgcttcaggagaagcgatttacggctccggcctgccgtcggacatctggaagtcgacgatggatggcgctctggagggtacccctaacgagggcttccccaagccgactgaggtaggtggctacgctggtgtgccgacactggcacccccgcctcctttgaagaaggttattcagcctactattgaagtagcgccgggcataatcataccggtcggcccgcccacgacggtcactgtcccgccgacgcaggcattgcccgacctaacaacttcaacaacgccaccgtga

SEQ ID NO: 27877 - DNA, 543 bp, Mycobacterium leprae
atgctggaactcgccatcctgggtcttcttatcgagtcgccgatgcacggctacgaattacggaaacggctaaccgggttactcggtgcattccgggcattttcgtatggctcgctttaccctgctctgcgtcgaatgcaagctgacaggctaatcaccgggcacgtcgcaccggccgggactccggtgcgacgtgcccggcaggtataccaactgacagacgcaggccgccggcgcttcagcgagctggtaactgacaccgggccggacaattacaccgacaacggtttcggggtgcacttagcgtttttcaaccgcacaccagcggaagcccggatgcgcatcttggaaggccgtcgccgtcgggtcgaagaacgccgcgaaggtttacgcgaggcagtaacgcgagccagcaattcgttcgaccgttatacccgccaactacatcaactcgggctcgagtccagcgaacgcgaagtcaagtggctcaacgaactgattgccgctgaacgggcactactcggccgtgtcgagcagacgtaa

SEQ ID NO: 27878 - DNA, 1461 bp, Mycobacterium leprae
ttgaacgtgcctgaagccgctcaggatactgatctactgactgtagctgcggtcacccttaaccggcacaccccagtgttgcgtgacctcggctcggtattcgctgcttcaggccacgagttatatctggtgggtggttcggtccgggatgcgctactaggtagattagattcacctgaccttgatttcgccactgatgccggtcctgagcaagtgcaacaaattatgcggcggtgggccgacaacttgtgggagacgggtattgagttcggcaccattggggtcggcaagggtgactaccgtctggagatcaccacgtttcgcgctgaccgttacgaccaggtgtcgcgcaatccagaggttcggttcagtgaccgcctcgacgacgatttggtgcgccgcgacttcaccgtgaacgcgatggcggtgcgcattgcatcttatgggcctggcgaattttttgatccgctaggcggtttggcagcgttgcgggtccgagtgctggagacccctgctgccccatcggtgtcgttcggcgacgacccattgcggatgctgcgcgccgcacgattcgtctcccaactcggctttaccgtcgccccgcaggtgcacgcggcgatcgaagagatggcctcgcagttggcccgcatcagtgcagagcgagtgtccaccgagctggacaagctgctgcttggtaacgacccggcggccggtatcgacctgctggtgcagaccgggatgggggaggtggtgttgcccgaaatcggggacatgcggatggccatcgatgaacatcatcaacataaggacgtttaccaacattcgctgaccgtgttgcgccaggcgatcgcgctagaagataacggcccggacttggtgttgcggtgggcggcgttgctgcatgacataggcaagcccgccacgcggcgccatgagctgaacggcggcgtgagttttcaccaccacgaggtggtgggcgccaagatggtccgaaaacgaatgcgcgcgttgaagtacgccaaacaactagttgacgatgtttcgcaactggtgtatctgcatctacggttccatggctatggtgaagggaaatggactgattcggcggtgcgccgctacgtcaccgatgccggcccactgttgtcgcggctgcacaaactggtgcgcgctgactgcacgacccgcaaccagcgccgggccgcccgactgcaggacagctatgatcgactggaagcccggatagcagagttggccgcagaggaggatctggcccgggtgcgtcccgatctggacggtaaccagatcatggctctgttggacatcccggcagggccgcaagtcggcgaagcgtggcgttttctgaaggaactacggctagaccgcggaccactgaccaacgaggaggccactgcggaactgctggcctggtggaaaacccggcaatcgcaggggctcctgtaa

SEQ ID NO: 27879 - DNA, 3621 bp, Mycobacterium leprae
atgaagcccgctccccggtggacccaatcacaatcggcgcagcaagtcacccatgcgatgcgtccgtgtcgggagctgtccgcacaacaacccgaactttctgacgccgctctggtttcgcggtcgtgggcgatggcattcgccacactgatcagccggatcaccggcttcgcccgggtcgttctgctggccgctatcctaggcgctgcgctatctagcgccttctcggtggccaatcagttgccgaatctggtcgccgcgctggtgctagaggcgacattcaccgcaatcttcgttcctgtgctggtccgcgccgaacggagcgacccagacggcggcacggcgttcgtacgacagctaatcaccttgacgaccacactgctactgctctccacaacactgtcggtcctggccgcgcccctgctggtgcggttgatgctcggcaggaacccacaggtcaatgagcccctgactaccgctttcgcctacttgctgttgccgcaggtactcgcctatggcttgtcatcggtgttcatggcaatcctgaacacccgcaatgtattcgggccgccggcatgggctcccgtcatcaacaacatcgtcgcgatcgcagccctggtaggatatctggtgacccccggcgaactttcggtcgatcctgtccgaatgggtaacgccaagctactggtactcgggatcggaaccaccgcaggggcgttcgcacagacagcggtgctactggtggcgcttggccgtgagcacatcagcttgcatccgctgtggggactcgatcagcgactcaaacgtttcggcgcgatggctaccgcgatggtgctttacgtgctgatcagtcaactcggcctggtagtcaccaaccagatcgccagcacgacagcggcttccggccccgcgatctataactatacctggctggtcttgatgctgccgttcggcataattggggttacagtgttgaccgtcgtgatgccgcgactaagccgcaacgccgccgctaacgacactccggccatgctcgccgacctatcgctagccacccgactgacgttgatcacacttatcccgacggtggcattcatgactgccggtgggtcagcaatggggagtgtactgttcgcatacggccatttcggcgaggtcgacgccggatatctgggtaccgcaatcgtgttgtccgcgttcaccttgatcccatacgggctcgtgctattgcagctgcgcgtgttctacgcccgggaacagccctggacaccgatcgtgatcattgtcgtcatcacggccgtcagaatcatcgtctcagtgctagcaccctacgtcatcagtaaccccgagctggtcgccggttacctcgggatggcaaacggcctcggatttgcggccggcgcgatcgtcggctactacctgctgcggcgcgcactcctgcccaccggtgggcacttattcggtgtccaggaaatacggaccgtccttgtgacgatagccgcgtcgttgttggccggtctggctgcccatatagccgatcggctactacggctaaacgagttgaccatgcacggcggtggcgcgggctcgttgctccgattgacggtgctgacgagcatcatgttgccgaccatggccgtggtaatgcttcgcggacacgtccctgaagtgcacgcggcactgggcgctgtcagaggccagatcatgagtcgaaactggatagcgaaactgcagaaagcgactgtgccagatcaatcatcccggcccatcacagtcacgtaccctgggcaaaacaattcgtcaccaccgagggtaaatgcgatccaggagtcaatccggagcaggcctccggaaaggatagccaaagcccagatagcgaaaggaccggaggtgagcgaccgcccagtggagagcgcctcatcacgttctgcgtcagacaccgggctaccctctgaactgccaaggccggttgccggcaactcccaaccctatatttcagccaacctcgaacttgaacatgtcgcgtcgttacatcctcctgaacagcagaaagtcgatttcccagcctatcccgctcgcagaccgattcgattcgaggtatcccgcgaacggggcggggagcaatcatcaccaaccggcgatgttcacttggtacccggcgcctgcatcgccggtggccgctatcgactgttagctttccacggcggtgcgccttctctacagttttggcaggcactagacactgcgttggaccggcaagtggcgctgactttcgttaatccggatggggccctgcccgacgatagcctgcaagaaaccctgtcccggactttgcggctcagccggatcgacatgcctggtgtcgctcaagtgctcgacgtaatccacaccggttctggcggcttagtggtttcagagtggatccgcggtggttcgttacatgaggtcgccgacacctcgccgtcgcctgtcggcgccatccgagcgatgcaatcgttggccgccgcggctgacgcagcacaccgcgctggtgttgccctgtcgatcgaccatcccagccgggtacgcgtcagcaccgagggtgacgtcgtgctggcttaccccgcgaccatgcccgacgccaaccaccacaccgacatccgcggaatcggagccacactgtatgccttgttggtcaaccggtggccactaccggaggctgggatgcatagcggcctggcgccggcccagcaagataccaccggccaacccgttgaacccgccgtaatcgatcagaacatccccacccagatttccgcagtcactgtccgcgcagttcaagaagatggcgggatactcagagcatcaacacttttgaacctactgcagcaggcaacagcagtggccgaccgcaccgaggtgctcagtccgatcgacgacagatccccgacaccaacagctttctgccccacaaccgcacgggatcctgtggtcttcgcccagcgacgccgcaacctgctgatcggtatcggcgcggcagtcgtcatcttggtggtggccttgttggtgatggcatcagtgatcaacaaagtcttcggccacctcggcagtggactcaacaacgacaaactcgggttgaacacgcctacatcatcgacgtcgtcgtcacctaccagttcggtgcctgagggcagcattgtcaagcccacgaaggcgacggtcttttcccccgatggcgaagcagacaatcctgatgacgccgggctggcgatcgacggcaacccggctacctcgtggcaaaccgacatctacaacgatgcggtcccattccccggtttcaaaaacggagtcggattgatgttacacttgcccaagcctacggtggtcagcgcggtcaccatcgacgttgccagcatcggcaccaaggtagaaattcgctcagcttccacacccacaccggcaaagttggcagacactactgtgctaattccggccactgcgctcaaacccggccataatgtcatcgaggtcaactccggctcaccaatgtcgaatctgctagtatggatttcgacgttgggaagcactggcggcaaaagtcttgctgtgatctcagaaatcacaattcatactccgtcctaa

SEQ ID NO: 27880 - DNA, 1221 bp, Mycobacterium leprae
atgtcgagtccgcgctgcgaagacggcgacacgctgcgctgtggtgaccgcaacgccgctgttaccgaaatccgatctgcgctagctgcgctgggactcttgcacagtcccggcgacgacctgacgactagcaagtatatagcgctcgatctgttcgacccgcaactggagcacgcagtgcgcgccttccagcagcatcgcgggttgctggtagacggcgttgtcggtgaagccactcaccgagcgttgaaagaagcttcctaccgactcggcgctcgcacactgtatcatcgattcggagcaccgctatccggtgatgacgttgccacattgcaagcccggctacaggaccttggcttctacaccggcatggtcgatggacacttcggattacagacccacaacgcgttaatatcctatcagcgtgaatacggacttactgccgacggcatttgcggcccagaaacgttgcgttccctgtattttttgagttcacgggtaaccggtggttcaccacatgccattcgtgaagaagaacttgttcgtcgatccgggcctaaactgtcaggcaagcgaatcatcattgatccgggtcgtggcggtgctgaccgtggtctgatcactcaaggaccgactggacccatcagtgaagcagatgtgctgtgggacttggcaagtcgacttgaggggcggatggccgctattggtatagaaactttcctctctaggacaactaacggtagcccgtcggactccgaacgcgctgccattgccaataacgtcggcgcagaattaatgatcagcttgcgttgcgaaacgcagactagtcctgctgctaacggtgtggcttccttccatttcggcaactcacacggatccgtctccaccataggccgcaatcttgccgatttcattcagcgagaaatagtggcccgcaccgggttacgggattgtcgtacacacggtcggacatgggatttgctgcgattgacgcgaatgccgactgttcagatcgacatcggctacatcaccaatccacgagatcgcggcgtactgattggaacacagaaccgcgatgccatcgctgaaggtatccttgccgcggtcaaacgactttatttactaggcaagaatgatcagcccaccggcacattcacctttgctgagcttcttgcccacgaactatcggtggaacgggcaagcagactcggtggttcttaa

SEQ ID NO: 27881 - DNA, 1056 bp, Mycobacterium leprae
atgagttctcttcagggttgggttgacaccccagctttgtggtcggccagtcttactgatcagtcagctttgttatcgagtgaaatacaaaaaacaccaccagagccaatgtttaggcaagaagcctattacgacgcagaatgtgttgttgaaatgaatgtttcacatgaaacaacaaatgaactcgacactccaatcggggctgcagcagaacgggctatgcgggttcttcacaccacatatgacccattgtgtcgtccatgccatcggcggttgttcactattgcgaaccagaagggtggtgtgggcaagactactactgctgttaatcttgcggcagcattggcacttcaaggacttaaggcgcttgttattgatcttgatccccaaggtaatgctagtacggcgctcggtatcagtaaccggcaatcacgcgtgttttcatcgtatgatgtgctcattggtgaagtttcgttgcagactgctttgcgatgcagcccatataacgagcgtttgttttgtcttccggccgcaatagatctggcgggtgctgagatcgaattagttagtatggtggcgcgagaaaaccgattacgtaccgctttaactgagcttaacgacttggattttgattatgtctttattgactgcccgccgtcattgggattactgacaataaatgcacttgtcgcggcaccagaggtgataattccgattcagtgtgaatactatgcgcttgagggtgtatcacagttgatgtgcaacattgagatggttaaggcccacctcaatcctcagcttgaggtaaccactgtaattcttacgatgtatgacggtcggacaaagctcgccgaccaggtggctgaagaggttcgccggtactttggaacgaaagtgttgcaaacagtgattccacgcagtgtcaaagtctcggaggctcctggttatagcatgactatcatagattatgatcctggttcgcgtggggcaatgagttaccttgatgcaagccgagagctcgccgagcgtgatcaaccaccatcgatgaagggatga

SEQ ID NO: 27882 - DNA, 747 bp, Mycobacterium leprae
gtgtttcacgtgaaacatgtcggttcttacgaggagttggcatcctttacgtcagttaaaggcaatcttggatttgatactgtgtttgaagctgtattcatgatttttggaccacgtcttaatattgctcagcggtatgtcgatctactcgcaaatacaggaattgaacgtggattgcttggtcctcatgaggctaaccggctttgggatcggcatctattgaacagtgcagtggtagccgaacttcttgatcctggtgatcgggtagtggatattggaagtggtgcggggttgccggggttgccgttggctattgcccggccggatcttcaggttgtgttgcttgagccactgttacgtcgagttacttttcttcgagaagtagtggctgagcttggacttgatgttgaagtggttcgtggccgagctgaggagttgtgggtgcgtgatcggatcggtgaaagagatgtggctgtatcacgagcggtagcggccttggacaagttgacaaagtggagcataccgttgttacgaccaggtggtcaaatacttgcaatcaaaggggaacatgtttttgacgaaatccatcaacatcggcgtgtaatggcctcattgggcgccgttgatgtcatggtggtggtatgtggtgcgaattatttgtgtcgtcccgtaacagtagtcctaacgcgatgcggacagcagatgcggcacaaaccagcgcgtgtgggggacaggaaaacacaatga

SEQ ID NO: 27883 - DNA, 1143 bp, Mycobacterium leprae
gtgagtctgttgccgtttgattttgtcagtcttgacatcgtctactatccggtgtcgtggattatgtgggtttggtacaagctgtttgctgctgtgctgggtccatcaaactttttcgcatgggcgttatcggtgatgttcttggtgttcaccttgcgagcgttgctttacaaaccgttcgtgcgccagatccgtaccactcggcagatgcaggagttgcagccacgaattagagcgctgcaaagaaagtacggtaaagatcgtcaacgcatggcgctcgagatgcagaaattgcaacgcgagcacgggttcaacccaattttaggatgcttgccgatgcttgcgcagataccggtgtttttggggctttaccatgctttacggtcattcaatcgtacaactggaggtttcggtcagccacatatgtcagtgaccgagaaccggatgacaggaaattatgtgttcaccccagttgacgtggggcattttcttgatgccaatctgtggggtgctccaattggtgcgtacatgacgcaacgttccggattagatgcgttcattgatttcagtcgtccagcggtgattttggttggtattccaatgatggttttggctggtgttgcgacttacttcaacagtcgcgcttcaatagcacggcagagtgcggaggcagcagaaaatccgcagactgcgttgatgaacaaaattgcgttgtatgtgtttccttttggtgtagttgtcggtggcccgtttcttccgttggcgattattttgtattggttttctaacaatatctggacttttggtcaacaacattatgtgttctctatgatcgagaaagaagacgaggctaagaagcagaaagctatcgaacgtcggacggctaacgcgcctgcgccaggctctaagccaaagtacgtctctacgacggcaccggtaagcgttaatggtttttcgaaagataccatgatatccgacgacggcgcaaagttggggtcccaggaggcggactctattgactgggtgactgaaacgaaaacagctaccactccggcggataagccggattgcgtcggctataacaacaatccaacctctcatactcggcgttctggacagcggacaaagagacgtaagcgctga

SEQ ID NO: 27884 - DNA, 363 bp, Mycobacterium leprae
gtgctttccgcatgtaaccgcatgaggcggtcatccgagtttgatgcgacggtaaagtttggactgcgcgcagtgcagtctgatgttatcattcacgtttggcgtgggtgtaacagggatgagacgaaggctccccatgtcgggctgatcatagctaaaacggtgggctctgctgtcgaacgtcatcgagtggcacgtcgattgcggcatgttgctcggaccatgttgggggaattgggcggagctgatcaggtggtgatccgtgcgttgccgagtagtcggaatgtgtcgtcagcatggttagcacagcagttgcgaaatggtttgagatgtgctcttgatctggcagagacggattggtga

SEQ ID NO: 27885 - DNA, 144 bp, Mycobacterium leprae
gtggccaagggcaagcggacttttcagccgaataaccggcgccgagcccgtgtgcatggctttcggcttcggatgcgcacgcgtgctggccggtcgatcgtgtccgatcggcgccgtaagggccgccgcacattgactgcttga

SEQ ID NO: 27886 - DNA, 1242 bp, Mycoplasma pneumoniae
atgggccagcagggacaatcaggtacctccgcggggaatccagactcgttaaagcaggataagattagtaagagtggggatagtttaaccacgcaggacggcaatgcgaccggtcaacaagaggccactaactacaccaacctcccccccaacctcacccccaccgctgattgaccgaacgcgctgtcattcaccaacaagaacaacgcgcatcgcgcccagctcttccttcgcggcttgttgggcagcatcccggtgttggtgaatcgaagtgggtccgattccaacaaattccaagccaccgaccaaaaatggtcctacaccgacttacagtcggatcaaaccaagctgaacctccccgcttacggtgaggtgaatgggttgttgaatccggcgttggtggaaacctattttgggaacacgcgagcgggtggttcggggtccaacacgaccagttcacccggtatcggttttaaaattcccgaacaaaataatgattccaaagccaccctgatcacccccgggttggcttgaacgccccaggacgtcggtaacctcgttgtcagtggcaccagcttgagcttccagctcggcgggtggctggtcagcttcacggactttatcaaaccccgcgcgggttatttgggcctccagttaagtggcctggatgccagtgacagcgaccaaagggagttaatttgggccaagcggccctgagcggcctttcgtggcagttgggtcaaccggctgggccgcgtggagagtgtgtgggatttaaagggggtgtgggcggatcaagctcagttggccgcgcaagcagctacaagtgaagcttccgggtcagctttggcacctcacccgaatgctttggcgtttcaggtgagtgtggtggaagcgagtgcttacagctcttcaacctcaagttcgggttccgggtcaagttcaaacacctccccctacctccatttgattaaacctaagaaagtcgaaagcacgacccaactcgaccagggcttaaaaaacctgttggaccccaaccaggttcgcaccaagctgcgccaaagctttggtacagaccattccacccagccccaatcgctcaaaacaacgacaccggtatttgggacgagtagtggtaacattggcagtgtgcttagtggtgggggtgctggagggggttcttcaggctcaggtcaatctggtgtggacctctcccccgttgaacgggtgagtggtcactaa

SEQ ID NO: 27887 - DNA, 2370 bp, Mycoplasma pneumoniae
atggaaaagaataaacaagcgttattactccaggccatcgaagatgtctttgcctttagctttagtaagtatgctaagtacattatccaagaccgggctttacctgatctacgtgatgggcttaaaccagttcaacgccgcatcctctatggcatgtaccaaatgggcttaaaacccacttcaccctacaaaaagtcagctcgggcagtcggagaaattatgggtaagtaccacccccatggcgatgcatcgatctatgatgcgattgtaaggatgtcacaagcctgaaagaacaacctcactactatctccattcacgggaataatggttccatagatggtgataacgctgccgcgatgcgctataccgaagcgcgtttaagtccgtacgggtttgaactactcaaagacattgaaaagcagttagtaccgtttgtgaataactttgatgacagtgaggtcgaaccgagcgtgttaccaaccctgttacctaacctctttattaacggtaccagtggaatagcggcgggttatgccactaatattgcaccccataatgtcggtgaactgcttgatggtttgagttaccggattgaaaaccctgattgtgatttaaaggccatcttaaagattgttaagggaccggattttccaactgggggattagtgtactttgagcaagagttggcgaacatctaccaaactgggaagggtaagtttgtgattcaggccaaatatgaaacgaacactgcgtttggccaaaaccagattgtaatcaccgaaatcccatacgaaacggtgaaggccaatattgttaaacaaattgaagagttaattagtgacaataaactcagtgccttggaaagtgtgattgacagctctgatcgtagtggtattcgaatcattattaaccacaaggactttttgagtgctgacaagattatggcgttcttgttcaaacacacccaactccaagtaaactttaacctcaacaatacggtaattgccaaccgttgtccggtacgggtggggttgttagcttactttgatcagttcctagcctttgcccacgaattgatcattaacagcgccaagtatgatttagcattggccaataagcgcttggaaatcattaagggcttaattaaggcggtttccatgattgatgaaattattcgtttaattcgccgtgctactgacaaacaggatgcgaaaaccaagctcattgacaagtatgcttttaccctaaatcaagccgaagcgattgtgtcgttgcgtttgtaccagttaactaacaccgacattaaggtcctgtttgccgaacaaaaagagttagagcaaacgatccaaacagccgaacgcttaattgctaaaccgcaagcacgaaaccagttgttacaagcacagtttttccaatacaaaaagcagtttaaccaaccacgacgcgcacaaatagttggtttaattgaaaagcaaaaggtacaagacagtgacttcatcgaacacaaggaagtgggcttactcattagtcacgatggcatctactttaagtttgaaccagaacagttagcgaagcacctagtggaatttaaaagtgaacaagaccaactgatttttggaggcgtagtacaaaactccgattacttttttatggtgacttcactcggtaacattattaccgttcccatttacaaaacgttaagtaacaccaaaaccaagatgaacgagttgttggccaaaaaaccgatcctaatggaagatgaaaaattggtactagcagggattgtaaacccagacaaaatggaacaacagctcttggtgttaacgtcacagtgcggtatggtcaaacgggtcgagttgagcaaagtcattaacacgaagcaaattaagtcaagctgctgcatggcactccgggaacgcgacaaactggtcaacgcctttgttcaaactaaaggggaacctaaactagtttgtctggtgtcatcttccaacagttttgctaccttcttagcggaagaaattccaattattagtaacaagggaattggggtgaaggggattaaactcaaagctgaggaaaaggtacggtttgcaatgccgttacaggataatgatgccttagtagtgattaacagtgatggtggtgtctataactttgaagtagtggaactggcagtcgctagccgcatgagtgttggtaaaaaactaattcccaaaaccaaaaccccggtaagctgttttgctgctaataagcacagtgagattattggtcatcgtggtaaaaatggtagtgatctgtttaccctaaatgagttaaaccgtttaccaaagtcaaccgttagtcaaatgcgtttgtttaagtggagctag

SEQ ID NO: 27888 - DNA, 1908 bp, Mycoplasma pneumoniae
atgaaaaataattacagcgaagcgaatatcaaaattctcaaggggctagatgctgtaaaaaaacgcccgggaatgtacatcggctcaaccgatagtcgcggttttcaccacttgctgtgggaaattttagacaactgtgtcgatgaagttttatcgggctttgctaatactattgccgttgttttacatgccgaaaaccagataactgttagtgacaacggtcgtggtattcccttcgaaacacactccgattccaagatttctacgattgacaccgtctttacctacctccatgccggtggtaagtttgataacgattcttataagattgctggagggttgcacggggtgggggcttcggtggtgaatgccttgagtgaccagttacaagtaacggttaaacgtcagggcaaggtgtaccgctcggtgtatgaaaatggtggtaagattaagcaaaaagcgcattgcattggtaatgccaaaattgacgaacacggtaccagtgtgacttttcgtcctgacccaaaggtctttaaaaagatccactttgacagcgaactaattcgtgcgcggttaaaggaattagccttccttttcaaaaagttacaactgaccttcgttgatgaaaccggcagtggggaaaaagaggtgttctttaccgaagccggtattagtcagtacttggacgaacttaacgctgattccaaacaaattgcgcaaaagatctttgttagtggcactgaagatgacattgaactggaagccgtgtttcagtttattgatggggaggatgaaaaactactttcgtttgccaattcgattcgcaccagcgaagggggtagtcatgaagcgagttttcgtcaatctgttggtgatgtgattaacaactactgccgcaagtacaacttcctaaaggagcgtgacaagaactttgaggccagtgaaatccgtgaaggcttaaacggcattattaaggtcaatctccccgaaaagattattgcctttgaagggcaaacgaagagcaaactgttctccaaggaagttaaagcggtagtgcaaaagctaacccaaaagcacttcttccagttcttggaacgtaacagtgttgatgctaaattaattgtcgaaaagctgttttataaccgcaaactgcgccaagaactcaaacaacaacgccaaattaaaaagaacctttctaatccgaaggccgagcgcattttgtttggtaaattagcaccggcgcagtccaaaaaagtggctgaacgcgaactgtttgtggtggaaggtgacagtgctggtggtacggctaaaatgggacgagatcgctttctacaagccatcttaccgttacgcggtaaggtgttaaatgtggagaaaattaacaacaagaaggaagcgattaacaacgaagagctgttaacactcatcttctgtatcggtactggtattggtaacaacttcaccattcgcgatcgtaaatacgacaagattattatcatgactgatgctgacaatgacggtgcgcacatccagattttactgctcaccttcttctaccgttacatgaaacccctaattgaaaaaggacacatttacctagcacttccaccactttataagtttgaaggtcgtgataaaaaagcccgttatctctgaaccgaacaggaattggaacagtaccgtgctaagcatagccactttaatgtgcaacggtacaagggtttaggggaaatgaatgctgatcagctctgggaaaccacgatgaacccgatgacgcgtaaactaattcaggtcaaattggataactttatccaagctgaaaagcaaattaatgtttttatgggtgataaaaccgaattgcgtaaaagctggattgaagctaacattaactttagtagtgagaactaa

SEQ ID NO: 27889 - DNA, 384 bp, Mycoplasma pneumoniae
atgagaattaaaggtggaaaacaaacccgcgtacgtcgcaagaagtggttaaagcaagctagtggtagctttggtacccgacatgcctcttataaggtggcaaagcaaacggtgatccaagccgctaagtatgcttaccgcgatcgtcgtaacaaaaagcgcgatttccgttcgttgtggatcttgcgcttaaacgccgctttgcgcgaacagggcatgacctattcggtctttatcaatctattgaagaagcacaacattgagattaaccgcaaagtgttgtcggaactagccattaaagaaccaagtaaatttaacctaattgtgcaaaaggttaaaagtgaacaaccgaaagccgctaagccagctgctttaggaaactag

SEQ ID NO: 27890 - DNA, 180 bp, Mycoplasma pneumoniae
atgaaagtaaaaagtgctgcaaagaagcgttttaagctcactaagtctggccaaattaagcgcaaacacgcttatacttcccacttagcaccgcacaaaacgacgaagcaaaagcgccacttgcgcaagcaaggaactgtcagtgcgagtgactttaaacgcattggtaatttaatttaa

SEQ ID NO: 27891 - DNA, 606 bp, Mycoplasma pneumoniae
atgccgttgattcttgatcagggctgttttgttagtgaaagtagatttcatagattggcacagaacataaaacaaggttccaggcgtgagcgcgaacaaaaaccgttaattaacgataaaattggctttaatgagttcattttaattgacgaaaatggctccaatttggggacggttagaaggaccgatgccctcaagatggctgaggaaaaacaactcgatttagtcttaattggttcaaacccagccaaacccattgttaagctcttagactttggtcgttacacttatgatttaaaacgcaaaaaacgccagtccaagaaaaaccaaaccattatccaaataaaggaagtggtagtgaaaccgacaatcgctaaacatgatctggaatttaaagctaagcaaacgacgggatgagctgaaaagggttatcacgttaagtttgtagtgcgcgcttttggtagagtaagtactaggattgagttaattgaaaaagtctttaatgacttttatctgctagtagaaccagcagtggaggtccaaaaaccactaactgcttcttccaaaacaatgtattctgctttgttagttccccgtaagaaataa

SEQ ID NO: 27892 - DNA, 2418 bp, Mycoplasma pneumoniae
atgttaatttctaaaaaaactttagctgttttaattcccgaaattacccacgtttccaacaatgaaatttgtgaaaagttacagcaaatcgggattgaagtggaagcaattcgcgcctttaaaaaccctgattacttacagttgggtattctccgcgctgttaccccccacccccatgacaaccacttgtatgtgtgtcaagttcaaatagacaaaaacaaacagctcaatgtggtgactggggcagttaacatagttgatcccaataatctcaataaacacgtgattgtcgccaaaaaaggggcagaactgctcaatggtttaatcattaaaacgaagaacattaagggaattatctcggacgggatgttgtgtagttatgttgatattaatccgtttagtaagcatttaattgctgacggtgatgacacgcatgcgattgtgctagacaacattaaccgcgatgaatttggtgattatttaagttttttaaacctcgatgacgtggtgtttgaggttactttacctaccaaccgttctgatttacagagcttaatcttcctcgctaaggaactagcagcagtgttgaaacgtccggtcttcttggaacagaaaaccaccatgaccctgcgcgagttctaccgctttccgcttaacttaagaaaccgtgctcaggccaatttctttggtggactttttttgcgtgatgtagcaattaccagttccccttgaactactaagggtttgttaattaaccaggagttacgtccagtcaactgctttgtggaccaggctaatatggtaactgtttacactggtcaaccaatccactgccatgatgctgacaagatccatggaagtgtggaacttaaactagccacccaattggaaacgatgttggccttagacaacaaggagtatgagattaaaccgggtgatctagtggtagctgatgaacagggcacaattgccatagtcggtattattggtagtaagcgcactatggtcgacaatacgaccaacaacatcttttttgaagttgttaactataaccatgagcgaattaagcaaaccgctcagcgtttaggagttgctaactttgctagtaggttaatgagtaaaccaattagtttacaagctaccgaaaactgcttgaactatttgcaaaataacttcctcaatcccgaaagcattggcaagattagtaagttttccagcaccattaaagccccagcttttaaccgcaaaatttacctcaactttaatcagttacgggagttaattggagtgactaaaaagcagttaaatgaccacatgatccgtaactaccttactagtttagggttcaaaatggaaaaccaaattgcccgcgcccccgcttaccggcaagacattacggtttgacaagacattagtgaagagttgttaaagatcttggacctcaacaagattaaagaggatgaaattttaagctccactaaactagagaaacacgaaaaactcaatgcttacgatgcgttgcaaaagctacgcactaaactgcaaaccttgggctttcacaatgtgattacttaccagttaatttcaccagaacgagcgcgtaactttaacctgtttgggttgagtaatttgtgggaaattaaaaacccgctttccaacgaacggagtgttttacgggttggtttaattgactccttgttgcgagtaattcaaaagaatgccgcatacaaaaataagttaggcaacatctttgagttttcttttgtcaaaactaaggacagtaaccaactccacattgctgctctttgattggaaaaaatgtttggttctacctaccaaaaggatcaaggcgttagtgtcgatattcccgccatgaagggcttagcgcagttaattatttccaactttggttttaactgcgactttgaaccaattactgaaggtgagtacttcactaagaacgtcggtttaaaactagtggtgtttaacgaacagattggttatgttggtttaattaaggatgagctgttggcgccttatgatttaaagggtagaccggtgtatggtttggaaattaacctagaccgcttgttgaactccttaaaccggttggagcgcagttataccccgattagcaaactacaagatgtctttaaggatattacctttagcttcccccgtgatgaaagtcactttgaaacgtttgtgaaagcgattaaaaaactacaaacgatttttaaatgggaattgatctcggtgtttgacaccgaaaaggatggtgtaccaatcaccaaatatacagtgcgctattacttaaagaatttcactaatacaccattaacgttagaacaaattaaagcagtggaaacgcagttaaaacaacagtgtgaactagctaaaatagcactcgatctttag

SEQ ID NO: 27893 - DNA, 1026 bp, Mycoplasma pneumoniae
atgattgatcaaagtaagttaattgaaaggtgaaaaactacctttgaaacagcacaaaatcctactgaattattagcttttaaaaacagcttccgcaatgctgatttaaagcctttacttagtcaaattaaggaaaccacggacatcgaaactaagcgccatttaggccaactttacaagcaattggaaagcaccttgcaaacactccatgatacacagctacaagtctttacccaagcccagtctagcagtgtattaactcatggtgatgtgatgttgctagcaacctcttttgcccctggttctagcaacattatttaccaggtaattgatgagttagtgaactattttaagaagttcttgtttacggttaactatgacagtgaattgactactattgcagactgttttgacctgctaaacattcccaaagaccatcctagtcgtaaccttactgacaccttttacttagacaaaaaccgcttactgagaacacattgtactgctgctactttacgtgctgttaaggaaacgaaaaagagtaataaccccgatattcggattgcttcctttggtgctgtttttcgtaaagatgatgacgatgccacccactcacaccagttcaaccaactggacttcatgtggattaaaaaggatttttctttaactaacctcaagtggtttatgcagaatatgattaaccacatctttggcgaaaatacttcagcgcgttttcgtctgtcccacttcccttttaccgaaccttcctttgaaattgacatccgttgctggttgtgtcagaatggttgtggtgtatgtaagaaaacacgttggattgaggtattaggggcgggtatcctccaccctcaagtgatggctaacatgggctttagtgacacggataatataaggggtatagcagctggcattgggattgagcggttggtaatgttgaaacacggcattagtgacatccgtgacctttacgacaataacttcaaatttttagcccagtttactgattag

SEQ ID NO: 27894 - DNA, 306 bp, Mycoplasma pneumoniae
atgcactgaattttcaaaaaggagcctaatataagtgttcaacaaaacccaacaaaagaaaacgttagtgatgttagcatgatagaaataaataatttgaccgctttagaaagggatgaaaaagtagaaacggaagacattaataccaatgtaatagcaaatacttatacagtgcaagccaatgttccaactgcatttcaaaccagtgaaacaaatagtaatactgttactaacgtcccaaaatctccagagttaataagtattcaaagattagaaagattaaaaaataggtacactttcctataa

SEQ ID NO: 27895 - DNA, 1947 bp, Mycoplasma pneumoniae
atgaaaaacctgtttgcttgccaacacttagcgttaagtgctattcaacacgctaagggtggtcatgtgggaatggccttaggtgctagtcctattttgtacaccttatggactaaacacatccagtttaaccctaactgtcccaaatggattaaccgggaccgtttagtgatgagtgcaggtcatggtagtatggccttatacccgatcttacactttgcggggttaattacgaagcaggaaatgctccatcacaaatacgggcaagtcaacacctcttcccatcccgagtatgcccctaataactttattgatgcgtccactggtcccttaggacaaggcctaggaatggctgtcgggatggccttgacacaacgggtactagcagctgaatttaaagcgttaagtcccaaactgtttgaccactttacctatgtggttgtgggtgatggtgatctccaggaaggggtgagttatgaggtagctcacttagcaggggtctaccagttaaataagctaatagtgctccatgattccaaccgggtgcagatggacagtgtcgtgcgtgatgtgtccttggaaaacctgcaaacccggtttaccaacatggggtgaaattaccttgaaactagtgatgcagttgcagacattgatgctgccattaaacaagcgaaaaagtccgataagccgaccttcattgaggtgcacacgacaattgctaaaaacaccaccttggaagaccaacccgctggtcactggtttattcctaccgacaaggactttgcgcgctttaacagcaacaccaagactaactttaccccgtttgaatatccccaaacggtgtatgacttctttcacaagcaggtcatagcacgccaagctaaaccagtgcaagcttacaaggaattactggaaaaactaaaggacaaaccgctgtatactaagtttattaattgaacggaaaacgattaccaggcgttgtacctcaaccagttagatgaacgcaaggtagcacaagccaatgcggcaacccgtaactacctcaaggactttttaggccaaattaacaacagtaattccaacttgtactgtctcaatgctgatgtagcacgttcgtgtaacattaagttaggtgatgataatttacataccaatccgcattcgcgcaacattcaggtgggtattcgggaatttggtatgtccaccattatgaacgggatggcactccatggtggggtcaaagtgatgggtggtaccttcctagcgtttgctgattattccaaacccgcaattcgcttaggggcgttaatgaacctccccaccttttatgtgtacacccatgactcttaccaagtcggtggtgatggaccaacccaccaaccgtacgatcaactcccgatgttaagggccattgaaaacgttcaggtttgacggccttgtgatgaaaaggaaacagcggctggggttaactatggtttgttaagccaagaccaaactaacgtattaattttgacccgtcaagctttgccttccctagaacaatctgatagtgtacagaccttgaaagggggctatattattagtaatagaaaacaacccgatgtcattgtggccgctagtggcagtgaagttcagctggcattgcaactagaacaagctctaaacgaacaacaattaaagacgcgggtggtgtcagtgcccaacattaacatgttgttaagtcaaccccaaagctacttgcaacaactgtttgatcctaacagtgttttactcaccttagaagcgagtgctagcatggagtggtatgcactagcaaaatacgtcaaaaagcacacccacttaggtgcttttagctttggtgagtccaatgacgggcaagtcgtgtatgaacacaagggctttaatgtgactaacttactcaagttgattaaaactctaaagagttaa

SEQ ID NO: 27896 - DNA, 1398 bp, Mycoplasma pneumoniae
atgcgatactttgccctcactgatttaaccaagcccactgcaaaatttaccactgatgccatggaactgcgtcagatatccaatgcttacctcaaccaagcccaagcatatttgcaaaagggtttaaagcaactcaaaaaggattacaagaatgccattttgtatacccccaaaacggagtacaagcgctttttgaaatggaagcaaacttttcttcaagatttaaaccaaacccaaaagcgcttctttattgttcgtgcccaacatttttcttacgtgttgttgtttaacttattggatgaacaggtggaagcggtgattgcgacctttaacaacttcttggatgaacaccgcttggaggcacaatccaagcagtttgatttagacacagctgtcaatgaactgcatgattactttgaccaactgcaaaagaacaccgcttacagcgaggatttaccaactcacctcacgcaaaaaaccgagcaattaattaacgctcgtaatacccagttaacgaatttgttaaacaagattgctactaccaaaccacccctaaacaaacagcaacgtttgttagccagttttcgcaattaccacgaacacctctttttaaagaacgaggtcaaaaaggtgacttggttaaacgaaccacgcgccaaaaaagagtctgttacccctgatgaagaacacattattgaacttaaaaacgtttacaagtacattactaatggggtgactaccaatgccgttttaaagggcatagatctcaaactcaaagcccatgatttcattgtgattttaggtccctctggctcggggaaaacgaccctgctcaacattatttccgggatggaccggccatcaagcggatctgttgtcgttaatggtcaggaaatgatttgcatgaacgaccgtcagttaactaactttcgccgcaactatgtcggttacatcttccagcagtacgggcttttacccaacctaactgtaagggaaaacgttgaagtgggtgctaacttgcaacgtaaccctgataagcggattaacattgatgaactgttagaagcagtagggatgaaacacctccaaaagaaactccccaacgagttgagtggtggacaacaacaacgggtctcgattgcacgggcgtttgctaaaaatcccttactcatttttggtgatgaaccaactggggctttggatttggaaatgacccaaattgtgctcaaacagtttttagccattaaacaacgctataaaaccacgatggtcatagtgacgcacaataacctaattgcccaactagccgatttagtcatttatgtggcagatggcaaaattcaagcactgcaagcaaaccctaatcccaaacaggttgaggacattaactgaatttag

SEQ ID NO: 27897 - DNA, 903 bp, Mycoplasma pneumoniae
atgcttaaccacaacagtaaagtttgaatagttaactatgcttgtgcgattgactattacttagataaacacaaacaacaacgcggtgtgttaacacccggtggtaagggaattaacatggcgattgtaatggctttatttggcatcaaaccaaccgtgttaacctttttgggtcaacctactaaagatttattcttgcagttgttaaaaccgtaccaactggacttagttagctttccagcgactacccaaacacggattaacgtgaagctgttggatggtgcccaaacaactgaaattaacgatgtcaccccgttaattgaggaacaagcagtccatgaaatgattgcttaccttaaggctaacgttaagcccaatgacctgttggtgttgaacggccgttttttacaacgcgatttagttaagttgttagatgttgcttttagcttaaccaagtatgttgtattagatgttgatgaacctcaactattacaactgttaaaccagcgccaaccctggttaatgaaaccgaaccgtgatgagtttgtagcaatggttaatgcaaataacagtaacgttgaccaacaagagttggtgcagttaataaagcagtttcagactacacagaacttattaatgtcagacggcgcgcagggtgcttacttctttgatcaacagcaactgttatttatggaagcgattcctccccaacagttagtttccactacgggagcgggagatacattgctgggtgttttcctagctaacttactgttagataaggatccagtgggtagtttaaaggtagcggttaactatgctagtgctacgattagcaagctcgctgtggtcaacagtaatgaccaaatagtgctaaaagctactaattattactatttataa

SEQ ID NO: 27898 - DNA, 2085 bp, Mycoplasma pneumoniae
atgttcaagccattgttaagcgctgagctgttttttaactgaacagctaaagattttaaagataaaacaagctttttaaaacaagcgtgtcgtgttttacaggacaaaaactgcattaaagaagaacaaatagcactcactgctttaaaagaaagggaggcacaaatcaccaccggaattatgtcaaaactggcattgccccacatgcaaagtgctaccgtgttaaaaccgtttgtggcggtgtttaaggtcaacaatgtggactggcaatccttagacaaccaaccggttaaactaatctttttaattggcgtacccaaagatcaaggcaacctccacttggaatttatttcgcagttttccaagttaatgttgcaggacgagtttgccaacaaagtgcccaacattcgcagctttaacgggttgatcaatttaattgacagttttcaacaaactgcagttgcaagtcaacctgttgttaacgaagcagcagctcagactgaagagccaaaggacacaaacactcagtatgactttgtggcggtaacggcgtgtcccaccgggattgctcacacctttatggccaaggaagcgctggaaaagtttgcccgcgatcacaacctcaaagttaaggtcgaaactcaaggaactgatgggattcagaaccagttaaccgagtctgatttaaacaataccaaaggcattattttggcctgtgaccgcttaattgatttaacgcgtttttacggtcacgcaaatgtggtggaagtgtccacaaccaaagcaattaaaacaccacaaacagtttatgaccaagtggtaaagaaggaaggcaaactactcggtaataagtccagtgatagtgctagtcaaacggaactcaaagaaaccactgaacagctctcgtttaaagactttcacaaacggatttaccgcgccattttaagtggggtttcttacatgctgccatttgtcgtgtttggtggcatcttaattgcaattgcctttttaattgacattaataatgctggcaatgctggtaaacaatttggctctaaagatcccatagctaactggtttaaaacactcggtgggttgtcgtttggtttaattgttcccattttaagtgcttacattgcctttgctctagtcggccggcaagggttactgcccggctttattgtggggttaatttcagctggtaagtttttactcaacattgacattgttactggaaaaattgattgagcgactgaatcaaaagtatcgagtggtttctttggtgccatttttggaggcttgttggcagcagtgttaattattgtgcagcaacgttacatctatagaaaattaccgcaagcattacaaggcattaagaacattctctttattccgttactaggaacgctagtcacagcagccttgttctgagtcattaacattcccctaatttacttgaactatggtctgtccaagttcttgcaaattatggacaaaccatatttggctcccttacttggtttagtgattggactcatgatgtgctttgacttgggtggaccggtcaacaaagcggcctatgtgtttggggtagtttcgctagagagccaaaacagtggtacggttgcaatggctagtgctatcttatcggggatggtgccaccattgggtattgccattgctgcgaccattcgcaagcagtgctttgacaaggaagaattaccagcagcgtatgcttgttatgtgatgggattaagttttattagtgaaggggcgattccttttgttgctaaacggcctaagattatgttagctgctaacctaattggtggtgctgtgtgtggtgttttaacgggagcatttgcgctaacgattcgtgcccctcatggtggcgtgtttgtctttgccttattgaaaactaacttagagggcattgccggcaacacactccaaatcggcgctggggttggcttagcacttctagcgctaatagtatccagcttcattagtgctggcattattattggtcataacctgcttgtagtgcgtaaaaaaacaaaacaactagtaaataccaatgcttaa

SEQ ID NO: 27899 - DNA, 900 bp, Mycoplasma pneumoniae
atgaaaatctctgttattatctccacttacaactgtggtgctttaattgtgaaagcactatgttcattagtgtcaaaccaaacaccagcatgtgagttagaagtgcttgtgattgatgatggatccattgataatactaggcaaattatcaaaaaatttcaagcaaaagttagctttactttaaagtacttttacaaaaaaaacggaaattggggtagtgtaattaactatgtcaaggaaaaccgtttggccaacggcgattggattactgttttagacagtgatgataccttaaaacctaatacactcaacaagttggctaatttagtggaaaaagcggattatgacttagtagtttttgactacactaagtgctgaaaaaagattaaactgaaaatccacacttacccgacttggtgaaaaaacatgacccgggaactacaaaagcaaacaccgttttgtattcctctaggtaagtttttgaaacgcaacctgttttacaagttgcccaagctcaaagaaaaggtgagttttcaggatgccttgtatacggctagtagtttaaagctcgctaaaaaagtgcgtcatgttaatcagtctggtggcaactaccactttaagcgtgctggtaattcaatgagtattccctgaaacattaagcgctttagtgctgaattggacatttgtaaagacttaattcgtttaaatgctcaggaaattgccctagtgcacttattgcgacaacagtttcgggtgcaacttaaagaaaagcagatacaactagcggttacccgtgactttaactttagtgggttctcttggtacacccgctgctttttatggatggtataccaaacgatgttaaagcgctacttttacttacaaacaactaaacaataa

SEQ ID NO: 27900 - DNA, 444 bp, Mycoplasma pneumoniae
atgcgagtacttgtcaacaatcccagagcgcaatatgactattaccttttaacgggttattgtgctggcttagtcttaaaaggtagtgaagtcaaatcgctagctttagggcaaggtagcttaaaggaagcctatgtttttattgacaagcacgaggtctatattaaagattttagcatttcgccctatgccttttcaggcgagttcaaccaccccttcaaacgggtgaaaaagctccttttaaaccggaatgagattaaacaaattacggcacgccaaaagcaagaaggactttccattattccacttaaagtgttctttaaaaatggcaaaattaaaatggaaatctggttggccaaacctaagaaaaaatttgataaacgtgaagccatcaaaagtaaaacgatccagcgcgaattgcgccaacaatatggatcgccataa

SEQ ID NO: 27901 - DNA, 1167 bp, Mycoplasma pneumoniae
atgagattaaacaaattacggcacgccaaaagcaagaaggactttccattattccacttaaagtgttctttaaaaatggcaaaattaaaatggaaatctggttggccaaacctaagaaaaaatttgataaacgtgaagccatcaaaagtaaaacgatccagcgcgaattgcgccaacaatatggatcgccataaccacgttgtttttagcttatcgaaaacccacgacttagttagtcgtatttgtcagaaactcaaaatgcccatggggttaattacccataatgagtttgctgatggggagacctacatccgctttgaggagtctgtgcgcaataaggatgtttttatctttcagtctacctgtgcgccagtcaacgattccttaatggaattgttaatagcaattgatgccttaaaacggggtagtgcaaaaagtattaccgccattttgccgtactatggttatgcacggcaagatcgcaaaacaatgggacgcgaaccgataactagtaaattagtagcggatttgttaaccacggctggggtgagccgcgtagctttaaccgacatccacagcgaccaaacccagggtttctttaatatacccgtggatacattgcgaacctaccacgtctttttaacccgcactgtagagctgttaggtaaaaaagaccttgtggtggtgtcccccgattatggcggtgtaaagcgggcaaggttaattgcaacatctttggaactaccgctagcgattattgacaagcgtcgcccagcccacaatgtagcggaatcaattaatgtcttgggtgaagtagcgaacaaaaactgtctaatagtggacgacatgattgacaccggtggtacggtaatagcagcagctaaactactccgggaacaccatgccaaaaaggtctgtgtcatggccacccatggtttgtttaacggtgaagcaccgcaacgcttccaaaaggcctttaacgaaggcttagtggactatttgtttgtctccaactccattcctcaaactaagtttgaccagtgtccccagtttcaggtaattgatctagcaccgttatttgaagaggtgttattgtgttacgctaataactcttccatttctgccatttatacgcgccacattgaatggataaaaaaacacgtctaa

SEQ ID NO: 27902 - DNA, 537 bp, Mycoplasma pneumoniae
atggataaaaaaacacgtctaaaactagatggggtgatagtgtgtgagggcaaaactgaccaagcccgcttacaacagctgtttgatgttagtgttattaccacgaacggttcagctttaaaccaaagaaccattaacctgattaaggctgtagctaaaaaacaaccggtgatcctcttcttggaccccgatgttgctggtcagaaaattcgccggcagttagaacaacacttagataagtatgaaagttgttttatagctcggaaagacatgaaacccaacagcactaaaattggggtagcggaagcaactgatgcagctttaatccaagcgttacaacaacgtcaggtgttcactaaaacaacccaacccactttaagctgggaacaatatttggaattaaacctcaacagtaaaagtaaacggttagcgttgtgtaacaaactacacttaagctactttaaccacaagcagctctttcgcaaacttaatttactccaacttacctttgaccaagtatgccagctcttaaagtaa

SEQ ID NO: 27903 - DNA, 831 bp, Mycoplasma pneumoniae
atgccagctcttaaagtaattgccacccccattggcaacattgaggaagttagtccgcgagttaaagcggctttaaccaagtgtgaagtgctcttttgtgaggacaccagagtaaccaaaaaactcttgggcttactcggcattgacttttcaaataaacagttcattattaacaacgagtttaaggaaaagcaaaacttaagtaaggtagctaacttaatccaccagtatcactgtggtttggtcagtgatgcgggttatccctcagtatccgatcccgggcacatattggtggagtatgtcagaacgcaactaccccaaatcgcaatagaagtaattaatggtcctagtgcgctggtttgtggtttggtaaccagtggcttccccgaaagtccactactgttcttgggcttcttggaccacaaacccactcaagtaacccaaacactcaaacactaccaaaacttccaaggcaccattgttttatttgaagcggtacaccgtttacaacaaacactggaagtaatccaaacggtgtttagtaatactgaagtttttgtagggcgggaactgaccaagctccacgaaagccactactggtttaatacaagtgcaccgctgccagacattactctaaagggcgagtttgtgattgtgattaacaaccaccacacccaaccggtggggcaatattccgaccaactcttaaaacaagaaattacccaattagtccaaatgggcgttaaggttaaggatgcttgtcattatttagctaaacgattgcaattaaaatcaaataagctctacaccttattccatgaaagtgattaa

SEQ ID NO: 27904 - DNA, 963 bp, Mycoplasma pneumoniae
atggaacaagtggaattaatcccgcaatgatacgttgcccctgtaagtgttaaggatgaagcagttgtgcgaaacctcaaagctaaggtaaaagctttgggatttgacaacgaaatcttagatgtaagggttttgaaagaacgcgaagtcatcgaagaagtcttttccttaaaatccggcaagctgccccgttcattaaagaacaccgcttttacaaagtgatttgtgttagatgaagaccgttatttaaaggtgaagattagcgagaagaatttactaggtcgttacatctacattaagatgatctacagtgaagatgcatgacgcattatccgtaacttccctggtattactggaattgttggttcctctggtcgcggtgcgttaccaactcctttagaccaagccgatgctgataacctcgaacaaatgcttaagggtatttcggtcaatccgaaaaagcgggtgttagtgaccaacactgccattgtggaaatggatgcggacaagtttgacgaaaagtgtcagtacattctcaagcacaaacaagttaaacccgaagcaattgcccaagttaacgaatctggtgaaatcattgatactaaccagtttgcgcaagctctaatggaagctaataaggccgaacaagacgaatgaaacgaggatgtagcgattgttaaaagtgaagctaacaaggttgacccatcagtgttaattccttacttgggtaaatacgaaattgtcgaaggtgacactaaggtcgatcaactgcaacaatttagtgttggtaacttagtggaagtccacttaactggtgcgattcacattcaaggtcaaattaaggctctataccaaggaacaattaacaaagcggtagtggaagtcgaattaaccaccaaaacgcagttaattaacttgcctttagaaaacctaagctttatcgaggttgagcaatcgcactag

SEQ ID NO: 27905 - DNA, 1665 bp, Mycoplasma pneumoniae
atgaacagtaacgcatacttggaagctcaaaggtggctaagccatccgcgggtaaaacccaacttaaaggaggtcattacggctatgagtgctgaggaaatcgagcacttctttagcttaaagaaaccgagttttggcactgctggggtacggggcaaaatggcaccggggtaccatgggatgaatgtgttttcctatgcttacttaacccagggttatgtcaactacatccagtcgttaaacccaactaaaaaaccattacgctttttagtagccagagacactagaaaacacggggcattgtttaatggcattgtgtgtgatgtgattacctctatgggtcatgtggtctatatgtttgataacaatgaaccaacaccaacaccattagtatcttatgtgattaagaagtaccactttgatggtggggtgaatgtcactgctagtcataatcctaaaaccgataatggctttaagatttacgatggtcatggcgcgcagttactagacttccaaactgatcaattaatcgcaatgttacccccagtggtaacaatgttagatttcgaaccacgtggtaacaacgagctgttacactttttggataacgaagtggtctacaaaaactactttgatgatcttaaggaaagcctagtagtggacaacgacagctttaaaaacctcccggtggtctttaccgggttacatggtacttcggtgaagttgttaccaaggtttttaacctatttgggttacagcaacattattagtgtccaaccacaaaacgtgtttgacgctaactttgctaatgctgaccacctcaaccccgaaagtaaggatacctgagagttagcgcgacagtatgcatccaacactaaggccaagttaatgatggcaattgatccggatgctgatcgctttgcgattgccgaatgaaatccgcaaacccaagactggcactacttctccgggaacgagtcaggagttatggtggcttactataagctcaaacacaagcagtttaagcgtcaaccttacattgtaacgacggtagtctctactgatctagtggataagattgccaagaagtacggggcttttgtcaagcgcacaaatgtcggctttaagtttattggtcaagctgttaatcacttctccaaagacaatgaactagtagtggcctttgaagaagcgattggtatgatggctagtgatggtttgaaccgcgaaaaggattcctttcaagcagcggccatcatgcttgaaattgcgcgctactgtcataataaaggaattagcttactagagttctaccgtggtgagatcttcggtgaatttggtgattactataactgaacggtaccacacaccattcacggagttaactggaaggaaaaaatggaacaggtattacaccagttaaccacagctaccattaaagaggttgtgggacacaagattaccaagattaaaaactatgtcgacattaacctagtcgaatatgtcttggaaaacggtaactggattaagttccgcatttccggtacagaaccgaagttaaagctgtactttaacctatctaacggttacttagcagctttaaaacacgaagcgaaaaagatgcacgagttcctagtgcgattgctcaacctcgataaagcttag

SEQ ID NO: 27906 - DNA, 1266 bp, Mycoplasma pneumoniae
atgaacatcgttaaccttattagtaaaaagcaacgcggcaaggcgttaacggaaacagaaattaactggtttgtccattccgttaataacaaaagcttggccgattatcaggtcagtgcctttttaatggcagtgtgatttcaggggatgaattccaaggagttgttttgtctcaccaaagcgatggtgaaatcaggagagagcctccactttaaccaccacagcaagttaagtgttgacaaacactccactggtggtattggtgacaaggtttccattgctttaattccaatcttaactgccttagattacagtgtcgcaaaactgtcgggtcgtggtttgggctacactggtggcacaattgacaaattggaagcagtgggagtaaaaacagattttacaccaacagaggcgcagaacttactagaccaaaatgactgctttattattggtcaaagtgagggcattgctcccgtagacaaggtgttgtatgcactacgcgatactacggcaactgtggacagtctgcccttaattgcttccagtgtcatgtcgaagaagttggcaattaacaacgactacatcttcattgaccttaagtacggtaagggcgctttctgtaaaacgaagacgatggctaaagagctagcgcagtacatgtacagtattgccaagcagtttaagcgcaaactctacattaaactaagtgacatgaaccaggttttgggtaaaacgattggtaatgcgttagaggtcttggaagtagtgcacttcttaaaacggaattgaactgaagtgggtgctgactttattcagttgatggagcaaatagtcactgaaatccttatagaaacaaaacgtgcaccaaacaaacgggcagctgtagcactttaccacgctacattagagggcgaaaaaccatggcagcgttttttaaaatttattgagctgcaaggtagtagttgggaacgttttttggatttaaaagagctgtttaatccccagtataaagcgccagtgttagcatctcaaagtggtactttgagctataccagtccggtggatttagccatggtctcgattagcttaggtgctggtcgaatggttaaaacagatctgattgacccaatggcggggattaagttagtgaaacaagctaacgaagtggtaaaagctggggacacagtcttagaactttacagctccaaaccaattacgcctgcccacatagaagctgcgcagcacaccattattattaagcagtaa

SEQ ID NO: 27907 - DNA, 675 bp, Mycoplasma pneumoniae
atgaaattagaatacaaccgcattattgacagtacactacttaaagctgataccttaccccacgaaattgatgctttatgtgctgatgctcataagtaccagttttacgcagtttgtgtcaatcctagctatgtgcggtatgccaaaaatatccttaagggtacgggggtgaaactgtgcactgtcgttggttttcccttaggacaaacaacacaacgccagaaggtgtatgaaactaagattgccattaaggaaggtgcggatgaaattgacatggtaatgaacattgccgagttcaaaaagcgctgtgcctgtgtcattagtgaaataagggcagtcaaaaaggtttgtggtaagcgaacgctcaaagtcattattgaaacggctttgttaaaccaggacgaaattcgtgatgccgttaatgtctgtattgatggtaacgctgactttgtcaaaacttctaccgggttttccatgcgtggtgcatcattggaagatatcacaattatgcgcgaagctagtggtaatctcattaagatcaaagcatcgggtggggttcaaacagcgcagcaattccttgacttctttaatgctggagttagtcggattggcacttccaatgcggtcaagattatggaagaattgcacaaactagaaagccatgaacatcgttaa

SEQ ID NO: 27908 - DNA, 1353 bp, Mycoplasma pneumoniae
atgtttaagtcaatgatctcgagcatcgttatgcgctcgatgcaaaaaaagatcaacgcgcaaacgatcagtgaaaccgatgtccaagccgttttaaaggaaattcggattgctcttttagacgctgacgtgaacctgttggtggtcaaaaacttcattaaggcgattcgcgaacaaaccgttggtcaaaccgtagaacccggtcaggacttacagaagtgactgctcaaagtaattaaacaagagttaatcaacattttgagccaacccaaccaagaaatcactagtaaacgtccacttaaggtaatggtagtcggtttacagggttcaggtaaaaccactacctgtgggaagttagcggtgtgactgaaaaaacagtttcaacaaaaagcgatgttagtggcactagacatctaccgccccgctgcgattgaccagttagcgaccctagccgaacaaaccgagtctgtcttctttgccaagggtacccaagcccccgaccaaaccaccaaggaggccgttaagacctttaaggaaagcggttgtcaagcaataatctgtgacacggcgggacggttacaaactaatcaggaattaatggatgagttggtagcaattaaaaacgaactccaccccgatgaaatcctaatggtggtcgatggtttaagtggccaggaaattattaatgttgccaaggagtttcataaccgtttaaaactcaccggttttattattaccaagcttgacagtgatgcccgcgctggagcggctttgtccttaacgagtttgttggaagttccgattaaactaatggggacatcagaaaaactcacaggtctagaacaatttcacccagaacggattgccagtcggatcttgggtttaggggatgtgatgaccttagtggaaaaagcggaagaagtatttgacaaacagagcttaaccaaaacagttagcaagatgttcttgggcaagatggacctggaagatctgttgctttacatggaacagatgaaccaaatgggttctgttagtagtattgtcaagatgctcccgggtaacttaacggtatcggatgatcatgtagagagcattgaagccaaggttaaactgtgaaaggtattaattaactcaatgacgcgtgaagaacgccggcaccccaaattaattaatcgtgacccatcgcgaaaacaacgcatcattaagggttcgggacgtaaaatggatgaactcaataagctaatgaaggagtggagtaaactgcaaacgaaaacagcagaaatgggccggatgctgaaaggtggtaaaaatccctttagtggctttggtggacttggtggcttaggtttttaa

SEQ ID NO: 27909 - DNA, 1152 bp, Mycoplasma pneumoniae
atggcaaaaacaattaaacatccccgatggggtagatatgtagcagaagcagttggtcgtggtcaccccgataagatctgtgaccagattgcggacagtatcttagatgaatgcattaagcaaagtccgaccagtcacgttgcttgtgaggtctttgcttccaaaaatctgattatggtgggcggggaaatccttaccactggttatgttgatgtggtccaaaccggttgaaaggtattaaatcggttgggttacaccgaaaatgactttagctttttgagttgtattaactcccagtccagtgaaattaaccaagctgtgcaaagtaatgacgaaataggcgcgggcgaccagggcattaccgttggttatgcttgtagtgaaaccgagcaattaatgcccttagggagtatcgtagcgcaagcgctggtgcaacgcgctgctcgtatcattgaccaataccccttcattaaacacgacatgaagagtcaggtagtgctcaactatactggtaacaaagttcaatgtgaatcagttttaatgtcggtacaacatactcaggacgtaagtttagaccaactgcgccaaacaattatcaaccaagtgatcctccccgtattaacggagtacggtttaaatgatcctaaaatcaaacacctagtcaatcccgggggttcgtttgtcgttgggggcccgatggccgatacggggttaaccggacgcaagattattgtggacacctatggtccgtacgctaatcatggtggggggagttttagtggtaaagaccctaccaaggtcgaccgcactggagcttactttgcgcgttttattgctaaacacattgttagtttgggttgagcggaagagtgtgaagtgagtattagctgggtcttttcccaaccattaccacaatcaattcaggtcaaatgctttaacattaataaggaatttagtgaacaattaataaaccaagttataagtcaatatttcaattgatctgttgctaaaattattgcaaagttaaaactccttgatcaagttgagtactttaggtatgctgtttacggtcactttggtcaccaaacagccccttgagaacaactaagtgaacgtgactcgctgcaatgtttaatcaaaaatttccaataa

SEQ ID NO: 27910 - DNA, 960 bp, Mycoplasma pneumoniae
atggaacaacctttgtgtatcttgggaattgaaaccacttgtgatgacactagcataggggtaatcactgagagtaaggtacaagcacacattgttttatcatccgccaaattacacgcccaaactggtggcgtagtgcccgaagttgcagctaggagtcacgaacaaaacttgcttaaagcactgcaacaatcaggggttgttttagaacaaattactcacattgcttatgccgctaatccgggattacccggttgtctgcatgtgggagctacctttgcgcgcagtttaagcttcttattggacaaacccttattgcccatcaaccacctttatgcccacatcttctcggccttaattgaccaagatattaatcagttaaaactccccgctttaggcttagtggtgtccggggggcacactgccatttacctaattaagtccttgtttgacttggagttaattgctgagactagcgatgatgcgattggcgaagtttatgataaggtgggccgcgctatgggttttccttatccagctggaccccagttagatagtttgtttcaaccggagttagttaagtcacattatttctttcgtccttccacgaagtgaacgaaattttcctactcggggttgaagtcacagtgttttaccaagattaaacagttaagggaaaggaaaggctttaatccccaaacccacgattggaatgagtttgcttctaacttccaggccaccattattgatcactacatcaatcatgtcaaggatgccattcagcaacaccaaccgcaaatgttgctgttaggtggtggggtaagtgctaataaatacttaagagaacaggtaacacagttacagctgccttacttaattgcgccgctcaagtacacgagcgataacggggcgatgattggtttttatgctaatcttttaattaatggcaaaaacaattaa

SEQ ID NO: 27911 - DNA, 1458 bp, Mycoplasma pneumoniae
atgaaaaaacagttaaagtattggtttagtctaatgggactaaccatgtcagttgggttaactgcttgtagttccaaccagtttgtgtttgctaactttgagtcgtatgtgtcgcccttacttttagaaagggcagaagccaagcaaccaatgacctttcttacttatcctactaacgaaaagttaattaacggatttgctaacaatacctatacggtagcagtggcctcgagttatgctgtgagtgaactgcagcaacaaggccacttactaccaattgattgagctaaattcaatttaaagaaaacccaaaatggtagtaaccaagccaccattcaaaacaaagaggatgccaaagaattatttaccaaagaaataggcgacattagtggtgaacttttaaactggggtgtgccctactttttacaagacctcgtgtttgtttaccggggcgaaaagattcaagaacttgaaggtcaagatgttacttgatcaacgattattaaagctattgttaatcacaaagaccgctttaacaacaaccgtttagccttaattgatgatgctagaacaatcttttccttagcgaacgtcgtgcaccatgaggttaagaataccacggtagatgttaatcctacaggtagcaccttaaactactttggcaacgtttacgaaagttttgcaaatttaggtctaaaacgtgataacctcaacacgctctttgtcaattcggactccaacattattattaatgaattagctaatggcagaagacaaggtggcattgtttacaatggtgatgccgtatatgccgctttgggcggtgatctccgcgatgaaattaatgagaataacttgcccaacggcgataacttccacattgtgcaaccgaaacactcgcctgtggccctagactttctcattattaaccagcaacaaactcactttagagatgctgcacaccagttaatttaccagttggccttagaaggcgctgatcaaacagcagaagaattattaaaaactgatgaagagaaaggtaccagtgatgaggactattacacttatggtgcaatgcagaattttagttacgttaactatgtttcgcctttaaagaatatttctgatgaaaccactgggattgtgtttaaggaaaacaaacaagctgatactaagcaagttgtcaaacaacaaagtcaatcagaacaacaatctgaatcagcagaaaaggaagaaacggaacaagatgatttctacactgctactctcaaaagtttgttgaaagcggacagtttagatgacaaagctaagaagttagtagacacaattaaaaagacttacaagatcaaaaaagccgacaatattaattgggctaacttaatcgagaaaccaattaccccattacaaaggagtaatttaacattatcgtggcttgactttaagcaacgcttttgataa

SEQ ID NO: 27912 - DNA, 267 bp, Mycoplasma pneumoniae
atgaagaagattcaagtagtcgttaaagaccctgtgggcattcacgcccgtcctgctagtattattgctggtgaggctaataaatttaaatcggaattaaagctagtatcaccaagcggcgttgaaggtaacatcaagtcgatcatcaacttaatgtctttaggcattaagcaaaacgaccacattaccatcaaggcagaaggaactgatgaagaagaggcactaaatgctattaaagcagttttagaaaaacaccaagttatttaa

SEQ ID NO: 27913 - DNA, 1527 bp, Mycoplasma pneumoniae
atggatctaaaacaacaatacattcttgctctagatgaaggaaccagttcttgccgcacgattgtgtttgacaaggatttaaaccaagtagcgattgcccaaaacgaatttaaccagttctttcctaagagtggttgggtcgaacaagatcccttagaaatttgatcagtccaattagctacgatgcaaagtgctaaaaataaggcacaaattaaatcaaacaacattgctgctgtagggattaccaaccaacgggaaaccattgtgttatgaaacaaagaaaatggtttgcccgtttacaatgcaatagtatggcaagatcaacgcactgctagtttgtgtgataagttaaaccaagacaccaagataaaggagtttgtcaagaaacacactggtttaccaattaacccttattttagtgccactaagattgcttgaatcttggaaaatgttcctttagcgcaaaagatgcttaaggaagacaagttgttagccggtacaattgatacctggttaatttgaaaactaacgggtggtaagatgcatgtaactgatgtaagtaatgcatcgcgtacgctcttgtttgacattaccaccatgacatgatcacaagagttaggcgacatctttaaagtacctttatcaatcctacccaaagtgatgccatccaatgcccactttggtgacatagtaccgagtcattgatctactagtgctactggtatggtacctattcgtggggttgccggtgaccaacaagcagccttgtttggtcagctctgcgtggaaccagcgatggttaaaaacacctatggtacaggttgttttatgttgatgaacatcggtaacgaactgaaatactcccaacataacttattaacaactgtagcttggcagttagaaaaccaaaaaccggtgtatgccttagaaggtagtgtttttgtggctggcgcagccttaaagtgattaagggatagtcttaaggtaatgtactcggcagctgaaagtgacttttatgctaagctagcacaaaaggaagaacaggaagtggtgtttgtcccagccttcactggtttaggcgcaccttactgggatgcttcagcaagaggcgccatctttgggatagaagctaataccaaaagggaacatttagtaaaagctaccttggaagcaattgcctttcaagctaatgacctgattaaggcaatggctagtgatttaaacagttctattaaaaaaattaaggctgatggcggtgcttgcaattccaactatttaatgcaatttcaagctgatattgctaacttagaggtgattattcctaagaatgtggaaaccactaccatgggtgcggccttcctagctggtttagcagttaattattgaaaggacactaaacaactagaaaaactaactggaatcgctaagcagttcaaaagtcaaatgaaccaaactgtgcgggaaaagaaatcaaagcgttgaaacgaagctgttaaaagaacactaaaatgagctagcttagactaa

SEQ ID NO: 27914 - DNA, 1356 bp, Mycoplasma pneumoniae
atggtccaaacacccagtgaaataaatacccaccttaaacacctcttggcctgtgatgcttataagctatcacaccgcttaatgtatcctaatgacacgaccaacttatacagttgtttaacagcccggggtggtcgtggtggttttccaaattttgtgtgaaaccacgagtttgccaaaaagattattcttgaagtgtttggtaacttttgtgatagtgtgttagcagtccaaaacgatcctgggttggcccaagcgctcactgacaaggtgaccactgtttttggtgatccccagtttgggttggagtttacccagcacatctgttatttagctaactttttaaaacaacaccaccagttacccttaacggtaaagattcaccagagttctgagggtttagccttccgtacacccttagtaactattacaggttcggaccaaatggttcccgagttagtttggttagtcaactattttgaaaccgtattattggaaaacatctgattgtaccaaactactttaactgtcgcccaaagcttaaagctgctgttggaacgctatgctaacgaaaccgcggataatactgaatttacccactttcagtgtcatgattttagtatgcgtggtatgagtagtcttcaaagtgctttatatgtagctaatgctcacctgcagtactttagtggcagtgacaccattttaggcggtgtagctgctaaatcgatcttagctagtgaacactcggtgatgtgtgctgatggtcaagagggtgaattgaatacctttaaacgtttattggagcagtttcctaacaaaaatctgtccttagtgattgattcttatgacatgtggcatgttctagataacatcttaccccaactcaaggacttagttttacaacgacaggagaagctgtacctccgacctgactcgggcaactttgaaacccttatttgtcagggcaaacggtttaaccccgaggacaaaactacctggggagtaattgattacttagattaccactttggttccactgttaaccaaaaaggttataaggttttgaaccaaaagttgggtattgtttatggcgatggcattacctatgagcggattgagtacattttggaacagctcaaacaacgtgggttttgttcttccaacattgtctttggggttggtagtacaacttaccaaaaccttaaccgtgatacgttgggatttgtgtataagttgacagccatcaaaaagggtaatacctgacatgatgttaccaagagtcccataaccgatcccaccaagcagtccatagggggacgatttgataaccccaacctaattcaggtttacggttaa

SEQ ID NO: 27915 - DNA, 1674 bp, Mycoplasma pneumoniae
atgaatttagacaacgccaagtgctttaagcaacgggtttttattggcaatttaacttccgagcacctcaataaaaccgttactattgccggatgggtcaaacggattaagaagttaggtgaacttaactttgttattgtcggggacaagactaatactattcaggttacctgtaaaaataaggaacaggtcaagtacttaaccagggaagacttggtgattgtcaagggcaaactgaaacgcttagacagtgttcggtttgaaattaccaatcctactattaccttatttgccaagtccaaaacaccccctcttatcattgaggacaaaactgatgctttagaagaagtgcgtttgcgttaccgctacttagacttacgccgtccggtgatgcaaaagcgcttggcgttacgccataaggtaactttagccgtccggaactgactagatcaaatggggtttattgaagtagaaacacctacgctcacgaagtccacaccggagggtgctagggactttttggtaccggccagaattagggaacatagcttttacgctttgccccaaagtccacaaatttataaacagttattaatggttggtggtacggaaaagtacttccaaattgcccatgtttaccgcgatgaagacagccgcaaagaccgtcaacctgaacacacccaaattgacttagaggtggccttttacaccaaggaaatggtgatggatttaatccaaaggttatttgtcgatgtctttcgccaagtgttaaacattaagctcaaaaaaccgtttccagtgttaaagtttgctgaagcctttaaccgttttggcagtgacaaaccggatttacgttatggtttcgaactggaagactgcactgatttattccaagacagtccgaaccaattcactaacttaattaatgctggcggcatagtcggtgggatccaattaccgaatctttatttagacgaagtttcttttaaagcattgaggaaactagctaaggacaacggggtttccttagagttttactctgataaagctagttccctaaaacaacccctggatttaccgttagcaggcaccatcttactggtagcacacaaaagtaaaacgcaagcttgaacggcattaggcgccattcgcaatgagttgaagtaccacctcaacttagtgaaacccaaccagtacagcttttgttgaattgtagactttcctttatacgagtttgacgaaaaggaacagaagtgggtttcggcgcacaacatgttctccaatccccaaccgcagtggttggttaactttgaaaaccacaaggctgaggcgttgagtgaacagtacgacctagttttaaatgggtttgaactgggtagtggttcaattcgaatccatgacccagaagtacaaacccgtttaatgcaatctttaggggtggatccccaacagtttggctttgtgatggaggcttaccagtacggtgctcctgtacacgctggcatgggtttgggattagaccgcttaatgatgatcattaacaatgtggacaacattagggaagtgatggcctttccgaaaaatgcccaagggatagagatgcacactaatgcccctgatcaggttgacattaaagacataacaacaatatggtccaaacacccagtgaaataa

SEQ ID NO: 27916 - DNA, 1245 bp, Mycoplasma pneumoniae
atgagtgtgttgcaaaaaccgcgcggggttaaagactggtatggtgaggagttaatctacttcaattgaacggtgcaccagatcactaatttggcctgaaaatgaggctttagtgaggtcaaaacacccctgttggaatacgctgaagcctttaagcgcaccaatgccaacgccgatattgtcaagaaggagttgtatgaattccatgacaaatcgaaccggctgttagccctgcgtcccgaggctactgctgggatagtgcgcttggtctgtgagaacaaactactccaaccacaaaactacccgttaaggttgtttaccattggcaccatgtaccggtatgaacgcccccaaagtaaccgttaccgcgagcactaccagtttagttgtgaagtgataggtgacactaatccaaccgtgttactcgacactttactgttgggtcatgccattatccagcaattgggaattgaaggagtgatcctcaaacttaacaacttaggtaacagtgctaccattcaacaatgaaaccaagcgctgcaagcttacttaacccagtttaaggcgcagttaaccgagttatcacaaagccgtttatcgaccaatcctctaaggatcttggacgacaaggttgatggtcaactaccctttatcagtgatgccccccaaattgagcagttcttggatgctgagcagcaggcactgaatacttgactgcagcaacagttaacccaacaacaggtgccgtttgagtggaatccaaccctagtccggggcttggactactatactggggtagtgtttgaatttgttaaggatgacaccacggtactagctggtggggtgtatgataacctagtggaagagttaggtggtacacctactaaagcgctgggttttgcttgtggcattgaacgctcaattaattgtttaagtgcggttaaaaagcaagcaattttggccaatcaacccccacgattactggttataggtctcaccgaagcagcgttggaaaagctgttacaactttcattgggttgaagggcgtatcatcctgtgactatttatcctaaagttattagaattatcaatggcatcagagccgcgcaacggttaggttaccgctttttaggggtcattggtggtaataatttagaacagcaaaccattaccgttaaagacctggctactgaacagcaaacaacatacacttgagatgaatttagacaacgccaagtgctttaa

SEQ ID NO: 27917 - DNA, 576 bp, Mycoplasma pneumoniae
atgagcttttcccaagttttccaccaatccccacgtggttgaatcgaagtgatttgtgggccgatgttttccggtaaaaccgaagaattattgcgcaaaattaagcgctgaaagctcgccaagattcccgttattatctttaaaccaaagattgatacgcgccaacaacacctcgtgaaatcccgtaacggtcacagtgatgaagccattgaaattaattcacctttagaaatctatgactacctcactaaagatcgttttgatgtggttgccattgatgaagcccaattcttttcgagtgaaattgtcgaagtggttaaatcactcaatgatctcggcattaacgtcattgtttctggtttagacacggacttccgcgctgaaccctttggtagcattccccaactattagcgattgccgacaagatttgtaagttagatgccgtttgtaatgtctgtggtcagttagcccaacgcacccagcgcatagtgtccaagagcaacgaaaccgttttaattggtgatattgaagcttatgaaccacgttgtaagttgcaccaacccagtgcagggtaa

SEQ ID NO: 27918 - DNA, 795 bp, Mycoplasma pneumoniae
atgtttaatttaagtgattttagtgaattaccacgttggattggtgccgaatttttaggcacattctttttaattctttcaggtaacggtgctggttcgcagctaacactcaataagatgtttgctaaagaatcgaaagcaaagttactaactgctgcttttgcttgaggtattgctgtattagttggtgttttaatagctaactctttgtttgagggtgcgggtaatattaacccggcagtgagtttgttctatgctgtttcgggaactattcaaaaagctttatatccattgcatgtaaacttcagcattccattactttgagtagcactcctacttgcttgagtagcacagtttgctggggcaatgttggcacaagcattgttaaacttcttgttctgaaagcatattgaacaaactgatccacaatcggttttggttacccattgtactaacccagcaatctttaacattcctcgcaactttgcaactgagtttgtagcaactagcgttttaattgctagtttactggtggctggtagttttggtgccaaccgatttgaccagtcaccacgaggggttgtaccaatgttagtggttactggcttaattatgtcttttggtgccgctactggtactgcaattaacccagcccgtgatttaggtccgagaattgtttactgattgagtccaattaaaaataaggatcctaacttaaagtacagttggattccggtagctgcacctctaagtgctagtgttatcttaggtgtgcttgtggctgttatcgtttag

SEQ ID NO: 27919 - DNA, 4332 bp, Mycoplasma pneumoniae
atggtattcgacaccgaaaccgaaaagggtaaacgcatttgagcattatcacagtttttagttaagaaaaatattctcgatcacaacgaattgcaccaactcaacaaccggattgaactggtttacctcgagaatgatcgcgaaaacgccctgtttctcgtggcgctcactttaaaaaaaccgttaacaattgacatttgaaacgccctgtatgagggctttcaggatgcggaaggggcagaactgaggattaccttccaagaagatgccaccttctttaaggacgggtccactaagtccagtgtcaccttagccattatcaaagactacttcaaaagcttctttggtaaggacaagaagtaccgcatcctgttagagcaagagttaacccatcctaacttcttgtcctacagtaaccatgaactgaaagctaactgccagtcccaagaattagaccaatggttaattgaacaacgccaagccttcattaagtggatgcaccaagctgggtttacccactttggttttgtctcgttgtttaatccaccagcggaaaaacaactaaaagtgaaatcaatgaaggtatccaagtacgacaagcagtttgaaaccgaggtctttagtacggaatttgtccccattcacaagattaaccaacaaatggatgagatcaaactaatggggcaaatctttgagttaaaggactttcctgggtacaacaacctccgtaatacccttaatatttatgtcactgatttccaactaggtggttcgttaattttgaagtggttttacaaggatcccaaaacaattgagggcattaagattggtacctgagttaaggccacggttaaggtcgaacgtgatgccaagacccaactactccagggtatcattaaggaaatttccccgattgaaacccccgcttactatcgccgccccgatcaggacaaacaaaaacgggtcgaattagttttccacaccaagatgagtgcctttgatggcattaacagtgtccaggaatacgcccagtttgccaaagaacgcgattggaagacaattgctgtcactgacaaggacaacattcacatttatcccactttatatgaagtggccaaaaagtacggcttgaaggccatttatggtttggaatgtaacctcattgatgatcacattaagatagttagcaatcctgataaaaccaaacttaaggatgcgacctttgtcatcttcgacattgaaacaactgggttacacggtcggtatgactcggtgattgagtttgcgggaattaaggtcaaacataaccgtgaagtggaacgaatgcagttctttctcaagattgatggacccttacctgcagcagttaccgaaattaccaagattacccaagcacaactagaagatgggatggaacagcaagcggggttggaaaaactgcgcgcttgactagatggttgtgtaatggtagcccataacggtttgagttttgacttgccctttttacaaacccagtttgaaaaatacaacattgcgccactaaccaatcccttaattgataccttagccttatcctgggccttaaatcccgggtttgcctcccatacgttgagcaatatttgtgccaagctcaagtttgactttgatgatgaacgattgcaccgagcggattatgatacccaggccttaaaaaaggtctttgactacttcaaggaacaggtcgaactcatggggattactaatctcgagcagttagaccaagagttaaaccagcagtgccactttgaactgctcaagcgcacttttaccaataccggcattatctacattaagagccaaagtgggtttgctaaactgtatgaactgttatcaattgcgctcaccgataacaacgctactcgacccctagtgttaacttcaacactccaaaagtttgctaaatcctttgtcattactgataacccggtgcaaggtgatatctttaaagcggcattgactaaaccgcttaaagaattagaagcggccattaaaagagttgactttgttttaattgccccacctggtgcttatgctggttacaccatcagggaaggtttgaaaaaagaagccattcctaacgcaattaagttagtggtggacacggcccaaagactcaataagttagtggcagttgcctcggatgcttactttattcacccctgggagaatgagtactataaggccatagtttgtgccaagggtctgggtgggcgttgacaccgtcactttaactataaggaaagggaacaacgggttcccaatgtgtttgtgcgtaccacaggggaaatgctcaatgaaatgagttttttaggcgaacaattagcttacgagttagtggtcgaaaacaccaataagttagcgaaacaactcaccgctgatgacctggtaccagtgcaaaccaaactccaaccaccagtaattgaaggttctaacgaaaacctggcagccaaaacctggagtcaagccaaggccatttacggtgatcccttacctaagttaatagaacaacggatccaggaagagttaaaagcgatcattgacaatggctttggcattatttactggatttcccatttactagtcaaacaatcggttcaagatggttactttgttggaccgcggggttcaattggttcttcgttggtagctaacctgattggtatctcggaaattaatcccttagtgccgcattatctctgtgagagctgtcagtactttgaggtcaacgaagaggtcgatgatgggtatgacctcatggtaagggattgtccaaagtgtggtgccaaagcagcctttaagggtgatggtcataacattccctttgctacctttatgggttttgctggggacaagattcccgatattgacttaaacttttccagtgagtaccaagccaaagcccatgcttatgtgagggaactgtttggtgaacagtacaccttccgtgctggcacaattgcgacagtggccgaaaaaacggcttacgggtatgcgcgcaactactttgaaattattaaacaaaccgaattggccaccgctcccgaaattgaacgctttaagcaaaagttagtcgggattaaacgcacgaccggccaacaccccggggggattatgatcttccccaaccacaaatcggtatatgagtttaccccgtgtggttatccagctgatgatacttccagtgattgaaaaacgacccactttgaatatgatgcgttagggaacaccatcttaaagttagatattctgggccaggatgatccgactatgttaaagcacctgggcgatcttacccatgtcaatccacaaaacattccccggtttgacaagaagctcaccgaaatgttttggtcggtcaatcccttaaaactaaaaccgcactacttagatgaacccacgggagcgattgggattcccgagtttggtactaagttcgttcgcaagatcttggaacaaaccaaaccaaagggctttggtgacctcattcgcgtctcgggtctaagtcacgggaagaacgtgtgggcggacaatgcgcagaaaatcttgaaggaccaaaacttaagcttaaaggatgtaattgcctgtcgcgatgacattatgctctacctcattcataaggggatgcaggccaaagatgcttttgagatcatggaaaaggtgcgtaagggaattgctctcaatgccaaggaagtgcagttaatgcagagcaatggggtcgaacaacactggattaattcgtgtttaaagattagctacctgttcccgaaagcccacgccgcggcttatgttttaatggcctgacgaattgcctggttcaaactgtaccacccgttgagctactatgcttgtttgttgagctttaaactcaaggaacatgatgtcagtggttttaaatcaggtgtgagctttgtcaagcaaaaactagaggagctcaacacactgtaccgcattaaacggattaaacccaaagaagcagaactgttaaccagttacgaggtttatttagagatgatggcccgcggcattaaactagaacaaatctctttaacccactcccacgccactcgttttgtcgagcacaacggcatgctaattgccccttttattacgattccggggatgggggaagctgtggccaattcgatcatagaagcgcgtaacgaaaagccctttagttcgctcgatgactttaaaaaacgcactaaaattaccaaaaaacacattgaagcgtttacccaaatgcaactactcgatgagtttagggagcaagacaaccagaaaaaacttttttag

SEQ ID NO: 27920 - DNA, 537 bp, Mycoplasma pneumoniae
atggcgttaagccaaatcacttcactactcttttttgaagtaactaaggaatcacccttagaagaaattgttgtaaaaaccccgtttaccaaaacgaagggttataagctcaaaaacgaaattgttctagtccccataatgcgcgctggcctgggtatggttgacccaattgtgcgctattcggaaaagattcgtgtgggtcacttagggatctaccgtgaacatgagggcactaatgtaatttcttactataagaaaatgcccgaaaacattggcaactcccacgtgattatcttagacccaatgctagctactggtactaccctagccacagccattagttccattaaaaagaaccacccgattaagattagtgtggtggccatagtagcagcaccagagggcattaaagccgtggaagcagcgcaccctgatgtggacatttacctagcagccattgatgaaaaattaaataaggataattacattattcccgggcttggtgatgctggggatcgcttatttggtactaaataa

SEQ ID NO: 27921 - DNA, 1089 bp, Mycoplasma pneumoniae
atgttaagtgcgggaattgttggtttacccaacgttggtaaatcaaccttgtttagtgctattaccaacctgcaagtggaaatagctaactatccctttgccacgattgaaccgaatgccgggatagttaacgtaatcgatgagcgcttagacaaactagcgagtttaattaaacccgataaggttacccacactacctttcgctttgttgacattgctggtttagttaagggtgccagtaagggagaaggactgggcaaccagttcttggccaacatcagagaagttgaccttatttgtcacgtagtgcgttgctatgaggacaagaagattgtccacgttaataaccaggtcgatcccgtatttgactttgaaattattgtcaatgagttaatccaggccgacattgaggtggtgaatacccggattggcaagattaagcgcaaggccgaatctggtgataagcagtccaaggaagaatatcaactgctagcacccgttttacaaggtttgcaacaaaaccagatggtgttgcatctagtgaatgaagtagatttaaagaaactcaagtcacttaatttactaaccgccaaaccgatcctagtggtggccaatgtgtcagaagcggatttgtccaaccttgaccataatccccacctcactcagctcaaccagttcttaaaacaacataacttaccccatgccattcctgtttgtgcattattagaaaatgagttgagtagcttggatgccaatggtcgtcaagactggctcaaggagttgggtttaagtgattaccaaggtttaaaccaactaattaaaacggcttatgatgcgattggtctgtggtcattctttacctttggtaagcaagaagtgcgcgcttgggcttttaaaaagggttggttagcaccgcagtgtgcgggtgaaattcacactgactttgaacgtggttttattaaagtagaagtaattagttgaaaccaactatacgaattaaaatcgctccaggaagccaaaaagcagggcctggtccgtttaagagggcaaggcttacgtgatgcaagatggtgatgtgtgtcactttaa

SEQ ID NO: 27922 - DNA, 867 bp, Mycoplasma pneumoniae
atgctagtaaacatcaaacaaatgttgcaacacgctaagcaacaccactatgctgtaccccacattaatatcaataactatgaatgggctaaggcagtattaacagcggctcagcaggccaagagtccgattattgtctccacttctgagggcgctttaaagtatatttccggacaccaagtggtagtaccgatggtaaagggcttagtcgatgctttaaagattactgtacccgtagcactccacttagaccatggtagttatgaaggttgtaaggcagcgttgcaagctgggtttagttccattatgtttgatggctcgcatttaccctttcaagaaaacttcactaaatccaaggagttaattgaactagctaaacaaaccaatgcttctgtggaactagaagtgggtaccttaggtggggaagaagatggtattgtgggtcaaggtgaattggccaacattgaagagtgcaagcaaattgcgaccttaaaaccggatgccttagctgctgggattggtaacatccacgggctttaccccgacaactgaaagggtttaaactatgaactaattgaagcgattgctaaagcgactaacttacccttagtgctccatggtggttcgggaattccggaagcggatgtcaaaaaagcaattggcttaggcattagcaagctcaacattaacactgaatgtcaactagcgtttgctaaagcgattcgggaatatgtggaagccaagaaggacttagatacccacaataagggctatgacccacggaaattgttaaagtcacctacccaagcaattgtggactgctgcttggaaaagatgcagctctgtggttcaaccaataaggcttag

SEQ ID NO: 27923 - DNA, 1539 bp, Mycoplasma pneumoniae
atgaaacggtgttacattaccaccccgatttactacgcctcgggtaagccccacattggccatgcctttacgaccatcttagcggatgtgattaagcggtataaacagcaaaacggttatgaagcttactttctaactggtacggatgaacacggcaacaaaattgaaagtaaggccaaaagtttaggtctagatccccaaacctttgtggatcaaaacgtggcttactttcaacaaatgtgaaagcagttagacattaactttgaccactttatccgcaccactgatcttagtcataaagcccaagttcaacatgcctttcaactactttatgacaaggggttaatttaccaaagtaactgggagggtgcttactgtgtcgagtgtgagcagaactatttcacttatgataaacaaacaatgttgtgtgaaataggtcaccagttaaccctagtccaagaaccatctttatttattgcctttaaagatagtaaggactggattggggaaatgattgcgacaaacaagctcaacattacccctgaatccagagccgctgagttaaagaacaacttcttggatgggggtttaaatgatttagctttaacacggcaaaacgtgacttggggaattcccgtaccctttgacaacaagcaaacgatttacgtgtggtttgatgccttgtttaactacattactaacttagggtttgcccataacgaccctaaatttaacaaatggtggaacaataatgatgaggaacacgaagtcattcatttaatttcacgcgaaattacccgtttccactgcatttactgaccaatctttctccaccagttgggttttaaactaccgacccagtttctctcccatggttggattgtcgatggtaatgggcacaagatgtccaagtcgttgggcaatgtcatttcccccgaagaactattggcccagtttggtgttgatggtacgcgttattgcttacttaaagaaatgcgcttggacaaggacaaccgctgtagtatggcgatctttaaggacatttacaacgctgatttggccaacagttttggtaaccacgcatcacgtacctttggcatgatcaaaaagtacttgggcggccagttagactttatcgaagtccaagaccctcaagtaaagcagctaatggaccaagcgaaccaagcgatggttcagtttgacaccgcttgaaataacttccagttttacaagggcattaatggcttactgcaactagtctttcaagctagcaagttaattgaccagttaaaaccgtgggagttagtcaaacaaacagattacaccttactcaagcaattactgtttgcttgtgtccgttgtacccaagtgtgctttgtcttgttagcgccgatcttagttcataccagtacccagatatttgacctgtttaatttcagtgcccaagcacgtagtaagacccacctagctgatccacaacaactgcaaaaaatcagcttagcacctgtaattcaacctttatttaaaagattggattaa

SEQ ID NO: 27924 - DNA, 1905 bp, Mycoplasma pneumoniae
atgctaagctcatgcagagctgtgacatctatgtcaagatgaagcaagcacaaaaagaccaaggaggtgatttcgatgctgtcgcataaccaaaaacccaattcctggaagattttgtgacgtttaattaagtccgtgcaaggtcgcacttcctccaaggtgctgtatgtcatggtctgtgccatctttggtattctcactggggttactaactcgattctcttggcccagggcctgggttttatttttcctaccactaataccgaaactgatggtatccaatcagtgtacttactggtatttgcgcacaacttaccggtcatggagcgcttgacgattgtttgtgttaccgtggttgtggcttacattctcatctttagttttaacgtagcgcagaactatttaggtttaaagctgtaccaagagatctgtgccttgttgcgctgaaaggcttacctcaagattcaaagtatgtccactagtttctttgatacgcagaacaacggggatttaatgagtcgcttgaccaacgacgtttacaacattaacaacctgtatgcccaagtgggtggacagacaattcagagtttgtttatcttaatgacaacagcgacgattctgtttgttttaagtccagtcattgccttaatttcgctaacagtcttaattgctttaattgccctttcctttctctttttaaagaaggcacgcgctgcttatgcaaaggtgcaaaacaacttaggggacatgtcgggttacattgaagaagtgttgtcgaaccataaggtagttcatgtcttgaaactgcaagaggtgatgattgataactttgacaagtacaaccgcccgatggttaatcccaccattaaggccaatacctatgcggtgtttatttactcctggtttggttttatttccaatattacttacttagcttcgatctcaattgccacggcctttagtgtgaataacattccctcctttggggtgagtgcgattaactattcgtttatgctgtcttacattgcggccttacgtcaaacagcactccctttaaaccagatctttagcttgtgaaacttaatccagttagggatagtaagtggcgagagggtcttcaagatcttggatctagaaagtccccaaaaacaggccaccattactaagttacccaacattaagggcaacatccgttttgaaaaggtagtttttggttacagtgcggacaaaccaattttaacggggattgatttctcggttaaacacggtgacattgtggccatagtcggtcctactggagcgggtaagtccaccattattaacctgttgatgaagttctacaaaccgtttgctgggaagatctacatggacaactttgagattagtgaggtgagtgaaactgcttgacgggaaaagatttcgattgtgctccaagaccccttcttgtttagtggcacgattaaggaaaacatccgcatgggacggcaagatgccactgatgaggaaattatagaggcgtgcaaggtggccaatgctcatgactttattatgcgtttaccccaaggttacaacacctttatttccaacaaaactgattatctctcggtcggtgagcgccaactgttaactattgcccgcgctgttattcgtaatgccccggtgttattattggatgaagccacgagctccatcgatgtacactccgaaaaattgatccaacaatcaataggcagactaatgaaggataaaacatcgtttataatatcccatcgactctcaatcatccgtaatgcgacgctgataattgtgattaatgatggaaaagttttggaaatgggtaaccatgaacaattaatgcggcaaaacggtttttatgctcgattaaagcgctctgctgtgaagtaa

SEQ ID NO: 27925 - DNA, 867 bp, Mycoplasma pneumoniae
atgaagcacatcagcgccgtatataaccctgcttttactaacattgcttccaaattaaaccaaacggaactgttaaaggatgcagcccagagcttaaacatccaactcgatttctttacttgctttgatattaataccaatcaggataagaccaaactaccctttaagtccaataccattttgtttttggataaaaacatagcgttagcgcaatggttagaatcagttggtttgcgcgttattaacagttcgattgccattaataacgcggacaataaggccttgagtcatgctgttttagcgcaacacccaaccattaaacagattcctacattaattggcccacagaactttcgtttagcttgatatccggaaaagttggaacaattcatcgaacaaattaagcgctgttttcagtttccagtgattgtcaaaagtatctatggttcttttggtgattacgtttttttgtgcaaagatgaacagaagttacgtcaaaccttaagcgggctaactgaacagatcattgtgcagcaatacattgccacttctaatagtgaagcggtcagggtaattgtggtcaataaccaggtagttggggccttacatactcaaaatgagggtgattttcgctctaatttaaataagggagcggttggtgaaccatatcaactaagtcaggaagaaaccaaattagcaattacaattagccaagcaatgcaactcttttattgtggcattgactttttatttgaccaggatcgttcgttaattttctgcgaagttaattccaatgtacagctcaccaaaagctcgatgtatttgaaaactaacctcgccattcaacttttagcatcaatcgcataa

SEQ ID NO: 27926 - DNA, 786 bp, Mycoplasma pneumoniae
atggaatactttgatgcgcactgtcacttaaactgtgaacccctactggaacagcacgaaaagagtttggccaactttaggttaattgggttaaaggccaatgttgtgggcactaatttaactaactcccaaattgcggtgaatttagctaaacagcaccctgatttactcaaggcaggggtgggtattcaccctaatgatgtccagctttttgatttaaaagcagcgcaagcaacactaaaaaaattagtaagtacgcatcgctcattcattagttgtattggtgaatatggctttgattaccactacactaaggactacattacccaacaagaacagttctttttgatgcagttccaactagcagaacagtaccagttagtgcacatgttgcatgtccgtgatgtgcacgaaaggatatacgaagttttgaaaaggttaaaacctaaacaaccagtggtgtttcactgttttagtgaagacaccaatactgctttaaagctgctaactttaagagaagtaggactaaaggtttatttttcgattccggggattgtgacctttaagaatgcgaaaaacttgcaagccgctttatcagttattccaacagagctacttttaagtgaaaccgattcgccttatttagcaccagtaccttttcggggcaaaactaattgaccggaatgcgttgttcatacagtgcaaacgattgctgacattaagcaagttcctttagctgaaataaaacaagcgattgtgcataacgccaagaagttattttggtag

SEQ ID NO: 27927 - DNA, 1329 bp, Mycoplasma pneumoniae
atggacaccaaacaaaccatgtttgccctcgctactgcgcccttcaacagtgccattcacattattaggttatctggtcccgatgtttatcgcattattaaccaaataaccaataaggaagtcaaaccgttgggtatgcggattcaacgcgtttggttaattgatcacaaccagaaaaaagtggatgatgtgttgctgtttaaatttgtcgcacctaactcttacactggggaagatctgattgaaatttcgtgccatggcagcatggtaatagtcaacgaaattattggtttattgttaaagcacggggcggtacaagcccaacccggggagtttacgcagcgcggctatctcaacggtaagatgagtttaaaccaagcggcttctgttaataacttagtactttcaccgaatacaaccctaaaggatgtcgctttaaatgcgttagctggtcaagttgatgccaggttagaacccttagtggaaaagttgggtcaactagtaatgcaaatggaagtgaacttggattaccccgagtacactgatgaacagcgcgaactggtgacaatgaaccaagcagtcgtgcaaataacccaaatcttaaaccaaatcgtggttggtcaagaccagttacaacggctcaaagatccgtttaagattgccattattggtaatactaatgttggtaagtcctccttattgaatgctctgttagatcaagataaagcgatagtatccgccattaaaggcagtacccgcgacattgttgagggtgactttgctctaaacggtcacttcgtcaaaatcctcgacacagcgggaattcgccaacaccaaagtgcgctcgaaaaagcgggcattcaaaaaacctttggcgccattaaaaccgctaacttagtaatttaccttttggatgcccggcagccagaacctgatcccaagattattgcgcgattaaagaagctgaagaaggacttctttttggtccacaataaagcagacttagtgcagcaaagctttcaggtaagtatttctgccaaacaaaaacagatccaaccacttgtcgatttattaacccaatacctacaccagttttacagtgtggagcagaaccagctctacttaattagtgattggcaaacgatcctgctccaaaaagcaatagccgaactagaacattttttaattaaacaacaaaactgccttttctttgatatcctagttgttcatttacgtgctgctcacgaatacattctccaagtcttgggtaaaaacaccaactatgacctgattaacgaaatctttaagcacttttgcttaggtaagtaa

SEQ ID NO: 27928 - DNA, 633 bp, Mycoplasma pneumoniae
atgaaacaaggcgtgtttgtggccatagagggcgtggatggtgcggggaaaaccgtcctcctagaagcttttaaacagcgctttccccaaagctttttgggctttaaaacgctttttagcagggaacccgggggcacaccgttagcggaaaaaatccgggcactgctcctgcatgaagcaatggaaccacttacagaagcttatctgtttgcggcatcgcgcaccgaacacgtgcgccagttaatccaaccagcgttacaacaaaaacagttagtgatagtagaccgctttgtgtgatctagttatgcataccagggcttaattaaaaaagtcggacttgatgtggtcaaaaagctcaatgctgatgcggtgggggatagtatgcccgactttacctttattgttgattgtgactttgagactgctttaaaccggatggccaaacgcggtcaggacaatttattggacaatactgttaaaaagcaagcggactttaatactatgcgccagtattaccacagtttggttgataacaaacgcgtctttctcttagacgggcaaaaccaaacgggttgtctggaacaatttattgaacaattaagccaatgtttaacccaacccacgctctcttaa

SEQ ID NO: 27929 - DNA, 1263 bp, Mycoplasma pneumoniae
atgttggatcgaaacaaattacgcaataaccttgacttctttaaaaagaagttagttgaacggggtgtaagtgaaagccagttcgaggcgtacgtgcaagctgataaagcaatgcgcaaactgttgcaccaaattgaactggccaaccaaaagcaaaccctgttagcgcaacaggttgccaagaagaagggtgatccgaagttattaaaggaatccaaggagttaaagcaaaaactagaacagctcaacatcgcttttaaggaagcggaaaccttaagccaagagttactgttaaacctccctaacattgctgatgaatcagtaccagttggacgggatgaaactgctaacttagaactgctcaaagaagggcgtaaaccggtgtttgactttactcccttaccccactgggagttgtgtgaacgcttacagttagttgcctttgataaggccactaagctaacgggtgcacggtttgtcgcttacactgataaagcagcgaaactgctccgcgccattgctagcttaatgattgacctcaacaaaaacaaataccaggagtgaaacgtgccggtcattgtgaacgagactagtcttactggtacgggtcagctacccaaatttaaggatgatgtctttaagttagaaaacacgcgttactacctctccccgaccctagaggtgcaactagccaacctccatgccaacgaaatcttcacggagggtgaactccccaaatactataccgctactggggtgaactttcgccaggaagcgggcagtgctggtaaacaaactaagggtacgattcgcctacaccagttccaaaaggtagaactagtgaagttttgtaaaccaagtgaagcgattcacgaactggaagaaatgacccgggacgctgagcaaattttgttagaactcaaaattccctttcgccgtttgttactctgtagcggtgacatgggttttagtgcccagaaaacctatgacttggaagtgtggatggcgggttgcaatgagtaccgcgaagtttcgtcctgttcttcttgtggtgactttcaagcacgcagagcaatgatccgctataaggacttaaccacaggcaagaatacctatgtggctaccttaaacggcaccgctttagcgattgaccgcatctttgcagccatcttggaacactaccaaacgaaggcaggggaagtaatgattccccaagccttgttgaaatacttagactttgacaaaattaccaaaccaaaataa

SEQ ID NO: 27930 - DNA, 2520 bp, Mycoplasma pneumoniae
atggcaaagcaacaagatcaaattgacaaaattcgtcaggaattagcacaatcagcaattaaaaacatctccctctccagtgaactagaacgttccttcatggagtatgcgatgtcggtgatagtggctcgcgcgctcccagatgcgagggatggacttaaacctgtgcaccgccgtgtgctctatggtgcttacactgggggcatgcaccacgatcgcccctttaaaaagtcagcacggattgtcggtgatgtaatgagtaagttccacccccacggggacatggccatttacgacacaatgtcgcggatggcgcaggacttttctttgcgttacctcttaattgacggacatggtaactttggctcgattgatggcgatcgtcccgcagcacaacgttatacggaagcacggttgtcgaaattagcgggggaactgttacgtgacattgacaaggacacggtcgactttgtcgctaactatgatggggaagaacaagaaccaacggttttaccagctgcctttcctaatttattagctaatggttcgagtgggattgcggtagggatgtccacttccattccgtctcacaacttatcggagttaatccagggcttaatccttttaattgacaaccctgactgcaccattaatgatttattaggtgtcattaaaggaccggactttcccaccggagccaacattatttacaccaaggggattgaaagctactttgaaactgggaagggtaatgtggtcattcgttctaaagtcagcattgaacaactaccaacccgggctgctttagtagtcacggaaattccctacatggtcaacaagaccagtttaattgaaaagattgtcgagttagtcaaggctgaggaaatcaccgggattgccgatatccgtgatgagtcatccagggaaggaattcgcttggtgattgaagtgaagcgcgacaccgttccggaagtcttattaaaccaactgttcaaatcaacccgtttacaggtgcggttccccgtgaacatgttggcactggttaagggtgcacctaaattgcttaacatgaagcaagcgttaacggtttacctcgagcaccaactcgatgttctgattcgcaaaacccagtttaacctcaagaagtaccaggagcgctttcatatcttaagtggccttttaattgcggcgttgaacattgatgaggtaattgcgatcattaaaaagtccgctaataaccaggtagcaatggaagcactccacgaacgcttcgggttagatgaaatccaagcacgggcggttctggacatgcgtttacgtagcttaagtgtcttggaagtcaataaactacaaaccgaacaacaagagttgaaagctttaattgagttctgtcaacaggtgttagctgacaaacaactgcaactcaaactaattaaggagcagttaaccaagattaacgaacagtttggcgatccacgccgtagtgaaatcctgtacggtattagtgaagacattgatgatgaggacttaattacccaggaaaacgtggtaatcacgatgtccactaacggttatctcaaacggattggggtagacgcttataacctgcaacaccgtggtggggtgggtgttaagggtttaactacctacaccgatgacagtattagccagctgttagtctgctcgacccactcggacctcttattctttacggacaagggaaaggtctaccgcatccgggcccaccaaattcccccgggttttcgtactaacaaggggattccggcggttaacctgattaagatcgacaaggacgagaagatctgtgccttaatttcggtgaatgattaccaaaatggttacttcttcttttgtaccaagaacggtaccattaagcgcaccagtctaagtgagtttgccaacatcttgagtattggtaaacgcgccatcctctttaaggaaaacgatgttttgttctcggttattcgcaccagtggtcaagatgacatctttatcggttcgaccgcggggtttgtcgtgcgtttccacgaagacaccgtccgtccgctgtcccgcgctgccatgggggtcttggggattaatctcaaccagtgcgaatttgtcaatggtctgtccacttccagtaacgggagtttattactctctgtgggtcaaaatggcattggtaagctcaccagtattgacaaatatcgtttaaccaagcggaatgctaagggagttaaaacactacgagtaactgctaaaactggtccggttgtgaccactacgaccgtctttggtaacgaagatttgttaatgatttcttcagctggtaagattgtccggattagtctggaacaactttcagaacagcgaaaaaacacttctggtgttaaactaatcaaactaaaagagaaggaacgcttagagactgttactatctttaaaaaggaagaagccattaaaaccacaacagcaaccgagacagacgatgttggatcgaaacaaattacgcaataa

SEQ ID NO: 27931 - DNA, 1953 bp, Mycoplasma pneumoniae
atggaagacaataacaaaacgcaagcttacgattccagtagcattaagattcttgaaggcttagaggccgtgcgtaagcgccccggcatgtacatcggttccaccggcgaagaagggttgcaccacatgatctgggaaatcattgataactcaattgacgaggccatgggtggctttgcgagtactgtcaaactaacccttaaagacaactttgtcaccattgtggaggatgatggccggggcattcccgttgacatccatcctaagaccaaccgctccaccgttgaaacagtgtttacggtactccacgctgggggtaagtttgacaacgatagctataaggtgtcagggggactccacggtgtgggtgcctcggttgttaatgctttaagttcctcctttaaggtatgggtagccagggagcaccaacagtacttcctagcgttccacaacggtggggaagtgattggtgatcttgtcaacgaaggtaagtgtgacaaggaacacggtaccaaggttgagtttgtcccggactttaccgtgatggaaaagagtgattacaaacaaacggtaattgctagtaggttgcaacaattagcctttcttaacaaagggatccaaattgactttgttgatgaacgccgtcaaaatccgcaaagcttttcttggaagtatgatggtggcttagtccaatacatccaccacctcaacaacgaaaaggaacctttatttgaggacattatctttggtgaaaaaaccgatactgttaaatcagttagccgtgatgagagctacacaattaaggtggaagtggcctttcagtacaacaagacgtataaccaatcaatctttagtttttgtaacaacattaataccactgaaggcggtacccatgttgaaggctttcgcaatgccttagtgaagatcattaaccgctttgctgtcgaaaacaagttcttaaaggaaacggatgaaaagattacccgcgatgacatctgtgaagggttaacggccattatctcaattaagcaccccaacccccagtatgagggtcaaaccaaaaagaaattgggtaacaccgaagtgcgtcctctagttaacagtattgttagtgaaatctttgagcgctttatgttggaaaacccccaggaagccaacgccattattcgcaaaacgctgttagcgcaagaagcacggcgccgtagtcaggaagcacgggaactgacccgcaggaaatctccctttgacagtggttcactcccgggtaagttagcagactgtaccacccgtgatccctcaattagtgaactgtacattgtcgagggagatagcgctggtggtacggctaaaacggggcgggaccgttacttccaagcgatcctaccattaaggggtaagatcctcaatgtggaaaagtcccactttgaacaaatctttaataatgtggaaatctcggctttagtcatggccgttggctgtggcattaaaccagacttcgagttggaaaaactgcggtataacaagatcattatcatgaccgatgctgatgtcgatggggcgcacatccgtaccctccttttaaccttcttctttcgctttatgtatcccttggtggaacagggcaacatttacattgcccaacccccactgtataaggtctcttactctaataaggacttatacatgcaaaccgatgtccaactagaggagtggaagcaacaacaccctaatctgaaatacaacttacaacgctacaagggtttaggggaaatggatgccatccaactgtgggaaaccacgatggatcccaaggtgcgtaccttactaaaggtaaccgttgaagatgcttcaattgctgataaagccttctccttgttaatgggcgatgaagttcccccaagacgggaattcatcgaacaaaacgcacgtaacgtaaagaacattgatatctaa

SEQ ID NO: 27932 - DNA, 1143 bp, Mycoplasma pneumoniae
atgaaagttttgattaataagaatgagttgaacaaaatcctcaaaaaactcaacaatgtaatcgtatctaacaataagatgaaaccataccactcttatttattaatagaggctacagaaaaggaaattaacttctatgctaacaacgagtacttttctgctaaatgtaccttagccgaaaacattgatgtacttgaagaaggtgaagtaattgttaaaggcaaaatctttagcgaactcattaacggaattaaagaagacatcattactattcaagagaaagatcaaactcttttagtcaaaacaaaaaaaacaaacattaaccttaacacgattgataagaaagaattccccagaatccgtttcaaccaaaacgttgatttgaaggaatttgatgaacttaaaatccaacacagccttttaactaaaggacttaaaaagattgcccatgctgtttctacatttagagaatccactagaaaattcaacggggttaacttcaacggttccaatggtaaacaaatctttttagaggcatcggattcttataagctctctgtttatgaaatcaaacaaaaaaccgatccatttaatttcattgtcgaaactaatcttttgagcttcatcaattcttttaaccctgaaggtggtgatttaatcagtatcttcttccgcaaagaacacaaggatgatttaagtaccgaattactgattaagttagataacttcttaattaactacacctcaattaacgaaagctttccgcgggtaatgcagttgtttgactttgaaccagaaaccaaagtaaccattcaaaaaaacgaacttaaagatgcattacaaagaatcttgacgttagctcaaaacgagcgcttctttctctgtgacatgcaagtaaccaactcccacctcaaaattaattccaacgttcaaaacattggtgcatccttagaagaagttacttgccttaagttcgaaggtcacaaactcaacatcgctgttaatgcgctttccctcttggaacacattgactcatttgatactgatgaaattgagctttacttccagggcagtaacaaatactttttaattagttcgaacaacgaacctgaacttaaagaaatcctagttccttccaagtaa

SEQ ID NO: 27933 - DNA, 813 bp, Mycoplasma pneumoniae
atgattatttcttttgttaataacaaaggtggcgttttaaaaacaaccatggccactaacgttgctggttcgcttgtaaagttgtgccctgaacaacggaaagttattttagaccttgatggtcagggcaacgtttcagcctcttttggacaaaatccagaaagattaaataacaccttaattgatattttgttaaaagtgcctaagtttaacggcgccaacagttcaattgaaattgatgactgtttgttgcccgtttatgaaggactagacattttgccttgtaactttgagttaaattttgcggacattgatattgctcgcaaaaagtacaaggcttctgatattgcggaaatagttaaacaactcacccgcaggtatgactttgttttactagacacaccgcctaacatggctaccttggtctccacagccatgagcctctctgatgtgattgtgatcccgtttgaacctgatcaatactctatgttgggtttaatgcggattgtcgaaacgattgatacttttaaggaaaagaaccccaacttaaaaaccattttggtaccaaccaaggtcaatatgcgcaccagattacacaatgatgtgattgagttggtgaaatcaaaagcgcacaagaacaacgttgctttttcagaacactttgtatctttaacatctaagtcatctgctgctgttggttatgaaaagttacctatctctttggtatcaccaacatccaacaagaagtaccaaactgaatatttagagattactaaagaaattcttaacctagtcaaccatggccatcagtaa

SEQ ID NO: 27934 - DNA, 1320 bp, Mycoplasma pneumoniae
atggaacaatttagtgcttttaaacttcttttaaaaaagcaatacgaaactactttaggtttttatgacaagtacattaagaatcttaaacggtttgctttaaaaaataatgtcctttttgtgattgtggacaatgagtttgcccgtgaaaccctcaatagcaaccctgatattgtcgggttagctagcaaactgtacgatgacattagagcagttcggtttgtcaacgaacaggacttctttatcaatttagccaaactagaggaagataaccgcgaaacgctttaccaaagttcggggctaagcaaaaactttacctttaaaaactttgtggttggtgatggcaaccgccgggtttatgaagcgggtgtacggattagcgaaactcaggacgctgatttctcccccttatttatctatggggagactggtctgggtaaaacccacttactccaagcgattgggaatgataagttcttccactttcccaacgctaaggtaaagtatgtggtatcgagtgactttgcccaggaggttgtcaatgccttttaccaaaaggaaaaggatcaaggcattgaaaagctcaaggctgcttacgagtcattggatttactcttaattgacgatactcagatcttcgggaaaaaggaaaaaaccttagagatcctcttttccatctttaataacttagtaagtaagggcaagcaaattgtgtttgtgtccgataaaacccccgatgagttggccaacatcgatccacggatggtatcacgctttaaatcgggactcttgttaaagattgaaaaacacaatttgagctccctgtgtgaaattttggccgttaagctcaaagaaaaggatcccaacatccaaattaccaatgaagcacgcgaaaaggcagcgcaaatatctggtaacgatgttcgttctttaaacgggattgcgactaagttgctgttttatgtcaaaacaactaagcaaaacctgattaacaacgacaatctaaaggaaatcctgtttgaggaatttgagaagttccacaaaaagagctttgatccttatttattaatagaaaacgtttgccgccgctttaatgtaccggtggacagtgttttgtctgagaaccgtaaagcagagttagttcgtgttcgtgacgtttgtaactatattttaagggaaaagtacaagatgcagttccaacaaataggcaaaatttttaaaaggaaccactctacagtggtggctgcagttaaaagggttgctaaaatgattgagaaggacgactccctccaagacattatcacttccttggtaatttag

SEQ ID NO: 27935 - DNA, 147 bp, Mycoplasma pneumoniae
atgaaacgtacatatcaaccaagtaaattaaagcgagcaaaaacccatggctttttagctcgcatggccaccgcttctggtcgtaaagtattgaagttaagaagaaaaaaacaacgcgcccaactcaccgtatccagtgagcgctaa

SEQ ID NO: 27936 - DNA, 1158 bp, Mycoplasma pneumoniae
atgcccctaaacctaaataagaagcataaagagctcaaaaccacctttaaccctttttgatcagcggccgttgttaacgaaaagaacggcctcaaaaatctcaaaaaggcctggggcattatctttaaagtccttaaagtagcgatctttatctttttaaccatagtaggtttatggggttgtacccaaaccctagcacagccctgaacgggaaccaaccaactgttaggttcggggttagaaattggttataactttggtactacgggggactaccggtatgacttgcagtccaataatgtggggccctactttacctttagtgactataccttagcgtatggtcccttttatggttggtttgtctgaccagcatcgcaaatagtgttgccgattatgtacgctaccagggttcctctaggtagcggtccggaattgggcttcaacatgatcttgtctttgattgtgttgttgttcctagtacggttaattaccatagtgattaccctcaactccacgctggcgttagaaaaaatgaacgaggtccagggcaaattagcagaaattaatgccaagtacaaaggggcgttggacttacagagcaaacgcaaccgccagatggagatcatgtccttgtacaagaagcacaacattaagtcttctgcttcctttgttcaggtctttgttaccttacccatcttcctcattatttaccggattgtcacgactttaagaccaattaaagcgattatcctgtttaacttctgggacttatctaaggtaccgttaacggaaatcttctcgaactttaccagtaccgggtgaacctttattatcttcttaatcattgttttaccagtgcaatttatctcgcaaaagttgccccaaatttgggctagcaaacgcaatgagaatgctaaagcgcattcgcaaaagagcattgaacagctcaataaaacaaagcgaatgcagttaattttctactttgtgtttgctgttattacggcttttagtgccgctggtgtgggtgtgtactggttcttaaatgccttgtttaccttactccagtcttatctaacccacctctttattgttaaaaggcgtaccagaagacggttaacgtattccaaattagaacaaatgttagaacgtgaatag

SEQ ID NO: 27937 - DNA, 792 bp, Mycoplasma pneumoniae
gtgaatagtttttatccttcacgcaaattagggcaaaactttacggttgaccagagtgtaattgccaaaacctgtcggttaattaagagtctcaacccaacggccttaattgaagtggggccgggtaagggagcgttaaccaaggctttactcaagttacaactaccataccatggcatagagttggataaacgcttagcggaatacctcttggtcaacgaaatcttaactgaagaacaactaaccattggtgatgccttaaaacaaaacttggatcagtattttcctgacactatacctttgctttgtggcaacattccctacagtattagctcccctttgattgctaactttttggcttccaaactacaacaatttgtgctggtgtgccagtgggagtttggtcaaaggttagtagcaccggtaaattcgcctaactatagtgcctttggtgtgttttgccaataccatttgcaaattaaatcagtttttaaaattgataaggttgcttttaagcccaagccccaagtggattcggtgttaatgttgttaaaaaagaaaccccaagtagcctatgaagctcattttggccggttcttaaaacagtgttttcaccagcgccgcaagctgttagtcaataacctcaagcagcttctcccacccaccttgttaactaatgttttacaacaacaggacttggcggcaacggttagagcccaagagttaaccccgacccagttgtttcgtttgtatcttagccttaaaccacatttaagcgatggaaaagattag

SEQ ID NO: 27938 - DNA, 1455 bp, Mycoplasma pneumoniae
atggaaaagattagaacccgttatgccccttcccctaccggttaccttcatgttgggggtgcgcgtactgctatctttaacttcttgttagcaaaacactttaacggcgagtttattatccggattgaggacactgacactgagcgcaatgtggaagggggaattgaatcacaactagaaaacttgcgctggttaggaattattcccgatgaatcaatttacaacccgggtaattatgggccttacatccaaagtcaaaagttggctacctacaaaaaactagcttatgaacttgtgggcaagggtttggcctaccgttgtttctgtactaaagaaaagttagaacacgaacgccaattggctttagaacaccaccaaaccccgaagtatttgggaacgtgtcgcaacttacactccaagcacattcaaacaaacttagacaaccaagtacccttcacgattcgcttaaagattaaccaggacgctgagtttgcctgaaacgaccaggttcggggcaagattactattcccgggaactccctcaccgatattgttttattgaaggccaatggcattgccacgtataactttgccgtagtcattgatgaccatgacatggaaattaccgatgtgttgcggggggcggaacacatttccaacaccgcttaccaactagcaattaaccaagccttaggctatcaaaggattccccgctttggtcatttatcggtgatagtcgacaagagtggcaagaaactgtctaagcgtgataccaaaacgatccagttcattgaacagttcaaacaagagggttacctaccagaagcggtggtaaacttcttggccttactgggttgaaattcggactttaaccgcgagttttttaccatcaaccaactaattgaaagctttacggtcaatcgagtagtgggcgcccccgctttctttgacattaagaaactccagtgaattaatgcgcactacattaaggagttgagtgataatgcctactttaactttattgataactacttaacgattgactttgattacctcaagaacaagcgcaaagaagtcagtctgttgttcaaaaaccaactagcgtttggcattgaaattaaccaactgattaaggaaacctttgcccccaagttaggggtgcagcatttaagtgttaagcaccgtgaactcttcaaagagctccaatcagccctacaacaactgagtgaacaactccaagccctacctgattggacgaaggacaatgtcaaaagtaccttaacccaaattggtgaacagtttaatctgaagggcaaaaagctgtttatgccactacggttgatctttaccaacaaagagcatggtcctgatttggcgggcatcatggtgctgcacggtaagactcaggtattagcgctgcttcaagaatttattcatgcaacaaatcttttttaa

SEQ ID NO: 27939 - DNA, 510 bp, Mycoplasma pneumoniae
atgcagtttagagttggcctaggtaagaaaaaataccgcattaaaccgagagcagaacagaagaataaattttgaataggtggggtggaaatagaagattccaagtacatttatgaccacgatgctagtgatgacgccagtgacgttatccagctagcagtagctgatgctttatttggtgctactgccttaggtgatggacaaattgtcttcaataaagaaaaaacccagatccctttaaagggtaatccgcgtaaagaagcgccccgtattttggcacggacttacaactttattcgcaagaactggtacatcaataacattgatatcaccttagaaattccctcacaacaaaagatggatgactataagcatgccatctttgactttatttgtacggctttacggattaccgaactgacaattaacctcaaggtacgtgaaccgttgaatccgaatgaaattagttgtttagcggtcgtgttagtggaacgacaaagattaaagtaa

SEQ ID NO: 27940 - DNA, 2130 bp, Mycoplasma pneumoniae
atgaaaaaaaataaaggacttaacgaggcgactacgagcgaaaaaccgcagtttcccaaacgcacagcgtgaaagattttttggtgagtggttatcctagccattattattggtattttggtttatatcctaatgccaagggctaccacggctgtaattgaaaagtgggagcttagtggaactacactttcggctcaaatcaaaggcttatcaggcaaacacaccttccaaagaattaataattccacctatgtcaccgatgacattctgcaggtttccattagtttccaagggataaatcccatagtagtaactgcccacaaagctactaatggtagtggggaaactatctttaatatagcaaacctctcgattaatcagtcaaccggaaaggccatagttaatggaatgatgacccaagaccaaaaaagtaacaatggcactgaattagcttctattaaaggtctccatgacatcggtacctttgttgctcctgatacgagagcacgtgatgtgctcaacatcttctttggcctactaccaattattatctttgtcattttcttcttactcttttgacgttctgctcgcggtatctctggtggtggtcgcagtgaggaggacaacatcttctcaattggtaagacccaagctaaactcgcaaagtcttcggtgaggtttgacaacattgcgggactccaagaagaaaaacacgagttactggaaattgttgattacctcaaaaaccccttgaagtatgcccaaatgggcgctcgttccccacgcggtgttattctttacggccctcctggtacgggtaaaacgctgttagcgaaagctgttgctggtgaagctggtgtgcctttcttccagtccacgggttctggctttgaagatatgctggttggtgtgggcgccaaacgggtacgggacttgttcaataaggctaagaaagcggccccatgtattatcttcatcgatgaaattgactcggttggttctaaacggggtcgcgtggagttgtcctcctactcggtggtcgaacaaaccttaaaccaactgttagcggaaatggatgggtttactagccgcactggtgttgtggtgatggctgctaccaaccgcttggatgtccttgatgatgcgttattacgcccaggtcggtttgatcgtcacatccagattaaccttcccgacattaaggaacgcgaaggcatcttacaagtgcacgccaagaacaagaacttgtcttccaagattagcttattggatgttgctaaacgtacccctggttttagtggggctcaattggaaaacgtcattaatgaagctaccctgttagcagtccgtgataaccggaccacgatcaacatgaacgacattgatgaagccattgaccgggtcatagctggtcctgccaaaaaatctcgggtggtcagtgatgctgatcgtaaactagtggcctaccacgaagcaggtcatgctttggttggcctccatgttcacagtaacgatgaagtgcaaaagattaccattattccccggggtcaagcgggtggttataccttgtcaacccctaagagtggcgatctcaatttaaagcgtaaatctgacttgttagcgatgattgctacagccatgggcggccgtgctgcagaggaagaaatttacggtcccctagaaattaccactggcgcttcctcggacttttataaggcgaccaatattgcccgtgccatggttacccagttaggaatgtccaagttagggcaagtgcaatatgtacctagtcaaggtaccgtcccaccaggtaccaaactgttctctgagcaaacagcaaaggatattgactttgagattaacgccattattgaagaacagtacaagaaggcacgtaccattattaaaacgaaccgtaaggagttggaattgttagttgaagccttgttgattgccgaaaccatcttaaagagtgacatcgattacattcacgaacacactaaactccctccagagatcctagcgcaaaagcaagaacagcaagccaaacaaaaggcagaagccaaggaagctaagttaaataagaagactgagaaggatacagaaaaagacagtgaaacaaacagttaa

SEQ ID NO: 27941 - DNA, 1200 bp, Mycoplasma pneumoniae
atgacaaaagatctcctagcacttttaaaagaacggggcttatttgtacaagctaactttgaaaaggaattaaagcaattattaaaccaaggatcatttgctttctatgttggctttgaccccacagcaccctcactccatattggcaactatgtgctgctccatgtagcacaaatcttccaagcaatgggtcatattccccacgtcttgttgggtagtgggacggctttaataggtgatcctactggcagaatggaactgcgccagatgatgagtcgtgaaacaattgccgaaaatacgcgcaacattaaaaaacaaattaggcgctttttgggtagtaatgtagtgttttgccaaaacgagacctggttaaagaaactcaattacattgaggtcatcagggaattgggaccctgcttttcggtcaacaagatgttagcgaccgatgcctttagtgctcgttgggaacgcggtttaacgttgatggaattgaactacatggtattacaggcctatgacttctattatttaaaccaaaagtatggggtgcaactgcaaatagggggcagtgaccagtgggctaatatcctagcgggggctgatttaattagacgcaaaacccaaaaacaggtgtacggcatgaccactaacttattagtgaaagctaatggggaaaagatgggtaagagtgctagtggagctttatggttagatccacaaaagaccagtccgtatgacttctaccagtattggattaaccttgatgatgctagtttgcaaaaggttttccttatgctcactaaattagataccaaggcaattgaaaccctctgcaacttgaagggcgctgccattaaggaggccaaggcaaaactagccttcgagttaactgacgctattcatggtaccaaggcagctttagtcgcccaagcgaaaagtgcccgaatctttgcctttcaacctgatactgaaaccaaaaccgtgcgagctggcaccaggttagtggatgtgattgttgatttaggtttagttgtatccagatcagaagcgcgccgggtgattcagcaaggtggtttaacgattaaccaagaaaaagtgactgatgtggaaatggtcctacaagcgagttcccaaccactagtgattggtaagggcaaaaagcgttttgtaacggtgcaagtgatagctaacaccaaataa

SEQ ID NO: 27942 - DNA, 876 bp, Mycoplasma pneumoniae
atgcccaaaataagaaaagccgttattcccgcagccggactgggtaccagattactcccagccactaaggccattcccaaagagatgttgcccttagtcaataaacccacaattcagtacattgtggaagaagcagtagcgagtggcattaaggaaatcctagtaattgtgtcttctaaaaaggaagcgattattgaccactttgactatgactttatcttggaaaatgctttactccaaaagcacaaagatcaagaacaccaagaaattaaggatattgccaacttagcgcacatttactttgtccgccaaaaacaccaacacggtttaggagatgccattttgcacgccaagtcgtttgttggtaacgaagactttgccgtccttttaggtgatgatgtcgtgtttggtgaacaaccggcattagcacaatgtattcaagcttatgaacaaacagattgtcaggtaataggcgtgcaagaagtgccccatgaccaggtcaacaagtatggcatagtaacccctgaagctaattgacaaaaacaagcgttagtcaaaattttgggcatggtggaaaaaccagctgtcaacgaagccaagagcaacctagccattttgagccgttacatccttaaacccagtatttttacagctcttaaacaagtaccgtttggtgttgggggtgagttacagttgactgatgggttgaactattgtttacagcaaggggaacccttctttgccaagcactttggtggtacccggtttgatgtcggtactaaaaatggttttattaaagcgaacctgtacacggctttaaaaaccgatgccattactaaggatgaagtcttggccatcctcaaggaatttgcttaa

SEQ ID NO: 27943 - DNA, 1185 bp, Mycoplasma pneumoniae
atggcaagagagaaatttgaccgatctaaaccccacgttaatgtaggtactattggccacattgaccacggtaaaacaactttaacagcagctatttgtactgtattagcaaaagaaggtaaatcagctgctactcgttacgaccaaatcgataaggctccggaagaaaaagcacggggaattacgattaactccgctcacgtggagtactcctctgacaagcgtcactatgctcacgttgactgtccaggacacgctgactacattaagaacatgattactggtgctgcacaaatggatggtgccattctagtagtttcagcaactgacagtgttatgccccaaacccgtgaacacattttgttggcccgccaagtgggtgtgccacgcatggtagtgttcctaaacaagtgtgacattgcaactgatgaagaagtgcaagagttagtagcagaagaggtacgtgacttattaacttcttacggctttgatggcaagaacacccctattatttatggttctgcacttaaagcgcttgaaggtgatcctaagtgggaagctaagatccatgatttaatgaatgcagttgatgaatggattccaactcctgaacgtgaagtggacaaacccttcttgttggcaatcgaagacaccatgacgattactggccgtggtaccgtggttaccggtcgggttgaacgtggtgaattgaaagtaggtcaagaaattgaaatcgttggtttacgtccaatccgtaaagcagttgttaccggaatcgaaatgttcaaaaaggaacttgattcagcaatggctggggacaacgctggggtattactccgtggtgtggaccgtaaagaagtggaacgtggtcaagtgttagctaaaccaggttcgattaaaccgcacaagaaatttaaagcggaaatctatgctttaaagaaggaagaaggtggtcgtcacaccggtttcttaaacggttaccgtccccaattctacttccgtactacagacgttactggttcgatttccctaccagaaaacaccgaaatggtgctaccaggtgacaatacctcgattacagttgaactaattgcaccaattgcttgtgaaaaaggtagtaagttctccatccgtgaaggtggtcgaacggttggtgctggttcagtcacggaagtgcttgaatag

SEQ ID NO: 27944 - DNA, 705 bp, Mycoplasma pneumoniae
atgcgttacggtttttttgatatttctcaggactttatcaccattttttgtcccaagaaaacacttaagaactgtatgtttggtttaattggtagccgcacgcaagctactttgcgccaagaaaagaaccagaactttagcttctttgtcaatgaagccaatgagattgctgggtttaacttctttgacattaaaaagagctttcgcaggggattaatttcccatcactttaccgcagggttgaattacccttctttgaagttggtcaaaaagattagtgagctgttgaactatgatttaacacccttagccaaaaaggtaccctttgtggtttgtgaggtcatttcggccattccgattcccaacactcatttgaaaaggtgtaaggtcaacactggttccaataagtccttggatgtcgtgtgtggggcggataatgttcgggttggccttaaaactgttttagtccatgttggtggtgttttacctgatggcacgattatcaagaaggctaaaattgcggggtatgattccatgggaatgctctgttcggaaaaagagctcaatttaaaacctaaaaatcagggtataattgaaattaagtcgcacatcaaaataggcaaaagtttccttgatgtttacttaaataatagtgaaaaattcagtgcatgagtaagtaccaaaaaaagagtgacggggaactaa

SEQ ID NO: 27945 - DNA, 267 bp, Mycoplasma pneumoniae
atgcgcatgggtcgtgttcactacccaacctacagaatagtagctgttgattccagagttaaacgtgatggtaagtacattgcgttaattggccatctcaatcctgcattaaaagaaaataagtgcaagattgatgaagctgtggccttggaatgactcaataagggagcaaaaccaactgatacagttcgctctttgtttagtcagactggtctttggaaaaagtttgtagaaagtaagaaaaagccagtagctaagtccaagtaa

SEQ ID NO: 27946 - DNA, 633 bp, Mycoplasma pneumoniae
atggcccaagctcaaaaagcaaagctcgttgagtttgaagtaattaactgaaggcagtattgcaaggacaaacaccaaacggttgatgatatggcttacggaggaggtggcgggatggttctaaaagctgaaccaattctcaaagctttaaaggcttgtagaactccacaatcgaaagtagttttattatcacctgagggacaacagttttcccaacccatggcgcaagctttaacccaaacggaacacctcattttgatctgtggtcactatgagggctttgattaccgcttgtataaacatgtcgatcaaattatttcgttaggtgactttgtgttgagtggtggggagttagtggctttaagtgtgattgatgccactgttcgtttaattaagggtgtcattaatgatcagagcttaatccacgaatcatttaacaactacttactggatttccccgcttacactaggccatatgatctagacggggataaggtacctgaaatattattatcaggtgaccataaaaagatagaggcttatcgcaaagaacaacaactgctcagaacggctcaataccgtcctgatttgtataagcaatatttagcaaagaaagatgaaaaaaataaataa

SEQ ID NO: 27947 - DNA, 360 bp, Mycoplasma pneumoniae
atgaaaaaaataaataaacaagctttaatagatttagtagaacaaaagcaattaaaggcttatgtgcctgagtttagcgctggtgacgaagtgaatgttgccatcaaacttaaagaaaaggaaaaggtcagaatccaaaactttacgggaactgtcctacgccgtcgtggtaaaggtattagtgaaaccttcattgtgcgtaaaaccactgatggtattccgattgaaaaaaacttccaaattcataaccctaatatttcaattgaattgaaaagacggggtaaagtaagacgcgcttacatttcatatatgcgtgagcgctctggtaaagctgccaaaattaaagagcgaaaacaatag

SEQ ID NO: 27948 - DNA, 816 bp, Mycoplasma pneumoniae
atggatacatttacctccgcagtcaagattaactggtttccgggtcacatgaagaagacccatgaccaactcaaaaaactagctagtagtttagatggtgtaattgaggtagttgatgcgcgtgcaccaacgttaacccaaaaccccgaaattacggcttactttaccaataaaccgaaactcactttagctttaaaggctgatttagcacaaacagtggctaactccaatattttatggggaaccttaaagcaaggtttgcaacttaaacgcttagttattaagaaactgcaaactttgtttcaagcaaaaaagaatcagttaaaagccaaaggtttattagtgcaccagtttcggttagcggttattggaatgcccaacgttggtaaatccagtttaattaacttgttactaaataaaaatcacttacaggtagctaatcgggctggggttaccaagtcaatgagttgaaaccaaataagttcggagttttatttgagcgataccccaggagtcttctttaaacgaattgatgaaatggctgttggttacaagttagttttaactaacgttattaaaagggaagtagtccctttggaagatgtaggtgcgtttgctttttgttatttaagcaaacattatccgcaattgttaccatatgaaggtacagacttcactgagtttttacataaatttgctatcagtcgtaagttgttgcaaaaatcgaatcagctcaacattaatttagcgtgcgaactgtttgttagtgaactgataaacgggaagtacggtaaactgagttttgagttagattag

SEQ ID NO: 27949 - DNA, 432 bp, Mycoplasma pneumoniae
gtgaaattactaaaaaataacatttacattaacgtttatttaaaaaacaaacaagaaatttttgaatttgtttttaaaaagtttaaagaagatggtgctgtactagatagttttttaccagcaattgtggaacgcgataaagcagctagtgtagcaattggtaattacctctttttaccccacccagtttatgacgaaatagcaaacattcaaaaagaaaaaatggtgtttattggtttaaaagatgtaattaacattgatggtcaaccaattaaatttatctgtggtttagccttaaaaggtgagcaccaaatggatgcgttgcaatctttagcaatagctttttcagaccctgaagaagtggaaaagttagttaaagataaggatttaacacaagataaggtacttgaatttttagcaaaacacaactaa

SEQ ID NO: 27950 - DNA, 1095 bp, Mycoplasma pneumoniae
atgaaaagaattaatgtattgcactttggcgctggtaatataggtagaggtgttatattaccgatttaccaacaaaatgacttttccattgatttagtggaattgaatcaaaatacagttaatgagttacaaaagcaaaaacaataccaagttcattaccttgattgtgatcaaagtcagttagttaatgactttaatacttgaaacttaaaggatgaagcgaagattattgaactaatggaaagagctgatgttatttccacttcaataggtgctaaaaacttagctagtttaaaaactttgtttgacaaagctaagttccataaaagggctatagtgctttgctttgaaaacggctttcggattagttctaactttaaaaacattttgcaattaaataacacacaagtaaattttgtggatgtggtaatcgatacaattgcacctaacttcgaaaagaaagcgaatttcttggatatttattgcgagaagtattcagaaatttatgctgaaactttcccgctagaaattaagggagtaaatcaaaagaatagtttagatagattcattattaaaaaacttttattagtcaatgcactgcacagtgttattggacttttaggctttcaacaaaagcttaagtatgtacatgaaacattgcaagttaaaagtaatttgacttttgtagaaaaattagcccaacaaattattgatgccctttgtgctgaatatcctgaatttaataaaaataatttgttaagttatggcaaaaataacttagtccgttttgctaatcccaagattcaagatttaaacacacgcttaattagggaaccattacgtaaacttaaccaaaatgaacgcttttatgccatttataaactctttaaaaagaataagattgcactaaataatattttgcaagtttatctgatggttttaaaaactaatataacagatgataccgaaagccaacaaattgctaaattaataaatgaaaaagcttgaacagagttagcgaaattatccagtttagaagagtcagaatgaaacctaattaaacaagaattaagccgtgaaattactaaaaaataa

SEQ ID NO: 27951 - DNA, 1188 bp, Mycoplasma pneumoniae
atggatctgaaagataattccttcgctaaaaaacgatcgacagtgttcgttgttttgctcattgtcttttgtttttttttaatgttttcagcctttgctgacggctttaacttttgatcgccttggtcaactgatttcaattcacgcgtaattcacattaaaagtgacggtaatatagaaaccactagtattgtcagccatgagttgcatcctgactttaaggcagtccgttttgcttttggcttagtgatagttttatttattagcgttattgccgttttaatgaattgggagttgtctaacagtatctttaaaaactatgaaaagctcaacttatccttatcactacttagtggaattatggtttcaggtgggatgattccaacctttttcgtaatctatttccgtgaatgaaatgcgaccgttaactgaatttgaactgcctcgtttgctggcatgattgtctttttatgggcagtgtacatgattagcacttccttcataaagatccgaccatcattgcaagtgatttatagcctaggtgcagtgatctgtttcatcgcttgcataggtacaatttacttttccgtaattaggggatggactaccatttttctcttaattgctattggcgtttgcactgatacctttgcttatctgtttggtaaacgttttggaaaaaatcccctcattaaaatttctccctcaaaaacttgggaaggtgctttctttggggttactggtacagttttaaccatttctattatttgtgttttgtactcgatccctaactatgtaagacaacctagcataaaggatgcaagtaagacagcactacaaacaccacaaaactatgatgtgcataaccttattaccaatgtctttctcatctccttcatttccggtggtagtaccttttacatctactggtgagttagcacattagcactgatatttactgcttccatttttgccataggtggtgatttattctttagttacattaaaagactcacaaaaattaaggatttttcgaagttattgggtaaacacggtggtatcttagaccggtttgattccagctcttttttaattagttttttctttatttaccacgtaattgcgggaatctcttctaaccaaagattgcttatggaaccaaacacttatttcagtgctgtaagttag

SEQ ID NO: 27952 - DNA, 555 bp, Mycoplasma pneumoniae
atgagtccagaaaaatacctgaacttctttaaagaaaccgctgataaaaagttccaatgactcaaagaagaattgagcaaaatccgtactggtagacctaatccaaaactgtttgataatctccttgtggaaagctatggtgacagaatgccaatggtagcattagcacaaattgcggtaaatccaccgcgggaaattgtgatcaagccgtttgacgttaaaaacaatattaatgccatctacagcgaaattcaacgtgctaacttaggtgtacaaccagtgattgacggagataaaattcgcattaactttcccccaatgacccaagaaagtcgtttggaaagcattaagcaagctaaaaaagtagtggaacaaatccaccaagagttgcgcagtgtgcgacgtgatacccttcaaatgattaagaaggatgatcataaagacgaagactttgaagaattcttaaaagaagaagtagaaaaagttaacaagcagtatattgcacagttagaaactattcaaaaacaaaaagaaaaagaactattagtggtctaa

SEQ ID NO: 27953 - DNA, 708 bp, Mycoplasma pneumoniae
atgcgcctaaagatcctaatcaaactaagcggtgctggcatgagcgctgatagttccgaaccgttttccaaccaatttttagaaactgtcatcgctcaactaaaacaactagtacccaactaccaaataggcattgtgattggtgggggcaacattatgcgcggtaagtcttgtagtgactacaacattaccgaaatagcagggcaccacttgggcattatggccacggttattaacggcgcttttttaaaggctaagtttgatagtcataaacttaacagcaccctgttgagtgcagtgagctgtcctagtttagcgacccacattgtgtcccagaccacgattgatgatgcctttaaaaaccatgacattgtcatttttgcgggcggtactggtaacccgtacttttcgactgataccgctgtggcgttgcgtgctacccaaatgcaagccgatattattctaattggcaagaatggtgttgatggggtttacactgcggatcctaaaaaggataagcatgctaagtttttagctagcttaacttacgctgaagcgattaagaatgacctgcaaatcatggacattaccgcctttacaatgtgtaaggaaaataacttaaaggtgatcatatttaacatcaatgccgagcatgccatcattaaggcattgagcaaacaaggtaaatacaccttaatagaaaaataa

SEQ ID NO: 27954 - DNA, 897 bp, Mycoplasma pneumoniae
atggcaacaaaaatagagctcataaaagaactacgtaaaacaacacaagcgagcatgatggactgtaaaaaggctttggaacaaaataacgatgatctcgaaaaggccattaagtgattgagagaaaacggaattgttaaatctgctaagaaattaggcaaagtagccgctgatggttgcattgtgttacacagcgatcaccacaaggcagtgatggtggaaattaattctcaaacggactttgtagcgcgtagtcaagagttaacggactttgcgcaattaatgattagtgaagtctttaaaaaggctacccctaccactactattgaagaagtaacccagtacgaactccaaggcaaagaaaaggtagcagaacgtttggctttagtcgcttccaaaactgatgaaaagattgtgttgcgccgcttaatggtgtttgaaagcaaaactaaccacatctttagctacctccacgctaacaaacggattggcgtaatcttggaagtggaaggcaagtttgatgaacaagatggtaaacacttagcaatgcacattgccgctaactcaccgcagttcattgatcaggacaatgtggatcaaacatggttagctaacgaaaccagcatcattaagtcccaagccaaactagaagtccaagacaatccgaagaaagcagcgttcttagacaaaactattgctggacgcgtgaacaaactcttaattgacatttgtctggtaaaccaaaagtacttggtcgatgaatccaaaacagttggtcaattcttaaaggaaaagaacagtaaagtaatccattttgtgcgctttgaagttggtgaaggcattgtcaaagaagcagttgacttcgctagtgaagtaagtgcgcaaatgaaaaaataa

SEQ ID NO: 27955 - DNA, 1719 bp, Mycoplasma pneumoniae
atgaaaaaactatctggtatcggtgtatctgatggcatggccctagccaaagccttccttgttaaaacaccggaattcgctgttaacaaatacctcaagcaccaattaacgaaggcgcaggccaaaagacttttggactcagctttcaaaaaagccgttaaggacttagaggaaattaaggaaattaccgttaacaacattaacactgaagcgggcatgatctttgatgcgcacattcaaatgctcaacgatcccacgatcaccgagcaactagaacaacagttagcgcaaaatgttcatcctgttatagccgtggacactgtctttagccaaacggctaccatgtttagccaaatgcaggacaagtatttccaggaacgtgctgcagacattttggacttgcgccaacgcttactagcttatttaaccggacaaaaaccacatgacctggtcaaaattaagagtgatgtcattattgtggcccatgacttaacgccgagtcaaactgctacccttaacaaaaaatacgtcaagggttttttaaccgaaataggtggtcgtaccagtcacgctgccattatggcgcgttcactggaaattcccgcagtggtgggcattaagggcattactactaaggtcaaagacggtcaaatagttggggttgatgggcgcaaaggaatagctggcttagacctaaactccaaggacactaccgagtggaagaaacaaaaagcgttggaagaaaaataccaacaagaactcaagcagtacaccaacaaggaaaccgtgactttagatggtcatgcggttgtggtggctgctaacattggtaatgtgaaagacatggaattggcatgtcagtacaataccaacggggttggtttattccgcactgagttcctctacatgaacagtcaagaatgacccgatgaagaaacgcagtaccaggcttacaaagcagtgttagaacaagcgcacggtgatttagttattatccgcaccctagacattggtggggacaagaagcttaattactatgagtttcctcacgaagataaccccttcttgggctaccgcgctttgcgtttaaccttagacaaacaggacatctttaaaacacaattgcgggctttactacgtgctgctgatcacggtcagttgggcattatgttcccgatggtcgctaccttggatgaactgttgcaagccaagcaactgttaaaccaggtgcaccaggagttgggtggcaataaacagtttaagctcgggattatgatcgaaatccccgctgctgttttagcggctaacaccttaagtcaccacgtggatttcttctccattggtaccaatgacctgatccagtacagctttgcggctgaccggatgaataagaatgttagttatctctaccaacctttaaacccagctttattaaaactcatttacctcaccattgaagggggtaaagtgaatgatatttgaacgggaatgtgtggtgagatggccggtgaaccgttagcgattcccctacttttaggtttgggtctcaaagagttttccatgagtgctagttccatgtttaaggcgcggatgattatcgctaagctcaattacacagagtgtcagacattagcacaaaaagcattaaccttagcgaacgccaaggaggtggaaaagctagtggaaaaattcttcaagaagaaggatatcttcatctag

SEQ ID NO: 27956 - DNA, 198 bp, Mycoplasma pneumoniae
atggcaaaaaaagaccaacttactttaagagggcctttgtatggcaacaatcgttcccactccaagactattacgcgcagaaagtggaatgttaacctccaaccatgcaaggtcaaaactgctgatggcaagaccaccagaatcttagtttctaccagaacactgcgcaccttaaagaaacacaaccgcctctcttag

SEQ ID NO: 27957 - DNA, 1353 bp, Mycoplasma pneumoniae
atggactcaacttttaatgaactaggcgtctctcctgccttaattgccacactcaaagataacaacattaaccaaccaactacgattcaacaactggctattccccagtttctccaacatcaaaacctgattgtccactcccccaccggcactggtaaaaccgctgtttttggcattccggtcattgaaacactccttaaaaaaccaagtaaaggtacgacccaaacattggtagttgcacctacccgtgaactggccgaacagattaaaaccacctttattaactttgctaaacacacccatttaaaggtagtgagcttaattggtggcatccccatttgacaacaactcaaacaactagaaaaccaaccagaaatagttgtgggcactatggggcgggtgatggacctgttagaacggggtgtaattaagtttgaacacctagaacacctcattattgacgaggttgacctaatgctcgaccgtggttttaagagaaaactgtttgatctgttaagtcgcattgaaaagtttgaacaaattgcggtttattctgctagttacaatgaagagacaattgaaacagctaaacaaattaccaagaatggtattttcctagcagcaccagaattaaaacaaaatgcccctgaaccagataacaaactcattgatcaatttgtttgttatcttttttctaaccggaagaaacaagccctctattctttggtatcgcaaactagagcgaagtcgattattgttttttgtgacaccaagaagttagttgatgagctgtgcatcttcttgcgcaagaatgatgtcaaaacttatccacttcacggggacaaagcgcagttcattcgcgaacgcaacttaaagctgtttgctaacacaactgctcctatagtattagtaacaactgatctaatcggtcgtggtatccatgtggaaggggtggacatggtagtcaactattccgcttgtgtaaactttgaaacttatttgcaccggatgggtcgcacaggacggaacaaccacaagggctcatgtattaccttctgtacctcacacgaaaagcaagcatttttaaagttattagaacaagttaacgacaagcgcattagccctctccgccccatgcgcttaaggttaattcccttgaagtgcaaaacccaacccaagaaggggaaactttccttacagtcagtgcaaaagatttacgtcaatcctcgttccaatggcacctttaaacgcgtacctttagcgggggatttgtttaaaagccggatgcgtcaacctgagcgggacatgcaaaagaacaaattgcatgacagtgattgacaaagcaatatgtaa

SEQ ID NO: 27958 - DNA, 261 bp, Mycoplasma pneumoniae
atgcaaattgataaaaacgggatcattaaatccgcacaactccacgacaaggacgtgggtagtattcaggtacaagtgtcccttttaacgagccaaattaaacagctcaccgaccacttactagctaacaagaaggactttatttccaaacgtggtttgtacgcgaaagtatcaaagcgcaagcgcttgttgaagtacttaaagcacaacgatttagaggcttacagaaatttagttaaaaccttaaatctccggggttag

SEQ ID NO: 27959 - DNA, 2847 bp, Mycoplasma pneumoniae
ttgaaaccagagctaaaaactaatgattttattcgcgttaagggcgcgcgtgaaaacaacctgaagaatgtaaacatcgatattcccaaaaaccagtttgtcgttattacggggttgtcgggttcgggtaaatcatcacttgcctttaacaccatttacgcggaaggccgccgtcggtatttggaatcactctcgtcatatgccagacagtttctcggtaacagtgataaaccggatgtagattcgattgaagggttatccccagccatttcaattgaccaaaaaaccacttcacacaatccccgctccactgtgggaacagtaacggaaatttacgattacctccgtttactgtgagcgcggattggtatacccttttgtcctaatggtcatggtgccattcaaacccaaaccgttaaccaaattgccaaccagatctttaacttaccggttaaatcacggattcaaatcttagctcctaccattaaaaaccaacgcggtacctttgctaatgagtttgctaaataccaacagttaggctttctccgggtttgggttgatggtcaggtctataccttagatgaagaaattaagttagacaagaacaccaagcacaacttgagtgtggtagtggaccggattgtcattaaccaagacaagcaaaccttgggtcggattgttgatgcaattgaaggtgtgattaaactaactgagggtcggattgaagtgttgttggaagatggtaagatacttagttttaataagaaccacggttgtgatcagtgtggtttttcaattagtgaactagagccacgcttattctcctttaactcccctttaggttcgtgtgagtactgtaagggtttaggttttagttatgaaccggatgtggaaaagattattcccaatccgttgttgtccatcaatgaaggtggtattgacatctttaagaacatagtgcacggtacatcactagattgacagcgcttcttgtctttaattaaccactatcaaattcccctagaccaacccttaggtcaaatggatactgatttagtacggatgatcttggagggtagtgatgaaccaattgagattaaaacagtatcaaactcaggtgccaaaaatgtgcgctttgaacactatgagggtgtggctcacttaattaaacgccgtcacttagagactagtagtcaagccagtcgtgaatggtactcggcttacatgtctgaaattacctgtaagaagtgccagggcaagaagcttactactaattctttaagtgtcaagttaggtgggttggacattattagctttacggaactctcgattgataaagcaattgaattcttgttgcaaatagaactgaatcaagaacagaagaagattggtgagttagctcttaaagagattattaaccgtttatccttcttgaagaatgtgggcttagaataccttaacttagcgcgccgggcttctaccctgtcaggtggtgaagcacaacggattcgcttagccacccaaattggttcgcaactcactggcgtcctttatgtcttggatgaaccctcaattgggctacaccaaaaggacaatgatcgcttaattaacacgatgatggtaatgcgggatttgggcaacaccttactcgtggtagaacacgacagtgaaaccatgctagcagctgattacctcattgatattggtcctaaagcgggtaaccaaggtggggaagtagtagctgctgggacaccgctagaggtaatggaaaatcctgactccttaacgggacagtatctcagtggcaaaaagcaaattgaggtaccaaaaacccggcatgctggtaatggtcgcaccttaaccttaaaaggagccaagggcaacaacttaaagaacattaatgtcactattcccttaaataaattagtactagtgaccggggtatcgggttcagggaaatcaaccttaattaaccaaaccttagtaccgatcttggaacgcttggtgaactataagaatgttaaacctgcaccctataaggaaatcataggggtcaaccacattgataaggtggtagtggtgtcgcaagatccgatcggtcgcactccccgctctaaccccgctacctatgtcagtgtatttgatgacattagggagttgtttgccaacactaaggaagccaaggctcggggttacactaactcgcgcttttcctttaatgtagccggtgggcgctgtgataagtgttttggtgatggggtcattcggattgaaatgcactttttacccgatgtttatgtgacgtgtgaaatgtgtgatggcaagaagtacaatccccaaaccctggaagttaagtacttaggcaaatcgatctttgatgtgttacagatgtcatgtcaggaagcttatgatttttttaaagcaattccgaatattgcgagaaagttaaaactactctgtgatgtcggtctggaatacctccagttaggtcttaatgttaccttcttgtcaggtggggaagcacaacgaattaaactagccaagtttctccagaaaaaggcaactggtaaaaccttgtacgtcctggatgaaccttcaacgggactacacatagaagacattaataagctgttaacggtgatccaacggattattaaaaacggtgatagtgtcattattattgagcacaacctagatattattaagatggcggactacatcattgatttgggtcctgaaggtggggaaaaaggtggacaaattattgcccaaggcacaccagaacaactgttaaatcaggtcgataagtcctacactgcccagtatctcgctaaaatcttaaagtaa

SEQ ID NO: 27960 - DNA, 2046 bp, Mycoplasma pneumoniae
atgcgcaaggtcctttaccagaaataccgtcccaccaagtttagcgatactgtcggtcaggacagcattaaacgcattattgttaatgccattacccaagaccaattaccccacggttacatctttgcgggggagcggggtacgggaaaaacgacctttgccaagattattgccaaagccattaactgtttaaactggaacggcgatgtttgcaaccagtgtgaggcatgccaagcgattaacagcaacagtgcgattgatgtgtttgaaattgatgctgcttccaaaaacgggattaacgacattagggagctagcggaaaatgtctttaacctaccctttaagttcaaaaagaaggtttacattttggatgaagcccacatgctcaccccccaatcttggagtgggcttttaaagaccttagaagaagcacccgattatgtcttgtttatttttgccaccaccgaatttaacaaaattccgatcacgatcttgtcgcgttgccaaagcttcttctttaaacaaattactaacgatctcatccagcaacggttagcggaagtagcggctaaggaaagcattaagattactactgatgctttggtcaaactagctgatttagcgcaaggttcgttgcgtgatgggttgagcttgttggaccaaattagtaactttagtgaaagtaaaaccattagtttagctgatgttgaaaagacctttaacctgcttgacaaggaacaaaagtttggttttattgaagcagttttaagtggtgatctcaaacaatcctttcacttaattgacaactttgaaagtcaagggattaactttgttcactttctcagggaactgtttgccctaacagttgatttatatggttatgtcaaaacgggacaaattgcagttgtaaaacccagcgaccaaacaatggcggcaaagcttcgttttcaccccaaacagtatgctcttttggttcaagcaattgaagctaacactggttatggtccttcacaactatccttaagtgatcagattaaagcaattgtgattcactataacaatgccgttagcaaagagccacacatacccgcttatacgccagtggtacaaactcaatcaccagcaaaagaacacgttccttcaaaaactgtagaagaggccaagccccaactaccagcaaaagaacctgttctttataaagtaatagaagaacctaaagtttcatcattcgtaaaagatcctgttgcttctaaactaatagaacaaccccaaactatagtgcaaccagaagcacagcaagaaattacagaagtagaacaaccaacagaaacttcaccagctccagcaactgatttatttgggttagcgattaaaccagaggtggtacgcaaacgcggtcgtagacctctttctgtagaaaacactgatttttttcagcccgctgttaaaaaattaatacagcctgtaagcaagcctgctcctattaagttaatagaaccatcagataataacccagtttccatcccaataaaacttaaccgggctgtgattgccgtttctgtttatgggcacaatgatcctaaactagtagcccacttccaacagttattggacagctttaaaagggagttcacccaagcagaaaaaactaaagacagcagttacttaaagcagttttccgataagtttaccgctagtgatttaagtaaagttattaaggttctagcagcatcaccctttggtttagtcttaattttcgaagataaagagatagcaacaaggttgtgaaaggaagcgcttaccgaagcgactgcccaagccaccttgttagaaatttttcaacaaaacctgttcttgagttcctttactttgagtgaatatgaaactaaggtactagctaaagtggaacaactaacgcataaaccccaagtgttgcaattacaacagttagaacagttaagtagtaccgttgttaaaaaagctcaaaaaacagcggcacaggagatcgctgatacgttcttcaaagggctttatgaagaaaagtaa

SEQ ID NO: 27961 - DNA, 441 bp, Mycoplasma pneumoniae
atgcaaaaaacatcaatgctaacaaaagaacaggccaacaagcgacgacagtggtatattgtcgacgctgctgggctcgttctcggtaagttagcggttaaagcggccgatcttattcgcggcaagaataaagttgatttcacccctaaccaagattgtggtgattacttgatcattattaacagtgatcaagttgtgttgactggcaataaaaaagaaaacgagttttggtaccaccactcccaatacattggtggcattaagaaggtaagtggtcgtgatatgttgaaaaaacaatccgacaaactggtctataatgctgttaagggcatgttacctgataaccgtttaagccgtcgttgaatcaccaaggtacacgtgtttaaaggtgataaacacaacatggaagcgcaaaaacctaccactttaaattgaagctaa

SEQ ID NO: 27962 - DNA, 399 bp, Mycoplasma pneumoniae
atggaaaaacaatcttattatggacttggacgccgtaagtcttcaagtgctaaagtttatctaacgcctacccaagacaagggtaagattactgttaaccgtcgtgatcctagtgaatactttcctaataaactagtgatccaagacatggaacaacctttagatctcactgatcttaaaaagaactttgatatcaatgtggtagttaaaggtggtggttttaccggacaagctggtgcaattcgtttaggaattgttcgcgcgcttttacagttcaatccagaattgaaaaagattctcaagtccaagaaactaactacccgtgacaagcgggttaaagaacggaagaagttcggtttatacggtgcccgccgtgctccacaatttaccaagcgttag

SEQ ID NO: 27963 - DNA, 990 bp, Mycoplasma pneumoniae
atgaaaaaaggcctaaaaacaatttgacacaacttcatccaaaagcgcgaaaaggtgaagcagtaccgtgctttatatgaaaaacaaattaagcaataccagcaaaaagttgctaagttagatcccactaccaaagctgaggaaattgctaacttgcagagtgaaattgatgtgttgcaacgcctcatcaaaattaagaataccaaggacgatgttgtcaaacaagactttgacaagaagaatgtctttgaaattgaaaaccttaacttctggtacaacaaggacaagcaggtcttatttgacattaacctcaaaattaagcgcaataagattaccgctttaattggtaaatccggttgtggtaagtccacctttatccgttgtttaaataaattaaatgacctcaatgaaaatgtgcgctgaaatggcaagattttctttttgggtaaaaacattaattccggaattattaatgatttaaccttgcgcacacgggttggtatggtgttccagcaactcaccccttttaacttttccatctttgaaaacattgcctatggactgagagcccatggcattcataacaagcaagcgattcatgaaattgtggaacaggccttaaagtcaaccgccttatgggacgaggtcaaagataacttacaccgtaatgccaataccctttcgggtggtcaacaacaacggttgtgtattgccagagccattgctctacaacccgatgtcttattaatggatgaaccaactagtgcgttggactcaattgccactaactcgattgagctgttaatccagcaattaaaggaaaaatacacgattattattgtgactcactcaatggcacaaactattagaatcactgatgaaacgattttctttgctaacggaagggtagtggaacaaggtactaccaagcaaatctttacgagaccaaagcaaaaggaaactaaccgttacattagtgggaggaattaa

SEQ ID NO: 27964 - DNA, 1371 bp, Mycoplasma pneumoniae
atgagtgcacaaactggaaccgatcttttcaagattgctgatctttttgcttaccaagtttttgattcacggggttttcccactgttgcttgtgttgtgaagttagctagtggtcatactggagaagcgatggttccatctggggcttctactggggaaaaagaagcgattgaactacgcgatggtgatcccaaagcttactttggcaaaggggtgagccaagctgtgcaaaacgttaaccaaactattgcccctaaactaattggtttaaatgcgactgatcaagcagccattgatgctttaatgatccaactggatggtacccccaataaggctaagttaggtgctaatgccattttggcagtttctctagctgtggctaaagcagctgctagcgcccaaaagacttccttgtttaagtaccttgctaaccaggtcatgggtctaaataaaaccgagtttatcctcaccgtaccaatgctaaacgtcattaacggtggagcacatgctgacaataacattgacttccaggagttcatgattatgccattgggtgctaactcgatgcaccaagcattgaagatggcgagtgaaaccttccatgctttacaaaagctgttaaagcaacggggtttaaacaccaataagggtgatgaaggtggttttgcgcctaacttaaagttagcggaagaagcgcttgatttaatggtcgaagcaattaaggcagctgggtaccaaccaggtagtgacattgcgattgcactggatgtagcagcgagtgagttttatgatgacaccaccaagcgctatgtcttcaaaaaaggaattaaggccaaaattcttgacgagaaggaatggagtttaactactgcccaaatgatcgcttacctcaagaagcttactgagcagtaccctattatttccatagaagatggtcttagcgaacacgactgggaaggtatggaaacattaactaaaacactgggtcaacacattcaaatagttggtgatgatctgtactgcaccaatccagcaattgctgaaaaaggtgttgctcacaaagctaccaactcgatcttaattaaactcaaccaaattggtacccttacagaaacaattaaagcgattaacattgccaaggacgctaactggagtcaggtaatttcccaccgtagtggggaaaccgaagacacgacaattgctgatctagcagtagcggcttgcactggtcaaattaaaactggttcgatgtcccgctccgaacgaattgccaaatacaatcgcttattgcaaattgaactggaattgggcaataatgctaagtacttaggttgaaacacctttaaaaacattaaaccgcaaaaagcttaa

SEQ ID NO: 27965 - DNA, 882 bp, Mycoplasma pneumoniae
atgtcaccacgggcgatagttttaaaagaacctaatggagttaacctcgtaccacacgaaggtatctttgacatttccccagttgcgggatgaaaaccattgctacccactgatcaagtttttggcatctttgtggtctttattgtgttgctcaccttattcttggtttactgaatcaagttaagaaaagcggatccgttacgcaaccattcgagctttgtgttattaatgcaaatgctctttgtttgagcccaagatactacagcggatttaattggtgaggaaaacaagaagtttaccccttactttttaatgttgctgttgtacctggtttccagtaacttgattggattattaggtggcatttccccaccaacttcatcactgacctttaccttttctttagggctagccacctttttgggaattgtcattatggggattaggtaccaacggtgatccttctttaaaagctttaccttcaacattacgattaagggcaagaagtactccactttaattcccaatccgttgagcttcttgggtgagtttgcgccactgttctcgatttcgcttcgtttgtggggcaatatccttgggggaaccttgattttagcgctcttttataacttctggttctttgctttttcgactttaagcaataagccactagcgcttagtttaggtgccatttttgcaggaattctcaccccagccctacatgtatattttgatgtagtagtgggtacactgcagggatatgtctttgtgatgttgacttataattattgggcaaaaatgcgtaacattggcttggaagaaagtcaagaagcagcgcagcgtttgcaaaatttggaggtagcaaaagaaataattaattag

SEQ ID NO: 27966 - DNA, 624 bp, Mycoplasma pneumoniae
atgaaactacgagcaacttttgtatttaaaacgaccttagttgcgcttagttttgccctgtttgccttgtttttagtttcctgtaccgaaaacgttaaggaaattaaaagtgaatcagtcatcaacgaactttttccgaacctctgggtctttttagcccacttgttggcctttgtgatcctgttgttcttgttgttgttcctcttttgaaaacccacacaaaagttcttaaaccaacgcaaagcgcttttggaagagcaagtcaaccaggccaacagcttagaacaacaagctcaagcattactccaacaagccaaccaacgccatgaaaactcactggtagttgctaaggaaattgtagaccaggccaactatgaggcgttgcaacttaaaagtgaaatcgaaaagaaggctaaccggcaagctaacttaatgatcttccaagcgcgtcaggaaattgaaaaggaaaagcgcttgatccaagaacaatccttaaaggaaagtgtcgagctagccatgttagctgctaaggaattgattatcaaaaaggtggatgtcaaagccgacaaggcctttattgaagagtttatccgcgaactagaagcagaggacgaccatgattaa

SEQ ID NO: 27967 - DNA, 537 bp, Mycoplasma pneumoniae
atgattaacgcgcaggcttttggaatggcactcttccaacttagtgaagaggaaaagaaggttaagaaggtctatgaccagagccatgattttttaaaactagcgcgtaactttaaagatggatcactagctgctctactcaatgcttatactttaaccaaaaaggaaaagcttaagctaatagataagctgtttaaaaaccacttttgtgacctctttgttgactttttaaaaacgattgtgctcaagggctactttaacctagtcgagcaagccttaaagtacttctttgattgtgttgagaatgaaaaacacgtccagttcattaggatcattaccgcttttgaactgagtgcgccccaactcaagcgaatcgtagcggcaatggaaaagaagctcaattccaagattgtttacaaaaccgaaattgacaagagcttgatttcgggtatccgaattgaatcgagcgcccagttatttgaaaagaatatccgtgatcaactatcacgtttaatggaacagtttaaagggaattaa

SEQ ID NO: 27968 - DNA, 1557 bp, Mycoplasma pneumoniae
atggcagacaaattaaatgaatatgtagcactcattaaaaatgagattaagaagtattccaaacagatctttaacagtgaaattggcaaggttattagtgtcgctgatggcattgctaaggtcagtggtttggaaaacgcactcttaaacgagttaattgagtttgaaaacaacgtgcaggggattgcgcttaacctagagcaaaacacggttggggtggcgttgtttggtgattactctaaaatccgtgaaggtagtacggctaaacggacccacaacgtgatgcaaactcccgtgggtgatgtaatgttgggccggattgtcaatgccctgggagaaccggtggatggtcgtggtccgattaaggctgaagagtttgaccaagtggagaagattgcccctggggtaatgacccgcaaaaccgttaaccaaccactggaaactggaatcttgacgattgatgcgttgtttccgattggtaagggacaacgggagttaattgtgggggaccgccaaactggtaagacctcaattgcaattgacaccattattaaccaacgtggtaaggacgtgtactgtgtctatgtagcgatgggacaaaagaattcctcggtagcgcaaattgtccaccagttagaggtaactgattcgatgaagtacaccacggtggtgtgtgctacagccagtgatcccgcttcgatgatctacctcacgccctttactggcattaccattgctgagtactggctcaaacagggtaaggatgttctaattgtgtttgatgatttgtccaagcacgcgattgcttaccgtaccttatccttactgttacgccgaccaccaggacgggaagcctttcctggggatgtgttctacttgcactcgcgtttactggaacgtgcttgccgtttaaacgaggagcatggtggtggctcgattaccgctttacctattattgaaacgcaagctggggacatttccgcttacattccgaccaacgtcatttcgattaccgatggtcaactgttcatggtgtcaaacctgtttaactccggtcaacgccctgccatccacgtggggttatcggtgtcgcgggttggtagtgcagcgcaaattaaagcaattaaacaacaaaccgggagcttaaagttagagctagcgcagtacagtgaattagacagctttagtcagtttggtagtgacttggacgaaaataccaagcaaatcttggaacgcggtaagcgggtaatggagatgattaaacaacccaacggtaaaccttactcacaaacccatgaagcgttattcttgtttgcgattgccaagtccttcattaagtttattccactggattacattgctaaatttaagcaacgcattatggaggaatttgacaaggaacacccgatttacaaggaaatagcgacccaaaagagctttagtgaagcgttggaagcacaaactaacactgcttttaaggcactagtaaaacgctttgttagtgctttaccagattacgacatcactaaatacggaacgatggaggagttggaataa

SEQ ID NO: 27969 - DNA, 459 bp, Mycoplasma pneumoniae
atgcaaatgaaccatccaatttacattgcttctgaccacactggtttagagctcaaaagcttagtgataaaacacttagaacaacaaaagttgcaagtgattgatttaggtcctacagagctagatccacttgatgactacccggactatgcctttttgttagcgcaaacaatgcaagctaatcctaatagtttaggcatccttatttgtggtactggtgtgggtgtttgtatggccgctaacaaggctaagggtatcttagctgctttagtggtagacagtaaaacagcagcattggcacgccaacatgatgacgccaatgtgctgtgtttgtctagccgctttgtggttcctgaagaaaacattaaaatagtagatgaatttctccaggcgcagtttgagggtgggcgccatagtaaacgtgtcggtaagatcattgcttatgagagggaaaaatag

SEQ ID NO: 27970 - DNA, 1044 bp, Mycoplasma pneumoniae
atgaggcagactatttaccttacagtcaacctgatgcagaattgggttgaacggtggattttagactgggcaaatatactaacgtgaaagactttgtgtcaccaaacgaaaataggattacctaatggtgcacaagcctttgtatcagcgcagacaagcacaattcccaaaacggctttcactgcgcacgattttgtggattacaccttgccccaagaacaaaaaggtaaagaacaaaaggagcagcagtggatgaagaacagtcaaactaaggatactgatgttcatccctatgctgattttgcagtcttagaaatccttttgtttcctgacagttctactgatcgcaaaatttttaatcactttatccaacctgccattagagcctataaacaattaggtgatagcttaaatatctttgctaatcaaaccctagatcaacctaaacataaccgttattacttgttgggttatccttttttaagaaataaagcggcatcattgtttttaaatcaaacggaacaaagaaaggaacatatggacaaaactacccaaatacttcatgaaaaaccatttgttgttttaaccgatccagctaagcctactttaattaggaataaaggcgctaattttactggcaacacttgaacttcaaactatgatctcagcaagaaatcggggctttatcataaatttttaggtaagaaataccaaatctatggcaaaagtatagtcattagtgaccttaatttaagcagtggctcttctggttctttgctgttaaatgataggaagcagattgttggtatttattttggtgttgatggccctaaagacgaattaggcttctcacagttattacgttgacaagcgaaaaataatgatgaagaaaaagacagtgttgcttacgatttaatatttggcaataaaaataccacaaaatactatgctcagtttgctaaagaacataaaacccatttatacgaacaaattgatagaagcaatgatcaacaatttaccttcgtcaaaaaccaaaagtgttaa

SEQ ID NO: 27971 - DNA, 1221 bp, Mycoplasma pneumoniae
atggaaccaaagattagaagaatcctcaataaggaattgcaaagacaaagagattgcatttgtttaatagcatcagagaactatgtgagtagggacatcctagaggtcactggttctattttgaccaataagtacgctgagggttatcctactagacgcttttatgaaggttgtgaggtagttgatgaatcagagagcttagccattaatacctgtaaggaattatttggtgcgaagtgagcgaatgtgcaaccgcactccggttcttctgctaactatgccgtgtacttagctctacttaaacctggcgatgccattttagggcttgaccttaactgtggtgggcacttaactcacggtaataaatttaacttttcgggtaaacagtaccagccttattcctacaccatcaaccccgaaaccgagatgttggactatgatgaggtgctacgtgttgctcgggaggtaaaacctaaactaattatctgcggtttttccaattactcgagaaccgttgactttgagcgctttagtgcaattgcgaaagaagttggtgcttaccttttagcggacattgcccacattgcgggattggtagcagctggcttgcaccccaatcccttaccttacactgatgtggttacatctactacccacaaaacactgcgcggtccacggggagggttaattatgtccaataacgaagcgattattcgcaaattggacagcggtgtctttccgggttgtcaaggtggtcccttacagcacgtaattgcggctaagtatgtttgttttaaagaagctttacaaccaaaatacaagcagtacatccaaaacgttaagaccaatgcagcgagcatggctagttggttcaaacaacaaggttaccgcgtcatttctaacggaactgatacccacttgttctcgcttgatgtcggtaagggtaaagatgtttcacaatgattgcaacaagccaacattgtgttgaacatgaacacggttcctttcgataagaatcctgccataaatccttccggtattcgtattggtacacctgccatgactactcgtggctttaaggaaaagcacttcctttatgttgctgccttaattgacaagattattaaatctgacggtaataagaaagttattaaagaagtaaaaaaagcggttttaaaactgttagaacgttttccgttgtataagggattggagtattag

SEQ ID NO: 27972 - DNA, 1632 bp, Mycoplasma pneumoniae
atggcaaaggaattagtatttggcaagaatgcccgcaataaactgctagctggtattaataaattagcagacgctgttaaggtaaccgttggtcctaaaggtcaaaacgtgattttaggtcggaagttttccaatcctttaattactaacgatggagtgaccatcgctaaggaaattgaactaactgatcctttagaaaacattggtgctaaggttatttcggtagctgctgtatctaccaatgatattgctggggacggtactaccactgctaccatcttggcacaggaaatgactaaccgtggtgtggaagctgttaataatggcgctaatccagttaatgtccgccgtgggattgaagatgctagtcagttaattattactgagttagataagcgttccaaaaagattaataccaacgaagaaatcgagcaagttgcagcgatctcttccggttccaaggaaattgggaagctgattgctcaagctatggccttagttggtaaaaacggtgtcattaccaccgatgatgctaagacgattaacactaccctagaaaccactgaagggattgagtttaaaggtacttacgcttccccttacatggttagcgatcaagaaaaaatggaagtggtgttagaccaaccgaagatcttggtcagtgcgatgaagattaacaccattaaggaaatcttaccgttactagaaggtagcatggaaaacggtaacccactgttaatcgtggcacctgactttgctgaagaagtggtaactactttagcggtgaacaagcttcgcggtaccattaatgtagttgctgttaaatgtaacgaatacggggaacgccaaaaggcagctttggaagatttagccattagtactggcaccttagcttacaacaatgaactaggtggtggctttaaggatgtgactgtaaaccacttaggggaagctcgccgtgtgcaagtagccaaagaaaaaaccacggttattggtggtaagggttctaaggaaacgatccaaaaacaccttgaccttctaaatggtcgtttaaagcaaactaccgaaaagtacgataccgatctgttaaaggaacggattgcccacctcagtcaaggggtagctgtagtacgggttggtggtgctacggaactagcacaaaaagagttaaaactccgcattgaagatgccttaaactcgactaaggcagctgttgaagaagggattatttccgggggtggtattgctttacttaacgtatccactatcctcaatgacagtaagttggctgacaagtacaaggcagaaactagtgcggaaaacctcaaggaaatcctggttggttatgaaattgtgcgtaagtcactagaagcaccagtgcgccaaattattgaaaactccggggttaacccagttaaagtatttgcagaactacgcagtgaagctgatggtgttggttttgatgctgaaaccaaaaagaaggtcgacatgatccgcagcggtattattgaccctactaaggtaaccaaaactgcactcgaaaaagctgcatcagtagcaagttccttaattaccaccagcgttgctgtgtatgatattaaggaaaacaaggaaggtagcttccaagaatag

SEQ ID NO: 27973 - DNA, 1338 bp, Mycoplasma pneumoniae
atgaaattaaataagttatttgacagcaagacggttgtttttaaaaagtccgataagtacggcaagagtgattgctgtaagactaagtgtgttgaaggccaaattgaatttggcgtaaaaattccgactgatttccccgctttcaaccgcgctctagttacctttttgaaaacgcaaaagaatcaactaaacgtggacttagacagttttgtggaactctacaaagcagaaaacctctgttacaaaacagcattaaaggtagtggtagctagcattaccttctgtgaaacaacacctttcaccatgaagaccgaaccacaaaagaatgtggaagtagcagtgaagtgtgacagcgaacacacgagcctcattaaagaatacgaggtagtgggtaactatgtcaacatggcgcgtcaactccaagacaccccctctgaccaactctacccagaggaatttgtgaagcgctttgaaaaggcggctactggtttaggtgttaagattaccgttttaaagcaagctgatctcatcaaaaagaagatgggcttactgttaggggttaacaagggttcggaacgtgaagcgcgtttactagtaatttcctataacaataataagaagagcagtgaaactttagctttagttggtaagggcattacctatgattcgggtgggatgaacattaagaccggtgactacatgcgtggtatgaagtacgacatgagtggggcagctattgtgtgttccaccgtgttggccttagcgaaaaacaaggtgaaaaccaatgtagtagcagtagctgctttaacagaaaacctaccaggtccccacgcacaacgccctgatgacatccaaaccgcttacaatggtaaaacggttgaaattgacaataccgatgctgaaggtcgcttggtgttagccgatgccattagctatgctgctaaggatcttaaagctacccaaattattgatgtcgctaccttaaccggtttaatgtcttacatcttaagtaccacttacaccgggatctttagtacctgtgacatggcatgggatgcctttaaaaaagcagcttgctgtgcaggcgaaccggtatgacgcttgccaatgcacccggattacctaaaaccattggaatcaaaactagcggacttacaaaactccactagtgttaagggagcaggttcatcccgggcggcatgtttcttagctgaatttagggaaggggtacctttgatccactgtgatattgcatccacagcttcgattcaagatcttggtcaaggggttttagtacgtactttatacgaacgtgctgcgcagcaagcaaaggaataa

SEQ ID NO: 27974 - DNA, 876 bp, Mycoplasma pneumoniae
atggaatcgataagaattggtgttttaggtctaaccaacgctggtaaatcaactctcgttaaccaattacacaaagcgaataacttgttggtttcacctatgaacaacactacgttgttggcggttagcactaatactattacccatgaaaagcaaaacattaccttcattgatgttcctggctttagtgaaaaacgtcacagctcctatgagttaattagtcaagagattcgcaaggctttaagtgggatagatgtcttgttgttagtggtgcgcagtgatcaacagcaaaagttacccttgttacaaacgcaattacaaccgttaaagcgttaccgtgatttaactcgtgttttgttaattaataacttctttgatgttgttttgcaagcggaggacaagcaagcaattgtgctcgattttaaaccgcaagcagtactggaaactgatctgcttcattttgatgccacttctttttgaaaccagtttaacgaagtgaaactacaagcaaatgagtttcgtaaagatgttgaatttttagatgctgacactgataactttaagattttagaagcgctgcgcgaacagatcattaagtactgcagcgaagaaattccccatgtagtaaggctagagattgtcgataagagttttgatcaagctaaaaacctgttgaagctacacctttccattagtgtgcctaaacttagtcaaaaaaaaattattattggccgtaatgcccaaatggtgaaaaagatcgggatgcaaatgcgtcaaaaactactggagtactatgactgcaatgtctttgtggaattgtttgtaaggacttatgaccctaaacaaaaaaagtcaccttatggctctttaatttag

SEQ ID NO: 27975 - DNA, 3111 bp, Mycoplasma pneumoniae
atgccaaaaacgataaaaaaacagaacccatcgaacactacattacagtacaaaaagtatttagaacagtctaaagagaaaactgctaaagctaaaaataaggatgttagcatcgatgatttactcaagaagcccttcttagaggagatcaaaaccaatgtacttaagaagaataaaactaccagagctagcaccgctaccagaggtacttctaaagtcaaaaaacagatagttgaatcttctattgacttttttgacgagaaaaagcgtggtgtttttattgtgccaccagctggtactagtgttattaacgatgaccgggatgataataaagcggtagaggagactgttagcaaaactgctattagtcaaaatcaactggcacattatgccaacagtgagcttgttgaaaccgaacaatttgaactaaaaccggttgctttagaacataatcaggttctaaccagcacccgccacagtcaagaacgtgaatcgatttttgaaaaagcacaactcttttgacaaatctttgttggtgatgttcgttttggtttttgaaagaaccacacctgaatttgattaggtttctttgatcaacaccaaaactggtattactttgaagtggtagaaacagtggaactgccccaagaacatactgcctttattaagcgcaaacagattgatagctgtttttgaaaaccactggttggtaatcctaactatggttacattcaaaacaacatttgggtgtggaagggtttctttgacaccaaactcaattggattcctgacccagtgcgctttaccttgccaatggttgaaaaagccactacaactacacctgttgtacaaattgaattaccagcaccaccaactgtaactgtagtagaccaaacatcaccaccaactgctgctgtcaccgtttctacatcacagccagtcatagaagagcagaccactgtatttaatcaaactactcagctagaacaactaagtgttagcgcaccactgttagaccaatcggaagtggaaacggaaatggtagaagtgccgtttgttgcaccgtcaacaactaccactcaacctcaagtggttactgtacaagcacaaccagcatcaagttcgattcagtttcaagaaccaattattaaggttgagtttgttaatgaaagttttgatttcaaaaaaccaagccaaacagcagctgcagctagtcaagccccttctcaagcaattaacattgctttaaatgaagctgacctcattgatgaattagtggcggttggcaccacagccaccacagccttaccacaaagcgagctgattcaagaggtggtggtgattgacaacggtcaaccccaacaagctgggtttcattatgtagttgattttctcactagcactgcaccactaactgtagcagaaatagagttgcaagagcaagagctagtcaatgagtttgtcacaactactagtagagaaacaactacttttgcatcaactccagtttttgaaccagttgtaattccaacagtagaatctgaagaacaacttttagaaaacgagtttgttgaatcaactgttgtaagtgcaacatcaaatgaacctaatgttgcatcaactccagttgttgaaacggttgaacttacagaaacaccagtaagtttagaaccgcttgaaactgttcaactagaaacagcaccagttgttactgaaactgttacagttactgagaaagcagtagaaccagaagtattagcagttgttgaagaagcaccacttgctgtagaaccaattgttgaaacttcaacaacattagctgcagagaccgttgaagaagcgcaagttgaacaagagtcaacagctgttgcagtcgaaccagctattgaaaccgagtcaaaagcaacttctgaagcccaagctgaactggattgggaggcgttaattggtaacagtgaatacggttactttgatgcagagcaaaactggatttgaaccggttacttcgatgaagataacaaatgggtatccacagctacagcgcaaacagaagcaaatgctgaagaagttgttttaacagcagacgctgaaacttcagagttaaatactgaatctgatcctagctttgaaccagaagtagaaattcaacctgaaccagaacctaactttgatttggaaacgattcctgaaccagaatcaattgaaactactgaaccagaacctaattttgaaccagaagtagagcttgaaccagaaattgaacctaatttcgaatccgaaactgaagttcaacaagagctagcacaagaatcaagtttcgagtctgaaccagaacctaattttgaaacagaagtagaagttcaacctgaatcagaaattgaatctaaattcgaagccgaagttcaatcagagccaaaagtaagtttgaattcagattttgaaactaaaccagaagctcaagcggaggtaacgccagaaaccttggaagtagaggcaacatctgaagctccagaacttcaaccagaaactgaagcaacaaaagtagttgatgacgttgaagaagagcaacttgattgagaactattgattggtaatagcaattatggtcattatgaacctagtggggaatgggtatgagctggttactttgatgacaaccaaatatgaacaccagatgctagtgttgaatgggcacgtgaaagtgattacacagatctaataggtgatgaaatctatggtagatataaccgtaaaggagaatggatctgatacggttattatgatgagaccggtgaatgagtcttagttgatgaacactatcagaatcatcaaccaaggattagtgaagcaccacggttctgggagcagttaataggcaacgaagactatggttactatgaagataatgaatgaaagtggtacgatggggaatttgacagtgagggtaactgattagtattccacagttccaacgctgaagatgcgaagaacattgacatagccaaggatatccctgtgtttgaaagctttgatgtggactcgattgatgctgatgaatgattagatcagttttccgattccgatgctaaggaggtatttggcgaagactaa

SEQ ID NO: 27976 - DNA, 1056 bp, Mycoplasma pneumoniae
atgaaagcatatgcaatgttaaaaattggcgctactggttgaatcgaaaaaccaagaccagtttgtgggcccaatgatgcgataattcgaccactggccgtagcaccatgtacttcagacgtccacaccgtttgggaaggtggcattggtgaacgtcacaacatggttttaggccatgagggctgtggtgttgtggatgaagtggggtctgaggtcaaaagctttaaggttggtgatcgcgttttagtggcagccattacaccagaatgaaattcggttaatgctcaagctggataccctatgcactccggtggcatgctgggtggttggaagttttccaacgttaaagatggcatgtttgctgaatactttcacgtcaatgatgctgagggtaacttagcattgatgccagaagggatggatttagctgatgcatgtatgttgtcagacatgattcccacaggctttcacgccaatgaactagctgacatccaatacggtgtcgcgttgtcgtttttttgtgctggtccagttggtttaatggcgatcgctggtgcagccttaaagggtgctggacgcattattgtggtggattctagaccagatattgtggaaattgccaaagcatacggtgcgactgattacattgatttcaaaaaggtttcagttgtggatgaaatcttgaagtgaaccaacaatgaaggagtggaaaaggtgttaatttctggtggtggttcgactatcttagaaacagcgattaaggttttaagaccaggaggcaaaattggtaacgttaattactttggcgctggtgagtttttaactattcctagagttgaatggggcgttggtatggctcacaaggccattcatggtggtcttatgcttggtggtcggttaaggttagaaaaattagcacgtttaattatgaccaaaaaactcgatccttccaaaatgattacccatcgctttaagggttttgaacacattgaagaagccctgtttttaatgaaagataaaccgaaggacttaattaaatccgtggttattttttaa

SEQ ID NO: 27977 - DNA, 1302 bp, Mycoplasma pneumoniae
atgggattaacagattattgtgagtgccgctttagtgcgggtaacgggggcaatggcattattgcttgacgcagggaagcccattatgacaagggtggtcctggtggcggtaatggcggcaatggtggtaacgttgtgttgcaagccgaccacaactgcgattccctcttttttttaaagaataaaaaacacctgtttgctgaaagtggcggcaatggcaaacccgatttagcccatggtaaaaacggggaagatttggttattaaggtaccagtgggaactacggtgcgtgaccttgatactaaccagatcttaatggactttgttcatgaccaacagagctttattctctgttacggtggcaagggcggtaagggcaacgcagcttttaaaagtccaattatgcgcgctcccaatctgtatgaaaacggcgacaagggtcaaagtttgcatgtgagcttggaaataaagtatttagctaatgtggggattgtgggttttcccaacaccggtaagtccactttaatttccaaactgtccaacgctaaacccaagattgctaactaccgttttacaaccttagtgcccgtattgggggtagttaaacacaacgaccaaagtttggtgtttgctgatattcccgggttaattgaaaacgccagtgagggtagtggtctgggtcactatttcctgcgccacattgagcgttgtgaaatcctaattcacttaatttcactcgatcccgtggatcatgacgatccttgtcaagcgtatgaacaaattatgcgtgaactgtcgaagtactcccagctgttagttaaaaagaagatgctggtcgtggccaataaaacagacgttgaccttgatggtacccgttttcaaaagttagcacaatacctcgaaaataaaggaattcccttgttcaaaattagtgcactcaaacaagaactgggtgatctagtggcccaagtgtttgcgctccaccaaaaaacgctagcgcaattcggtgccaataagtttcatttacccatggaaatggagaagcactatgtctttgaacaggccagtgaaaccgaccatgatccactcaacattgaacgtgatgccttggggcggtggcatgttgaatgcaagcgtttacattattggtttgacaagattccccaaactacacttgacaacattcgccgtttaggtaataagattaaagaagtgggcatagaagaccaattaaaggtggcaggtgccaaaaaaggcgatgtcattgtgtttgctggccaggaatttgtaattaatgactaa

SEQ ID NO: 27978 - DNA, 747 bp, Mycoplasma pneumoniae
atgactaaaaatttattgaactatttaaacgaattggaagcttgactcaccaattacgttaatgaagctcacgctcagggcgtggttgttggattgtcaggtggagttgattcggcagttgtagccgccatgactaaaaaactgtttccgcaaaaccacttaaccttggtaatgcacattaataactccgagttagatcacaaggccacaactgccttagtggaacaattacaactcaacaataaacaggtggatttagaaccaccttaccgcgctatgttgcaagcattgaccattgatccccaaaaggagttaatggtagccggcaacctcaaagcacgtttacgaatggcttgtctatacacccatgcccaaaagcacaactacttagttttgggtactggcaacttcattgagtacagcttgggctactttactaaatggggtgatggggcgtgtgatgtggcacccttagcgttcttgttaaagagcgatgtttatgctttatcccagcacttcaatgttcctgaattggtcattgaacgagcccctactgctagtctgtttgccgggcagactgacgaagcggaaatgggtttgacgtataaggaattggaccagtactttcagggccacttacagttaagtgccacgaaacaacaacgggttgaccacttgcgccaaagctcccagcacaagcgtagtttacctaaaacctttaaaccactttattccttccaaatctag

SEQ ID NO: 27979 - DNA, 576 bp, Mycoplasma pneumoniae
atgaataacagtaaattgaaacagtatgttcaactagtacaaacagccaaccaaaactttaacctcaccggtcttaaaactgaaggcgaaatttacgaacacttagtccaagaaattatcgagctctttaatgagtatgacagttactttgaccataaaaaggttgcagatttgggtagtggaaatggttgtcctggtgtcatcttaaagctgttgtttccccaaatcaaaactttggatttaattgatagcaaacacaaaaaggttaactttttaaaagaggtgattcaaacactggaactaaacaatacccaagcactttgtgccagaattgaaaaccacactgaacaatacgacactttatgctcccgcggacttggcagcattattgaggttaatgcctttgctttaaaactgttaaagcccaacggcattatcttccacattaaacaaagcttagatcaatacctcgagtttgaggattcggagcaaaaagaccagtttaaaccactgttctttaagtttttccatggcaagcgccagcaaatcctgattgccatgaagaaaaatgtttaa

SEQ ID NO: 27980 - DNA, 1839 bp, Mycoplasma pneumoniae
atgtcttttacactaacagttattggtggcggtcatgccggattagaggccgcatttattgctagtaaactagggctaaaagttaacctcttagtactagatcccaaccatgtggggtcgtgtccctgtaacccggccataggaggtcctgctaaaggtatagtaacccgggaaatcgatgttttaggagggatgcagggtaaggccgctgatgccactgctttacaatacaagctgctcaacagctcgaaaggtccagcagtgcaagcaatccgcgctcaaatagacaaaattgcttatcagaagtggtttcgccagcaaattgaccaaacgcctaacattgagttaattgctggggaagccgttgatatccttgaaagtaacggtaaagttaaaggtgtcgtgttagctgatggtagtgaactggcatcagatgctgttattgtgactacgggaacttatctaaaggccaaaacttactgtggtagcttaagcaaagaagaaggtcctgaccgcgctaagcgcagtgaatacctttccactaacttaattaagcggggttttaaaacgttacgactaaaaactgggacaccaccacggatcctacgcgaatcactcgactttagccaaatggctgtggaagctaacactacccctcatttagcctttagctttactactaagaattatttaccactagaacagcaagtgatctgtcacttaatccataccaatccccagatccatcagttaattctggccaacttaaaacagtccgctgtctttaacggtagtattaaagcaaacggaccactttactgtccgagtattgaagacaaggtatttcgctttcaagacaaagaacggcaccaaatctttgtcgaacctgaatcacttagtttagaaacggtttacctagcagggttttccacttcctttcccccagaggtgcaagagcacattgtccgtttactccctgggtttaaaaatgcccggtttcaaaagtatggctatgccattgaatatgatgcctttagttcgatacaactcaaatcaacactagaaactaagttaattcaaaatctgtattttgccggacagattaatggtaccagtgggtatgaggaagcagctggccagggcttaatcgctgggattaacgccgctttaaagctacagcgtaaacccgaatttgtgttacagcgcaatgaggcataccttggtgtcatgattaacgacctggttactaaggaaattagtgatccctaccgcttgttaacttcgcgcgctgaacaccgtttgtggttgcgcaatgataacttacaagaacgtctaattgaaaagagccgagccttaggtttagtggaagcagatgtgtatgccaattacttggaacaacaacaaaagaaaaaacaattaattgattatttgcaaaccactaccgttgggcaaattgctgccttgaaattaaactttaaaaacacggcccaaacgctgtttgactttaccaagcgtgctgaaattaagctggttgatttagtacaactactccccaagcgttttgacttggatgtacaaagtttaaaccagattgacattgacattaagtacgctggttacattaagaagagtgaaaagtacttcaagagtttaaacaacctcagtagtgtcaaaattcccttaaagttaaattaccacaaagtacctaacttagcgagtgaagcaattgttaaactctccaaaattagaccaactgatctcagtgtagctagtcaagtagcgggcattaactttaacgatattttagcgattaaacattttttagataaccatgaataa

SEQ ID NO: 27981 - DNA, 1614 bp, Mycoplasma pneumoniae
atgcttttcattaacacagatcttcaagaatgtcttaacgctttgaatctagaatttgatgagcacaaagagttagtcaaacttgttaaaaacaacagctttagtggttttgcttccaccgttgtgttccacttaaagggtgtaaatcaaaaggaaaccgcccaacagattgctgcttggttgttaaaacacaaaaaggcgcattaccgccgtgtgtttgtcgctaataacaacttcattaactttgaaattagccctcaaaaatacctcgattttttaaaaaccaaacctacttttgcccctaaaccaactaaggttctaattgaatgggtgtcggctaaccccacgggtgagttgcacttaggtcatgtccgcaatgccttctttggtcatgtactcaataacctgatggtttttttaggctttcaaacagttcgggaatactgggtcaatgactatggtcaacaagcacgggtgtttggttttagtgtgtaccaagcactccacttacaacaaaacattaaggtcactcctcaccctgatggttatgagggggagctagtggacagtattgccaaaactattaccggtattcctttagataaactcagctttgaagagtttttacaacaaccctttctggaccagttactagctgactgtactgccaaagtcttggaagtaattaagcaagacttagctacaatccacattcactttgacagctggaagtttgaaagtcaagtggttaaggaaacagattacaaaaaactgttaacccagtttaaggacgaagcgcactatgaaaaggatggtgccatttgattgaagactacgctctatggtgatgataaggaccgggtgttagtgcgtcaagacaatcggccttcttactttggtaccgatgtcgcttaccacttagacaaggctgcgcggggctttgacctcttatacgacatttggggcagtgatcatgaagggcacattaaacggatgcactgtgtttatgagggactaaagattcaccaaaaatgccagctcaaaattactgccttacagttggtaatgctgtacaagaataaggaaatagtcagattgtccaaacgtgctggcaacgttattaccattaagcaaatgttgcaaatgctcagtgaggatgcggcgcgttggtttatgttgtcgcaaaccaacaactcgattatcaagattgatttggacactgctaacctgcaaaactcttccaatccggtttattacgtgcaatatgcgtatgccagaatgtgcagtgtattaaaggtagtggatcaagcagcactagctcaagtaaatgactgcagcttattaacgcatgaaaaggaaattgctttactagaccagttagtgtactttaagagcttactggaaaaagttcaggttagccatgaactgcacctcttaactaattacttatacgagacagctaccttgtttcattcttggtataaggcttgcaaaattaacgatccagcgcagtacaatttaacccagcaacgcttacttttactgcaatcattgcaccatgtttttggtcagctattgcaaatcttaaacattactgcaccacaacaaatgtaa

SEQ ID NO: 27982 - DNA, 1695 bp, Mycoplasma pneumoniae
atgctagctggtgttcttttattacaaagctgattaaaagctaactatcctcaagtacagtttggtagttacggggtacaagaaggcgagttttaccttgactttaaggtggaaaagagcttttccattaaagagtttgaacagctcgaacaggacttaaatgcttattttaatcagttaaataatgttgttcagacaaaaattgataagacaaaatcactcaaattttttcaagctgatccgtttacaaccacgcttattgaaagtatagaaagcaacagccttgtagttaccaccgtaaatgaacaaacattttgggtgcatgatttagtgttgccattacccaaacagggctttgtgaaactgctcaatgttagtgccaattattttttaggtgatcccacaaaaccacaactacaaaggcttgtgggaatttttgcagcctctaaagaacagcttaaaagtcttattgcggctaatgaacaaaaataccaaaatgatcaccgtgctattggtaagcgtttagagatctttacctttgatcccttagtcggtgcaggctttccgatttgattggaaaagggagcagttttaaaaaagattattggtgattttgtccactaccaacagttaatgtttggttttaaaacggtatcttcaccagtattagctaacttagagctgtacaagattagtggtcactatgtgcactatagtgaggacatgttcccctctgtcaaattagaaaaccaaatgatgatgctccggccaatgacctgtccgcaccactgtttgattttcaagcacaaacgccgctcttacaaagagttaccacaacgcttctgtgaggattccatcttgcaccgctttgaagcatcgggtgggcttactggtttggaacgggtaaggtgcatgacactgctcgacaaccacatcttttgtcgtactgaccaaattaaagctgagattaaaaatgcctttaagttaatccaaacggtcaacaacaagtttggttttagctttgaccgaattgacttggccttacacgatcctaataacaaggccaaattcattgacaacgatcagttatgagctaactcagaaagccaaattgaaagcgtgtttaaggagttaaatgtgccctataaaattgatgtgggtgcagctgctttttatggacctaaaattgactttcagtttaaaacggcactcaataagatgattaccattgccactattcaactggattttttactgccagaacgctttgaattgcgttactttgatgagcagagcaatgctcaaactcccgtaattattcacgttggcatagtcggtacgtacgagcgttttattgctgctttattggaaaaaactcatggcaatctaccgttgtgaatggcaccagtacaagtagtggtgattccggttaacatcgataaacacgaaaaggctgccaaaaaactgtaccaaaaattgttaaaggaaaacattagggtcagcctagatgagagcgaagatcgtttgggcaaaaaagttcgcacagccattgttaacaagattccactgcaaattattgtcggcgataaggagatgcaggatcttactcgaataacttgtcgtggctttaaaggtgagaaggtacagaaactgtattgagctaactttgtcaaaaaagtgcgtaaggatggatag

SEQ ID NO: 27983 - DNA, 264 bp, Mycoplasma pneumoniae
atggctaatatcaaatcgaacgaaaaacgtttacgacaaaacattaaacgtaatctgaataacaagggacagaaaactaagttaaagaccaacgtgaagaattttcacaaggaaattaacctagacaaccttggtaatgtttattcccaagcagatcgcttagcacgtaaaggtattatttctactaatcgtgcgcgtcgtttaaaatcacgcaacgttgctgttttaaataaaacacaagtaacagctgttgaaggcaaataa

SEQ ID NO: 27984 - DNA, 369 bp, Mycoplasma pneumoniae
atggcaaaactagataaaaaccaattaattgaatcgttgaaggaaatgaccatcatggaaatcgatgaaatcattaaggctgtagaagaagcttttggagtatcggcaacacctgtagtagctgctggtgctgttggtggtacacaagaagctgctagcgaagtgactgtgaaagttactggttacactgacaacgctaaattagctgtgttaaagctttaccgcgaaattgctggtgttggtttaatggaagctaaaactgctgtggaaaaacttccttgtgttgttaagcaagacatcaaacctgaagaagctgaagaacttaaaaagcgtttcgttgaagttggagcaactgttgaaatcaaataa

SEQ ID NO: 27985 - DNA, 486 bp, Mycoplasma pneumoniae
atggaagctaaaaaagataaagctcagcaggttgctgatgtctcccatttgctttcaaccagtgcaggatttgtcatttttgactataccagcatgtcagcaattgaagcgacttctattcgcaagaagttgtttaagaatggcagcaaaattaaggtaattaaaaacaatattttgcgccgtgctttaaaagctggtaagtttgaaggaattgacgaaactgccattaaaggcaaattggcggttgctgttggagtgaacgaaattgtagaaacgttgaaagctgttgacggtgtggtaaaggcgaaggaagcgatgaactttgtttgtggttactttgacaaccgtgcttttaacagtgctgatttagagaagattgcaaaactgccaggacgaaacgaactttatgggatgtttctctcggtattacaagctccattgcgcaagttcttatacgctttggaagcagttaaggctgcaaaataa

SEQ ID NO: 27986 - DNA, 2148 bp, Mycoplasma pneumoniae
atggattttagttttacaccaacaccagataagcgtgatttcttaaaggaaatggggcgtagcattaacgatgaggtgctcaaaaataaggttgatcctattattggtcgcgacaacgaaattcgacgcttaattgaaattttaagccggaaaaacaagaacaatcccgttttaattggtgaaccaggcgtcgggaaaaccgccattgttgaaggatttgtaagaagggtagttaataatgacgtgcctttaaacttgcgtgatgttgaaatttatgaactttcgttgtctggtttaattgctggcacccaataccaaggtgagtttgaaaaacgggttaacggtatcttaaagcaagtcaaagaatcaaatggcaagattattttattcattgatgaaatccaccaaatagtggggctaggtcgtaactccagtagtggtgccatggacattgccaacatcttaaaaccaatgttagcacgcggtgaaattaaggttattggtgccacgacactgaaagagtaccgtgaatatgtggagaaggacggcgctttagaacggcgcttccagaagatccttgtcagtgaaccgagtcaacaagaagcacttaccattatgcggggtttgaagacccgttgggaactttttcataacctcaccatctttgacagtgccttggtagctgctgtagaaatgtcagcacgttatattcctgatcgtaatttacccgataaagcgattgatttaattgatgaagctagtgccaagattaaaacggaaatggcttcagagccagtggtaattgacacccttaagcgggaaattattaacttagaaactgaatatgccgctttaaaacaagataaggaaaatgctgataacaagaaaaaacaaggacacttagacaatctaaaacaacagttagatgagttaaagaaaaagcgtgattctctaactgccgaatgaaaaaaggagaaaactaactttgaaagcattaacaagctcaaaaaggaaattgaggatttgcaaacacgcttagagctctaccaaacggaaggtaactatgaagctgcttctaagattctttactatgacatccccaaacttaaaaaccaattagaacaagcacagaaaaagtatgttgattccaaacatgacttgtttaagacagaagtgtcagaaaacgaagtggccgaagtagtatcacaagctaccggtattcccttaaagaagctgttagaaaccgaaaaggaaaagcttttgcatttaggtgatgaaataaaaaaacgggttaagggtcaagatgcggccgtggagacagtggtcaataccgttatgcgtggaagggtaaacctcaatgaccctaaccggccaattggttcctttatctttttaggctctactggtgttggtaaaacggaattggctaaatcactagcagaggtcttgtttgataatgaaaaagcgatgattcgctttgacatgagtgaatacatggaaaagcattcggtcgctaagttaatcggagcgcctcctggatatgtaggttatgaacaatctggtttactaactgaagcagtccgacgcaaaccttactgtgtgcttctgttcgatgaaattgaaaaagcacaccctgatgtaactaatattcttttacaagtattagatgatggtactttaaaggactctcaaggtcgtttagttaactttaagaatacgatgataattatgacttccaacttgggttccaattacattatggaaaacaaacgcgatttagcgatggaagcactaaaaaaacacttccgtgctgaatttattaaccggattgatgaaatcgttttctttagcgtattgcaaaaaacaaccgttttagaaattattacaaatttattggatcaattaaatcaaagattagctaaacaaaacttaaagttcacgtttgaccctaagttaaatgagtttatttacaaatctagtttcgacgaacagtttggtgctcgaccaattaaacgttttatcgatcggcaaatagctactctaattgccaagcaaattctggaaggtattattactaaagatgttagttacaacgtaatagttgagaaagataaagtggcaatagtagccaataaggttaaatcttag

SEQ ID NO: 27987 - DNA, 501 bp, Mycoplasma pneumoniae
atgtataaatcagcgattaatatcgtcttattttgcccagaaattcctaataacactgggaacattgttcggagctgtaccgcttttaaagctaacttgcatctgattaagccctatggcttttttctcaatgataagcggatggtgcgtgctgggttaaattgttgggataaggtgcaaatgtttgaacacaaatcctgggaacacttcattgaaacaacaccaccaaataaagcaatttggttgttgacaaagagtggtactactaccccagaccaaattaacatgcaaacagataacagggaacaactgtactttgtttttggtcaagaaaccaagggattaccgcaaacactcatggaacaatactcgcagaaccaggtacggattccgatttgaaaccctgtaagaagcattaacttgtccaatacagtagcttgtgtactgtatgagtatgctaaacaaaatcattactttaatttagataaacagtgcgcttaa

SEQ ID NO: 27988 - DNA, 2586 bp, Mycoplasma pneumoniae
atgaacttaaaaaagacactgttaatgccccaaactgcatttgaaatgcagggcaaattaaccactaaggaacagcagtttcaagctttttgacaaagtaaacggatttaccaaaaactgcaccgccaaaacaaagataaaccacaaaaaatcctacacgacggtccgccttatgctaatggcaatatccatgttggccatgctttaaacaaaattttgaaggactttgtgctccgtagttgaaacttacaaggctttggtacagtgtttattcctggttgggattgccatggtttgcccatagagcatgcggtgagcaaaaaagatccgcaacactatgcgagcttatcattgagtgaaaagcgcgatttatgcaagcaatttgccctgtcacaaattgccattcaaaaagcccagtttcaacgcttaggtctgttgaatgactttagtaagtattacaaaacaattgatgaaagctttcaacaaaatgagctagacctgtttttacaagcagtgaaaaaggatttaatcttccaagcgttaaaaccaacttactgatcgcctgtatcacgcacttctctggctgaggccgaaattgaatacaaagaagtaaaaacaattggactttaccttacttttacagtagtgcagagtgcagtattaaattcaggtactaaactcttagtgtgaaccactactccttgaacgctgcctactaaccaagcaattgccgttcacccccagtttgaatacctgctgtttacttataataacgagcagtacgtggtgttggccagtttatttgaatcgcttaagactaagtttggttgaactgatgctatacaagtacaaaccattagtggtagccaattacaaaacactacttataaacactgtctttatgacaaagtgaacccggtgttgttgggtaatcacgttttatgtaatgagggtacaggactcgtgcatacttcaccagcttatggtttggatgacttttatttgtgcaagcaaaacaagttaaatgaagcgctagtttcacttgatgaaaaaggagtttttaatgatacgttgaacgatccagttttaacgggtttgttttatctaaaggctaatgatgtgattattgaacgcttaaagcaacaccataactttgtctttagtgaaagctttttgcaccgcgaaccccacgattgacgcagtaagactccggtgatttaccgtgcctccaaacagctcttcattaaaactaaatcaattcaaagtaagctaaagcgtcaaattaaaagggttaagtttgttaataacaagaataaagagcgcctacaagaaatgctgttgcaacgtgctgaatggtgtatttccagacaacgagtatgaggcttgccgattcccttaatttatgcagataaccaacccttactggatgtgactaccattaaatacaccattcaacagctcaaaaagtacgggattgacagttggtttgaaaaggatattaatttttttttaaacccaaagaaaatacagccaggagttgaatataaaaaggaaactgataccttggaagtatggtttgactctggttcaacttacaacgttttaattagtaataaactgaactttcccgctgatctttatttggagggtagtgaccaataccgcggttggtttaactcatccgccagttgcggtattatccaaactgaccaattacccttcaagagtttgatttcccatggttttaccttggatgaacatggtaataagatgtccaagtcactcggtaatgtggtcgaccctttaaagttgtgtgatcagtatggcgcagacattctgcgtttatgggtaactaatgttgattgacaagtggacaaccgcataggtgacaacattatcaagcaaattgtcgagcaataccgccgcattcgcaacagcttattgcgctttatattgggtaacctcaaccactttaactttggtgagatgaaggattatcgttttgctctagaggacaaaatcgtaatccataaaactaatgcattggtacaagaattgcaccagtggttaaagcaatacaactttttaaattgcttaaaggccattaataagtttgtgttgtggttatcgggttggtattttgaaattattaaggacacactttattgtgatgctaaaactaatcctaatcgggtggctaagcaggcagtattgaactatatctttacccagttaattggtttcttaaatatctttattccccatactgccgaagatgcttgacagaattatcttttgcctaaaaagccggttagtgtaaacctgtttgcaggaccagccatgtttaaagttgctaatgttaaagggttagatcgcttacacgaaagctttagcgccattaaagaccgggcttatgcagccattgaacaagcacgtcaaaatggtgtgattactaaaaacaaccaggttgtattgacattgggtgtggattctactagtgcaattgatccaacgtcttgtaaaacatttagcagtttggctaaacgtaaaccaggtaaatataacgaatgaccccaacgaaattaa

SEQ ID NO: 27989 - DNA, 819 bp, Mycoplasma pneumoniae
gtgagagacaaagtcaatattaatactgttgatattagccaactagaagtattttttcaaccagctaaaaaacccgctaaacaaactattgtgtttgcgcacggtttttcagtgcaccattcttattttaagagcttttctgaaacgctggtggattatgactattacgcacccttgtgaccgggtcataaccaccatggttttactgacaaggaattgtcacctattcactatgcccatttattggtagcttgaattgaaaagcaagatttagaaaacattgttttaataggacacagcatgggtggggcagtggctagttatgcattgcagtttttaaaaccacaacgagtggaaaaactagtgctcttagcgccactgtcttattccaacttgttgaattactacaagattaaaaaggcttttaaaaagaaggacgaaaagctgtcttactttaagcggatgtttcaaccaaagtttcctgatttacaaaacgatggacagtgacaaatggagttagacaagcatactgctatgtgcaaaaaactcacctttcagatctttaaggaattgtcgcgcttaaacagtgcttataaaactattaccataccagcctttttactgttggctcaacatgatgattttatgcctacaaaagctactttaaactactttaaccgctttttgattaagaaaggtaacttgcaatcaggggttatcttacacagtcaacaccaaatgtttaacagcaagcatgaaagtttctgtaaagcaatgcacgatattttgaagcataataaactaagtaaaatttactag

SEQ ID NO: 27990 - DNA, 4176 bp, Mycoplasma pneumoniae
atgtcacaaaaacctagtttctttcagaaaaaatactcacccactgctacccgccgttactatggcaaaattgccactgattttgtgcaacctaatctggctgatattcagattaggagctatcaaacttttctagatcacgatctggaaaacctgattgctgcttactttccaattaagtcccctaatgatcgttacacgatcaactttaagggtttgcgtcgtaccgctcctgaacgtaatgaagcccaatcacgctctgagtccaagacctatgaaattggtatttacgctgacttagaattaattgattccgctaccggaaccattaaaaagccgcgcaaatccaagaagaacagtgccaccagtagtgtcgatggcgttttcttaactaacttaccattgattacccgcgatggggtctttattgtcaacgggattgagaagtttgtgattgcccaaattacccgttcaccggggatctacatgctcactaagtcccagttaaaattgtctagttcgcgtaaacgggtacaagaaggttatgtatgtgaagtattaccagccaacggttcggtaatgctgatctacatctccaataaaaagaagattgaagatgcctttgtgcaaatcttgctccgggatgctgtacgtgaaggggcaaagatcttccctattaccaccttgctcaaagcctttgggatgagtggcaaggaaatcctcaaagttttcaaaaacaacgagtttattacccgttccttagaagcggaagtctacaacgctaaggatttcttaaacaacgttgaccctgaaattaaaaacttattaagggaattccgcgatggcaaaactgatctccgccgtaaggggattgcctctgaccaaaagatccgcagcttagtgagtgactatgtccttttagaaaaggaacacaaagcgctcagtgaagctaaaccaaatgaccctaaagtaggtcagttagaagcggacatggatgagttgatggataaaatcatcaccgaacgggctgctaaacacattgttcatgaattgtccatttcactacgtggtttagaaaacaccgatgaatgtccggaaaacagttaccacgctttactgtgttcacgtttcttccgtcaaagaaggtataacctctccgctgctggtcgttataaggtatcacgtaagttaagaattaccgagcggatttaccaaaaaacacttgcttgtgaccttcatttaaaaaacggggaactcttattaaagaagggcaccttattagttaaagaagaaatcgacaagattaagcaagctgcccaaaacaaccaaattgactttgtccaaaagattaagttaaccactgatggtagtgctgttaacctttcccctgaatcgttgttgtatgaatcacttgatgtttatgtgaacaacgacaacttcgatgtatccgtgccagtggtggggatccacaacgataacgatctcaataaggcaattactttaagtgactttattgcctcgattagttatgtgattaacatcccttcggccatcggtaagtacgatgacattgatcacttaggtaacaaacgcgtcaagttaattaacgagttaattagttcccgtttggaaagtggaatcacccgcatggagcgcttcttaaaggaaaagctcacaattgctgatggagtgaaccgtggtcaacaaattaacgaagagggtcaagtaattgaacaagcggaaaagaaggaattgaccattaaatccttaattaattccaaacctattcaaattgtcattcgtgacttcttcaacactcaccagttgacccagttcttagatcaccaaaatccactttcagaattaagtaataagcgccggatttccgccatgggtccagggggtatctcccgcgaagacccgaacttggatatccgggatgtgcactattcccaatatggtcggatttgtccaattgaaacaccggaagggatgaacattggtttaatcatgtcgttggcttcctttgccaagattgacgaaaacggattcctaatggcgccttaccgcaagattaaaaatggtgtcattaccgatgaagttgaatacctcacggcattaagggaagacgagcacattattgccgaaatctcttcgttggtcaacattgacgaaaacaacaagatcttagataaggaaattattggtcgttaccgctcgatgcaagggttgtatgatccctcgaagattgactacatcgacgtggcccctcatcaggtagtgtccatcggttcgtccttaattcccttcttggaaaacgatgactcagcgcgggcattgatgggtaccaacatgcaacgccaagcctatcctttaattaagccttacgctcccgttgtgggtacaggtcaagagtacaagattgctcgcgactccggcttgacgatgttagcaccttgctcaggtacggtaaagtatgtagacaacagtaagatcacgattgaaagtgacagtggtgaacagcacactttggatctaattaagtttgaacgttccaaccaaaatacctgctacaaccacgttcccttagtagaaaaggggcaacgggtaactaaggacgaagtgattgctgatggtcctgcagttaacaagagtgagctgtctttagggcaaaatgtccttgtcgcctttacgacctgaaacgggtacaactatgaggatgcgatagtgatttccgagcgcttagtgaaggatgatgttctaacctccttaacgattaacgaatacgtagcccagtgtttatcgaccaaaaacggtgatgaacaaattacccgtgatatccccaacgttagtgatgctaacaagcgttacttagatgaaaacggcattatcatggtcggtgctgaagttaaggaaggtgatgtccttgtcggtaaggtatcccctaagggacaggttgaagtatcacctgaagaaaagctgtttaaggccattttccctgaaagtgtgcaaaacgtccgtgactcttccttaaagctccctcatggtggtgatgggattgtgtcctgtgtcaagcgttttagcattgccaacggtaatgaacttaatgatggtgtcatcgaaatgattaaggtctatgtggtgcaaaaacgcaagatccaaatcggagataagttggcagggcgccatggtaacaaaggggttatctctaaggttgtcccagtagcggacatgccccacttagaagatggtactccagtcgacatcctcttaaacccactgggggtaccgagtcggatgaatattggccaaatctttgaaatgcacttgggttatgcagcacataaccttgccaagcgaatgttaattagtgcttgttttgatgacaagaaggctcaagcactttcaaccgaaattaaccagccacagtacaaacttgaccgcttaattactggtttaaaagcccaaattacgaaccgcggtcttaaagacgagcaggcagccttggcccaactcaataacggtgacattgctttagtgctcaaggaaatcggcatgagctttgatgacctccactttaaagtagcgaccccgatcttccaaggggtgaacttccaagacttgcaagacatcatggatgaagcaggattgaaaccagcggaaacgcacgggaagttcaagctgattgatggtcgcactggtttaccatttgaaaaaccaatttccttgggaatcatgtacattatgaagttaaaccacatggttgatgacaagatccatgctcgcgctgtcggtccttactccaagattacccaacaaccattgggtggtaaatcacaaaatgggggccaacgctttggggaaatggaagtgtgagccttggaagcttacggcgctgcttacaaccttcaggaattacttaccattaagtccgatgatgtgcagggccggaataaggcctatgccgcgatcgttaagggcgctgccttccccgaaccaggtatccccgaatcgtttaaactgttaacgaaggaactacaagggttagcgttgagtgtgtcctttatttacgatgacaacacccaacaagattccaacaacgtttcaattctccaagctgatggagaacaggacgatctctttaatgactttgaatttgacacggagggttattaa

SEQ ID NO: 27991 - DNA, 3873 bp, Mycoplasma pneumoniae
atgacaaagcgtaataaaaagaacaacaagctgtacaagaacattaaggcaattaagctttcgattgcttccaacgacacgatcctaaactgatccgaaggggaagttaccaaggcggaaacgattaactataagtccttaaaacccgaacctggtggtttgtttgatgaagccatttttggtccagtgaaggactatgagtgtgcttgtgggaagtttaagaagattaagtaccgtggcgtgcgctgtgatcgctgtggtgtttgggtaaccgaatcaattgtgcgccgggaacgtatgggccacattgccctagtcagtccggtagcgcacatctggatgtcgaaggaactgccttccccttccaagatctccttagtgttaaacatctcttataaggaagtggaacaggtcttgtactttgttaactacatagtattagatactgggaagatcaaagatcccaagatcatgccgtttaagtttaaggaagtgttggacttagcaggcaagggttctttaaccacgcggcaaaaaatgcgccgggtgatcggttacatcttccggaacctgattaagaacaggagtagcgaagactaccgcaaggggaagatcttttatgaaagcttaaagaacagttcgttaccgttctccttaaatgatgcctttaactacattaagaagtacactggcttccgcgttggtatcggggctgaagccattttagaattgctcaacaagattgaccttaactatgagtttagtaagctcaatgatgcgttacggaaggctaagaaggatagtgttgaggatgctaaggttaaaaagatcttgcgtcaattggaaacaattagctggtttagaaattcgaagctgcacccgaaaaacatgatcctgcacacggtgccagtgatcccgccagacatccggccgattatccagttagatggtgctaaatttaccaccagtgacattaataacttctacagaagggtaattatccgtaacgaccgtttacgccgcatcttggaagatggtaccgtacctgccattgtggttaacaacgaaaagcgcttgttacaagaatcagttgatgccttgtttgacaactcgtcgcgccacaagccagcgttatccaaagacaaacgttccttgaagtcactcaccgaccgcttaaaagggaaacaagggttgttccgtcacaaccttttaggtaaacgggtggactattctggtcggagtgtaattgtggtgggtccagaactaaagatgtatgaggtcgggattccagcattaatgatcctcaagctgttcaaaccatttattattcacgggttaattaataagtttgacagcaacggtaacgaaattagaccaattgcgtcctcgattcggcaagcggaggacatgattaaaaatcaggacgacctgatctgggggattgtgtatgatgtcattaaggaccgtccggtgttattaaaccgggcacctactttgcaccgtttgggaatacaggcctttgaaccgcggattgtcgatgggaaagcgattcgcctacacccgttagtgaccactgcttttaacgctgactttgacggtgaccagatggcggtgcacgttccgttgagcgaaaatgccgttaacgaagcgcgtgctattctgttagcttccaagcacatcttgggactaaaagatggccggccaattgtcaccccaacccaggacatggtgttaggtaactattacctcactactgagcgtaagggtcaaacgggtgaaggcatcatctttggtaccgtgcatgaagcccgcgcggcatacgaagcgggcaaggtgcacctccacgccattgtcggcattagcaccaaagcctttccaaacaagcactttgaagctcaaggtactctaatcactacggttggtaagattatctttaacgatgtgttaggggacaacatcccttacattaatgaaggggaatttgatgaacatgcgtgtccgcaaaagttcatagtaccaccaagtggtgatgtgcgtgctgcgattgccgcacaccaagtgctccctgcctttggtaagaaggtcatctccaagttaattgacttactttacacggtggttgaatttaaggatctaccacggatcttggaaaacattaaggccttaggctttaagtactcgacccactcttccaccactgtatcggtgtttgatattccgaagtactccaacaaacagcagtactttgatgaagcggaccaacaggtcttgaagtacaagcagttttacaacaagggtttactgaccgatgatgaacggtataaacgggtggtgaaactgtgaaacggtgtgaaggaaaaggtgtcgagtgagatccaggacttaattaaacgtgaagagtaccgtgataactcgattgttgtcatggccgattccggggcgcggggtaatatctccaactttacccagctgtttgggatgcgggggttaatgagtaagagctttaactatgaacgcaacaaccagtccaaaattattaaggacacgattgaggttcctattaagcactccttcctggaaggtttaacgattaacgagtacttcaactcatcttatggggcgcgtaaggggatgaccgataccgccatgaaaacggctaagtctggttacatgacccgtaaactggtggatgcaacccacgaattgattattaaccacgatgactgtggtacacgcaagggaattgtggtcgaagcaattgtggaaaccaaaacccgttcgttggtggaatcactgtttgaccgcattgtcaaccgttacacgattggaccaattttagatcccgaaaccaaggcggaaattgtccctgctaacagcctaattacccaagagttagccaagcaaatttgtgccacttcgattaaacaagtgttagtgcgctctgtgatttactgtgaacgcgaaaacggcgtgtgtcagtactgtttcggggtcgatttgtccaccggcaaactggtggaattgggtaccgctgtgggtgtaattgcagcgcaatcgatcggtgaaccaggaacccagttaacgatgcgtaccttccacaccgggggggtttcgaccgaaaacaacttggcccaagggtttgaacgtttaaagcaaatctttgaagtagtcgcccctaaggattacgagcgctgtgtcatttctgaagttaagggggtagttaaatcgattactaccacccaaaacgcgcaggaagtgttgattgaatctagtgtcgatgaacgcacttactcgattccgtttagtgcgcaactgcgtgtcaaggtcggtgatgcagtagaactaggttcgaagattaccgaaggttcgattgacattcgccagttattacgggttgctgggatccaacgggtacgccagtacatgattgtcgaaatccaaaaggtgtaccgtattcaggggattgagattgctgataagtatgtcgaaattattatccgccagttgacgagcttactccaagtaaccgatgctggcagcagtaacctgtttgtgggtcaactggtacacagtcaccacctcaatgaactcaacaagagcttgttgctgtcggggaagatgccagtgattgccattaaccaggtgtttgggatcgatgaggcggccagcaagtcgaactccttcttgagtgccgcatccttccaagacaccaagaagatcttgaccgatgctgcggtaaaaacccaagttgactacctcttagggttgaaagaaaacgtgatcattgggggtaagatcccggctggtactgggtttttaaccgatgaagaattggcctacctcggtgccaaaacggttcaagaggagtattaa

SEQ ID NO: 27992 - DNA, 432 bp, Mycoplasma pneumoniae
atggatccaccgaatgtgggccgtgatgtcaaacggatggtagcgattgcagaacaactaaagggcaagctgaacattattatggccactggttttcacaaggctgctttctatgacaagggaagttcttggttagcacaagtgccagttaatgaaattgtgccgatgttggtcgctgaaatagaagagggtatggatttgtataactattccggtcccgtggttaaacggggcaaggctaaggcaggcattattaaagctggtacgggctatgctgcgattgaccggttggaattaaaggccttggaagcagtcgcgattacttcgattactactggtgctcccgtactcgtgcacacccaactcggtaccatggcatatgaagcagcacaacacctgattgattttggcgttaatccgcggaaaatttaa

SEQ ID NO: 27993 - DNA, 1983 bp, Mycoplasma pneumoniae
atgctcaacaaaattaagctccaacaaaaacgtaagttaattatcggttgatccgtttttgctttgatcaacctggtggtaattctcttgacagtattactgcgtgcaggattaccgaacttagttagtaagggagtaaccccgttttcggcccaagcctttggtgatgcctttatctttttaattacgcgggtatacctcgataactttttgcgtcaaccagcgctattgttaggtgttattaccctaattggttaccttgctttaggtcgtggtggggtgcaatcggtggtgggggcactaaagaccgtaattggctttatcctgttaagcattggtagtggcgtgttggtgtccaccgcccgtcccgtttttgacacgattaagggtttagggggtactggtgtggtactattggatccttacttttccttagcatcagcgaacgatttctttacgaacagtttcttgaacaatgactatgtgtccttgattgccttttcgctgttagtgggctttattgtcaacattatctttgtggggttaaagcgttgaactaacaccaattcgattatggttactggacacgttatgttgcaacaagcagcggtagttactacgctgttctatattgtcttgttccgccaaattccgttgttgggtacgggcattgcttacggtgcccaagccggtctagtgattattagtggtatctttttgggagtttactggtctacggcctctacgggtacctatttagtgaccaataaggtaaccaataatgctggtttttcgattggtcaccagcagatgttagggattatgacggttgctaaattgggcaagtactttggtgacaaaaacgatagtgccgagcacaaaaaactgcctaaggccctaaagatctttgaagataatatcttcacccaaacgatcattatccttagtttgtttgtggtgttgtttattgtgattttggctagttacaagggtgataaaccactgttaattaactgggacaaatttggtgccattaatggtttagagatttgaaacactacctttggcggagctaactttacgctcaacattattgggggtgctttgaaaatggtggccagcttaattgccattatgactggggtaaggatgtttatcactgagttacaacaggcgtttcaaggtattagtgaaaaggtagtaccaggggccgtggtagcggttgatattgcagctgtttatgggttttcaattaactccgtgacctttgggtttttaagtggggtcattggtcagtttttagctgttgccattatggctggcattagctatattccgggtaaccagtttagctttgtggcgattcctttgtttattacactcttctttaacagtggtgcctttggcgtgtatgctaatgccgagggtggttggaaggcggccttactgctcccgggtattattggctttttagaaattattgtgatttcatttgcgctgcgcaccgtatcaaacgcttaccaggcttcggcactgttagatgctaaacaaagctttgatttaaaggcgttaatgggtaatagtttggacaataacaacggttcggcattaaaaacagccgtagaaaaggttgtaaatgctactggtgttaaccggataaccgaagcgcaaagctttgttaaatccgatagctttaacagtttaaaagctgttaacagtacgctagcacaagcaattgagtggatcagtaaaagtgcatcacccgttgacaacggttttattggaatggctgactggaatctttactttgggttgttagtttgaattggggcttacaatgtaattggtggttggatcttagtaattttggctaccgttggtttaatcttgctggcacaaattattgacaatggtaagcaaactaaagtaactaaattacaacaattactcaaaattaacccacaattagatttaaataactaa

SEQ ID NO: 27994 - DNA, 480 bp, Mycoplasma pneumoniae
atgacaaagctcgattttaaggccgtcttaaagcaacaccacaccgtgcggttgcaccaaaccgcgcaggactgaaaacaagcgatacagctctgcatccatcctttaattgctgccaagttagtccaaccagcttactttgatgacattctaaagagtgtagctcagtacggtccgtatttcattattgcggaaaatgtcgccatgcctcatgcccagaataacggtacggtacagcaaaactgcttctctttagtgaccctaaaggaaccagtttactttgacaacgatccccgcccggtgcgcttgttaattggattagcggctaccagcgctgccattcatacgacagaagctttaccacaaattgcggccctagtagaagatactcaagtggttaaggacttgttggactgttgtgatgagaccagcttgtttgctgtgattgatcgggttaacttacacaaatatttaacttaa

SEQ ID NO: 27995 - DNA, 1011 bp, Mycoplasma pneumoniae
atggtacaaaaagaaatgattaataagaaaattagccaagacaacagttttattcaaaacaataacttggcagactttgattttttagatgcaaagaaaaacagtgaaattaaaactgtctcaactggaagccttcatttagatgaagcgctcggcactggtggtttgccactagggcgcattgtagaactttatggtaacgagtcctcgggtaaaaccacggtcgcgttacatgcagtcgctagctttcaaaaagcgggcaaagtggcctgttacattgatgctgagggtgcactagatttaagttacgccaaggcaattgggattgacttgggtaaattactagtagcccatcccaagcatggggaaaacgcctttgccctaatggagtcactgattaagaccaacaaagtggccttaattgtggtggactccgtggcggctttgattcctaagcaagaactggagggcaacatggatgaccagacaataggactccatgcgcggatgatgtctaagggactacgccgtgtgcagtcactcttacctgaatctgacacctgcttactgtttattaaccaactccgggaaaaacccggagtcatgtttggtaatggggaagtaactactgggggtcgggcgttgaagttctacgcttcgatgcggatggaggccaaacgcagtgaactgctcaaagaccgctttggtaactatgtcggcattaagagtaagttaaccgtgtccaagaataaggtagcgcgcccgtttggtgttgcctttttggaaattatgtttaaccgcggtattgtgtatgaacacgaagtgattgagttagcgcttaaacacaatgtggtggtgcgcagtgacaatgcatattcgtttaagagccaaaacattgcgattggcaaagagaagctctttagcgtgttggcggaaaaaccagagttgtttgaacaaattaagcagctcacgattaagcaaatccacagcccgccacccccagcgagctag

SEQ ID NO: 27996 - DNA, 423 bp, Mycoplasma pneumoniae
atggatcgcaaaataagggagcaaattattgccatttacagcaacttacaacacaaacaggacttaactcagtttgcccattgtttaaccactaaggctgatgataactgtgaggacttctttaacttaggcttacagtttcaaaacaaccaactaacagcacttggttttaacggggagggttgtattatttcgacaattgctagtgaactgactttaagtgcgttggaaggcaaaacaatcaaagaagccattgtcttgttagaacagtttatggaagctgtacaaactggtagcttaagcacgccactaccccaagctttacaactgttgtgggactttcagattgaccagaagcgtttaaactgcttactcctaacaccacagaatttgctacagtggcttaaagatttttcgcactaa

SEQ ID NO: 27997 - DNA, 2517 bp, Mycoplasma pneumoniae
atggacaagcaatttagttttcaaggtcaatacgacttcaaaacagtgagcactggtctttatgatagttgaagcagtgctagtttttttaaaccacaaaaaaacaaggtacccttcactgccattctccccccaccaaacttaacgggtacgctgcacattggtcatgcctttgaagtgagtatcactgaccaaattatgcgctttaagcgactgcggggttatggcgtgaactggattcccggatttgaccatgcggggattgctacgcaaaccaaatacgaaaagttagcacgggaaactaatcccgagtacttccaagcgccgcgtaaacaaaaggtcaaaatgattatggattgggccttaacacaaggggacaccattcaaagtcagatcaaaagtttaggggcatccttaaactgaaaccaggttaactttaccctgtccaaaaaagcgagtcaaattgtcaacgatagtttcatccagttgtttgaacagggctttatctaccaagctgaaaccttggttaactgggacaccaagctaaacactgccatctcgaacattgaagtcattaataaaccagttgaccaacagctgtattacattgcttataagttagctaataatcccaaaaaacgtttagtggtggcaactactagaccagaaacgatctttgttgatgtgtgtttgtttgtccatcccaaagacaagcactaccacagctttgtcaaacaaaaggtagttaatccgctcactggtgcgttaatgccagtgttcaccgatagttatgtcgacaagaagtttggcaccggtgtgttgaagtgcacccccgcccatgactttaacgactttgccttaaacgaaaagtaccgtttaccgtttgtaagttgcattgaccacaatggtttgttaaatgagcacgctaagcaatttactggtttaaccgtaagtgcagcacgtcagcaggtagtcgagtttttacaaacgcaaaaactactagtgaaaactatgccactaaccagtaacgttggtttttccgagcgcagtgacacggtcgtagaaccgttattatccaagcagtggtttgtcgatttaccgaaactcaaaaaagcactcgccattaagaaataccccgagttaattcccaagcgttttaacaaacaggtaacaaggtggttgagtcagctcaaaccgtggtgcatatcgcgccaattaatttggggtcaccctattccggtgtgaacacataaacaaagtggtgcgttgcatgtgggcagtactgcaccaactgataagcaaaactacacccagtccaccgatgtactcgatacctgattttcctcatcactgtgaccgttaatttgtttagactgacacaaaaacaagcactttgtgccaactgatcttttggtaaccgggtatgacatcctcttcttttgggtcttacggatgacctttaactcgtactttcaaaccaagcagttaccttttaaacaagtgttaattcacggtctagtccgcgatgcccaaaaccgcaaaatgtccaagtccctaaacaacgggattaacccaatggacttaatccgtgattatggggccgatgccacgcgcttattcttaacttccaatcacactccgggtgatgatttaatcttcaacgaacagaagttaaagagtgccgctaacttcttgaacaagttgtggaatgtgaccaagtacgtgttgcagttaggagaacaagccaaaactgtaccaagtactcacttaccctctacattgagtgagcgctggatctgggctaaattgaaacaactcattgtccaaaccaccaagttattagacaagtaccagttagctttggccaaccaagcgttagtcaactttatttgaaatgatttttgcaataccttcattgaaacgattaagcaagaggacacggcacttttaccccagctgtacacaactgctaaaactgttttaagtacggcggtcgttatgctaagtaccgttactcccttcttggcggaacggatctaccaacagtttcacagtggcagtgtcatgcaagcaagttggccaactgccaaagcagttaaaccaccgaaactgtttgctgatgttgttgaagccgtgtccagcttgcgccactacaaggccaacaaccaactagtagctaaccagaatttagccgttgttttaagtggtaaagctgctcctgtagtgcaaaactacttccactttaactgggtcgatcttaggatagaagttaacaaaactccaggcttccaaatcaaaatcgttgacaatgcagccaacaacttagcccacttagaaaaacaacggagcttttatttagcggaagtccaacgtagtcaagcgattaccactaaccctgcctttctaaaaaaagcaccaccgcacaaagttaaggcggagcttttaaagttagaggaatatcaaaaaaaattagcggaagtcaatcatttaatcgctaaattaactaaagctgagtag

SEQ ID NO: 27998 - DNA, 654 bp, Mycoplasma pneumoniae
atgtattttcaaattgccattgacggtcctagtagttctggtaaatctagtgttgctaaaacagtggcccgacagctcggttttgagtacttttccactggcaaaatgtaccgggccttcgcttacgtgatgcaggtcaaccgcttggatgtcaaccttttgttaaaggtgattaaccaaattaactggcgctttgaacacgaaaaggtgttttataacaacgctgatatctcagaggttatcctaaaccaggaaattgcccaactagcgagcaatttagcaaccaatcccgaagtgcgtaagatggcggtattgcgccaacaagcgttagctaaaaacaccaacattgtgatggatggacgcgacattggtaccgttgtattgaaggacgcgcagttaaagtacttcttggatgctaaaccggaaataagagcgcaacgacgcgcccaagatcttggcatagcatatgacagtgacaaggcctttcaggaactagtagcggaaattaagcaccgtgatgcggtggatacttccagaactgctgatcccttagtgcaagcccccgatgcgatttacatcgacagttctaaccttacttttcagcaagtagtcgagttaatggtgcaacaagcgcgtacagtttttaaactttaa

SEQ ID NO: 27999 - DNA, 879 bp, Mycoplasma pneumoniae
atggatcgactagttaaggacaaccaactccccccttaccatggtagtagtgaaaccaatcccgaagtgcgcttttgtgtaattggtaaacccaatgttggcaagagttctttaattaaccaactggtgcagcaaaaccgggtgttagtgtccgatgagagtggtactacccgtgatgcaattgatattcccttaagggttaatgggcaaaactaccttttaattgatacggctgggattcgccgtaaggggaaaatagcccccggaattgaagcggcctcgtatgggaaaacccagttagcaatcgctaggagcaacattattctgttaatggttgatggttccaaaccgttgagtgaacaggacgagattatcggtgggttagcccaagccgctttaattccggtgattattttggtcaacaaatgagacttagtacagaaggacagcaacacgatggctaagtttaaaaagcagttacaaagtcagtttcaacacctcagctttgctcccattgtttttattagtgtcaaaaacaacaagcgcttacataccatctttgaacagctccaaattatccaggaacagctcaccaaaaagatttcaacttccctgttaaacgatgtcatccaacaagcacaactgtttaaccaagcacccctgtttaagggtgggaggttacaggtaacttatgcggtgcaaactcacagtcaaacgccgcactttgtactgttctgtaatgaccctaagtttgtccacttttcctatgcgcgctttttagagaacaagattagggaaagctttggttttagtgctgtacctattactctttatttcaagtccaaaaatgcacggataagaggtgtcgcaaaaacctaa

SEQ ID NO: 28000 - DNA, 3102 bp, Mycoplasma pneumoniae
atggagtttttagaacaagaaggccaggaagtactaacaaaggaaattaaggctggtttttgtgaaattaccccctctagtattaccgaacaaacgaccaagccccagttagatgaaactcaactagtcgatgaatacgtgcacaccaaagagttagaaacaacaccaatacctatatcctttgccactaaggaagtactgtttgaagaggtctttaatactccttcaacccaacaagtcgatgaaagtgtgcttgtcaacgaatacattgaactaacccaacaaatcaaaaacgcatcagaacaagtttcatcaaaccatacccataagtttagtgtggcaacagaaccagcagccacaaaagctgttagtgaaactatgttgttggatgactatgtcgaaatggtggaacaggatgttcaagcccaaactgctttaccccaagcagcacttgatcctactgttagcttgacctttagcagtccgattgacagtaatgccattttggtgtacccggaaatgaaggtacctcatgtatttgacacagttgcaccaactaccacaactgttccgttagaccaaacacaactgcttgacgaactagtggaagtgccagttttaactcacactgtaactccagcaccgttacaaccaaaagcagcaccaactaactttgcacttgaccaaacccagttagtcgatgaattagtaacagtaccactcacccatacattagtcaacgagtctgcaccagttacacctgttgttgtgacatcacctgcagctgaacatagcttctcgattacaacggtggacaaggctaatttaactaatgctttgagccaaacagtggttataaaacccgctgaagacagcgctcatcaaagtgccgttttagacaaggaaattgccaccaaacaagcgcagttacaacaattgcaagcccaaattgaactacgccaagctcaactagaaacacctcctgtaacttacatgggtgtggaagaatacaagctactgcctgttcaagatgtagtgccagtacaacctaccgtgagttttgaaatgaccctgctccaagaacagttagataaggccttgaagcacaacgctgctttacaaatccagctagaagagcagttagcaaagccacttcagtacgaccaaagtccggtgttacaggaacggattgaactgttgcaaaaccaaaatactaacctcactcaggagttgaatgaactgcaacaaaagctgtttaagagccaaaacaacagcttactcttagcacgtttggaagaggaaaaccgtacgcttaaacagcatttacaaaacaacctaccggaagctaaccagttaaactttgtcttggaaaaacagcttgaacaactccaacaagacaaacacagcttaacactccaaatcgaacagtacaagtttgattccaaaaaacaccaggaacaactggctttaattccgtcgttacgcagtgaaattaacagtttggaaacggaagtaattagcttaaagcaaactaaccaacgcttaagcctaattgagcgtgaaaacaacttcctcaaaaccgaaattaaacagctacgtgaaactaagttaaacgatgaaaacaccaagtaccgtaatcttttaaagcagtatgagttaatgcgtgctgacagtgatgctaagttaaaggaattggaacacgaacaacacctagcacaccaacaccaccaggaacagttagcacaattacaacgccacaacgaagctttagtaaaagagttagaccaagttaaggccactaactttgagttaggtctcgcagcacaaggttttgaacagcaaaaagtggtactagaacaaaaaaacagcagtttacttgcaagcttacaagcagctgaggaaaacgtccaggccttgggtattactaacagtgaactacaaaaccaactaaatgttttagaatttacccacaaggaaaaaactgcgtttgacagcaaaacgctaacactcacaaagcaacagctagaacaaacccagtttgaccttagcttaacccaagaacagttagctaccttcaaacaacaaaaccaaagcctaactgacaaactaatggctagcgaaacccagttaaaccacttgcaacagagtgatgaaaacttaacccagctccaaacgcagcacgagctgttgcaagagagttacaacaaattgcaagatgaagctaatcacacccagcaacaattccatcaagcacaaaatgaacttgatgctgcccaccaacagttagcactctttaagcaaaacaacgaggaattaactgataaatgcagtaacattcaaaatgagttgcatgatttaaaccgggtaaagactaactgggagaacctcaatacagagcataacttgttgcaagacaaatatgctcaacaaaaagagcaaatgcaacatgaacacagtaatttagcccaaatccaagcggagcatgagttactgcaagagagttacaacaaggtcaaagcagaattaaacgaaattcaaattactaaccttaatgaggccaacgcccagtaccaggacttgctctccgcttacgagttgttacaaagtaatcacaacaagctcaagcaagagttgcaagttttaaaccaggtcaacttggaaaaacaacagttagcgcaaaagttacacaacacacaccaaagtttaagtcaaacccatgcagagctaacccaactccaagctgcttacaataacctccaagcaactccaccggtaagcgatgaattgttagaacaatttaaccaagtgcagctagaaaaacaacgcttactgcaacaaaacttagccttagtacacgagttgcaatacttcaacgaactcaactcgagtcaaacccacgaaattaaaacaaagcaagacgaaactgttaaagaggtcattattgtggaaaaggaaattccagtgccacccgaaaagaaaccacggctaaaaaaacgtgatattgtgatcgaaaacaaggaagatgctttgggcaagttatccaaaaaggaacggatccaagcgtacgctgaacgcctagctaagatcaatggcaagcagtaa

SEQ ID NO: 28001 - DNA, 807 bp, Mycoplasma pneumoniae
atggcaagcagtaagagcgatccctttcaatcaatctttgcctttaaaccacaccgtaagcgccataactttatctttctccatggttttggcagtgagtattccagctttaaacacgtgtttaaactgtttgaaaaaaagcgctggtcgttctttgcctttaattttccgggacacggcaataatcagagtaacagtgttgatgaattgaagttgaaacactatgttgaattggtgtgtgactttatcatccaaaagcgcttgaaaaaggtggtattggtagggcacagtatgggcggggcgattgcggtgttggtcaatgctgtattgcgtgaacgcattaaggccttagtgttggtagcaccgatgaatcaaacatcgtttgttgtaagtaaaaaacggatcttggataccttgtttaccaggagtcctaaaaaccagcaggacttcatagaacacaccgatgataagaagtcgattgttaacttctttgttggtgcttttaagaagcgagtcaactttaaaacactttacagtgacatggtgcaaaacgccaagtatggtaatgattatctcgaagcgggttacaacgcaattaaggacaaacccaccttagtggttctcggttccaatgatattgtcacccccacaaaggcttctgtggaatacttagctaaacacagcgaaacgatcattttcaaaattattgatggtgtaggacattcaccccactactatgcacccaaacttttttttgattacattggggagtttctagataatataaagcgaaataaggacaaatag

SEQ ID NO: 28002 - DNA, 162 bp, Mycoplasma pneumoniae
atggctgttaagagaagcacacggctaggatgtaatgattgtcgtgaaattaactatctaacgtttaaaaacgtcaagaaaaaccctgaaaaacttgccctcaacaagttttgttcgcgttgtcgcaaggtagtagtacacaaggaagtaaaacgaaaataa

SEQ ID NO: 28003 - DNA, 825 bp, Mycoplasma pneumoniae
atgaagttaccacctcgaagaaagcttaaactgtttttattagcctgaatgctagtgctgttcagcgctttaatagtgcttgcaaccttaattttggtacagcacaacaataccgaactgacagaagttaagagtgaattgagtccccttaacgttgttttacacgcagaagaggatacagtacaaattcagggcaagccgattactgagcaagcatggtttattcctacagttgctggttgctttggttttagtgccctagccatcatcttgggccttgctataggactgccaattgtgaagcgcaaggaaaaacgcttattggaggaaaaggaacgccaagaacagttagcggaacagctacaacgcatttctgcccaacaagaagagcaacaagcgttagaacaacaagcagctgctgaagcccatgctgaagcggaagttgaaccagcaccacaaccagtaccagtaccacctcaaccccaagtccaaattaacttcggtccccgtactggtttcccacctcaacccggtatggcgcctcgtccaggtatgccgccacaccccggtatggctccaagacctggtttcccacctcaacccggtatggcgcctcgtccaggtatgccgccacaccccggtatggctccaagacctggtttcccacctcaacccggtatggcgcctcgtccaggcatgccgccacaccccggtatggctccaagacctggtttcccacctcaacccggtatggcgcctcgtcccggaatgcaaccaccacgtcctggcatgccaccccaacccggttttccaccaaaacgctaa

SEQ ID NO: 28004 - DNA, 618 bp, Mycoplasma pneumoniae
atgaaatacactggtagtattttcaaacgatcacgccgcttaggtttttcgttactagaaaacaacaaggagttttcgaaagggaagaagcggaaaacgattcctggacaacacgggaaccgtttccgtagttccactatgtctggttatgcacaacagttgcaagaaaagcaacggatgcaatacatgtatgggattactgataaacagtttagacgcttgtttagactggtattaaaacaacggggtaacttagcggttaacctgttccgtgttttagagtcacgtttagacaacattgtgtaccgcatgggttttgctccaacccgtcgcagtgcgcgccaattagttaaccacggccacgtattactcaacgatcgtaccgtggacaccccttccattattctcaatccaggggataaggtacgcttgaaggccaaaacaattaagattccaattgttaaggcggcgagcgaaagcggtgtggtctccccgtttgtggaaaccaacaacaagacctttgaagggacatacgtgcgcttcccagaacgtagtgaactccctgctggtattaacgaatcgtacgtggtcgaatggtacaagcgtttggttaagtag

SEQ ID NO: 28005 - DNA, 3978 bp, Mycoplasma pneumoniae
atgcatacgtttacgcgtaaagtcaagtggccctttatgttcaccgcaatcgggctcacttttggtatagtcgcggttgcctgtgcgcagcctacagccagcactgtggaggggctttttaagcccagtagtgcttttgctgatcgcactgactttagtcttagctcgattctgcaaaagtcactaattaaccgcgagagttttaaccagtatctagcaatgcgtttagcacccgttttgcgcaccttttatgaggacaattatgatactgatattaaagagcgtttaaacggctttaccgctgacacggataatgcgtttgtcagtcaagaacaaaacctacggaaccagtttcgcgaaaactatttagtgcacctgcaaactgatatctttgacaacactggcggtaatcaagccgcttgaaaactgcgtgatgttaacaacaagataattgatgactttatctcacggatctttgccaagaactttgtcgagtatgtccaggacggtgtaggtcctttaactaaacccaccaagagcttaattgaaaacacctctaactttaaaaacattaagctccaacccaaatttgttaataagaatgctaagctcaagattaacaatgatgcggtgtacgcggccatccaagacaaactgttagaccagtttattaccaatgaaaaccccaacttggtatcccgggtcgtgtttaccaatgaaactcccgttgacgggtttgataattactttaacactaaagtaattcaaagtccaaccccttcctaccagtttcaggtctttaacaaatacaaccaacagagtggtggcactaagggagcgaatggctttaacttattggctagcaacctcaagagttacaaaaacgaccagagcaaagggattgatattcccaataagttttccagtgatagtggtggcaaattgttgttaaaggcgagcgacatgttcgacacctttgatccgagtttttctgctgctttcattcagggctatttagcactgcagaaaaagtcgaagggcgctgatagtaaagaagttgacagtctcattaaggataagagtattattgaaaacttttttgttgacaataatacacaggcagccgccgctgcaagggctgcgagttcatcatctgaaggaactattcaattaaaaactgccagtgatggtggtggaactacacaaagtaccgtccacaaaactgacttagtcaaaatctttggtgataaagatgtctttgctggtgagtataaacaacaaataggtaatactaatgctaatcaaacaggtggcggaggttctggaggcggcggtggcacctctaccggcagtagcaccggatcttctactgaaactactactggcaacagtagtaaggcggttgttgacttaattgaagttaaaaaagattctagtagtcaaccagactacatcctctcccgtggtaaagacggcatccacttaatggccgtggatggtggtagtcattatcttactgaaagtggtcgtgatgtcgctaaacaaaagaaattcttattgttccgggctttgcaaaccaagtacggtttagtggataccgacaccacatacgactttaagttatttgatgaggtcaaaaagtactttgacactaaccggatcttattcttatttgaagctttattagatctttctagtgatacaaacaacaaagacaacttcttaagctatccccagtttaagaagtttgctgacagtattaagtcaattgagaaggatttaaaagaacttgttcaagcccactataaacaagcagtctttaacgaaactgcagtggcggaaaacaaggttaccttaaagctagcagaacgtaaccaaccttttattgacaacgagcgcaataaccagattgaacagaacggtttggcagctaagttaccttacgaacaagatgctaaaaccggtcactataatgaccttggtaactattacaaggacattattgataatgttgataaaaaaggaactagtactgttaaaacaacctcttccaatacaggacaaactaaaaacttctctgaagaagtagttagcaagcttaaagataataagaagaaggtagaagaagctgctaaaaaacatgtagaggcactcaaagtcttcaccattccttccccactctactcccaggtaatcttagtgcaaactaagttgtcttttacccctgaaagtacctctttaggacttaacttagctctaaacaactatttaaccagtactgagctccaaaacagcattaagctcagttacttccaggaagatgaagcgtttaagaagattattgatattacgaatttaacttttagtcaacaaagtggtggtactggtggcaccaacggtaacaacaacctcaccgctgacaactgaaagatttttaaagaaacctatttattggacttatttgaatcacaagcccaaaaatcaatctttggtcatgttggttcatctgataaaaattcttcaactaagacgggcatcgaaggtgtcttggacacactgtacagctcgctaaacttagaagagcgcttagatagtgatgatgtaattgattatctgtcttacctctacacggcccattggttgttaaaggacaacttaaagaactataagcaaagcttacagtcgaagttgtcgcgtacttccaatgcctttttagtttgaagtgtggatagcgaaaagaataaaaatgattcacaatcaactttatccagtaccgcttcaagcacaagtaatactggcttaattcagttaagatcagtcgtttccctagcacaaaatcaagcagctggccaaggcggtgataataatagtgacatcacccaaaccgaagtcaaaaacccgaactttgtgtttggttcgagtgtgtatgattgaaccaacagtaaaaccccagaagtgaaccgggctgctgatgacacttcaagcttcttctacactaagtctagtagtagtagtactggcgcagcacaaagtagtgccactgttttaaggagtttaaatcaagctagtggcatgaccacaaaaactgccaaaaaccgctatggctttaggggtattgtaacgagtagcactagtggtagtttacccgaagcggtaagtagacgtttgtttaagcagtttgttaaccaaacagaaaaaggcgttaaagttggtggtcaaatgctaattaccacagctaaaagtggtaaagctaccttagttttaaaacaacaagctgacgacgccgaatccaccaccaacaacgcttacaaaggtgccttgtttagctttggttcgatggataacttaaagaacatcatcaacggaatccaaacgcaaaccgagttcgatgcgctttacaaccacttaactagtgacctcaacattgatgttactggggttgataaaaacaaaactttaacggaacagaaaactagtttaacgagttttgttgattctaactttaagcagagtactcaatctgcacagagaggcgatacaagtgcacgcagtgcaagatctgcaacagtacaaattaagaaaacacaagaagataaccaaaataccaactataaagacgtctttagccgctttgatggttacattggtgataacaaggtagaggaaaagaactacacttcctaccaattcttaagtgacggtggcaaataccacgctacctttgtcaaacaggtcaaccttgatgatgtggagaagatcggcactgattctctaaagcaagaagattccagcaaagacaaacgcctcaacctctccctcgaagaattcctcgctgcaattgcgctagaagccttggatcctaataatcaaacccaagccattaacgccttaattagtggtaataagaagggtttagttaaagtaggtgactttaggatctttagttctattagtgcgcaatgggtaagacgtttttaa

SEQ ID NO: 28006 - DNA, 1788 bp, Mycoplasma pneumoniae
atgagtacagataacggcttaattatcggcattgaccttggtaccactaactcctgtgtgtcggtcatggagaatggacgcccagtagtgttggaaaaccctgaaggtaaacgcaccaccccttcgattgtttcttacaagaacaacgaaattattgtgggtgatgctgcgaaacggcaaatggtaactaaccctaatactattgtttccattaagcgtttaatgggtacctccaataaggtaaccgttaagaatcctgatggttctaccaaagagttaactcctgaagaggtatcagcgcaaatcttgagctacctcaaggactatgcggaaaagaagattggtaaaacgatttcccgtgctgttattaccgtacctgcttactttaacgatgcagaacggaacgctactaaaaccgctggtaagattgctggtttaaacgttgagcggattattaacgaacctaccgccgctgcattggcttatgggatcgacaagtctaaccgagaaatgaaagtcttggtgtacgaccttggtggtggtacctttgacgtttccttacttgacattgctgaaggtaccttcgaagtattagccactgctggggacaaccgtttgggtggtgatgactgggacaacaagattattgagttcatcttagcgcacattgcccaagaacacaatgggcttaacttgtccaatgacaagatggctatgcaacgcttaaaggaagcggctgaacgtgctaagattgaactttccgcccaactagaagcaattatctctttaccgttcttaacggttaccgaaaagggtccggtaaacgttgaacttaagctaacccgtgctaagtttgaagaaattaccaaacaattactagaacgtactcgcaacccaatttcggatgttttacgtgaagccaagattaaaccagaagaaattaatgaaatcttgttggtgggtggatcgacccggatgccagcagtgcaaaaactagtggaatcaatggtaccaggacacagtccaaaccgctcaattaacccggatgaggtggtagccattggtgctgccatccaagggggtgtgttacgcggtgatgtaaaggacgtgttactgttggacgttactcctttaacgctctcgattgaaacccttggtggtgtagcaactccgttaattaagcgtaacaccaccattcctgtaagtaagagtcaaatcttctctacagcgcaagacaaccaagaatcagtggatgtggtggtttgtcaaggggaacgcccaatggcacgtgacaacaagtctttgggtcgctttaacttagggggcatccaaccagcacccaagggtaaaccccaaattgaaattacctttagcttggacgccaacgggatcttaaacgtgaaggctaaagatttaaccactcaaaaggaaaacagtattactattagtgacaacggcaacttgtccgaagaggaaatccaaaagatgattcgtgatgcggaagccaacaaggagcgtgacaatgtgattcgtgaacgcattgagctccgtaacgaaggtgaaagcatcgtgagcacgattaaggagattctccaaagtcccgaagcgaaggacttccctaaagaagagaaggaaaaactcgacaagattaccggtggtattgatgcagcaattaaggccaatgactacaccaagttaaaagccgaaatcgaaaacttcaagaagtgaagggaagaaatggccaagaagtacaaccctaacggggatcaaggtcaaccagcacaataa

SEQ ID NO: 28007 - DNA, 1014 bp, Mycoplasma pneumoniae
atgctagcaaagagtaagactatccgtgttgctatcaatggatttggacgtattggacgccttgtttttcgtgcacttttaagccaaaaaaatattgagatcgttgccgttaacgacctcacccatcccgatactttagcacacttactaaagtacgactccgctcacggtgagtttaagaaaaaggtagtagctaaggacaacaccttaatgattgacaaaaagaaggtgttagtgtttagtgaaaaagatcctgctaacctgccatgagcagaacacaatattgatattgtggttgaatccactggtcgctttgttagtgaagaaggtgctagtttgcacttgcaagctggtgctaaacgcgtgattatttccgctccagctaaacaaaaaacaattaaaaccgtggtttacaacgtgaaccacaagattattaacgctgaggacaaaattatctcagctgctagctgtaccaccaattgcttagcaccaatggtacacgtcttggaaaagaacttcggcatcttacacggtaccatggtaacggtacacgcttacaccgccgaccaacgtttacaagacgcaccccacagcgatcttcgtcgtgcccgtgctgctgcttgcaacattgtacctaccaccactggagctgccaaagcaattggcctagtagtgccagaagctactggtaagctcaacggtatggcccttcgtgttcccgtactaactggttcgatcgttgaactttgtgtagcccttgaaaaggatgctaccgtagaacaaattaaccaagcaatgaagaaggcggcttccgcttcctttaggtactgtgaggatgaaattgtgtccagtgacattgtcggctcggaacacggttccatctttgactccaagctaaccaacattattgaagtggatggtaacaagctttacaaggtttacgcatggtatgacaacgaatcctcttacgtaaaccagttggtacgggtagttaactattgtgccaagctttaa

SEQ ID NO: 28008 - DNA, 1230 bp, Mycoplasma pneumoniae
atggttgactttaaaacagtccaagcgtttgactttcagggtaaaaccgtagtcttacgtgctgacctcaatgtgccgatgaaggacggggtcattaccgacaacgaacgcatactagctagcttagacacgattaagtacctcttgggtcacaattgcaaaattgtgttactgtcccatttgtcacgagtcaaatcgctcgatgacaaaaagggtaagaagtcactccaaccagtagctagtgctttacaaaatttattaaagaacaccaaggttcacttttgtccggaaaacacgggtgacaaggtcaaagtcgcagtcaatcaactcccattaggggaaattttggtgttggaaaacacgcgttactgtgatgtgaatgaggctggtgaagtggttaaacacgaaagcaagaataacgctgagttagcacagttctgagcatcattgggtgacatctttgtcaatgacgcctttggcaccgcccaccgccgtcacgcttccaacgctggcattgccaagtacatcaaaaactcctgcattggtcttttaatggagcgggaattgatcaacctctaccgcttaattaataacccacccaaaccgtttgtggttgtgttgggtggcgctaaggtttctgataagttacaggtagtaaataacctgttcaagattgcggatcatattttaataggtgggggcatggtcaacaccttcctcaaagctctgggtaacgaagttggcacttccttagtggaggaagacttagtccaaaccgccaagcaaatccttgacagtgacaaggacaagaaaattgtcttgggggtagaccaaatgcttcatgctagctttaaggatgaaccaggcgtggagtgtgttgtagccccccaatgaccagcagaacttcagggctttatgtccttggatgttggtagcaaaacagtggccctgtttagcagttacctcgccaaggccaaaacaatcttttggaatggtcccatgggcgtatttgaatttagcaactatgctcagggtaccttagcaattggtaaagcgattgcgcaaaaccaacaagcctttagtgtcattggcggtggtgattctgcagccgctgctaaacaactccagattgctgatcaatttagttttatttccactggtggtggtgcatctttagcactaataggtggggaagagctagtgggaattagcgatattcaaaaaaagtaa

SEQ ID NO: 28009 - DNA, 963 bp, Mycoplasma pneumoniae
atgagtgttattgatcttttaaaacaacgtgttcaaagtgctggtaaaaagccagtgatcattttccctgaaggttgatcgccaaccgtaatggaagcagttaaccagctccagcaagcgggtattttaaccccaccggtgatcttccgcacccgcagtgaagtaccagctggttttaacaccgccatcaagcactatgtgattgaggaaatggacttgacaaagtacgctaacttcgtttatgaaaagcgcaagcacaagggcatggaaatgcgtgaagcacaaaagtttgtccgtgatgccagttccctagcagccactttagtagcactcaacgaagtggatggggaagtgtgtggtaaggaatacgctacgaaggatactctccgtcctgctttacaactgttaggtactggtaactttgtgtcgagtgtgttcatcatggaaaagaatgaggaacgcttgtactttaccgactgtgcttttgctgtttacccttcaccccaagaattagcagttgtagcggaaaacacctttaagtttgcccaaagtatgggggaaccagaactcaagatggtctttttgagctattcaacactgggcagtggtaaaggggaagcggtggacaaagtagtcagtgcgacccaaatcttcttggaaaaacaccccgaactcaaagctaatgtttgtggtgaattacagtttgacagtgcttttgtggaaaaggtacgcaaacaaaaagcccctaatttgacttggaatggatcagctaacatctatgtgttcccgaacctagatgctggtaacattggatacaagattgcgcaacgtttaggtggttatgaagcaattggtccaattgttttaggtctagcacgtccttttaacgacctttcccgtggtgccagtgtcagtgatgtctttaacgtgggcattattaccgcagcgcaaacacttaaataa

SEQ ID NO: 28010 - DNA, 873 bp, Mycoplasma pneumoniae
atgacaaagacaagtaaagcatccgggttaagctggtttttttgtgatttagatggcactttactgcgttaccaaaacaaccagcacttaattgaaccaactacgaagcgagcagtggcacagttagtggagagtggtgccaactttgttgtagctactggacgcaaaccgagtgacgtgcgcaacatttacaaggagttggggattgaacaagccagtccctacttaattgccaacaacggcgcggtagtgtgggatttaaagcgcaatagctacctcaacaagcaaaccttgtctttaagtgactttgacttaattgaccacattaaccaaacgttaaaccaattaaaccacgagtatggctgcattctgtatggcctaaacgaccaggtgtacttttatcatatccacgctcctgactcacaggccttcaaacagtactttgctttttatgaaggcgaatttgtccaaaaccagtatctggaaatagatgggctcaaaactgaatacaatctagttaaagccatttggttctttaaggaagtgcaccagcaaaaggcggtgattgcgcaacactttactaaccaagaacgcttggtcattacttcagcacactcgtttgaactagtaccgcttaatgtatcaaagggtcatgcgataaacctaattaaacaacaagtaaaaatcaccgataaccagattatggtccttggtgactcttacaatgacttgccaatgtttcaacatggtgtagttaaggtaactaatcacctcgcacccgacaacctcaaacaactagctacaagggtttatgaactaccagcttcactgtttgtgggtcaagcgttgaacgactactttaagttcgattaa

SEQ ID NO: 28011 - DNA, 2949 bp, Mycoplasma pneumoniae
atggtttttctcaaacggtttcgtgcgtatggttttaagtcatatgctgacgaaataacaattaattttacccactcaatgaccggtatagtcggtcctaatggttctggcaagtccaacgttgtcgatgctttgaagtgggtcttaggggaacgcagcatgaagcacttgcgcagtaagtccggtgatgatatgatcttctttggttctaaggacaagcccgctagtaagctagcggaagtggaactgacctttgacaattcccaaaaactactgcacgatccccgaccagagatctcggtgatgcgccggatctatcgtggtagtggtcagagtgagtactatattaacggcgagttagtaacgctaaaagaaattagtgggatctttgctgatattggtttggaaaaaggctcgttggggattatttcccagggcagtgtgtcgtgatttgtggaagccaaaccagaggagcgacgtaagatctttgaggacgcttcggggattgggcggtacactaagcgcaaagaagaggttaccaaccaattagcgcgtaccgtgcaaaatctcaaacaggtcagcattgttttaaatgaactcaaaaaggacttaaagaagcttaccattcaagcggacaaggcccagcgctttgtcaaacttaaggaagaattaaaggagctggagctgagtgtcttggtcgcagattacctcaagtcccagggtgagttagaccgctttaaccaccaaattggttacatcgaacaggactttaaactacacgaaccgcagttacaactgctagaagaccagctcaacatctttaaccagcgctttcgtgatgctgatgaacagtccatcaaactacaacaagaactgcaagcggtctaccaaacgattaacgagttggaacaacgcaaggccgtgattgatgtgcagctcaaaaacgagttgtccaaaaaggacgaaaagcacaaaatccaggcgttaaaaaagttaatccgggtagaccaagcgcaactagaaagcttacaagcgcaagtactcaaaacaaccagtgaaattaccctgttaaccaatgagttgagcaccgtccaaactgagttggacaccacaaagttgaatcttaaccaaaacagtgcggcgttagtctaccaacaagcgcagcaagagtttttaaaagcgcaaaacgaggagtgggtcaaaacgaatccggcccatgttttggtcaaaaatgtcaaggccctcaccggtctcttaaacacgctcaacacttttttaaagtttgaaaagcagtacgaaaaggccttgttaaaggcgttgggtaaatcaattggttatctggttgttaacaacaacttggcggctttaaaggcaattgattttttgttaactaaccagattggtcaagttacctttttaccaattgacgacattgcctttgatactaagatagctcccgagcacatggaaattttgcaacaactcgatggctttttgggtgttggtagtgaccatgtgagttgtgatgaaagcttacaaccaattgttaatgctttattgggtcaagtaattattgccagtgaccttcaagccgctttaaaactgtccagttatacctataagctgtaccgcgttgtcaccctcaacggggaaacggtgtacgctggagggattatccagggtggttatgtcaaggacaacttaagcttgtataacctccaggaaaagttagcttctagcgaagctaacattacccaactagaacataacgaaaagcaactacgtaccaatctcactagcttagagactaaactcaatgagctcaacaaaaagttaaagtacgaagaaatcctactggaaaagtttaacgaacgtgttaaccacaccaataaggcaattttgagctataagattgagtatgagcagctcaccaacgaaagctttgacggaaccccgcacagctttgatgaaaccagattggttgaatcattaaaccgtgcttgggctgaacgtgacgaactcaattcacagttaaagctcaaccaggaattgaaagaaacactggccaaatcgattaaactagccgaagccaaaaccgctgacctccgtgcccttttagatgaacaacgctcccagttagtgttggcacgcgaaggcaaaatccgctttgaaaacacaatccacaacattaccgacaagattaacggtgggtataaactaacgatggagtttgcgatcgctaactataacaaaccaattaagctctccaccatgcaagcgcaaaacaagattgccaggatgcagagccaactcgatgaaatgggtccaattaacctggagtcgattgctgaaattgctgataagcaaaagcgctttgatgacattaacggtgagtatgaatcactgcaaacggcgattaaggatttgcaaaccgcgattggtgaaattgatgaattggcctgcaaggaatttgacgagctcatccaaaaagttaatgcagaactacctaaaacctttaactacctctttggcggtggttcgtgtcaaattcgctacacggatactgataacgtcttgttgtcaggcatagaagtgtttgctaatccgcctggcaaaaatgtcgctaacttaatgttgttatcgggtggggagaaaacactcgtggccttgtcggtcctctttagtattttgagagttagtgcctttcctctagtaattttagatgaagcggagagtgccttagatccggcgaacgtggagcgctttgctaacattattggcaattccagtaacaacacccagttcttaattattacccaccgtcagggcacgatgatgaagtgtgacatgttactgggagcggcaatgcagaccaagggagtgaccaagacgtttgccgtttctttggaaaaagcagagcagtacattagtaaagataagcagaactaa

SEQ ID NO: 28012 - DNA, 1047 bp, Mycoplasma pneumoniae
atgagttttatccacaagctaatccagaagtttaaaccgaaaaagaaactggtcgaccaagtgcaacaagctgtccaggaaaagagcttctttcaagccaaccaaaagagctattaccagggtttaaacaagtcggctaacagctttgccaataccattaataaactagcagctaactatgtaacggttaacgaacagtttcaagaaagtttgtttgaggagttagtgttgcttgatattggttaccatgcggctactaaaatctgtgatgcgattgtccaagaactcaaactacaacgagtgagtgatcctcagttaatccaggaaattattgtcgataagttaattgtttactatatccaagataagttgtttgaaactgatttaacggttgaagctaataaaaccaacgtgtatttgtttgtcggggttaatggtgttggcaaaacaacttcattagccaaactagctgaccagcttaccaagcaaaacaaacgggtgttaatggtcgctggggatacctttcgcgctggggcagtggcccagttagcagaatgagcgcagcgcataggttgtgacattgttttacccaatcccaaagaggaaacgccagcggtgatcttccgtggggtgcaacaaggcattcaaaacgaatacgactttgtgttgtgtgacacctcgggacggttgcaaaacaaaaccaacttaatgaatgagttgaaaaagatttaccaaattgtccagaaggtgagtagcgctaaaccccaagaaacactgctcgttttagatggtactaccggacaatcggggttagcacaggccaaggtctttaatgaatttaccgagcttaccgggattatccttaccaaaatggacagctcctctaagggtgggattatcctagcgattaaagacctgtttaacttaccggtaaaactgattggttttggagaaacaactgctgatttagcggcctttgatttagagcaatatgtactgggtcttaccaagaatttaagcctcaaccatgaaccaaaccaaacttaa

SEQ ID NO: 28013 - DNA, 309 bp, Mycoplasma pneumoniae
atgaaccaaaccaaacttaaccagcgtttaaagcaacagcaactatttgatatttacggggaacttttaaccaaacggcaagcgtgttactttaacgagtacattaacctggatttgagcatgcaagagattgctgataaataccaagttaagaaaagttcaatccaccaacacatcaaaacctgcaacctgatctttaaccgttttgaagcgaaattgcagttgtttaaaaagcaacagctccgtttaaagttgtacgaaaaaataacagatccccaattacgcgagcaacttattaaactaaggtaa

SEQ ID NO: 28014 - DNA, 1113 bp, Mycoplasma pneumoniae
atgcaaaataaaaccgtttttgtcggaatatcaggtggagtggactcagctgtgagtgcgctccttttaaagcaacagtaccgcgaagtgattggcatttttatggagtgctgggacaatacactaaataacgaccagttaggtcaccgcgcctttaacgagcataagtcgggttgttcgtccaaagaagattttcgcgaagcgcaagcaattgcccaattactaggaatcaaactaattaagcaaaacctggtggaaccgtactgaaagcaggtatttctccctaccattgatgcctttaaaaacgggttaacccctaaccccgacatgttgtgtaaccgtttaattaaatttgggctaatgcgtgattactgcaagcagttagatcccaacagtgactttgctacagggcattatgcggcacttagctgggacaacaaccaacctttactggccattcccaaagacaagcacaaggaccaaacctattttttagcgcatgtcaaaccagcgcaactacaagacgtggtgtttcccttggcgcatttactgaaaacggaggtgcggcaaatagcgttagcacaccactttagtgtggctactaaaaaggactcaaccggcatttgctttattggggaacgccactttagtgacttcttaaagaattatttaccagtcaaaccgggggttatttatgattgaaaaacgcagcgccaactaggcagtcatgaaggggtgtgattttacaccactgggcagcgcagtggcttaaatttaggtgggcaagcagcacggaactttgtcgttgaaaaggacttaaaaacaaacaccttgtatgtctcgagtgacccagaagatttacagcgtcgtggcattaccctttcccactttaactggttgtaccaacccaatccattgacccaaaccgttctggtacggattcgccatgcccaaccgttagtgcaagggcacataacagtacaaccaaacaacgtcgtgcaagtacaactagatcaaccaattgaccgcgttaccaacggtcagtatggtgttttgtatacccagaatggcatttgtttggggagtggtatcattaccgctagccaaatctaa

SEQ ID NO: 28015 - DNA, 1428 bp, Mycoplasma pneumoniae
atggaaacgaaacttagtttaaagaaacggttgcagcagttttccaaaaagcagctcatagcactaattattctcggtgcggctgatgtttttgtaattgcggccccgtactatattaagaatgtggtgcctaacttgcacctgtatttagggattactgaagatgaagtggccaccttaacctcgattattggttatgtgaccttagccacgcagttacctggtggttttttagcgaaccggtttagttcgcggaaactattgttcttgtcagaaatttcaacgggtgtaattaccttttggctagctactaacattcttactcgtgaaagccaaaaatccaatgccttgtttgtacagtactgtgttatttgggggctttggggtattacttcgaccttaatcttttgaacaccactgtgaaagttagcgagtcaacaagcaacccaggaaaaccaagcattgggttttggtattcagggcgctgctaatggtgtttggggttttatttttattttcttaattgccttgattattacagcagtagcttacccagccggtggtgaaagtagtgctaataatcccgcaccgtttgccatttatgcctttattattggtggcatgttgctcgttactgggtttaccgtgctgttctttgtaccagaaaaaccaattgaaaagtacgacagtcataccagtttaaaaactgccaaaaagaactttgaacagattctcattaccttaaagaactggaagttgtgactcttgtccttctttttaatgggaatgtatgtctttcaaagtacgtttgcttattatcttttacaaatgatgcaaaacgcctttttggcaccagtgatcttagggactgtactgggtggtgtaaggacgtatgttttgcgcagtgctgtaagtgtgtacttgggcaggttagctgataagtttaggagctacatcctctttttaatgttgtgtacaggacttggcattatctttgtcttgatgtttattctcttaggttttgggcaagtgggccaacagcaaaactatgccttgattatcgtatcggcgatcctctacattctcaccggggtgttgtcttggggtatggtaaccgttaggtacaaccaggtagcggaaatagagattggtaaaaacaactatgcttctagtgttggtttactttcctttattggtttttcgactgatggttggctctacacggttacaagtgtcgtgggtaaggcttataccccagacggtcagaagaatacctcgattcagggttaccaaattattgcagctatttgtctaggaatagccctgtttggtttattgtgtggtacgattgtctttttggttaatacttgagagttaaagcgcttgggtaaaaccgattaccgctggagaaccttagacaatgcttaa

SEQ ID NO: 28016 - DNA, 726 bp, Mycoplasma pneumoniae
atgcttaaacgacaacttctgctagcacaccgtgggtacagtgatattgcgcctgaaaacacccagctagcgtttgaattagcgttccaatatcgctttgatggcgtggagttagatgtgcacttgaccaaggacggggagttagtgattatccatgatgaaactaccaccagaacagcgctagtcgacaaaacaatcgaactggaaacactcgctagtttaaagcaagatgatcacagtgctttctttaagttcaaaacgcaaccccagccgattatgaccttaaaggagttctttgatcagtacttagataaatttcaactaattaacgtggaaattaaaactgaccaaaaggaatacccgggaattgaagctaaaattgatgctttggcccaacagtatggcaaaaaagtaattgaaaaggtagtgttctcctcgtttaactttgcttccttacagcgcttgtatgacattaaccccaactaccaaatagcctttttgttttgaacgaaaaagcagttccaagcagttgatgcactcaaaattaagcaagtgtgtcagtatctccatccctgaacaaacatttacgaaaagttcccggacatggtgttgagcttgcagttacctttagggctgtgaacgcttaacagtgaggttaaattccaccagttccgtcaagatcgaatggtgtatgcacaaattgccaacaagaagtttgaagtgtaa

SEQ ID NO: 28017 - DNA, 2703 bp, Mycoplasma pneumoniae
atgaaatgaacaactgataaggttagacaaacctgattagattactttactgccaagggccacttagcactcccttccaaatcgttaattcccgtaaatgatccttcactgctgtggattaactccggggtagcgaccttaaaggactactttagtgctaagaaaacaccaccgagtaaacggttagccaacgcccagatttgtctacgggttaatgacattgaaaacgtcggttttacatcgcgacaccaaacgctgtttgagatgttgggtaacttctcgattggtgattactttaaggaagaggccattggctttgccaatgatcttttagtcaatcattaccacttggatccgaagcgcttttacattacagtgtaccaagatgatgaattgacctttaacacctgacttaaacacggtattcctgcaagtcggattattaagtgtgaccgcgaccgcaacttctgggacttaggtttaggaccatgtggaccgtgtacggaaatttactatgaccgcggggagcggtttgatccgcacaaggttggtgaaaaactgttctttgaggacattgaaaacgaccgttatgtggaagtgtggaacattgtctttagtcagtttaacaatgatggcaatggtaactacagtgagttagcgcagaagaacatcgatactggggccggtattgaacgcctagtagcaatcttacaggacgcgccgactaactttgacacggatattttcttaaagttaattggcattattgaacagcactgtaagcataagtatgataccaacttatactttaagtttgaccaaaagttaaacgaagcgcaaagtgcctttcgcattattagtgaccactttaaggcaattaccttcaccattgccgaaggcgtattgccaggacccaacgagcgcagttacattgtgcgccggttactgcgccgcgctttgttggcctgcaaaaaactggacttagacttaaagtttattgatccgatggtcgatgccattattagcgtttatgggtcttactaccagcagttgcaggggaaaaaccaggtggtgcaacaagcaatctgaaaggaagttacggcctttgataaaacaattaacttgggcttaatgctgtttgaaaagagtattgctcataatgcactccaaccccaagtagccttccagttgtacgaaacctatggctttccgattgaaatgattaaggaactggtggataagcgccaactccaggtagactgaaaggccgtggaacaactgatggaacagcaccgtttgatctccaaacaaaacagtaatacgttgagctttgaaaagcaaaatgaacacttagtgaactttaaaacagcgagtgagttcttatacgaggctaatgagatcaccgccaaggtcattgggctgtttgatgaacagtaccaaccggtgcaaaaactgcacaaccaaagtggttatgtggtgtttgaccaaacggtgctgtatgccacatcaggcggtcagcgttatgatgaggggtactgtattaaccacagccaaaatgatcaaagagtaagctttcagggcgtgtttaaaggccctaataaacaacacttccacttctttttaactggtagttttcaactaggtgacaaagtgatcctagtacatgacggtaagtggcgccaactagtgaaaaacaaccacagtttagaacacttactgcacgcggcattgcaaaatgaaattgaccccttgattaaacaagacggcgcctttaagtcagcgcaaaaagctaccattgactttaatttttcgcgagccttaacctgagccgaactggaacgggtggaacacaggattcgacaaattattcaacaagacattcagcgcgaagagatctttactgatctagagggtagtcaaaaacttaatgcgattgcctactttgaagaggagtattcgaaccacgagttgttacgggtaattcgctttggtgattttagtgtcgagctttgtggtggtacccatgtggaacacactggtttaattgagaactgttttattactgattactatgctcgtggcacagggcgttgacggattgaaatcattagtagtaacgaaacaattgcagcttacctcaatgagcagaatggcaagttaagtgaaaccattaacagtttacacaatacactaaacaacattgctaaccccgctttgaacaagcaaaaaactgctttaactaagcaactaaatcactttcacttgccgcaagtaattactgatttacgtaaatgccaagctttactaaatgaactcaaaataacggttaatgaactgaaaacggaagactttaagtggaagcaaaagcagttagcggaaaagatcaaacaggaattgttagagctagcaaagcaagacaaagcttatgttctcgctagctttgcagcagttgatccgaaactgttatcacaagtagcccaagcagtcttgaaccaacacaaaaacaagctgtttgtactcctcaaccaattcaacaacagtccgtcctttatgttattagggcaagatgtttctaaatgtattcagcttttaaaagctcactttgaacttaagggtgggggtagtaataacttctttaggggttcgtttaacgagtcggtggatgtaagtaaactacaagctatcctcgatacccttcaatag

SEQ ID NO: 28018 - DNA, 759 bp, Mycoplasma pneumoniae
atgcgcaaaaagaaatttttgtcaaggtttgcttttggttctttatttttgttatgtggaacaattttaagcgcttgcactggtatccaagctgatcttagaaatcttattaaagaagccaccggtaaagacattgatttgtctaaatcaattaaaactacagatggtaaaaagaacataataacttcttcaaagaagtcttacgaagttaatccgaaagatacaacaaaattgttgttagaagcatgaaaacaaagttttgaagagggtaaattaggtattgcggaacttgctttcgatcaagcaactaaccccacaaaaaatagcgattttaaaatggagcggaaagttgagtatttcaatatggaatataaaagctttagtgacttttcagttaatgctaggttaagctatatctttaattggtatgggagttattttggagaaaaaagtttcactgccaataatggcggtaagcataatttcgatcttttccttagtattaaatctcattcaaaaaaacaatttacagaaaaaagtttcattgttaaagatgaaaattttcaagatcaagataaaagtcaacaaataattacagaatggattcagcttgatctttcactgatttgatcattaaaaggacaagatgaacttagcagaaaaagtctggataaaatttttttaaaagactatattacttacagtgctaacgaaaaacaaattaatttattcacctacttacagcatttgattaagtaa

SEQ ID NO: 28019 - DNA, 2283 bp, Mycoplasma pneumoniae
atggttattaagaagggttttttcgcgttatcaagttgcacattaggtctaggtcttattttaactgcatgtggtgctaggggtaaatttgaccaagttgacgatggtgttattaagctagctacttcaatccaaaataaggacagtatcgctgctttaaacaccatttacaagaagtataaggaacgccatccagggagttatccagttcaaaattttcaggttcccggtggttacagtggtttgcggaacgacattagaacgcgtttatcagctaaagatggcaacaacttttacaacatagtactcaactatcctgatgttgtctcctcattggctacaagtgacatgcaactaatattggataacgttgacaccaagctcctttcgaaaaatttcttgagctttaacgagcgaattggtggtgtacgacaaaaggggatttatgcaattcccatttccctttccactgaattaatggtgctcaacggaccggtattgcactatattttgaacagtgctaagaagaaggaaaacggtgctcaaatgattaaaagatcaggtagtttttccactgttcaaaaaggtaccatggcaatcgacatgaatgatcaaaagaccaaagatctttgacaaaaaatcgaaaacgctgctaaggctaatggtaagacaactagcactcaaacaagtccacaaccaaaaaacgctgttagctcactccagctaaaacaggcagctgaaggtactagcactgataattctcaggatgcagaaaatagcgataacgaaatcaaaaagacttggggtgaatacaaggaagagggtaaccacacactgaagggttacacctttaaggctagtgtctttgaaaactgaaatgaactattagacttttccacgcgggtagccaattcgttcccagacaaaattaaaaatcaagcatctaagaaagctaccgaactgcaaggtgtctttggggttgacagcgtctctggtgctttattttccgctacctttgctgctggtggtggagactatgataagttcttctttaatgtaaagaatggtcggggtaattttagaaatttactcgaaaagggtagttcttacaataatctgcaaaaggtctttaacgattacaagcagttaattagctctaacggtttgtacattaataaaggtggtgcttattccagtaacttcttaaagtttcaccagttagcttttagtgtgggttccagttctggttaccattttgcttttgctggtgaaagcgctaaacgcttggaatttggccagaaagcaatcgagtacccacgtgacacttacgaaattaaggcacctacaaatagccaaaatggtaatggtacccttctaggtagttttactaaaagtaaaagtaatggcaaagaacaaagtgggcaagatgaggataaccagaccagtgaaacgattgagctttacaaaagcagcgttcctagtggtaaagaggcgggtaaaaatgcgcttgctattaccaatcaacaactaatttcggctttagaaaatgctgcaaaagataataaaacctcccaaccacaagcacgatcacttacagcttctgatcaagttcaaattacacaaagttcagataaggttattggttacatcaccacatctaatttggacattgacaacaacaatacctttgatgttggtaagttaaacggtgataagtcaaccagcaaaatcattgttaacgctactttaaaaaccttaaacaagatcaacaccttgcaaagcgaagagggcattattctgccccatccacaaaaatataagagtactgatccacaagctgtcgctaccgttcagggtccaagtattattggtgttcatgctaacgctaaggaaaacgctgaaacccaaaaatttatcaactggtttattaaccaaaaagaaacttgacctgaaaatagtaagggaaataagaatggccaaaatggtcaaatgaccgcagcacaatactttgctaagagctctggttatgttttaccttacagtgaaacgtttactaaacaaagtgaagacgaacacagcacaactaaagacgcttataagatcttgaaagatgtaaacgatggtaagttagttggttacagtgatccaagtgatttccgttctggtaaattccgtgacacaattgtcgctgcttttagtggtgctgtaagctctaaagctgactttaataagttctttaaaggttttgaacaacaattaggtcaagaatacagaaggggttaa

SEQ ID NO: 28020 - DNA, 255 bp, Mycoplasma pneumoniae
atgcaagagcgtgacattcttttaaaaattaaagagatcgctaaggctaaaaacttcaaaactgagttagatgaaagtgtgttgcaaaaaccctttcgcgaactgaaaattgactcacttgatatgtttagcgtgattgtcagcttagaaaaggagtttgacattatgtttgaagatgaaaaactgatgcagctcaataatctcgctgagttaattgctgaggtaaaacacctaataagtcaaaaaggggtatag

SEQ ID NO: 28021 - DNA, 1452 bp, Mycoplasma pneumoniae
atggccaataaagatcaaaatctaacgctttgatacgaccaactactgagcaaagcacaattagtgagctatggcgatgtgaagggcactaactgttttttacccaacagttggaacctctgactacaaattcaaagactctataataacgctactgctctaattaaattaaaggacaaggttattttaaagcagtttatcccgattgaaccactgccatacacagtggagcaagttcaactaccgaccctttccttttacagtgagtaccaaaaggaaaagcgtcatgtggagggctttaatcctgagctttttttaatagagcaaataggtactaaaaaactccatgatccgctagtactacgtcctactagtgaaattgctttttgtaacttatggaaaaaacagagcttttcttaccaaaaccttcccgttatctataaccagtgaacctgtgtttttcgcgctgaaaaaaacacccgccctttcttgcgcaacagtgagttttactgacaagaaacccacggtttgtttagtgatggagttaattctgaaagcgcagcaattgctttttgaaaactgtaccaggacattattgtcaaccagctctgtatccccgcttttgtggggttaaagagtcccaatgagcgctttgccggagcacaaaatacctgaacggtggaaagcattatgcccgatgggcaggcattgcagtgtgccacgagccatgatttagggcaaacctttaccaaaccgtttgggctaacctttcaaaaccaagccaaccaacaggccattccctacagctttagttgtggaatttctacaagaatcctcggtgctttactgttaacccacagtgatgactttggactggtactaccatgaaaagtagcaccaattcaagtcaaactgtacttatttgacaaaaaaggtgatacaaagacagtagagttagcacagaaagtgcaaacgttgttggaacaattagcaatccgttttcaatttattaaggtcgaaaaccagctcggtaaacagttaggacagggtgaagtcaacggcattccctttcaactaatagttgacaatccccaaacagtcaacatctttaaccggttaaccagggtcaaaacagcttacagtttcgaacagttggcaagccgatttgtggagctcgtgcaacagtaccatcaagcaatgtatgacaaagccaaagcagtggtacagcaaaaggtggtgcaagccactactttaaagcaaattgaacaagcctttaatgacaaaaaggctgttttgtgtgcggttcgtttaaccgatacattagaacagcaattaaaggaacggtaccaggtcacggtgcgctgttgcttagagcagcttcaaaagccccaaatttgtccgtttagcggtgagtcagcacaggactatgtcctgattgcgcgtgcctattaa

SEQ ID NO: 28022 - DNA, 2202 bp, Mycoplasma pneumoniae
atgttttacaattgacttaaattatataaatttagcaaaatggccactttagttgaaattgaacgcgattttttacaaaaaacagcccaaaaatttgcacctgaagtggttgcgttgattactaaagcactcgattactccaaaaagtgacacggtgagcaaaaaaggctgagtggtgaaccgttttttatccatcccttgagaacagcactgcgcttagtggagtgaaacatggacagcaacaccgtgtgtgctggtctgttacacgacattattgaagatacccaggtcactgaagctgatttaactgccatttttggtaaagaaattactgatttagtggtaaaagttaccaaaattaccagtgaatccaaaaaacaacgccagctaaaccgaaagaaagaagatttaaacctcaaaagtttggttaacattgcgatgagctcgcagcaagaggtcaatgctttggtgttaaagttggccgaccgactcgacaacatctcctcaattgaatttttagcagtcgaaaaacaaaagattattgctaaagaaacactcgaactgtatgccaagatagccggtcgaattggaatgtatcccgttaaaactcaactagccgatctttcctttaaggtattagatccaaaaaactttaacaatacgctgtccaagattaaccagcaaaaggtcttttatgacaacgaatggggcaactttaaaaaacagttggaagagatgctggaacaaaaccagattgaataccgcttagaaagtcgaattaaaggcatttattctacttatcaaaaattaacctttcacgagcagaacattgccaaaatccacgatctgttcgccattcgtttaattgtgaagtcagagttggattgttaccacttacttggtttaatccacctcaactttaccgtgttaatgaaacactttaaggattacatagcatcccccaaacaaaacttttaccaatcaatccacacgactgtgcgcttgaagggtttaaatgtggaaatccagattagaacccaacgaatggatcatgtgagcaagtacggttttgctagccactggatttacaaagagaaaaaggaagggttattggcaagtgctttacaagtaaattacttaaacagtaaacaaatgcattcgcgcgatttttttaaacgaatctttggtactgatattattaaggttaatgtaagttccgataacgaacctaacatagtcaaaaaactcaatgttgaaagtaacagcaagttgctcgatattgcttatgagttgtatcccaaacagttcaataaattagaaaaaatcaaactcgatggggttgaggttatgtcgtttgacgtaactgccgaaaacgaaatggtaattgagttttgttttggtaaaaccaataacctcaaacggcgttggttacgttatatgaataaccacgtatttcgcgaacgggttaaaaaggatttaaacaagttaaagaaagcggttaagtacagtgaactacctctatacgaaaaggccttggaagagttgcacttaaagctagctgatgaaacccagattaaacaacgcttaaatgctttagggatcaaaaaactgacagagttcttggaattaatcgaatacccccacttccctaaaaatgagcatttgtactttttagctagtaacaatcagaagtgaagggaattgattaaacccattaagttcgctttatcacaagctgtgttccaaaactcttactttgaacaaattgagggaatttacatcaccaaaattgtgattgaaacctgttgcacaaagattcctgacatgccagaacaagttattggcatcttaatgaaaaacattctcagggtacaccttcatgattgtagggaattagctaatcaaaagcaacccaaaattattccactttattgaaatgcacaccaattaaagatgcgaccacgtaaattccgctgtcaaattaacattcgcggtgtatggagtgaaacaacggtcaataaaattgttcaaaccattattgaaggtgatagctatttagaacgaattattcccaagatcgataaacaaaaagatgagtttgagctcaacattactatgtttatcgacaactatcaccaactaatcacaattatggagcagattactactaagaatattagctacgtttgaaagtacctttaa

SEQ ID NO: 28023 - DNA, 1077 bp, Mycoplasma pneumoniae
atggcaattttgattaaaaacaaagtccctactacactttaccaagtgtatgacaatgagggtaagttaatggaccctaatcacaagattacacttagcaacgaacagttaaagcacgctttttacctcatgaatctttcccgaatcatggacaagaagatgcttgtttgacaacgtgctggtaagatgttgaactttgcgcctaacttaggtgaggaagcactgcaagttggtatgggcatgggtttaaatgaaaatgactggttctgccctaccttccgttccggtgcgttaatgttgtaccgtggtgttaaaccagaacagcttttactttactgaaacggtaacgaaaacggtagtaagatcgaagctaaatacaaaacgctgcccattaacattaccattggtgcacagtactctcatgctgctggacttggttacatgttgcactacaagaaactccctaacgtagccgttacgatgattggggatggtggtacagctgaaggtgagttttatgaagcgatgaacattgcttccattcacaagtgaaactcggtcttttgtattaacaacaaccagtttgccatttccaccagaactaaattagagtccgctgtaagtgacctttccaccaaggctattgcggttaacattcctcgtattcgcgttgacggtaatgacttaattgcgagttacgaagcaatgcacgaagcagctaactatgcgagaagcggtaatggaccagtgttaattgagttcttctcttgacgtcaaggtccccacaccacttccgatgacccttccatttaccgtactaaagaagaggaagcggaagcgatgaagagtgaccctgtgaagcggttacgtaacttcttgtttgaccgtggtattctaaccccacaacaagaagaggaaatggtagctaagattgaacaagaagtgcaagctgcatatgaggtaatggttagcaaaacgccagttaccttggatgaagtgtttgattataactatgaaaagttgactcctgatctagcgcgccaaaaggctgaagctaaaaaatactttaaagactaa

SEQ ID NO: 28024 - DNA, 984 bp, Mycoplasma pneumoniae
atgtcaaaaacaattcaagcaaataacattgaagcgttgggtaacgcaatggatctagcgttagagcgcgaccccaacgttgttttatacggtcaggatgctggctttgaaggtggtgtgttccgtgctactaagggtttacaaaagaagtacggtgaggagcgtgtttgggactgtccgattgccgaagcagctatggctggtattggtgtgggtgctgccattggtggacttaaaccaatcgtggaaatccagttctccggtttttctttccccgcaatgttccaaatttttacccacgcagcacggatccgcaaccgttctcgcggtgtgtatacctgtccgattattgtccgcatgccaatgggtggtgggattaaagcacttgaacaccacagtgagaccttggaagcgatttacggtcaaattgccggacttaaaacagtgatgccgtccaacccttacgacaccaagggcttattcttagcagcagtggaatcacctgaccctgtggtcttctttgaaccaaagaagctgtaccgtgccttccgtcaggaaattccagcagattattacactgtgccaattggtcaagctaacttaattagccagggtaacaaccttactattgttagttacggtcctaccatgtttgacctaattaacatggtctatgggggtgagttgaaggacaagggcattgaactcattgacttgcgtaccatttccccttgagacaaggaaacggtgtttaactccgtgaagaaaaccgggcgcttgctcgtagttaccgaagcggctaaaacctttaccaccagtggggaaattattgcatcggtaactgaagaattatttagctatctcaaggcagccccacaacgggtaaccggttgggacattgtggtaccgttagcacggggtgaacactaccagttcaatttaaatgcccgcattttggaagctgttaaccaacttttaaagtaa

SEQ ID NO: 28025 - DNA, 1209 bp, Mycoplasma pneumoniae
atggcaaatgagtttaagttcaccgatgttggtgagggcttacatgagggtaaagtaactgaaatcctcaaaaaagtgggcgatacgatcaaggtcgatgaagccctttttgtagtggaaaccgataaggtaaccaccgaacttccatccccttatgctggggttattaccgccattaccactaatgttggtgatgtggtgcacattggtcaggtgatggccgttattgatgatggcgctggtgctgctgcacctgctgcgccccaaccagtatctgcaccagctcctgccccaaccccaacatttaccccaacaccagcacctgtaaccaccgaaccagtagtggaagaggcgggtgcctcggtagtgggtgaaattaaggtatcgaacagtgtgtttcctatttttggtgtgcagccaagtgcgccccaaccaacaccagctcctgtagtacaacctacatccgctccaactcccactccagctccagcatctgcagcagcacctagtggtgaggaaacgattgcgatcacgacaatgcgtaaagcaattgctgaagcaatggtgaaatcacacgaaaacattcccgctacgattctcaccttctatgttaacgctactaagttaaagcagtaccgtgagagtgttaacggcttagctttaagcaagtacaacatgaagatttccttctttgctttctttgttaaagcaattgttaatgctttgaagaagtttcctgttttcaatggtcgttatgacaaggaacgcaacctaattgtgttaaacaaggatgttaacgtaggtattgccgtggacactcccgatggtctgattgtgcctaacattaagcaagcacaaacgaagtcggtagtcgacattgccaaggacattgttgatcttgctaaccgcgcccgcagtaagcaaattaagcttcctgatttaagtaagggaacgatctcggtaactaactttggttctttaggcgctgcttttggtaccccgattattaagcacccggaaatgtgtattgtcgctaccggtaacatggaagaacgtgttgtgcgtgctgaaggtggggtagccgttcataccatcctaccgttaacaattgctgccgaccaccgctgggtcgatggcgctgatgtgggtcgctttggtaaggaaattgccaagcaaatcgaagaattaattgatttagaagtagcttag

SEQ ID NO: 28026 - DNA, 1374 bp, Mycoplasma pneumoniae
atgaattacgatctcattattataggggctggtcccgctgggtatgtggccgctgagtacgcgggtaagcataaacttaaaacactcgttgtcgaaaaggaatactttggtggcgtgtgtttaaatgttggttgtattccaacgaaaacactgttaaaacgggccaagattgtcgattacctccgccatgcgcaggactatggtatttcaattaatggtcaagtagcacttaactgaaaccaattgctggagcaaaaaggtaaggtagtgagtaagttagttggtggggttaaagcgattattgcttccgctaaagctgaaacggtaatgggagaagccaaggttttggatcccaacaccgtggaggtagcgggtaaaacttacaccaccaaaagcattgtggtcgcaactggttcacgaccccgttacttaacgcttccgggttttgcagaagcgcgtcaaaacggttttgtaattgactcgacccaagcgctctctttggaaggggtaccacgcaagttagttgttgttggtggtggagtgattggtattgaatttgcctttctctacgcttcattgggtagtgaagtgactatcttacaaggggtggataggatcttggaaatctttgacactgaggtatcagatttagtcgctaaactcttgcaaaccaagaatgtcaagattattaccaacgcacaggtaacccgtgctaacaataatgaagtcttttattcgcaaaacgggcaggaaggcagtgtggttggtgatcgcattttggtctcgattggtcgcattcccaacacggaatgtcttgatgggttgaacttacaacgtgatgagcgcaaccggattgtgctcaatcaagatctccaaacctcaattcccaacatctacatagttggcgatgccaatgcccagttaatgttggcccactttgcctaccaacaagggcggtatgcggtgaaccatatcttaaacaagaagcaggtcaaaccagcgcaaaagttaacttgcccttcctgtatttacaccaatccggaagtagcatcggtgggttacaccgaaatggagttgaaaaaacagggcattccttatgtcaaaaccaatcttgttttagcgcactgtggaaaagcaatcgctgacaatgaaaccaacggttttgtcaaaatgatgtttgacccacaaaccggtaagatcttgggttgctgtattattgctgctactgctagtgacatgattgccgagctagcgttggctatgggtgcaggtttgacagtatttgacattgccaactccatttcaccacatcctaccatcaacgaaatgatcgctgatgtgtgcaaaaaagctctttttgatcactttaaatag

SEQ ID NO: 28027 - DNA, 2382 bp, Mycoplasma pneumoniae
atgtataaccacaacttactggaagagaaatggttgcaattgtgaaaaacgaagcaagttaaccgtttttttgatgataaaactaagcccaaatactatatcttggacatgttcccttatccttcagcggctggtttacacctgggacatgtgcgcgcttacaccattaccgatgttttgagtcgttatcataaagcgaagggttttaatgtgattcacccgattggctttgatgcttttgggttaccagcagaacaatacgcgattgcctccaataagcatcctggtgactgaactgacaaaaacattactaatttcattgagcagttaacggcctttggctttgattatgactaccagctgtctttaaagacaactgatccacgctattaccagtacacacagtggatctttggtcagttatttgaagccggtttggctgaagtgaaggagattgatgtcaactggtgtgctgaattgggcaccgttttagccaacgaagaggtgttgattgacagtaatggtaatgcggtgagtgagcgtggcgagttcccggtaaccaagcgaaaaatgaagcaatgggtgttgaaaataactgcttttgctgaaagtttactcaatggtttggctgagctggattgacatcaatctattaaggaaatgcaaaccaactggattggtaaaagtgaaggggtagaggtaacgtttgacatagaaaactccaaggaaacgattaccatttttaccactaaggtgcaaactatttttggtgtaacctttttagcgctttccaatagccatcccttagtaaaagaggtagctaaaaccaaccccaagatagcacagtttctccaaaaacaagcacagaaaaccaccactgtaaagcaacctgagacgctccatgacggggttgatttaaaacttaaagcaattaatccagcaactaatactgccattccgttgtatgtagctaactatgtagtggaaggttatggtacggatgctgtgatgggtgtgccagcgcataacgaaaacgataacttcttcgcgcggaagcaaaagctaccgattattaccgtcattgataaacaggaacgcttgcaacactccgggcagtttagcgggctcaactcccaaactgctaacacccaaattacgcaaatgttagtcgagcgtcaaaaagctaaaaaaacaacggtgtacaaactccgtgactggatttttagccgtcaacgttactggggtgaaccttttccgattttgtttgacgaaaacaaccaaccccatttagttaaagagctccccgttaccctaccagctttggctaactatcaacctgatggttcgactaacccaccattgtgacgaaaccaggagtgggctaaggtgaaacaaggcaatcaaacttttactcgggaaacgagcactatgccccagtgggctggttcttgttggtattacttgggttatttgatgttaattaataacgaaaacttttggccaattgactccagggaagcgaaagatctttttgagcgttacctaccagtggatctgtatgtgggtggtgccgaacatgccgtgttgcacctcttgtacgcgcgcttttggcaccaattcttgtaccaaaagggaatagtcaccactaaagagccctttaaaaagttaattaaccagggcatggtattgggaccagatggcaaaaagatgtccaaatccaagggcaacacaatcaaccctacgccactaattgattctcatggtgctgatgccttgcgactttacttgatgtttatggggccgattagcgcggcgttgacctgattggatgatgggttaaacggaatgcggcgttgacttgatcgggtgcacaatttctttcacaaggaaaacattattaaagaaacggtagatcaagaaactgtttatggttataacctctttttaaagcgtagtttcgagcacttagagaaacaagaactcaatttggtaattagccaaatgatgatctttttaaacctgctttacaaaacaaaacaattaaccctggcttatgcaaagggctttttgacggtgttatcgttttttgcaccttatttagcggaagaattaaacgctaaactagggatggagccgtttattgttcatgctcaactaccaaatgttgataacagcgtacttgaaaccgataaggttaaaattattctttcggtcaacggtcgcttcaaaggtaccaaggaatttgctaaaggggttgatgaacagactgtcttaaaagcctttaagacagatccggaattccaagcgttgttcgaccaacccttagcgcgtgttgtttttgtccctaatcgtattattaatgttcttttaaaatccgaatag

SEQ ID NO: 28028 - DNA, 834 bp, Mycoplasma pneumoniae
atgcctgaactacctgaagttgccactgtaattaccgaacttaagagctgtgttttaaacaaacctgtcaagcaagttaaggttcacttagacaaggtgttgaaaaatactaatgtcaagcagcttaacgatgcgttagtcaaccacagctttgtggacattaagcgccgcggcaagtacattattttttgtttaagtaacggtttgtttttagtgtcacacttacgcatggaaggcaaatatttctttgaagctaaaggcagtcagtttgacttaaaccatgttttagtcgagtttttattccaagatggtgatcaacttaactatcatgatacgcgtcaatttggtacctttcacttgttcaatagatatcagtttgaaaacgcacgtgaattgaacaaattagcactcgatcccttagatcaggaatttaaccatcaagcgatctttaacaaaggccataagtccaacaagaagattaaaacctttattttagatcagaccaacattagcggtattggcaatatttacgctgatgaaattttgtttgcaagtaagattcaccctgaaactttagctaaaaatttgaacttatcgcagtatcagctaatttgtcaaaatgcaactgatattttaaagaaagcagttgaaatgaagggtactaccattggcacttttacctttaaaaaagatcataccggtggttaccaacacttcttgaaaattcatggcaaaaaggggaagcaatgtcaaagctgtaacaccactattattaagaaaaagattaatggtcggggcagctatatttgtgaaaagtgtcaaatacagcgttaa

SEQ ID NO: 28029 - DNA, 876 bp, Mycoplasma pneumoniae
atgaaaaatgcaattttaattgatggtaactcactagcctaccgtgcttacttcgctacttgacaacaggtggagtttgccaaactacacaacttaccctttaacaatgcgattcgcacaatgttaatgatgtgctgaaacttactgcagtcaaaacagtatgactatggtgttattagctttgatactaaagcgcccacttttcgtgatcaactttacagtgaatacaaaagtaagcgcagtaaaacaccgagtgaactgttagtccaaattcctgttgttaaagaatcactgcgtcatttaggttttttagtgtgtgaacaagacgggtttgaggcagatgatctaattggtagttatgcgaggttaatgacacaaaacaatgtggcagtagacatctacagctctgaccgtgatttactacagttagtcgatagtatgactagtgtttggctttgtgtaaagggcacaaaagagatgaaggaatataacactgacaactttgctgagcagttttttggcttaacaccaaaacaagtgattgaatataaaggtttggtaggggataacagtgataacctcactggcattaagggaattggtccgaaaaaagggattgatctactcaaacaatacggtaccattgacaatatttttgctaactttgacaagctatccaaagcattgcaaacgattctccaaggccaaattgacactgctaagaaattcagctttttagcgagcattaaaacagatattaaacttaatgacgatattgtccacgctgctttaaaaccaatcgataaacaagctttattagagcttttagataaatatggcattaaagcactagcgcaaaaatttagtcaactgtaa

SEQ ID NO: 28030 - DNA, 2619 bp, Mycoplasma pneumoniae
atgtttgttaacctccacactaactcttactataacttcctcaactccacactttcaccgcaaaagctagttgacctagctgttcaagaccaacaggtagctgtttgtttaaccgatcccaacttatttggtgctaccgagttttttttggcctgtcaaaaagcgcacattaaacccttaattgggttgagtgttactgttcgacattacgaacaaaacgttaatttactagtaattgcccaaaccaaccggggttatcagaacctaatgtgcttagcgttagttaaagaccaaccagatttgcaattagaaccctttttggatggtaatgtggtaattatttgcacacaaactgaactgcgcctcaacaccgcaaaccccgtttacttagcacatggtttgagtggtcgttatcctaaaattgcagtaacacaaaaaccagttaagtgtcaaaacaccaataaggacttaacactgctcttaacacttaagcaaattagtcaaattaacagcgaacacttccagccactggaatgaaaattaagccgtagtttaaacgaaatccaattggatccaccattgttgcaacaactccggcaccaaccttttttaagccaaaaggcagcacagcaaatttttagcgaagaggaattgggaaatctgcaaaagctagtggagcaaagtcaatgagatttaaccaaactcaaagcgtcatcgttacaagtgtcacacaacgatgcacaaatgttaagcgagcagtgtcaactagccttaactgaatttttaaagctcaatccgcaattaaacaaacagctctatgaagagcggttagccaaagaattggagataattaactcactccactttgctagttactttttagtggtgagcgacttagttcagtttgcccataataacgatatcctcatcggtcctggtcgaggatctgcagtgggttctttagtggcctttctgctcaaaattacccaaattgatccagtagccaacaatctcatttttgagcgctttatttcccgtcaccgccagggcttacctgacattgacattgacattatggaaactaaacgtgatttagtaattgactatgtcatgcaaaaatatggccgggaacagtgtgcacaaatagttactttccaaaaatttaagacccgctctgcgttgcgtgatgtcggtaaggtatttaaccacattgagggtgctgaagatttactgggtaaactaccaaaagacaaaagcttattggagcttgatgtaaacggtgttactgatccggttttacaacttagtttaaagagctttcgcttgttgtgggaggtggcgcgtgaaattattaactttccgcgccaaccaagcattcacgcttctggtgttgtgattgtcactgaacctttaattaccacgatccctttaatggtgggtaataacaacaactacgtcacccaagtgtcgatggactggttagaatggtacaacctcaataagtttgacttattgggtttaattaacctcaccatgatccatgaggttgtgcaagcggtaaaacccaaggaagttagcgtacagcaattcctccaacaaataccgctagatgatgaagctacttttactaacctcactaaccaagccactttaggtgtttttcaactagagtcgtttgggatgaaaaaggtgctcaaacaaattaaaccgcacaacctccatgatttagcaattgttttagcactttaccgccccggtccacaggacaacattaatacctttattgctaaccgtaacttagggtttgacacatcagacatcgatccgcgaattttgccaatcctcaaagaaacttacggagtgttaatctttcaagaacaggttattaacatcgccaaaactgttgctaactattcattggaaaccgctgatagctttcgccgtgccatttccaaaaaaaacttgcaagtaattcaggacaacatgcgcagcttttatgaaggcgcgctagccaataactttagcttaaaagcagcgactactatctttaattacatccagcgctttgctggatatggttttaacttgtcccacgccttgggctatgctttattgagttactgaacagcatgattgaagacacattactttgagcaatttaacctgtggtgattaaaccacgaacagggcaaaaaggaaaagcaaaaacagctcttaaacgagtttattagcagtggttatgaaatttgcccaccactaatcaataaggctaaaagtgattttagtgttcaagataaaaagctgtatttaggctttaagttaatcaatggtattggtgacaagcaagcccatgccttggaacatgttcaggaagttttaaagcaaaaccccaatttatccttaatagctaccgttaatttgtgtttgagcaaaacggtagggggtttagaacttaaagacattacattgctccaacaagcaggttgttttaattgctttaattacacggttgactttaatttggccaaaagcttttgggtgcaaagtaaccatgaattatttccaaaaataccactagatcaaccacccgtaattaactgaaagagctttggtttttaa

SEQ ID NO: 28031 - DNA, 1080 bp, Mycoplasma pneumoniae
gtggagtttgacaagcagttcttttctagtgttgaaaagattgttgaacttgctgaacaactcgaaaaggacttaaataaacccgatttgacctttgaacagatcaaagcgatcaacaaggaactgaaacataaacaacccttagttgttaaattcaaagaatttaaacggctcatagatcaagctttggaagcggaggccattttggaaaacaacgagctcaaggagctacatgatgaggccaaaaaagagctggaacgggtgcgcagtgttgtccctgaatacgaagaagcgttaaaactgttgttattaccaattgatgagaataaccagaaaaacgtgattgtagagcttcgtcccgctgctggtggggatgaatcgtgcatctttttagctgatttattcaatatgtaccgcaacttttgttctaacaagggttgaaagttgcaaattaacgaaatgatcccatccagtgtcgggttaaacttcgtttcctttgaagttaatggtgtcgatgtgtttgccaagctcaagtttgaatctggcgtacaccgggtacaacgcgtacccgctactgaatccaaggggagagtacacacttcaaccgttacggttgctgttttaccacaactagaagcggttgaagttcatattaacccagctgatcttagagtagatacctaccgtgcttcgggtgctgggggtcaacacgttaaccggactgaaagtgcagtgcggattacccatttaccaactggcatagtagtttcgtgtcaagagggtaaatcacaatttactaaccgtgatacggcaatgaagatgctacgtgctaaactgtgggaaaaagcgcagaacgaacagttatcaacccaagcaggtttgcgtaaaagtcaggttgggtcaggtgatcgtgccgaaaagatccgcacatataactatccccaaaaccgggtcacagaccaccgcattaaacttaccgtcaataagcttaacacgattattttaggtgaccttgatgaaattattgaagcgttgcaggcagatgaaaagaaacaacaactagagaactttttcagttaa

SEQ ID NO: 28032 - DNA, 294 bp, Mycoplasma pneumoniae
atgaaaaaagattttcattttccaagccaatccgttagcttcaagtgtgcttcttgcagcaatagtttcaccattgaatcaaccctaaaacaaaaagaaattacgattgatatttgtggtaaatgtcacccgttttacattggtgaattaaccaaacaaacagtccacggtcgtgcggaaaagctttctggaaagttcaatgctggcaaagcctttttagagaataaaactcctaaaaaagcgaaaggcaaaacagaagaatataccaaacaccgttctttaaacgaactgtag

SEQ ID NO: 28033 - DNA, 1977 bp, Mycoplasma pneumoniae
atggcaaaggtcgcacaaattcgagcaatagttgaacagttaaaacgctatgattaccattactatgttttggacgatccgctggtcagtgactttgaatacgaccagttatacaaacagctgcaagcgttggaacaagcccatcctgagttaatccaacccgattcaccaacccaacgtgttgggggaattgtagtggaagcatttaataagtttcctcaccaaaatccaatgctttccctagacaatgccttcgacacagcaacaattgctagttttattgccaacattaacaacttaactggagtgcaaaaccgctttgtggtggaacccaaaattgatggtgtaagcatctctttaacttacgaaaacggattgttaactcgggctttaacccgcggtgatggacttgtgggtgaggatgttttgagtaatgttaaaacgattaagagcattcccctaacgattccctttcacaaacaggtggaaatccgcggtgagatctttgtcgataaaaaaacatttgcgcaaattaacgagaatttagcaaaaccgtttgccaatgcccgcaatttagcagcaggtacactacggaacctcaacagtgaggtgagtgccaagcgcaaacttaaggccttcttttactttgttcccaacgccttaactttgggttgtaggagtcaaagtgccgtgttagcacagttaaagcagtgaaactttccagtgtccaaagcggtggctagctttgatcgacccgaagcattaattgaatacctcgagcagtttgaccaaacacgtgatcagttgaacttccaagtcgatggcctagtggttaaactagataactttcacttttacgaccagttagggtttactagtaagtttccccgttgggcgttggcgtacaagtttaaaccgaagtttgtccaaaccaaactgcgtggtgtcttggtaacagtgggacgcactggcaagattaactataccgcgcagttagatccagttaacttagaggggacagtagtatcagcagccacactgcataactttgactacattaaggagaaggacattcgtttaaacgatacagtgataatttacaaagcgggggaaattatccctaaggtattggaggtgtgtttaccgttaagaacagcagcgaatcaaccgattcccgaacaaacccactgtccggcatgtcaagccccgttagtgcagtataaggatgaggtagatcagtactgtaccaatgaacgttgtgaccagcgtaaccttgaagcgattaattactttgtgtccaaaacggctatggacatccaggggctaagtatccagaccattagtaagctgtatgaaaataacttagtgcgcagcgtcgttgatttataccacttaaaggagcacaaagccgcggtgttagccttggaacttaaaattggtgaagtgctgttcaataaactaatcagcagcatcgaacagtccaaaaccaaggggatggcacgcttgttaactgggcttggcattaaacatgtggggcaagtgttagccaaaagcttaacgaagcactttgaaaacatcgatgccttacaatccgccagtatggaaacactgttagaactccctgatgtgggaccgactgtggcagaatcgttgtttaactggtttcacaatgacaataacttacagctgttagctgcacttaaagcagttggagtgcaaatggatgctttaaagagcaacactaactttgacaccgcgagcatttactttcaaaagagttttgttattactggcagctttccaattagtcgcgataccattaaaaacttgctcgtcaataagtatgattgtcgttttacaaataacgtcactagtaaagttgattttgtgttagctggcattaaggctacacctcgtaaacttgaacaagctaaagccctcaatattcccattattaatgaaccaatttgaacctaa

SEQ ID NO: 28034 - DNA, 1314 bp, Mycoplasma pneumoniae
atgaaccaatttgaacctaaatttaccctcattgacacggtgagcaatcagagcgtggtattagaacaaaagcaaattaacatttatctgtgtggaccgactgtttacaatgatttgcacctaggcaatacccgtcccttaattgtgtttgatgtgctacaaagggtgttgcaagcagcgcagtacaaggtgcagtttgtccaaaacatcactgatattgacgacaagattatcaagatcgcgcagcaacaggaaattagtgaagcgcagttgtgcaaacagcaaatcaccgcttacaaaagcttgttgaaaaagctcaacattttgccgattaaacacctccaagtcactgataaaattgacaaaatgcccggttacattgcccggttagtcaaaaagggctttgcttacgtttcgcctttgggcaacacgtactttagtgtaagccaattaccccagtatggtattttagccaaccgtgttgtggaaacaattgaggatgaagctactgacaaacgcaataaactggactttgttttgtgaaaacaaacgaccgctggggtaaagtgaaacagtccgtgaggttggggtcggccgggttgacacgtggagtgtgcctttttaattgattacagctttaaagaccagttgacaattcatggtggtggggtggatttgaagtttccccatcatgaaaacgaaaacgcaatgcatatggcactgtatgacaaaccattaacgcagcattggatgcacattggccacttaatgtttgaaaaccaaaagatgtccaagtcactgcaaaactttcttttagcagttgactttttgacaatccatgactttcgcattttgcgctgattgttctatcaaaaacactattaccacccgttggatttaagccaatctttaatagagcaagcttgcagtgatattaaaaggatccaaaaggcagtcaatgtgtgccgcacttggtttgtgtattctgaacaatccgccattcccgcgcccaaacagtttgaaccggtgtttaaggcacttctcaataacctcaactttgctaatgccattacccacatttggaagttagtcaaacaaattaaccatgatgtaagcaagcaaaacttgagcggtttaaaggaacatttaagccatttggagtgagctttaaacatcttgggcattggctttaagtcgatccacactaagctcaatgtacagttaattaaaaagtgagctagtttgcgcaaaaatggtcagttagacaaggctgatgaagtgcgccaaaagctaattaaaaaaggtttgttatag

SEQ ID NO: 28035 - DNA, 1350 bp, Mycoplasma pneumoniae
atggctcaagtatattcccaagaagtgtatgtgcaatacctcaagcgctatggctttgtctttcaaagtagtgagctttacaatggacttgccaacagctgggacttcggtccgttgggtgccgttttaaagcaacaaattaaaacggcactgtacaacttcttcattaaaaataagcgggatgtattgttgattgacacgccaattattctcaacgaacagatctgaaaagctagtggccatttagccaatttcactgatgctcttgtggattgtaagagctgtaagttgcgttttcgtgttgatcatttggatgaacaaattaaaagcgccacccagtgaaacccaaagcaggtcaactgtcctaactgtaaggccaataattggtcagaagtacgcgattttaacctcttgttccaaactgaaattggcgttgtcaacagcgaaaaacgcctggtttaccttcgtccggaaacagctcagggcatcttcattaactttaaacagctgttacaactcaaaaagcgtcctttaccgtttggcgtagcccagtttggtaagagctttcgcaatgaagtgaccccgggaaactttttgtttcgcgttcgtgaatttgaacagtttgaaatggagtggttctgcaatcctcaagccagtttaagcgtttttgaaagccaacaacaagcaattgctcactttttgtttaaggtactgcaattaaacccagcattggttaaacaatacgagtatgacaagaatgaattagcacactatgccaataaaacagtggattttttattccagtttccccatggcttgagggaattgtggggtttagctgatcgtggtacctttgatttagaacaacaccaaaagtacgccaaaaagcccttagacttctttgatggagagaataacgaacactttattccagctgtagtggagccttcggtgggaattgagcgcttgttttatgccttgattgttagcagctatcaacaagagcagttggaaggggaaatgcgcgaagtgttacgtttaccctttcacttatgtccagaacaaattgtagtgctgcccttagtcaataaactcaaagaaacagcacaaacattatttgaagcgctgagtcaaacccactgacggattggctttgaaagcgccggtagtattggcaaacggtaccgtaaagctgatgccattggcactaagtttgccattacctttgactttgaaagtttagaagaccaagctgttaccatcagagaacgggattcactcaagcaagtgcgtgtcccaatcaaggagctcaaggcttggtttgcccaacacgatgaccagtcccactag

SEQ ID NO: 28036 - DNA, 1863 bp, Mycoplasma pneumoniae
atgaccagtcccactagcctagatcagctcaaacagcaaatcaaaatagctcccatagtggagcactatgccattaagctaaaaaagaaggggaaggactttgtggcactctgtccctttcatgctgaccaaaacccctcgatgacggtgtcagttgcaaagaacatctttaagtgtttctcgtgtcaggtgggcggtgatgggattgcttttatccaaaaaattgatcaggtagattgaaaaacggcgctcaataaggcacttagtattctcaatcttgactcacaatacgctgttaacttttaccttaaggaagttgacccaaagttaaagcgctattgggatctacacagtgccctagtcgattactatcaaacccggttaaagctagagcccaaagagcagggtttgacttacttaactgaaacacgaaagttaagtcctcaagtaattgaacgctttcagttgggtttagcgtttactttagaagaccagtattttctacccagtctcttaaactatccctgaattagcccggcaattgaaaaggcagagctctgttttgctactgaaaaattcccagaagctttaggattttttaaccaacaaacgcattatgcaacctttaagagccggattatgattccgatccatgaccttaagggtaatccagtaggtttttcggggcgtgcactgcaaaaaacggaaaagattaaatacaaaaacagtgcagaacaccagtggtttaagaagagtgaattgttatttaacttccaccggattgataaaaacacactaaagctgtatttagttgagggttacttcgatgtctttgcccttactagcgctgggattggtgatgtagtgggcttaatgggtttagccttgagtgaaagccacattattgcctttcaacagcaactaaaagcgctagaaacagtggtcttggcactcgataatgatacagcgggtcacgatgctacttttaagctattacaagagttaaacgcacacggcattattgtggaagtggtcgattgaaaccaagccgcttacaaagactgggatgagttgtttttagctgaaggtagtgatgcggttaaagctaagactcacagggttttaaacctcgtggaatacttagtggcttactttaaaaccaagggctttgatgagcggattaccgtcaataaagttatcgacattattgcacaaaaccagaaagtaacagctgacactagctttagccgctttttgtgtcagaaattacagcaattgttgcaatacagtgatgtggaaacactgttcacacaattacagcagcaaaagctcaaagtaaaagttaataaaactacaacttttacccaaagagccccgatttacgaatcagtggttggtgtggttgataatagttttagaaatgaatcgcagccggttgccattaccaaggagtttttagtcgaaaacaactgaaaggagaccaaggaacgtgtatttcatgctgaaatcttcgcttacgtactgttagataagcagtttttagtcgaattaaagcaatctgatttagatgaattgtttgcttcattgcaaacaccgttgtttgatgttgccctttttattgataaagcgcggctttattgagctaaggtgcaagagcctgattgggctgtgtttaacagtattttaggggaacaacaagcaatgtttccaacaacttttttagcgcaaattaaggagttctttttaaacaaatcactctcatatgaccctgaggattatgaggaagatttacagttttttcggcaactaattgtgaaacaaaaagagcttttaaaatattttaaaagcatggttgagcactaa

SEQ ID NO: 28037 - DNA, 1500 bp, Mycoplasma pneumoniae
atgtcatcgccaaagaaaaatttcaaaaaacctcagcctaaaactgaaaatcaaaaacaagcacttaacgaagagcgcattgctgaacttaaaaagagtcgtatcctcggtaaaaaccgtccgtttaaaaagatgatttacgttgacactaaggcacaacgtaaacaaaaacacgaaaacgtagcctttttaaaaacgcttcaagaaaacaaggagagtgatgtaccaaagaagcgtcgcggtcgaaagccaaaacacgcacctttaaaggaaaagaacaaccttaagctgtttgatattttagaaggctctctaaagagtcataccgaaaatgatgatactaacaaggtaattagcctgttggtggaggtgtgggagaaaaagaacaaaaagaaagacaataactcgctttccaacaaggacattgttaatgttttgtccaagtttgaactcccagatgatgaaattatctttgttttggatgaactgcgtgacaagggaattgaactaccacatgatgtggaagagcacatccatgagttccgtgctaaccaagacttgtcgatcattgacgaggacattgaagaattaaccaccaaaaacatctctaatcgtgataaggttgatgacaacgtacgtttctttctaggttcgctcgattcttccaagatgttggactttgagtctgagcagcgaattgccaaagttttaaacagtactgatgaagaatcacgcaagtatgccattaatcaactggtaacctctaaccttaggttagtggtctccattgctaaaaaacacttggaaagaggattggattttaatgaccttatccaggaaggtaacctaggacttttaaaggccatttccaagtttaactggtcattgggtaataagttttccacttatgctacttggtggattaaacaagcgattactcgtgctattgctgatcaagcacgtacggttcggattcccgtacacatggtggaaactattaaccgtttagctaaagctgaacgtgccttaaaccaagaattaggacgcgaacccaccgcggaagagttagcggaaaaaatgggtggtcaagctgaagggtttacagttaaaaagattgctgaaattaaacgtttaagcttagatcctgtttctttagataaaacagtgggccacgatgaagaatcgcagttcggtgactttgtgcgtgatactgatgcccaaatgcccgatgagtttaccgaaagccgttctaattacgaaaagattgatgagttgttaaacaactgtttgtccgaacaggaagaattaattgtgcggatgcgcattggtatgccaccttacaacgaaaccaaaacactcgatgaggtaagtcaaaagattaagattccccgcgaaaagattcggcaaatagaaaccaaagccattcgcaaactgcgtcaagcagtgcgtaataaccacatgagcctttccttcatgaggggaaatgaaaagaaggattag

SEQ ID NO: 28038 - DNA, 720 bp, Mycoplasma pneumoniae
atgaacgcagctagcgccatcgctctacttattgtctttagccttgttattggctatttaatgggttcagtgatgtttgctgatgtttttggcaagatcttaaacaaagatgtcaggaaattgggctccaagaatccgggggctactaactcaatccgtgtttttggtttgaaaataggcttcttagttggtttatgtgatgctttaaaggggtttttggcgtttgttttcagctttttaatctttagcttttggttacaacaataccttaatgtaaaccagtatcaaaaggtttattacctcacttatttaagttgttttgcagctaccattggtcatatttttccactgtactttaagtttaaaggtggtaaagccatcgctactacaggcggttctttgctggcaatttcgctgtggtgatttgttatttgcttagttttgtgattgctagttactttaataaccaagtacgtttctttagctagcttagttaccttctttattttagcgatcattatcctagtgccttggttagattacctttacttttttaagcctaatccaataaacgcgatctcttaccaaaatgattggtacattattctcttctttgtattgtggtattgaccactaacaattgcggtgttttgattgcaccgcaaaaacattcaccgtttattgaataaaacagaaaataaggtaacccagttaaattag

SEQ ID NO: 28039 - DNA, 846 bp, Mycoplasma pneumoniae
atgatgaatagcattaaattcattttcctaggtgacgtctatggcaaggccggacgtaatattattaagaataatctagcccaactcaaatcaaagtatcaagctgatttagtcattgttaatgccgaaaatacgactcacggtaaaggacttagtttaaagcactatgagtttctaaaagaggcaggcgttaattacattactatgggtaatcatacctggtttcagaagctagatttagctgttgtaattaataaaaaggacttagtgcgtcctttaaatttagacaccagttttgcttttcataacttagggcaaggtagtcttgtatttgagtttaataaagcaaagattaggataactaatttactgggtactagtgtgcccttaccctttaaaacaactaatccctttaaagttttaaaagaactaattttaaagcgcgattgtgatcttcatatagttgattttcacgctgaaaccaccagtgaaaaaaacgccttttgcatggcttttgatggttatgtcacaaccattttcggcacccacacccacgtgcctagtgctgatttaagaatcacccccaaaggtagtgcttacattaccgatgtcgggatgtgtggtccgggatttggtagtgttattggtgctaaccccgaacagtcgatcagactcttttgtgctggtagcagagaacactttgaggtatctaaatgcggagcacaactcaatggtgtcttctttgaggttgatgtaaatacaaaaaaggtgattaaaacagaggcgattaggattgtggaggacgatcctagatacttaaaacaagactactttaacctaatttaa

SEQ ID NO: 28040 - DNA, 495 bp, Mycoplasma pneumoniae
atggacaaaaatgccttaagaaaacaaattctgcaaaaaagaatggcattaagtaccattgaaaaaagtcacttagatcaaaagattaatcaaaaattagttgcttttttaactcctaagccatgcattaaaacaattgcactttatgaacccattaaaaatgaggttacttttgttgacttcttctttgagtttttaaagattaaccaaataagagctgtttaccccaaggtaataagtgataccgaaattatctttattgatcaggagacaaatacattcgaacctaatcaaatagactgcttcctaataccattggtaggctttaataaagacaattaccgtctaggctttggcaagggctattatgaccgttatttaatgcaattaactagacaacaacctaaaataggaatagcgtacagtttccaaaaaggtgattttttagccgatccttgggatgtacaactagacttaattattaatgatgaatag

SEQ ID NO: 28041 - DNA, 621 bp, Mycoplasma pneumoniae
atgagatgaagtgactctgaaaacaataaaatcgactatattgaagactttgcaactcattttttaaacaaaaacgccttattaaacgttatttgtaaattttgtgtgttcaggtcaaatagtgatctttgagttatgcgtccttaccaaatatgcgcaactgaaagaattttagaaaaaataaaagaagacaataggaacagtaaaaactctaaaaatgcaagtaagggcggctgtatttgacactcaaccggaagtggtaaaacactaacttcttttaaagctgttcaattggctagtgaaatagactttgttgataaagtccttttcgttgttgacaggaaagacttggacaaccaaacgatcgaagaatatgaaaagtttcaagcgggttctgttagcgaaactgagaacacaaatgatcttaaagaaaagatattagacgatagtaccgccacacgtgcaattgttactactattcataaacttaagaggttaatagatcagagaagtaagcttaaagacgaagatcttaaaaagaaaaacatcgttcttatattcgatgaatgtcatcgatctcaatttggaaaaatgaaacaagaaatcgatgagtttttttaa

SEQ ID NO: 28042 - DNA, 1632 bp, Mycoplasma pneumoniae
atggaaaagaaacgtactgaacaacgtaatggcgttgaaaagaagatttgagaaatagctgataaattaaggggaaccattgatggatgggactttaaaagctatgttttaattggtcttttttaccgttttctttccgaaaacctatgcaaatattttaacgattctgaaagaaggaataatcctgattttagttacgaaaatttaacagatgattatgaagcaattgatgcattaaaagatgctgccattgcaagtaaaggcttttttattaagccatctcagctttttcaaaatgttgttaaaagtattcgtgaaaataaaaataacgaagatctaaatacaactttgcgcgatatcttcgatgatattgaaaagtctactgaactaggtgatggaagaagtaaagaatcctttaaaggtcttttcaaagactttaatgtttctgaggttaagttaggttctactttaacgatccgaacagagaaattaaaagaacttttaacaagcattgacacaatggagctcgatgaatttgagaaaaattctatcgatgcatttggtgatgcatatgagtttttaatttccatgtatgcacaaaatgctggaaaaagtgggggtgagttttttacaccccaagatatatctgaacttctcgctagaattgcgattggcaaaaaggacaccgttgatgatgtttatgacatggcttgtggcagtggttctttacttttacaagtaattaaagttttaggtaaagaaaaaacttcactggttagctattacggtcaggaaataaaccacacaacttacaacctttgtcggatgaatatgattctccacaatattgattacgctaatttcaatattattaacgctgatactttaacaacgaaggagtgggagaagcattacgtaaattgctcaaatgaaaatgggtttgaagttgtggtttccaatccaccatattccattagttgagctggtgataaaaaatccaatttagtaagtgacgttcgttttaaagatgcagggacattggcacctaattcaaaagctgatttagcttttgttttacatgctctatatgtattaggtcaagaaggtacagcagcaattgtttgtttccctggaatcttgtaccgtgaaggtaaagagcaaaccattagaaaatacctagttgatcaaaactttgttgatgcagtgatccaattaccaagtaatctttttagcacaacatcaatcgctacttcaattcttgttctcaagaaaaatcgtgataaaaaagatcccattttcttcattgatggttctaacgaatttgttagagaaaagaagaataaccgcttaagtccaaaaaatattgaaaagattgttgattgctttaatagcaaaaaagaagaagctaattttgcaaagtcggttgaaagggacaaaattagggaatctaactacgaccttacagtaggtaaatacgtaaactcagaggctgaaaaggaagaattagatattaaggttttgaatcactctattgatgaaatagtagataaacaaaaagatctaagaactaaaattaaggatattattcaggatatcaaagtagattttgacaacattgatattaataactag

SEQ ID NO: 28043 - DNA, 2148 bp, Mycoplasma pneumoniae
atggcatttaacattagcactcaactcaataaggaacaacgagccgctgttacctgtggtaagggtgtcaacattgtctattctggtgctggtactggtaagaccaccattatttcccaacgctttgcttatttatttaaccaaaagcgaattaatcctagcaacattttggcgttaacctatacaaggaaagcggcgagtgagatgaagcagcggattttggagctgttaccggaaaagtatcataaggatgtcaacatttacaccttccacagcttttgtagccgttttttacgtgaagaagggcaaaaaaactttgtgattgatgatgacttaagtaactttctaaaagactttctcaaagagagtgaactaaaaagtcaaaaggtattacaaattattgacggttttaaaaacgcttactttgattttgataccaacagcttaaaggatgatgaaagattggtcgagttgtgtgagtttcatttagacccccaagagcgtaactttcaacttttcaaagaaaccgctattgctgcttttgttgaatatgaaaaaggtaaacaacagaacaataaaattgactttgctgatttattaattaaaacttgcactttactgagcaaagatcacaaattattgcgcaagtgatcgaaaaaatttcagtacattttaggtgatgagtttcaagataccaaccaaattcagtatgaactaattaagatgttggccagccatcaccaaaacctttttttagtgggtgacaataaccagatgatttaccgctgaaggggcgcggttagtgacattattgattctttaaaaagtgattttaaggtaagacccgaaaacgagttttacattacccaaaactaccgttgtgatcagaacatcttaacggtggcaaactcgattctaggcaccatttatgccaaagaaaaccaacctgattcaactaaaggctttcttttttctgccattaaatcaaaccggcttccagtttatttccaagcctcttcagttgaaggccaacattcttgaattatcaataagattaagaatttacataaaaaccatggcattcaatacaaagacatggctattttgtttcgcaccaacagaaacatggattcgatgactgaagcgcttgaagctgatggcagtattccccttaagcaaaataagggtttttttaaacagttagagacttttaaaaaggtattagtggcactcataactaggtcaaactatgacattaaactagctttaaaaagtttgcgggtttgacctaatgttttaaataaaagtctcactgtaaacgagcaagtgaatttagataaaatcttgcaaaacttagagcaagccatttttttagatgagcatactcggggtgagttgacggaagctgctaaagtttttacgcgtttaattaagtttgttgaagaacaacagtttgaagctttattagcctttacttttgaggcattaaatactgatcagtttgtctgcaactttatttttagaacattgcaaaaactgcaaactgaaaataaaaacttcaccattaccgattttattaacgagttaaggttccaacaagatgagttaaagcagtccaaagataatgtgattaatttaattacagtgcactctgctaagggcttggaatttgaagctgtctttatttatgggatcaatcaagacaactttccgctcaaatcgaagaatcaaataatagatctacaaagagaattggatgaactacgccttttttatgtggccttgacaagggcaaagaaatacttgtttttactttcagtttatcaaatgagtggtgaaattatttacccctctaaattcattcgttttatcaataaagaggatagactagaaattgccaccattaaccataaagttcaccaggatgatgaattcttcgattcttctaaaacagaagactatcaaaaaaagtatttaacagaaaatacggattttgttaatggtgactctgttagccaccgtacttatggtaagggcgttgttgttgaagttagagaagatgcagtctgtgtcgcttttaaaaacagtaagtacggacagaggtgaattgttaaaaatcaccgtgatttggtgaaggctgtgtattag

SEQ ID NO: 28044 - DNA, 1590 bp, Mycoplasma pneumoniae
atggaacatttaaatcaggaacagaaagctgctgttacttgtgataacggtgttaacgtggtgtattccggtgctggcacgggtaaaacaaccgttattgctgaacgctttgcttacttagtcaatgaaaaaggcgttaatcctcaaagtattttggcctttaccttcactgataaggcagcgagtgaaatgcgccaacgcattattaagttaattccacaaaaaagcttgcaggatctgcacatctatacctttcacagttttgccaacaggtttttgcaaaaacatggcaaaagtgactttgccatcttgagcgattctaaccgcttctttagtgattatgaaatgggtgatcaactacaaacagtggtggaaatttataaaaacaaagtagttgatttagaacttgacaacctagagtataactccgcttttagagatgcttgtacagatacttttaacgaggattttagtaccatctccaatggtcagtttcgtaaacgggctgcgactgctttacgggcttaccagaactatttaattaccaataacctatttgattttagcgatttaattattgaaacttgccaccttttaaaaggtaatagtgaattgttgcaagcatttaccgaaagtgtgcattatatcttagtagatgaatttcaagacactaacctagcccagtacgaattggtaaagttactagctacaactcatcctaatctctttttggtgggtgatagcaaccagatgatttacggttggcggggtgctgttgtagagatctttgaacttttaaaaaatgattttcaagcagtcaaagagttttataccacccaaaactaccgcagcatccaagcggtgttagcagtagcgaatgatgtactaaccgcaattgctagaaaagagaggaaagcgctcgtgttgttgcactctagcattgattctaaagctgtaccggtacactataaggccaattctttgaaaaaccaagaccagtggattatttaccaaatgaaacagttgcatttaaacaatggtgtaccttatgatcagatggcggtgttatttcgtaagaataaacaccttgacgcttttagtcaaacagtgctggaagatggtgatttacctttagctaaattaaaccttttaacaattcacgctgccaagggtttggaatttgaggcagtatttgtttatggcttggttgaacgcgcttttcctagtttgcactgggatggaagtgataagcacaagttactagaagaaatgaaactgttttacgtagcgattactcgtgctaaacagtttttatttttagtttctgttagtgtggaaagtttcaatgcgtattatgagccgtcacgctttttaaaactaattgaaaaggaacatttgcaaacacaaaaggcagcgtactttaaagaacaattaaagacacagccaaaaccagttaatttgtatacagagacagaaaacgcggaaaacttacaaaaagccactgactctaaaaagtgaattattttaggggcgattcttttgataattgtgattattaccgctgtgttaaaactttttgttgaaaattaa

SEQ ID NO: 28045 - DNA, 876 bp, Mycoplasma pneumoniae
atgttaagggttgcgctaaaagcattgcctcagatggcagtatctaactttgacattaaagcgcaaaacggtttttcgttcaatacagtacaacactttaagcagcgctttcccaatgctgagttgtactttttaattggcagtgataaattaagcgagttggccaaatgacataacattgagcagttacaaaaactttgtcgttttgtctgttatgaacgtttcggttatccaattgatgaacaattggtacaacagtttaacgtccgactgttgggtaagtgtcctttagatttggcatcgagtgaaatgtttggtagtcataaatttcgacaaattcccgctaaggtgttgcactatatccaccaacacaacatttatctaaaaaccattttgcaaacactgttagatgaaccgcgcatgcaacactgtttgcgcgttggtcagttagctaaaactttagcagtggcaaataaactcgatggtaaaacggcttatactgctggtgcttaccatgatctagcaaagcaactaccccaagcgcaattagagaaattagccaaagtagcgggtgtaaatgattaccctagctgaaaggtgttacacagctatgcaggtgcatacattttaaagcattggtatggtttaaataatagtgctgtttttagcgctatttgaaaccacactgtaccaccacaaaagatgagtcaactagacatgattatctacttagcggataagttagaaccaatgcgcgttcatgaagagtgagctaaaggcattgatattaccgctttggttaaactagcgaaaaaggatttaaaactagcttaccaaattaccttgaagtacgttaggtcgttacagaaaaactaa

SEQ ID NO: 28046 - DNA, 981 bp, Mycoplasma pneumoniae
atgtctgttacaccaattgttgaagttaaacatttagaaaaggaatttggtttttgacgcaaaaaccgtatcttaaaggatgtgaattttgccattatgcccggtgagttccatgcctttattggtcaaaatggtgcggggaaaactaccaccattaagtgtttaatttcatcttatcagcgctttaaggacgaaattaacatcgatggcattagcaataaaaacgccaagtctaagggtgtaattagttatatccctgaatatgctgtgtttcccaaacacctcaatacccatgaatacctctacacgttgggtaaactgtcaggttgtagtttgcaaaccattaaggaaaaggttgattactgactagcacgttttcaaattgaacacctccgctttaaaaagccaaatgacttttcttctggacaaaagaaaaaggttttattaatccaggccttatttaatgatcccaagctgttaatcatggatgagcccactgctaacttagatcccaaaacacgtaatgagtttatggatgtgtgttacgaacttaatgtacgtaacaagatggcggtgtttgtttcatcccatattttggctgaattggaaaactattgtgattcgctcactgttattcatgaaggggaaattctttttaatggcaaaacaaagaacattgctaaagacaactttggttaccgtttaaaggttaacaattccgatagtttacgtaagtgattaaaagcacaaaaaattgcttacaagtatttccctgcaaccgatgactttcaagttgacttaaaacaaaagcaatccaacaaatttgcagttgagctttaccaacaacctgactttgaggtatttatttttgcacgacaaggcaactcgttgcaaaacatttacaataacctaattgagcaatacgagtacgatcaagtccagcgtgctgttgctatccgtgaacaagatgaagctgtttaa

SEQ ID NO: 28047 - DNA, 2388 bp, Mycoplasma pneumoniae
atgccagctgtaaaaaaaccacaaattctcgttgtgcgtaaccaagttatctttccgtacaacggctttgaacttgatgtcggtcgtgaacgctcgaaaaaactaattaaagcactcaaaaacctcaaaaccaaacgtttggtgttagtcacccaaaagaattcagatcagctcaaccctgagtttgatgacatttaccattgcggtactttatgtgacattgatgaaattattgaagtaccgagtgaagatggcaagacagctgactataagattaagggtaaaggattacagcgcgttgccattacaagcttctctgatgctgatttaaccaagtacgaccatcactttctcaactctaccctaacagaaaataaagcgttagataagttgttggaacggatctttcccgataaagaagactttgctgaaattttagacagcttaaacagcttcttggaactgcaagagttaaagaagctatctaaggtaccaaaagacataaaacggtatgacattattaccttcaagcttgctagcttaattttcaaagacattaccctccaacaagccattttggaagaaaatgacattgaaaaacggttacagaagatcattggttctggcatcgaggatttaggtcacatcagcgaagaagcccgcgctaaacaacgcgaaagtgagtttgacaagattgacaaccgcatcacgcgcaaagttaacgaacagttatcgcgccaacaacgtgacttttacctccgggaaaaactccgggttatccgtgaagagatcgggatgacttccaagaaggaagatgaagtatccaacattcgcaaaaagctagaggaaaacccatatccagagcacattaaaaaacggattttaagtgagttagatcactttgaaaactcctcctcttcatcacaagaatcaaccttaaccaagacttacatcgacactttgatgaacttgccatggtgacaggaaagcaaggacaatgctgatgtaaaaaacctgattaagatcttgaacaagaaccactcaggactagataaggtaaaggaacgagtggttgagtatttagcagtacagctccgtaccaaaaagcttaagggtccgattatgtgtttagtcggtccacctggagttggtaaatccagtttagccaaatcaattgctgaagcgttaaacaagtgctttgttaaggtttcattgggcggggtgcatgatgaatcggaaatccgtggtcaccgtaaaacctatttgggttcgatgccaggacggattttaaagggcatggtacgtgctaaggttattaacccactgttcttgttagatgaaattgacaagatgacatcctccaatcaaggttacccttccggcgctttgttagaggtattagatccggagttaaacaataagtttagcgataactatgttgaggaggattatgacctgtctaaggtaatgtttgtagccaccgctaactatatcgaagatattccggaagccttgttagaccggatggaagtgattgaacttacctcttacaccgaacaggaaaagctacaaattacaaagagccacttagttaagcgttgtttagatgacgctgagattaaaacagatgacctcaagtttaccgatgagggtattagctatatcattaagttttacacgagggaagcgggggtgagacagttagaacgcttaatccagcaaattgtgcgtaagtacattgttaacttgcaaaaaaccggcgaacaacaggtagtagttgatgtagatttggtaaagaaatacctcaagaaagaaatctttgactataccgtgcgcgatgaagatgcacttccgggaattgttaacggcatggcttacaccccaactggtggtgatctgttaccaattgaagtaacccatgtagctggtaagggtgatttaattctgaccggcaatttaaagcaaacaatgcgtgaaagtgctagcgtagcgttaggttatgtcaaggccaatgcgcagagctttaacattaaccctaacctctttaaaaaggttgacattaacatccatgttccaggtggtggtattcccaaggatggcccgagtgctggcgcggctttagttactgccattatctcgtctttaactggcaaaaaggttgaccctaagattgccatgaccggggagattaccctaaggggtaaagtaatgaccataggcggggtgaaagaaaaaaccatttccgcctaccgcggtggagtacgcaccatctttatgcccgaaaagaatgagcgttacttagatgaagtgcctaaagacatcgttaaggacttggagattatcctagtaaaggaatacaaggacatctacaacaagatatttaattaa

SEQ ID NO: 28048 - DNA, 861 bp, Mycoplasma pneumoniae
atgcctaaactcctaggaagctttatttcgtttaaatcaccccattatctagtggggagtgttcgtgacgctgttagcattaaagcacaagcgttcatgatctttttgggcgcaccacacacggcactacgagtcgatcctaatcgtatgcaaattgacgagggtcacacattgatggaacaacataacctcagtaagtctgggatggttgtccatgctccttacattattaactgtgcctccaaagatccggtaaagcaaacctttgcgattgacgttctgacaagggaggttaaactgtgtcatgccgtgggtgctaaactaatcgttctccaccccggttcagcggttgagcaaactcaaacccaagcgttagatcacctaatcaaggtcttaaatacagtgattgccaacactaaagaagtcattatttgtctcgaaacgatggctggtaaaggtaatgaaattggccgtgatttagaccagttaaagtatgtgattaaccacattgaacaacaagagcggattggtgtttgtctagatacctgtcacttccatgacagtggtaatgactttaacaatactgccgaaattatggaaacgattgacactaaactaggctttgagtttttaaaggtcatccacttaaacgagtccaaaaacgtttgtggttccaaaaaagaccgtcatgccaatctaggtgaggggatgattgggtttgataatttaatgcgctttattgcccaaccgcaaataaagcaaataccgattgttttagaaaccccatctgacaagcataattatcccgctgtatatggtgctgaaatcgaaaggatccgtgcttgatttggagcacgataa

SEQ ID NO: 28049 - DNA, 315 bp, Mycoplasma pneumoniae
atgaataacaaatattttttaaccaaaattgacttacagttttttgcttccaaaaagggagttggttcaaccaagaacggccgtgattctcatgctaagcgtttaggtgctaagaaggctgatggtcagatgatccgtactggtcaaattatttaccgccaacgcggtactagggtatatcccggtgtaaatgttggccttggtagtgatgacaccttgtttgctttaagcgacggcttggtaaaataccaaaagtttggacctaaacagggcaagacccgcgtgagtgtggtcaaacacaaactagatgcctaa

SEQ ID NO: 28050 - DNA, 303 bp, Mycoplasma pneumoniae
atgattaaactaactgtgtcgcaccacaaactcaccgcttccgggcacgctttatttgccaaaaaggggcaagacattgtgtgcgctgctgttagtggtattatctttggcgctttgccctggtttgaaaccaacagcattgccgttcaagaagatgctactgtacccagtttaagcttggagttagtgcaaccaaccgctaagcttatcacgggattgagtgtggtgattatgcaacttaaaaccctcgcgcattcttacccgcagtttatttcgtttgaagatcaacgtaaagatgaataa

SEQ ID NO: 28051 - DNA, 303 bp, Mycoplasma pneumoniae
atgcatgctattgtagtctgtggatcaaagcaatatttagtccacgaaaatgacactttttttgttgaaaaacttgaagcgccagttggtaaagaaatccaactcgacaaggttttaatgttggatgaaaagattggtgcgccatacttggaaaaagcgcgagtagtgtgtgtggtggaaaagcacggtttacaacgcaaagtaaacgtgattaaacacatctcacaaaaacaccacttaaaaaagtatggtcaccgtcaaccttacactaagttaaaggtagtgcgctttgtccatgattaa

SEQ ID NO: 28052 - DNA, 2166 bp, Mycoplasma pneumoniae
atgtcagttaaagaaaagattcctgctttcaacacccaagaagacttagaaagctatatttccttaaatgcctacactaaggtgtacggtgattttaagatggatttacacgctgtggaggcttacatccaagagcatgtcaaacccaaaacaaaggtgtttcactccaccaaggaacgcttagactttctagtaaagaatgattattacgatgagaacatcatcaacatgtacagctttgagcagtttgaggaaattacacgtaaggcttacgcttaccgttttcgttatgctaactttatgggggcatttaagttttacaacgcttatgcactgaaaacctttgatgggaagtggtatttagaaaactatgaagaccgcgttgtcatgaacgtgctctttttagccaatggtaactataacaaggctttaaagttactcaaacaaattattaccaaccgctttcaaccagctaccccaacttttttaaatgcgggacgaaaaaaacgtggtgagtttgtgtcgtgttacttactgcgcatagaagacaacatggaatcaattggtcgtgccattaccactaccctacagctctccaagcgtgatggtggggtggcgttattgctcactaacatccgcgaatcgggtgcgccaattaaaaaaatagaaaaccagtcatcaggcattattccaattatgaagctgttggaagactctttttcttacgccaaccaattagggcaaagacagggagcaggagcagtgtatctccatgcccaccaccccgatgtcatgcagtttttagacacaaagcgcgaaaacgctgatgaaaagatccggattaagtcgctgtctttgggtctagttattcccgacattacctttactttagctaaaaacaatgaggagatggccttgtttagtccgtatgatgtgtatgaggagtatggcaaacccttgtcagacatttcagtcacggaaatgtattacgaactgttagcgaaccaacgcattaaaaagacctttattaatgcgcgcaagttcttccaaacagtggcggaactgcactttgaaagcggttatccttacatcttatttgacgatacggttaaccggcgcaacgcgcaccccaaccgcattgtcatgtctaacctctgtagtgaaattgtccaaccctccactccatcggagttccaccacgatttggcttttaaaaaggttggtaatgacattagctgtaacttgggtagcttaaacattgccaaagcaatggaaagcggaccggagttctcggagttggttaaactagcgatcgaatcacttgatttagtttcaagggtaagcaatttagaaacggctccatcgatccaaaagggtaattccgaaaatcatgctttgggattaggggcaatgaacttgcacggttttttagcaactaaccaaatttattacaactcccctgaagcaatcgactttactaacatctttttctatacggtagcttaccatgcctttaaagcatccagtgagctagctttagagaagggtaagtttaaaaactttgaaaacaccaagtttgctgatgggagctactttgataaatatatcaaagtagaaccagacttttgaacacccaaaaccgagcgcgttaaggcgttgtttcaaaagtaccaagtggaaataccaacacgtgaaaactgaaaggagttagcactcaacattcagaaaaacggtttggccaattcccacttactggcaattgctccaacgggttcaatttcctatctctcctcctgtactccttcactccaaccggtagtatccccggtagaagtgcgcaaggaaggtcggttgggacggatttatgtaccggcttaccaactcaataaagacagttaccctttttataaagatggtgcttacgaactgggtcccgaaccaattattaacatagcagcagcggcacaacaacacgtcgatcaagcgatttcgctcaccctatttatgactgataaggctaccactcgtgacctcaataaagcttatatttatgcttttaaaaagggttgttcttccatttactatgtccgagtgcgccaggaagtactagaggacagtgaggatcacaccattcaaatgcagcagtgtgaggcctgtgtgatttaa

SEQ ID NO: 28053 - DNA, 462 bp, Mycoplasma pneumoniae
atgcataaagatatcaaaatagtcgacgctagtgcgatcgttaaaccaactggaacaccgtatgtagtgtatttttcctccatttctaataacacccaccgttttattgaaaaattggagtttgaacacacccgcattccggttaatttagatgaacagattgaagtaaaccaggagtatgtgctcttttgccccacttacagtggtggtggggaatacacatcgggggcggtacccaaacaggtaatccactttttaaacaacaagcacaaccgtgatttgtgtcgtggcgtaatttcgtccgggaacactaatttcggcaatacttttgccattgccgggccgattttgtcgaaaaagttaaacgtaccacttttataccagtttgaacttttaggcacgaaaaacgatgtagaacaagttcaaaccattattaccaatttctttggtaaagccaaataa

SEQ ID NO: 28054 - DNA, 1020 bp, Mycoplasma pneumoniae
atggctaacacaaaaaaatactttttagaatcagtttctcccttagaatatgcacaaaaaaagtttcagggcaacttgcgctcggttaactgaaacctagtggatgatgagaaggatctggaagtgtgaaaccggatcacgcaaaacttctggttaccagaaaagattccggtatccaatgacattccatcatgaaagcagctgtctaaggaatggcaggatttaattaccaaaacctttacggggttaacattacttgacaccatccaagctaccattggtgacattaagcaaattgactatgctttaacagatcacgagcaggtaatttacgccaactttgcctttatggtgggggtacacgcgcgctcttatggcaccatcttttccactctgtgtacttcagaacaaattactgaagcacatgaatgggtggtgaaaaccgaaagcttgcaaaagcgcgctaaggctttaattccctattacaccgggaaagacccattaaagtctaaggtagcagccgctttaatgcccgggttcttactgtatggtgggttttatttaccgttttacctctcctcgcgtaaacagctacccaacacttcggacattattcgcttaattttgcgcgataaggtaatccataactattacagtgggtataagttccagcgtaaagtggaaaagatgtccaaggaaaaacaggctgagatgaaacggtttgtctttgatttaatgtacgaactgattgagttggaaaaggcatacctcaaggaactgtatgaagggtttgggattgtagaagatgccattaaattcagtatttataacgctggtaagtttttgcaaaacttagggtatgactcaccgtttacagaagaagaaacgcggattaaaccagaaatttttgcccaattgtcagccagagccgatgaaaaccacgatttcttttctggtaatggttcgtcatatgtgatgggaattagtgaagagaccgaagataaggattgagacttttaa

SEQ ID NO: 28055 - DNA, 483 bp, Mycoplasma pneumoniae
atggtaaaagcaatttgagcaatggatcaaaatgggttaattggtaacggtaacagtttgccctgaaggattaaagcggagttacagcactttcgccagaccacgttgcaccaagatgtattaatgggctcggctacctatctttccttaccgccggtgtttagtgagcgtaacgtttatatcctcacccgtaacctcaactttaacccgcctgataagggctgtttgactaaagtaatccatgaatatgaaaactttatccaaccttatttgcaccatcccgataaacacctctacatctgtggtggggcacaagtttatgaacagctcattccccggtgtgatgcgttaattgtctctaccattttcggtaaatacaccggggacaaatacctcaaagtggattttagtccctttgaattgaccaaagagatcagttttgctgagtttaaggtcgcttactatcacaaaattgcacgataa

SEQ ID NO: 28056 - DNA, 987 bp, Mycoplasma pneumoniae
atgagctttaaaataaccgttttaagttattgcaaaaactcttttaaaaaagttattcgcttattttgcaagcttaaaaaaagatttttatacaatgctacaccatcgaagtttaggagagttatgcagcagtatctagatttagcccgttatgttttagagcacggaaaataccgtccaaatcgcactgatactgctggcattggtgtctttggttaccagatgcactttgatatttcaaaacactttccgctcttgactacgaagaaggtgcactgaaagtcgattgtgcacgaacttttgtggttcattaagggtgacaccaatattaagtacctagtcgacaataaggtcaacatttggaatgaatgaccttacgaaagctttaaaaagtcacctcactttaacggtgagagtcaaaaggagttcattgaacggattcgacaagacgcgaagtttgcccaacagtttggtaacctcggacccgtttatggaaagcaatggcgtgactttaacggagtcgatcaattgaaaaaggtaattgcgcaaattaaggtaaatccgttttcgcggcgcttaattgtgtctagttgaaatcccaatgaggtggatcaaatgttgctcccgccttgtcattcactgtaccagttttacgtacaggacgggcagttgagctgccagttgtaccagcgcagtggtgatatttttctaggtatccccttcaacattgcgtcctactctcttctggtgtacttagttgctaaggaaactaacctaaaaccagggagctttgtccacaccattggcgatgcccacatttacgaaaatcacttggaacaaattaagttgcaattaacacgtcaacccaaaccattgcccaaggtagttttaaagagtgataaatcaatttttgattatcaattcgatgatattgaactggtggattacgaccaccaccctacaattaaaggagaggtagcagtttaa

SEQ ID NO: 28057 - DNA, 1512 bp, Mycoplasma pneumoniae
atgtcacaccaagagcagttacataaacctaaccggcaacagtttagcgaaaagcaatttattgcttttgcttttaactatgttgctgggttcggctttatttccgtggtgctaaccatgtttaagcttggcccgttttcttacttgatcctagggctagcagctttaggtattttgggggtaatgttgtccttttcgcgcctttcaattatttgtggtagcaaggcttacggtggtagttatttaatagccaaaaaagcacttggtgtgaaaacaatcacggcgcgtttctttacttttttgagtggttgaaatgtttccttaaccggtccttttaatgggttaattgtgccagcggtgctagttctctcgtttgctgatattaaagcagtgaaggataacaatggtgctttaattggcttactggtcgggggctttgttttatttggggcattaaacttcatctccctgtttggccttaaaatgaataagaacgccattctcttctttgccatagtgaagtgagtagttgttctgggcggtttaattttgggaatctacctcatcggtacgaaccacggccatggttttgtcgaaaacaacactttaggtgaacacattgaagatctcagtttccttaaagttatttctactactgtggggatgttggtggcctttgctggtaccgaagatcttactgcgattaccccggatgtgaagtcaaaaaacatccgtaagtgtttcttattgatgtttggtgcagttaccctgctttatctaatcggttttgtcattattagtgggatttctggtttaaatggttatggccttgatggtaaagaaaagaatgaaaaagcgattaacacctttggttcgatttactttcaagcaggcggtaagtatttaggcatcccactgttggtcatctttggtctgggttttttactcaattccttggcatcacgattaggcatgaccattacgacagcgcgcaaatacgttgcgttagcccaagatggtttcttgccgtcctttattaacgaacaaaacaagcaccacgagtaccataaggcagtgtgagctagcaacattatgaccttagcagtgatggtgctgatgatcattgtcccctttttacctaatgatgaaaaccccggtaaacagctcgttatgttcgatgccattagtgttttagttgaagtggcgattgaactagcagtgttaatttccttaatccagtactttattacctacatcttcttctttatgattctggccaaaaaagagggtagtgccagtgtttcgtgatgggaaattgccagttatggcgtaagctttgccattattacggttttgttgtttgttaacctctttcctataacggcttgaaagaacaccaacacctttaagctaagtatcctagcggccttctttgccttgggtattggcttctttatccactcggaaataaaacacaaaggacaattagtcaagtcagtcgagtgtaattaa

SEQ ID NO: 28058 - DNA, 1143 bp, Mycoplasma pneumoniae
atggattgaatacaaacagcaggtgctggtactcaactaccagagaacaacattaagatagccgtttttggaattggtggtgctggtaacaacattattgatgacatgttgcgcatgcaccccgaattgcaaacggctaacgtccagttctttgctttaaacactgatttacagcacttaaaaacaaagcgctatgtccaaaataaggctgtgattcagtttgaagaatccaagggcttaggtgttggtggtgatccccaaaaaggtgccgttttagcacaccattttttagagcaatttcacaaacttagtgacagctttgatttctgtattttagtcgctggttttggtaaggggactggtactggtgctaccccggtttttagtaaatttcttagcaacaaaggggtgttaaatctctcgattgtcagttaccccgcaatgtgtgaagggttaaaggcacgcgaaaaagcagctaaaggtttagaacgcttaaaccaagcgactgacagttttatgctgttccgcaatgatcgctgtactgatggcatttaccaactagcaaacgttgccattgtcaaaacaattaaaaacattattgaactaattaatctaccactacagcaaaacattgattttgaagacattcgttctttctttaaaaaaccagcacaacgtttagagaatgaagctaacttgtttcgcgtaactaatacttttacttttagctttgacgcgcacaatacaattgagcactttagccacaaattgaaaaactttgagtatgaaggtttttttgaccataaggtagaaggggcgcaaaaggtaattttaaaggtgttagtcaaccaaggtttatatccgcttgatttaacccaaattcaagagattatttgagccaaaattgacaatcataacctagaggtacaacttggagttgactttactgatgccaacccttcagtgcaactgtttttcttaatggagaaaaagcaagcagtgtcctctgactttattcaaaaaccagcatttatctcagttaaagaagtaaatcagaaaccggccaaaccgttccaagttttgaatgatttaaaggagctgggactgaaatacgtcaaacagcaaaccggatttaattattag

SEQ ID NO: 28059 - DNA, 927 bp, Mycoplasma pneumoniae
atgttaagtaatcaaccccacaaaagtgtcttacttgatgaagtcatccacaacctcaacattaaaggtgatggtaactatttagatcttactgttggttttggcggtcatagtcagcacattttagagcagcttaccactggcactttaactggcaatgacatggataaggacagcattaccttttgtaccgagctgttcaaagacaaaaagaacgttgttttagtccatgataacttcgctaacttttttaaccacttaaagcagctcaaagtaacgaagtttgacggcatcttaattgatttaggggtttcgagctaccagctagataaaccagaacgcggttttagttttaaacacgccggtccatttgacatgcgcatgcaccaaagcgatcgcgtaccaactgctttagatatcttggagaggttgtctgaggaagaattgacacatgttttaaagaagtttggtgaaatagcccaccccaaaccaatcgccaaggccttaaaaacactcattaataacactaaaaatccaactacggtagaggtagcggaaacagttaaggcagctgctagcaactttgaaaagtacaaatcacgcaattacttagctaaagttttccaagccattcgcatttacctcaaccgtgaactggaaagtttggaaattgtgctgcaacacattcccaagctgttgaacaataagggtcgttttctagtgattgtcttccattcactcgaggaaaaattggtgcggaactacatttttaaacttactcactttgtccaaccccctgaactacccgttaaattaaccccaccgtttgaactcattactaaaaaacccattttgccaactgaacaagaaattaaaacgaacccccgtgttcgaagtgccaaactgtttgtcattgaaaagaaataa

SEQ ID NO: 28060 - DNA, 426 bp, Mycoplasma pneumoniae
atgcttttaggaaccttcaacattacccttgatgcaaaaaacaggatcagtctgccagcgaagctgcgggctttctttgaaggtagcattgttatcaaccgtggctttgaaaactgcttggaagtgcgtaaaccacaagacttccaaaagtactttgagcagttcaacagctttccctccacccaaaaagacactagaacactcaagcgcttaatttttgccaacgctaactttgtggatgtagatacagcgggacgggttttaattcccaacaatctgattaacgatgccaagctagacaaggaaattgttttaattggccagtttgaccacttagagatttgggacaagaagctgtatgaggactacctagccaactctgagtcgttggaaacggtagcggaaaggatgaaagatgttaagtaa

SEQ ID NO: 28061 - DNA, 5457 bp, Mycoplasma pneumoniae
atgaatgatactgacaagaagttccccttgcaaccagtttatgacactgggtttgatgatgggtatttacagcgtgattatgaaaagtgtttagaaagtgctgctgctaatgatgcacaaacagtggaactacaaacccagctgttagcagagattaaaaaccttgaaaacgaaatcaaggccctaaaggcgcaggaatcacgccaacccgatccgcacaacaatgcccggattcaaagcttagaagctagcttaaaccgtttggtcaatgagtacaacaactttgaattccaaaagaactatatggttgatcgggtagcagagttaaataacaaagcgcgtttttttaaggacgaattaaagcgtctccaacaagaaaacgccgcttttgttaattcccgttatgccaattgagctgactttcaatccaactatcagctcaaattagaccagtttcaagcgttaattgaccagcaaaaccaaacaattaagcagctcaacgaacagattgcagctaaccagggcttaattgatcaaaacgtacagcgcttacagcaaaaccacagtttagaccaacaagaacgtgacgccttactgtatgaggttgaccatttatacaacgaactgtacgaacttgaaaaccaaaaacgcttagtgggcatcgagtatgaagccacataccaggacttggtgagtgcggatgcggagttgcaaaacgtttatgaaacaattgcccaaaaccaggccaacttccaaaagcagtgtgatgcttattgagcacagctcaagcaagtagaacagcaaattcaaacgacaaagcaagaattggttgatgaagaatcgacacttaaggtgcgtttaaatgacgctgatttttacattaactcacgcttagcagaattagatgatttaactagcaagattaacgaacgtgattttgtttctaaagaacaagctcaagacgttaaagctagtttagctaacctcactaaggaaaaagaacgtttgagcgctgagaaggatagctttgaaaggttaaggaacaccgctttaaacgacattaaccgaatggagcaggaaaacgcgttgtttgctaaacacttagaacagcaacaatacgagtttgaaagaaagcaacaggaaagcttattaaagctagaaacagagcataaacagctccaaaaacgaattggtgagttcaaaatcgagagtgaagctaaaagtgaagcgttactgatacaagaacgtgaactgttggaaaaacgccgggaaattgatgatttgttaacccaagccagcttggagtatgaacaacaacgccggacgaatcaggtcttaaaggaaaagcaccgtcaagtccaacaacacttccaaaacctcgtgcatgctaaaaagaaattggatcaaaagcgccattatttagcggaacaaaagcggattgatgaagaacagatttttaagttaaaggaaaagattgccactgaacgccgcgaattggagaagctttatctagttaaaaaacaaaagcaagaccaaaaggaaaacgatttactgatttttgaaaaacagttaaggcagtaccaagctgactttgaaaacgaaatagaagagaagcaaaacgagctgtttgcatcccaaaaatcactccaaaaatcgtttacacaactcaaaaataaggaagcggaattaaaccaaaaggcacaaaagattgcagaggattgagcacatctcaaacaaaacaaacaccaccacgctgatctagaaatctttctggagggtgaatttaaccacttacaacaagaaaagcacaagctgttggaagcacgtacgcagtttgacaaccgtgtcagtttgctctcagcacgctttaaacaaaaacaagcagaattagttaaacaaaaacaaagcttggaacaactcaccgctgcctttaataaagagcaggaagcggtagagcgtgattggaaggatcgcttagctaacttagaaaagcaaaaggaaatgctgggggataaggtacaccagtttgatgaaaattcgctcaatatttccaaaaagctagcggagcgggagctagcgattaaatttaaagaaaaggagctggaggctgcacaaaaacagctaagtttagacaacaacaataacgctgggttaaagttgcagttagataaattgagcgaatcactcaaaacggaacgcctggaattagaagcatctaaagaacgtattttggatttttacgatgaatcatcacgccgaattgcagattatgaaagcgatttacaagcacgcttagctgaggttaagacactagaaaaaaaccagcaggaaacagcggctaaaagtgagcgcgaactcaaagtagccttagaaaagttaaaccaagcaaaaaaggcttttttacaaattcgcaaacagcaattgctcgaaattgcttctgtaaaacaacaactagcacaaaaagctaatttgttgaaaaaccaacaagcagagctagataagcaaacagaagagttagaagcagcttttttagagcaagatacggacaaaaaggagttggaaaaagcactccacagcgttaagtccaagcaagaattattagagcgcgaacgcagttttttactgcaaaaacaacgtgaatttgccgaacatgtagccggctttaagcgccaagtgcactttaaaacaacgcaaatgcagcgtttaagtgagttcaacaaacaacaacaaagtgaacagataaagcgcgaaacggagctcaaaattgcttttgctgatctaaaaaaggattaccagctgtttgaattgcaaaaaaaccaggagttccagcaaatcgaacaaaagcacaaagaactagaactattagcacaaaaacaggccgaactcaaacaggagttagagcaaaaagcaacagctttagctagccaagatcaagacacagtacaggccaagctagatttagcgcgtcaacagcatgaattggaattgaggcaaaatgcctttaaccaagctagtctttcgctcaacaaacaacgcgaacagctcacaaaccaagtcaaggtattgcacggtgagttgaaaaaacgccatgaaaagctaactttaaaggatcgtttactagctgaaaaggaaaaggatcagcacaaaaaagatgcagaaattaaccaacgctttaagcagtttgaaaatgaatacgctgattttgaccaagccaaaaagcgcgaattgcaagagttaaaccaaatccgtcgaaacttggagcagagcaatgcatcactgctaaagaagcgcaaccaactaacgcttgattttgctttactacgtaaagtgcaacacaatacgcaaactaaccgtgtccaactcaacacgcaaattaaggagtttttactagagaagaagaactttcaaaaggcgagtgatgaagccgctttacaaaaagcactgttaattaaacgcttacgtagttttgcttctaaattacagttgcaacgcgaagctttagcgattcaaaaactggaatttgataagcgtgatgaacaacaaaagagtgagattaacaacgctaagttacagttagagcagttcaaactagaaaagcagaactttgatgaagcgaaacaaaagcagttaattgagtttaaggatcagtgccaacgacttgatgttgaaaaacgtctgttaaagcaaaagttagtgcagctcaaaaacctatctaagagctatcttacttacaaaaaccgtgctgatctgtcccaacaacagctgcaacacaagtatgctaacttactggagttgaaggaaaagctgcaaaccgctaagcgtgccttggacaaaaaacaccgtgccatttatggcaaaatggcacagtttgtcagtgagctccgccaagaaaagaagcagcttttaagtgcgcaaaaacaagttgatgacaagtcacgtttactggaacaaaaccaacgccatttacaaaacctttccagtgaaaccaaaaagaaacgccagtctttagagcatgacattaataagtttgatcaaagacgcaaggaagcggtttcttccattttaaactcgcacaaaaaactcaagcaaaaagagggagaattgcaaggcattttgcaaaagcttagcttgaaaaaaacacaaattgaacaagagttttccaagctttatcagcaacgcgaaaagttagatcgccaacgcactacgctctctaaactccacagagagctaaaagcccaaaatgaagctacggcacacaaaaatcgtgaagttttagagattgagaactattacaagaaggagttgcaacgactcaccacggaaaagagtgagtttgataacaacaaaaatcgcttgtttgaatacttccgtaaaattcgcaatgaaattgaaaagaaggaagcacacattaaaaccgttttagaagaaacacaaaaaaagcgtcacctagtcgaaacggaagcggtcaaactacatttacaaaagcaatctatcatttctaagggtcaagaacttaaagaaatcaaggaacgggttagccgtgacattagccacaccaacaaacaacgcgaagagttaaacagcttattgcaccaaaacaaactgttgcaaaagaatttggctgagcgtgaacgtgaaattaataataaggattcactgttaacccaaaagattcaaacagctaaacaaaagttaagcgaaaaagaagcacgcatcttaaagctgttggaaaaaatgcgtgcggtagaacagcaataccaagcggaaattacccgtttaaagacacgtaatgctgatttggagaagaatgacaataagcacttatttccaccgttatttaaaattaacggtaatgatatgaactatccttacccatatccttgattttatccgcaacaaaaacaagaagatagttcaaaccaaattcgccatctttttgaacaacagttgcaatttatgcaacagcgttacgaaaacgaattaactgagttgcgtcgccaacgtgctttattggaaaaaaaactagaccaaattcaactcgaatcacagttaagcgcgaagaagaacgactttgaaaaggttgagcaaatgatgcaaaagttgttggaaaaaactgagcaaaaactcagtgcctttgaccaaaaaattaatgctttggcagaacagattaacacacaaaaagcagagcacgctgacagtgaaaagcaacagttgttactaaggattgaacagttagaaaagcaaaacctagctcaagctgttcaaacaccccaaccagtacaaccagtggtacaagcaccagctgtagtaccccaagtgatccaaccacaggtagtgcagtcccaaccagcttttttagcaacgcagcaaagtatttctaaacagcaacaaatcgcgcaattaaacgctgagatcaatagtattaaaaagctaattgcccaaaaagcagctaaataa

SEQ ID NO: 28062 - DNA, 1698 bp, Mycoplasma pneumoniae
atgaaacaacaaaaacccaaaattagctttatagcagcgatgctaattgttatcggctcgtccataggtgctggtatcttttttaaatccagcactgttttggaaaattcccaggcctctttagtgctagcgatttttaactggttggtagcttcagtggcagtgattgctatggccttggcattaattgaaattgccagtgttcgcaacgataatctctcgattattagctgggtcaaagtgtttaaccggcgctggttgtaccatggttgtaagaattttatgacctatttgtacctaccgttgaccttcttctttatgccgctgtactttatctgttccattcaagatgggtttcgcggtttgttgggactggaaaccggagcgcatttcaatactagtgtggactggttaatctggttagctttagcacttattattaccacttacttcttgacaattccaccactgtacgctaaggtagggaacatccaaaacatggtggtaagcgccgtgaagtttattcctttagtgtttgtgcctatcatcggttttattgtagcgggtacaggtaacggtgaattaaaaaacgttaaggcattagtgcaacccccacaaattaatggtgcgactgcttcctttacccaattagtacaagcggggtatggaattactcgttttacgggaattggtgctgggatgggttcctttatttcgattgccgccattttctttgcgtacgatggtttttacgtaacagctggactgcagtcagagatgcgtgaaccgaaaaaaacaccgtgagctttgtttttaggtttactaattactacgctgttttaccttatcttagcagtggcactttccattaacggtggtttgtttagtggtatggaagagtccatgggaaagctgtttaacaataagcgtgccgggcaaattgtctttggtgttgttaacctaatgattggcataggtgtcttgggtattattaacggttttgcactgtgagcaccacggtttgtggaagacttattagcccaaggtgatttacctttttgaaagcaagtgcagggcagattgaaccccaacaagccagtggtgggggtaatttactgtttggtactttctttgactgttcaagtgctgtttacggtaataggtgctttggcttacctcccgacagtagcggattacaaaaattacgttaacactgaaattgacaagctcaattcgatgcaatggttgtattcgttttccgatttaatggctacttgaacttcgctgtttaccttcgcctttattgcctgtgccatctttggtgccattgttaatcgcaaaaccaagaagattacgattgccaatccaaagcgttattttctcccagcggcttggattgccgtagtggttaactgcattagtgtttttgtaactatcattgagcccttcattaacctctttttactgtttggttatgatgaaacagtggcacacacagtgctgggtaatgacttcattgaattgaatgaattagtgataggacgggtaatgctgatagtagtgttagttttctttgccataattagctttctccctgtttatgtggaggatcaataccacaaacgtaagtttggtagtttagctaactatcagcaatatgtacaacaacatttagcacactccaccattaacggttaa

SEQ ID NO: 28063 - DNA, 930 bp, Mycoplasma pneumoniae
atgcaaaaaattgtcatagcattgggtggtaatgcattaggtaacaatcccaccgaacaaaaggacttggtacaactaccagcacgacaggcggttgctttattaaagcagggttatcagatattattgggtcatggtaacggtccacaggttggcatgatctacaacgcctttagtgcggccaaacaagtcaaccctaatacacccactgtaccatttgctgaaagtggggcaatgtctcagggttacattggactgcatttgttaacagcattgtacaatgagctgctacaccaaaaactaccccatcaagccgtgtactttttaacacaaaccttagtagaagcgagcgatcctgcttttcaaaacccaaataaaccagttggtccgttttacaacacagaggaaacagcacgctcagctaatccaaacagcaccgtggtggaagatgcagggcggggttggcgtaaagtagtagcgtcccccaaaccagttgatgttttgggaattgatgccattaaaagtagctttaaccaaggcaacttggtgattgttggtggcggtggcggtgtacccacaattaagaccaaaagtggttatgcaacggttgatggggtgattgataaggatctagcattgagtgaaattgccattaaggtagaggctgacctgtttgttattctcactgccgtggactttgtctacattaactatggtcaaccaaacgagcaaaagctaacctgcattaacaccaaggaagctaagaccttaatggccgcaaaccagtttgctaaaggtagtatgctccctaaggtagaagcgtgtttaaactttgtccagtcgggtaccaataagacggccattattgcccaattagaccaattagctgcggccattgcgggcaagattggtactaaaattgtcaagtag

SEQ ID NO: 28064 - DNA, 822 bp, Mycoplasma pneumoniae
atgggttgcacttacatcggcccttctggttccaattttggtaagaaggaatcgattgaagacactgctaaagtgttgggttcaatgtatgacggaattgaattccgtggctttaagcaaagcgatgttgatgctttggtcaagtactctggtgttcctgtttgaaacggtttgactgatgcggaacaccctacccaaatgctagcggattacatgacgattaaggagttgaagggtgatttgaaggggcgcaaaattgtctttgctggtgatattaaaaataatgtggcacgctcgttgatgattggggcagcttttgttggtatggacatagtgctagtaggtcctaaagcacagcatgaattagttcaaaatggtgctgggtataaagaggtctttgagcagtgtcaagcattgtttcaactcaatggtggtagtgttagctttagcactgataagctgcaagcggctaagaatgctgatgtaatttacaccgatgtgtgactgtcgttgggtgaagactttagcttatttgaagaacggattcaggagctgggtcaatttcaagttgacatggctatgatcaaagcagctaagagtgatgtgatcttcttgcactgtctccccgctttccatgatgatcacactagcttttcactggaaattaaacaaaagttaggtaaaaaatatccggtggtgaaaacgggtgcgatggaagtgactgatacggtgtttcagtccaagcataacatggcctttatccaagcagaaaaccgcttgcacacgattaaggccgttattttagctactttagggtattaa

SEQ ID NO: 28065 - DNA, 1527 bp, Mycoplasma pneumoniae
atgattcaccacctaaaacgcactaagattattgccacctgtggtccggctttaactaaaaagctatgaacgctagcaatgttagatgacccagcttacgctgcgatgaaagcagaagcttacgccaacattgaaaatattattaaaaacggcgtaacggtaatccgcttaaacttctcccatggtaaccatgaagagcaggctgtaaggattaagattgttcgtgatgtggctaaaaagctcaacctcccggtgtcaattatgttagacaccaacggtccggaaatccgcgtctttgaaacggcccctgaagggttaaagatcctcaaggacagtgaggtggttattaacaccaccactaaggaagtggctaaaaataaccagtttagtgtgagtgatgctagtggcacttacaacatggtaaacgatgttaaggtgggacaaaaaatcctcgttgatgatggtaagttaagcttagtcgtaaagcggattgatacgaagaacaaccaggttatttgtgttgcccaaaatgaccacactatctttaccaaaaagcgcttaaacctccccaatgccgactactcaattccctttttaagtgctaaagacctacgcgacattgactttggtttaacccaccaaattgactacattgccgcttcctttgtcaatacaacggaaaacatcaagcaactgcgtgactacctcgcttctaagaatgccaagcatgtcaagcttattgccaaaattgagtccaaccacgctttaaacaacattgatgggattattaaagcgagtgatggcattatggtagcacggggtgatttgggcttggagatcccatattacaaggtgccttactgacaacggtacatgataaaagcgtgtcgtttctttaacaagcgtgttattaccgcaactcaaatgttggactctttggaaaaaaacatccaaccaactcgcgctgaagttactgatgtgtactttgccgtggaccgcggcaatgatgccaccatgttaagtggagaaaccgcaaatggggcgtttccccttaatgctgtgtatgtaatgaagatgattgataaacagtccgaaacgttctttgattaccagtacaacttgaactattacatggccaactccaaggcccgtcacagtgagttttgaaagcaggtggtgttaccgttagcacaaaaaacagcaccaaaacgcaaactgattaacagtgactttaaatacgactttgtggtgcacgccaccaacaaccttaatgaaatctatgccttgtccaacgctcgcttagcggctgcggtaattatcttgaccaatgacccccaagtatacaccgggcacggcgttgattatggcatcttcccttacttaattgaccaaaagccgcaaagcttaagtaaagctgagtttaagagcttagctaatgttgccattaaacactaccagcagcatggggaaattagtcaattaaagcagtgtttgggagtatttcacaataagatcattagcttataa

SEQ ID NO: 28066 - DNA, 987 bp, Mycoplasma pneumoniae
atgagtccaaaaacaaccaaaaaaattgccattttaacctctggtggtgatgctccagggatgaatgccacactagtttacctaacgcgttatgccactagttctgaaattgaagttttctttgtgaaaaacggttattatgggctgtaccatgatgagttagtacccgctcatcaattagatttgtcaaacagcttgtttagtgctggcaccgtgattggtagtaagcgctttgtcgaatttaaggagttaaaggtccgcgagcaagcagcacagaatcttaaaaagcgccaaatcgattacctagtggttattggtggtgatggtagttacatgggcgctaaattgctaagcgagttgggcgttaactgttactgtttgccgggtacgattgacaacgacataaattcgagtgagtttacaattggttttctcacggctttggagtcgattaaggtcaatgtccaggccgtgtaccacactacgaaatcacatgaacgggtcgccattgtggaggtgatgggtcgccattgtggtgatttagccatttttggtgccttagccaccaatgctgactttgtggtgactcctagcaataaaatggatttaaagcagctagaaagtgctgtcaaaaagatcttgcaacaccaaaaccactgtgtggtgattgttagtgaaaacatctatggctttgatggttatccctcacttacagcgatcaaacagcactttgatgctaacaacatgaagtgtaacctggtgtccttgggtcacacgcaacgcggatttgcccctaccagcctcgagttagtccaaattagtttaatggcgcaacacacgattaacttaattggacaaaacaaggttaaccaggtcattggtaataaggccaatgtgcccgttaactatgactttgatcaagcctttaacatgccaccggttgatcgcagcgctttaattgcagtcattaataaaaatattatttaa

SEQ ID NO: 28067 - DNA, 801 bp, Mycoplasma pneumoniae
atgaaaaaattaacacaagcttttttgcgtttttgtctgagattcttacaactgctcagtttagttttggttttacccgtttttgtgttaatgctcatctctagcctaattagtgctaaaaattatgaaagcatcccggaaaactatcccccagaaatccgctttaagaaggtgtaccgcttggtatcacttttcctctacattaaaggagttaaagtggttattgttaaccctgaaaatgtgcctaaaaaggctgttttagtggtagctaatcataagtccaatttagatcccctcatcctcattaaggcctttggtaaaactgaaggggtaccaccgttaacctttattgccaagattgaactgcaagatacctgactgttcaagattatgaagctgattgactgtgtctttattgatcgaaaaaacctgcgtcaaatggcagcatccttggaacaacagcagcaaattatccgccagggcactgctctgtgtgtttttcctgagggtacacgggtactctctaggcaaattggtgagtttaaatcgggcgctttaaaggtcgcttacaacgcctttgtgccgattgtgccactaacgattgtgggtagcatgggacacatggagtccaaaaagcgtttacaaaaagcccaggtagagcgcgatcgtggttataaaatccaggtcatctttaacacacctattaacccaattaactttaaccagattgattcgcaaaatgtggctaataatgtctggcgtgaaattagtcaaacttatgcgcaatattgccaagactag

SEQ ID NO: 28068 - DNA, 360 bp, Mycoplasma pneumoniae
atgattctaggcatagggattgatttagtcgaaatcaaacgctttgaacaattagctagacaaactgataactgttttgcgaaacgcttgttgacttcaacggagtacgcgcactatgcgaagctgcgtaaagatagtgaaaagtcgagttttttagcagtccactggtcattaaaggaagcgatttataaggctgttaaccacatcaagccattgtttagccaactggaaattacaaagaaaaaccaacgttataactgccagattgaccctaagattgaacttttgctctcggttagttacagcagtaataacattactgccatctgtttggcacaacaaacaccatgaaaaaattaa

SEQ ID NO: 28069 - DNA, 1134 bp, Mycoplasma pneumoniae
atgaaatttaagtatggaacggttgttttgggcagttttttagggctttctgtggtgttagctgcctgtggtgctcgtggtaaatttgaccaatttgatgatggcaaaattaagctagcatcatccttaacttccaaagcagctgccaatgctttacaaacaataatagagaagtacaacattgtcaaaagcggcaaggattaccccattgaaattacccaaattgctggtggttatgacggcgggcggactgatctccaaacccgagttagtgttaaggataaaacgaacttttataaccttattttgaactatccagatttagtttctgtgttagcgcgcagtggaatggaactgctttttgacaaagttaatgttgataaattagagccgaacttcttaaagtttaatgaacagattagtggagtcgctaaaagtggtaactatggtattcccgtgtccctttcaactgacattttggtcttaaatggtccggtgttgcactatattttgaacagtgcgaagaaagaagaggctaattctcaagttaaaagtcaaataaaaacatcacaaattcaagctaaaggttcattaacaattgatacagatgaaaataccaaatcactttgagagaaaattcaaaattcagccaaagctaatggtgaaactaatcaaaaaggacgaaaagctgcaaaatcaaataaaactgcattagttcaacttaaaaatggcgctgatactaccactaacgaagagaataaagataccaaaactagtgatgataaagttaaacaaacttgaggtgattatgtagaaaaggatgatggtcttaaaaactatacctttagggctagcgtgtttgaaaactggcatgatttcctcgatttttcgacaagggtagctaaatcttttactgaaaaggtaagcaacattaccaataaaaagggcactgatattcagggagtgcttggtgtcgacagttctcctaatgttttatttgcctctgtatttgctgcaggtggtggtaattatgaaaacttcttttataagttgaaagatggtcgggctgattttagtaactttaagaacaagggtagttcttaccaaaacctccaaagcgtttttaaagactaa

SEQ ID NO: 28070 - DNA, 1710 bp, Mycoplasma pneumoniae
atgattaaggattttgatcctagtgagtttgtcggtaaaactcctaccaagatttttgcctttggtggtatccaagaagttggaaaaaacatgtatggaatcgagtacgatgatgagattatcatcatcgactgcggtattaagtttgctagtgatgatctactagggattgatggtattatcccgagcttcgaatacctcattgaaaaccaagctaaggttaaagcactgtttatcacccacggccatgaagaccacattggtggggtgccttacttgttaaaacaagtcgatgtaccggtgatttacgcaccccggattgccgcttctttgatcttaaagaaggtcaacgaacacaaggatgctaagctcaataaagtggtcgtatatgatgactttagcaactttgaaaccaagcacttcaagattgacttttaccgcgtcaaccactcgattcctgacgcctttggtgtctgtgttcaaactcccaacggtaacattgttgagagtggtgactttcgctttgactttgccgctggcggggaaatgctcgatgtgcataaggtcgtgaagattgccgagcgcaatgtccatgtctttatgtgtgagactactaacgccgaaatcccggggttctcccagagcgaaaagttaatttaccgcaacatcaacaagattattaaagaagcacgtggtcgggtcattctcactacctttgcttccaacattacccggattaacgaaattattgagattgctgttaacaataaacggaaggtctgcttgttgggtaagtcgatggatgtgaacgtcaacatctcgcgtaagattggcttaatggacattgacagcaatgacattgtggaagtccgtgacattaagaattaccccgaccgcagtatcttaatcttgtgtacgggttcccaaggtgaagactcagcagccttaaacacaatggcacggggtaaacataactgggttagcttaaagtccactgacaccattattatgtcctccaacccgattccggggaactatgcagcggtggaaaatctcttgaatgagctttcgaagtacggggtgaccatctttgaaaactcaccgaacatgaagctacacgcctctggtcacgctacccagcaagagttgcagttaatgttaaacctcgtgtttccaaggtacttaattccgattcacggggagtacaagatgatgcgcaccatcaaaaacatagcgcaagaatgtggcattaacggtgatgatgttggtttgctagctaacggtcaggtgatgtacctaattgatggcaagctgtattactcaggggaagtgattaatgctgacccgatttacattgaaagccgcaattcttctccagacttagcgcgggtaattaaacaacgccaaatcttgagtcgggagggaatgtttgctgtgattgtagtctttgacaaaaacaataacattttagggatgcctactctgattactcggggttgtttctttgctctagattccagtccgttaatgactaagattacccactcaattaaacgcggtttggaaaacgttattcaaaacaagcgttttaatacccgtgaacagatgatcaaggaattgaaacgagtatgtaaggaaacggtgtcttacttcatttggaagaacaagagtcgtaacccgttgatttcaaccgtattgtcttgagtttaa

SEQ ID NO: 28071 - DNA, 1200 bp, Mycoplasma pneumoniae
gtgacgttgttttctttccccaactacgtgaattgaaataagtttgatttcattgttttaggtgctggcattagtggcatagttttatcacatgttttagcacagcatggtaaaagtgttttactgttagaaaaacgcaaccaattaggtggtaattgttatgacaagttggatgaaaccaccgggttactgttccaccagtacggtcctcatatctttcatactgataatcagaaagtaatggattttatccaacccttttttgaactaaacaattaccagcaccgtgttggcttacaactggacaacaatttggatttaacgcttccatttgactttagccaaatgcgcaagttgttggatacaaaaacagctagcagtttaattaacttctttcaacagcactttccagctgaaaagcacttaacactgatgcagttacaaacaattaactttgctccagtccaacagctgtaccagtttttaaaaataaaggtgtacggtccttacagtgtgaaaatgtggggcatgccattagaacaaattgatcctagtgtattgggtcgagtcaaaattagtttaagtgaaaacagtagctatttccctacagccactattcaaggtctacctaagggtggttatacaaaggcctttacaaagatggtggatcatcctctgattgatttaaggttaaactgtccagctaacttaattagcgtaaacaataatcaactcttgtttgcaaatcaaccaattaccaaaccagtggtttattgtggtttaattgatcagctgtttggctattgttttgggcgattgcagtaccgctcgctccactttgaatgaaagcgttatgctgtaaaacaacaccaagcttaccccgtaatgaactggccactccacccaacaataacgcgccaagtggaatacaaacagttaacgcaagagggtttggagtctaaccaaacgattgtttcgtgtgaaactcctggtgcttttagggaaggcgatccccgctttatggagccgtactacccgctaaatgatgtaagtaataatgccttgtttgcgcgttatttaaagttagctaacgctattcctaacatacatttgttaggtcggttggcactgtaccagtacattgatatggatagagcaattgctcaaagcttagctaaagccgaacaactattacagtaa

SEQ ID NO: 28072 - DNA, 1470 bp, Mycoplasma pneumoniae
atgagcgatcgtttaaatgatcaagcacaaaatcgcttgcaaaaactcctaaacctcaaacaaactggcaacgatccctacctcattactaagatagaaaacacccactcagcggctagttttcaaaaagcatttgccaaccaatctgacgctgagttaaagcagtaccaagtgatcttaaccggtcggattattgcgctccggcagacctttattattatccaagactttagtgggaaaatgcagttgtacattaataaaaaaactgcccccgaactgtttgaatatttcaataattacattgatttgggtgatcaaatagtagccactggccatccaatgatgaccaaaacaggtgttttaacgctgaacgtagagcgattacaaattgtcgctaaatgcttacaaaccccacctgaaaaatgacatgggttgaccgatccagaagcgcgagcacgaaagcgttacttggatttgacctacaaccgtgcgcaggtcgaagtctttttgaaacgcacccagattattacagctatccgtacctttttaaatgaagcgggctttctagaagtggaaacacccattttacaagccgttttagggggtgctaacgccaagccctttaaaacacactataacgccttaaagggtgatttttacttgcggattgcaaatgaaatagcactcaaaaagctcattgtgggcggtttgccgaaagtgtatgaaatggggcggatgtttcgtaacgaaggggtggatactacccataatccggagtttacgagcattgaaatgtatcaggctaacgctgactatgcggtcatgatggatttaaccgaaaacctcattaagtttgtttgcaaaacactcaatcagtgaagttttaactggaacgggcaaacacttgatttagccaaaccgttcaagaaagtcaaaatggtagatttaatctgccaagttactggggttaattttgatgatgttaaggatgatcaaacagccattgcgcttgcaaagcagcacaaagtagagttaaaaaagcacgagcagaacaaacaacacattattaaccgtttctttgaacagttctgtgagcataccttaatacaacccacctttgtcacacactatcccaaggccgtttccccgctagctaaacaagatccccacaaccccgagtttactgagcgctttgaactttttattaatacaaaagagttagcgaacgcttacagtgagttgaatgatcccctagaacaacgtgcgcgctttgaacaacagttgcaggaaaaacgcatgggtaatgatgaagcaagtgaattagatgaatcctttttggatgctttgagttttggtctcccgccaacaggcggccttgggattggggttgatcggttagtgatgttattgtgcgagtgcagttccatccgtgacgttgttttctttccccaactacgtgaattgaaataa

SEQ ID NO: 28073 - DNA, 303 bp, Mycoplasma pneumoniae
atgagttttaaaaagattaccgaaatgatgcgccaagctgaacgacaaagcaagcaaaaagcgcttgatttcgagcaaaaattgtttgagtacagctataagaatgctgccatcaagattatcatttttggtaatctcaccattaagtctatcacaatcgatcccgcattaattgacccagaagacaaggtcactttagaggagatgattacagaagctgtcaatgaggctgtgggtgatgttaaggccaagtacgaccagttaatggaagaggctatgccacagatgcctgggcttttttaa

SEQ ID NO: 28074 - DNA, 1482 bp, Mycoplasma pneumoniae
atgagcgctaagttaacgttagaaagcattgcaaaaacatttgccgaaacatcgatctttgcgatcttgtttttaattattgtcatcctcaatttaggtttacttgtttttttagcgtatcagtaccgtgtttacaaaaagaagcaaagagcaaacctcaccaagcagacttataacaatgactatggccaaattgttaatttaaaacagcaaaacggtgccaagataaaggagcttgctaacttaaaagatcagttaagtgaattaggccaaaaatttaacaccacactgagtgaaatcattaacaaaccacttgtcaatgtgattgatgaatacttggatgaacagtttaaacaagctgctaattttcgtgaagcagaacttaatgccgttttagatagtaatgaccagaaaacagtgttccataagcgtttgttcaataaatttcactttggtgtcgacaagctagctaatattaatgtcaaaaatccgctcaatttatgctgggttgacagcgctagttttaccgtgattgaaagtgatttccgcaaacttaatggtgttggcgggattaataaaaagttgttaattgaaaagttaaggattgaagatattatctttaccaatatcgataagaagtactatgaggtacagatactatctgactcgccagtaaaggtacaaaaaacagtgttaactattcgcaacatcttgattaatgattacgtggacaatgaaaaaattgagtcatatgctagggaagctaacggttacttcaatgaccactgtaaactgattggtaagcaggtgttagaacgactcaatatctttgaaattagccctaaactacacaagttttttggtttattagcgtttcgttattctttcggtcaaaacgttttatcacactgtctggaaactggttttctcaccgcttacctagcgcttttagttaactttaaacctgatgttgcattaaagtgcggtttgtatcatgatattggtaaagcggatgatgaaaacgggaagaagaaccacacggttacaggtgccaagatcggtgatgaattttactttgaaaacgatgtcaaatacacaattgccaaccaccataataaaaatgtcgataacgtatactgtcgtttaactcaaattggcgataagctttcagcagggcgtttgggtgcgcgctctgacagttcggttttatttagccaactcaaacaagaattaaagcaaattgtggaagaaacactagcacaatttaaaacaaccatccttttaggacaaagtggacgccgattagtaatttgattggaaaccaaccagcacaataacattattgacaaccaacagttaactgatttggctactaccattaaaagcaaaatcgtgcaaaacaacattactaatcgctttccaattaaggtagtattacgctataacttcgaacacagctttgatacaaaggacaagaactag

SEQ ID NO: 28075 - DNA, 780 bp, Mycoplasma pneumoniae
atgaagtacaagatttttgcatcaacaacaccacaaaccgagccagttttgcaaaagttaaagcaggtgttgaaaggttgtgaggcagttgaaaagggctttgattatctctttgtattaggtggtgatggtttctttgtttctactgtggccaactataactgccacaattgtagggtagtagggattaacactggtcatctaggtttttacacatcgtttaatgaaaaggatttggatgataatttcctccaaaagctccagcaatgtcactttcaacggattagtttgttggaagttagtgtcaatggccagcagcacttggttttgaatgaactggcagtttacaccaacacagcttacccaattaacatctttattgatggtgaagcgtgggagttttaccgcggttcaggtttattaatcggtccgcgtactggttcgactgcactggctaaatctgctaaaggggcggtgattttccctggcattgatgtgctgcaaattattgaaatgaatccacttttgcaccccaatcaagttactatccaatcaccaattattttgcccaaagaaacgcaagtggaatttgtggtcaaaaaagcctttaacccacaacagtttcccaccttttactgtgacgggagaaagttggaattgccaaacgctgacacaactttagcgcttaaactagtgcaatccacaccgatgtttaacatttcactcaaaacacaggactttatcaataaacttaagtccacttttattaaacaaagctaa

SEQ ID NO: 28076 - DNA, 1041 bp, Mycoplasma pneumoniae
atgatgaaacgcgctcttaccgggattcaagcatcgggcaaacagcatttaggcaactatttgggggtaatgcagtcgttaattgaactccaagagcaatgccaactgtttgtatttgtcgctgatttacactcaattaccgttgattttcaaccccaagcactgaaacaaaataactttgatttggtacgtactttattagcggttggtctagatccacaaaaagcttgtctctttttacaaagcgatcttttggagcacagtatgatgggttatttaatgatggtgcaaagcaatctcggtgaactgcaacggatgacgcagttcaaggccaaaaaagcggaacaaacccgtaacccaaacggcaccttaaacattcccaccggactgttaacttatccagccctaatggcgggagatatcttgctgtaccaacctgacattgtgcccgttggtaatgaccaaaaacaacacctagagcttactcgtgatttagcgcagcgaattcaaaagaagtttaagctcaagctgcgtctaccccagtttgtccaaaacaaagataccaaccgtattatggacttatttgacccaaccaaaaagatgagtaagtcctcaaagaaccaaaacggagtaatttacttggatgacccaaaagaagtagtggttaaaaaaattcgtcaagctaccactgacagctttaacaaaatccgttttgctcccaaaacgcagccaggggtgaccaatatgctcacaattctcaaggcacttttaaaagagcctgtcaatcaatccttaaccaatcagttagggaatgatctagaagcttactttagtactaaatcttatttagatctcaaaaacgcacttacagaagcaaccgttaatctgctagttaacattcagagaaaacgggaacagattagtcgtgaacaggtctttaactgcctccaggcgggtaaaaatcaagcccaagcaacggccagaacaacactagcacttttctatgatggctttggactaggaagccaaaacatcaagtaa

SEQ ID NO: 28077 - DNA, 2136 bp, Mycoplasma pneumoniae
atgagtaaaaatctggtggtgattgaatcacccaataaagttaaaacgttgcaaaaatatttaccgaatgactttgaaatagtctctaccattggtcatattcgggaaatggtgcacaaaaactttggttttaacgaagccgattactcaccagtttgggaagactgaactaaatcaaaaaagaagttttctagccttagctttaaaggtaatcttaagggcaaaaaacttttaagtaagtacgacatcatcaaaagcattaaagagaaggctagtaaagccactaacatttacctagcaaccgacccagaccgtgagggagaggcaatttcctgacatgtttacgatgttttggatgaaaaggacaagtcgaagtgccaacgcattacctttaacgaaattaccaagaacgccgttttagatgcactgaaaaacccacgggaaattgatcagagttgggtgcagagtcagtttgcgcgccaaattcttgaccggatgattggttttcgcctttcaaggctgttaaacaattacctctcagctaagtcagcgggacgggtacaatcagtagcactgcgttttttagaagaacgtgaacaggaaattcgtagctttgtaccacggttttggtgaacgctcgatgtgttgttaaatcccaaggctgaaggtgttagggaggcgtgtgctaatcgttcaattccaattgtcttgcgtgaaattaatcctgctttacgtgctggcttgaaatttgaagaggagaagagcgtatcgggaattgactttttagatgaagcatcagctaaaaagtttggtgaacagctcaagggtgtctttgaggtgtacaacattgatgaaaccaaacactacagcagttcgcccaattccgcttacaccaccgcttcattgcaaaaggatgccatcaacaaactaggttggtcttccaaaaaggtaaccttaattgcccaacacctgtatgaaggggtgagtattaatggagaacaaaccgctttaattagctatccccgtaccgactcaactcgtttatcagcgcaatttcaacaaagttgtaaagaatacatcttaaaccattacggagaaaagtacctctctaatcggattgtaagcgctaagggaaaaaaaggtgaaaaaattatccaagacgcccatgaagcaattcacccaactgacattaacattaccccggaaatggtcaagaatgcgattaagaaggatgagttcttactgtaccgcttaatctggatccgtacggtcgctagtttaatggcggattgtaaaaaatcacatacccacatccggtttattaacgatggtaataagttttacgcttcttccaagtcattagtatttgatggttatcgcaaaatttacgaacactttgaaaataaggaaagtaatgatctctacattgatttggataagattagggttggtgatcgtttcatggctaaagacattaagatcacagcccgccaaacccatccagcagcccgttatacccaagctagtttaattgaagcgttagaaaagtccaatattggtcgaccttccacctataacacgatggctagtgttaatttagaccggggttatgctagtttaaataaacatgcttttcacgtaacacaactaggggagcaggttaatgaagaattgtccaaacactttggtaagatcattaacaaagagttcactaaaaacatggagaagtctttggatgaaattgctgaaaataaaaagaactaccaggagtttctccgtgatttttggtcaaactttaaggaagaggtaaagctagcggagggttcgattcaaagggtgaaaaaggaaaaggaatttgttggtcgtgattgtccaagctgtgctagtcccttgttgtaccgctatactaaacggggtaatgaaaagtttgttgggtgcagtaactttcccaactgtaaatacaacgagtttagccaaaataaaccgaatttaactttggaaaagctcgaagaactgtgtccggagtgtaacagccaactagtgaaaagacgcactaagtttaatcccaataaaacctttgttggttgtagtaatttccctaggtgccgctacataaagaaggataatgctagctag

SEQ ID NO: 28078 - DNA, 756 bp, Mycoplasma pneumoniae
atgcagcgtactttaaatgttggggtgatcctgtgtgaaagctttatttccaacgcccaaaacccagttaactcctacattaagatttacgaaaacgtgaggatgtttgagtttgcgattaagctacttcaagaatcgcgaattaacttccaaaagatccttttatacgttttggaagagcaaattccacttgtggaaaaagtagttgccaagtacgaaaactgctgggtctttcgttccaagcacaacgaggttgaggacatttatgaagccaagggctttattgaagacaagtacaaaattggtttaaaaagttctaaaaaccaagcctcttcgtattatgacaactgttgttttgttgtcttggaagcatgtcgacctttaacttctaagaaggttgttaaaaacgtgtatgaaaaggcaatgattgacggtgccgctgtagctgtactaccgtttgaaaggcagcttgtttgtggtgataatactaaggcggtgcgccagttaaaggacaagggcaacatgaactattggcgtcaaagtagtacttgggagttgcaatttccccaggcttatacgctcaataagttaaaccagtatcataaaaacctctttatgaaggcgcggaacatgcttgatttaatgaacatttccgctaagaatcccctaagcattgtcgatggtagtgcttacagctttcgtgtagttactagcctggactttgaaattttgttaggtattttgcgcaatggatag

SEQ ID NO: 28079 - DNA, 684 bp, Mycoplasma pneumoniae
atgcgatcccctttccccgtgcccatggttccattaactattaaaacttgacagaaaaagttacctaattggttaaccatttaccgcatttttattgctgtacctaccattatttttttgggattaaatcacttacttggtagtgttgctagttttacagtgttaggcaatgtcaccattcacctacaggttagcctttttattgggggagtcttgtttattaccgcagttatttctgattatttagatgggtattgagcgcggaagtgaagggttgtgtctaacttcggtaagctgtgagatccgttagctgacaaggtgattattaacggtgtcttaattgccctagtagcatatggctactttcactttagttttttaattgtgattgtgctgcgtgatttagtgctagacggattgcgcttttacgctcaggaaaaacagctaattattcccgccaaccaatggggtaagtgaaaaaccacttgacaaatgatagcaatcttaatgagctgttttgtgtttagtttttctttgaaggaaaccaacagtgctaacacaaaaatcttttactgagccatagtgcatttgccctattatttagctacagccttctccttggtctcgtttggtatttacgcccaacaaatatataaaaccattaaggttaaagtaaagttataa

SEQ ID NO: 28080 - DNA, 1368 bp, Mycoplasma pneumoniae
atgtctgcaactgctattagcgatctctttgaaaaaccagcccaatttaaaaacaagaaaattaagctaacgggttgattgaaaaacaaacgtactagcgccaacattatctttttggaagttaatgatggatcaacgctgttaaacctacaagcggtggttaaacaagaccaaccggagttgtttgcattagctgaatcaattagtttagcgagtgctgtaagtgtttctggtactgtagcgttaacacccaaatccaaacaacccttggaattagtagtcaaacaaattaatgtattgagtactgcgcgagcagactatccactccaaaaaaaggaacacagcttggagtttttccgcaacaacgcctatttgcgcgtacgagcccgtacctactttgccatcatgaaagtgcgcagtctgttgtcacaagccatttttgactacttctttaagaatgactttgttttagtgcacagtccaattcttactagcaacgactgtgagggggcaggtgagacctttgaattaaagcaaggtaaggaattctttaataagactacttaccttactgtcagtggtcagtttggtgcggagtgttacgcccaagcctttaaaaaagtgtttaccttcgggccgacttttcgcgctgaaaaatcacacacttcacggcaccttagtgagttttggatgattgaaccagaagttgcttttgccaacctcaaggacttaattaagctaattgaaagcactgtcaaaaccgtgattaaacaggttatgcaaaaagccaagcaggaactcgactttttagaaaagcagtttgatgtcaaattaatggaacgcttaaagcaaattacaagtaccaaaaacttccatgttttggaatacaccaaggccttagagattttaaaaacagcccaagctagtggtcaagctaactttgaggtacaagactttaacttcggtttagatctcaaaacggaacacgaacgctttttgtgtgaacagcattttcacaaccaaccggtgtttgtaattaactaccccaaggactttaaggccttttacatgaagcaaaatgctgatggtagaactgttggtgcggttgaccttttatttccccaaattggtgagatctgtggtgggagtgaacgggaaggtaatctagaaaaactagtggaacgttgccaagcaatgcaaattgatacccaaacacttaactggtatttagatatgcgtaaatggggttactttgcctcagctggctttggtttagggtttgatcgtttactagcttacatctgtggattggaaaacatccgtgatgcgatcccctttccccgtgcccatggttccattaactattaa

SEQ ID NO: 28081 - DNA, 1293 bp, Mycoplasma pneumoniae
atggaaagtaaatggttaacagttgacactaagcacctctatggttttgatgaagcgatttttattcagaaataccaaaaaaaagttaaccaaattcaccaacagtttttaaatcaacaactacccgatggtcacatgaatggctggtatagtcaacccgatcaagaccacaagggtttgctaaaacaaattaacacaattgccaaacagtttaatgctctaaaagtaactgacatagtgtatttaggtattggtggttcttatactggcattcgtgccatcttagactttttaaaaccagaacagaaggcgaatatcaaagtgcactttgttcctgacatatcggcctttaacattgctgcagttgctagagcaattaagggtaaatcatgagctttggtagtaacttctaaatctggtcgcacactcgagccggctgttacctttcggtacttccgtaatttattgcacaaacaatacaagcaaaaacatgctttacgcacagttgtgattaccgatgccgttaagggtttactagttggcatgagtaaccagtacggttatgcacacttaactattccaagcaatattggtgggcgtttttcaactctttcacccgccggtttactgttagctaaactttgtggtcatgatccgaaacagctcttattgggtactttgacagccaaacaagagttagcaaacagtgatttaaacactaattcggcttattattatgctgctttgcgtcactgactttacacgacaaagaagctcaaaatagaagtgacggtagcataccacagtgcttatgagtacctcttgttgcaacaccgccaactgttcggtgaatcagagggtaaaggtggtaagtccctgttccctaccttttcgctatttaccactgacttacactcaatggggcagttgtaccaagaaggggaaaagaacttctttgaaacagtgatacaagtgcaaacacaatttcacgacttggaactaccaccatcagactttaacaatgatgatcagctagattacttattggctaaaagtatgaatgaaatttcaaacactgccctagaagcagttgtggaagctcattttcaatcaaacgttaacatcattaagttaacgctcaaagaaagaacaacctttatgtttggttacttttacttctggttatcaatggccacaatgatgagtggttcactgctgggacacaacgtctttgatcaaccaggggtggaagtgtacaagcagttaatgtttgctaaacttggtcgtgaatag

SEQ ID NO: 28082 - DNA, 1170 bp, Mycoplasma pneumoniae
atggcactaaatttaaagattggtgacattgtccaaaacaagtaccggattgaaaagctaatcaaccgtggcgggatgaactcttacctgtttttagcgagcaacctccacgtccaggaatttggtccactgcaaaagcgccagtttacccggttggtgttaaaggtagtacaacgcaccgacaagattaacgacaacaactggaagaagtttttggatggaaccattaccacgacacgggtgtcacacaaaaatctggtgcaaacctttgatgtagttagcccccgtttaagcgttttgagtgaaaaccaggtgatcgttttagaggacacggtgatgattgtaatggagtatgttgatggtccttctttgcgtgaaatgctcaaccagaagggttactttagtgtgcaggaggtggtgtactactttacaaagctagtcaaagtaattaactacctccacagttttgaacaccaaattattcaccgtgatctaaagccagaaaacatcctgtttacgagtaacttgactgacattaaactgcttgactttggcattgcttccgctgttattcgtaacgctgagaaaactgaagtgttaacggacgaaaactcgttgtttggtacagttagttatatgacacccgaagtgttggaaagtactgtcaacaaagaaggcaaacggattcgtaaaccccctacagtgcagtatgacatctattcattaggagttattttgtttgaaatgttagtcggacgcgtaccgttcaataaatcgattgatcctaaaaaagaacgggaaaccatccaaaaggcgcgtaactttgatgtacctttaatgggaaacttgcgcagtgatgttccggttagtttggaaaacattgtctttaaatgtacggctgttaaacgtgaaaacagtaagtggatgtatagtgacacgaagcaactcttggctgatttggcgcaatgacaaaccgagcaaaccttaattaaaccagtgcacgaacgtattctagaaggacaaaacgaaatgcgtgaactaatggtaagtaattacctaccgtggtatttaaggaagggtgttttgatctttttttctgttgttttattagcactcttaattgctgtagttagcttttttattattactggggtagttgtccattcgtaa

SEQ ID NO: 28083 - DNA, 843 bp, Mycoplasma pneumoniae
atgtcctttagtgttcagattaagcacgagttagccaccaaccctttaattaaaacagagtgatccagctttttagctggttattttcaaaacgggttaaaactactcgctactggtcaatgatcctttaaaactagcactgctactttaaaggcgttgtttagcaatgcactccagtttagttttcaaatccacgaaacgagcactcactgtgagtttagttttagggcttcgcaaacagaggtggatcagttgttagcctttgatgcaactcagagcgatttaccgctacagaaggcctatgtcattggtgcctttttgagtggtggtagtgtgagcgatttactccattccagtaactttcacctccaaattagcactaacaacgaactgcaaataaaacagttaatgaagctgtttcatccttttaaacaaaccactaagcgccaccagcttttggtctatgttaaaagctatcaggccatttgtgacttctttaaactagtcgaagcttttgatggttatctagcctttgaagaaaaccaattgcaaaaaaattttgccttagaacaagtgcgtaaaagtaacttagaaattgctaacctaatgcgcactttaaagaccagcacaagcacagcggaacagctaaaaatcctcataaacagtgctgactttaaaaagcaatcgctcaactttcagcgcttttgtttagtcaaactagaccatcctgactggtcattggaacaaattgcccagttttttgaaaggaaatacaaagtgcaaattacccgttcgggaattcaacacctcaacgctaagttaaaaaaactaaaccaaaattaa

SEQ ID NO: 28084 - DNA, 1437 bp, Mycoplasma pneumoniae
atgatgattaactttgaagcaattattgggattgaggtacacgtggtcttaaacactgctaccaaaatgttttccccagcgcccaaccaagcgcaaaacgccacaccaaaccagttcataaacgcgattgatttgggcttgcctggtaccatgccccaggtcaatgagcaggcggtacaaaaggcgttaatccttgctgacgcgctcaacatgcaacgggtacagccagtcttagtgtttgaccgtaagcactacttttaccaagatctacctaagggttttcagattacccagcaaaactttccgattgcgcaaaacggttacgttgaaattgtggaaaacaacaaagcgcagcggattatcattgaacggtttcacctagaggaagatactgccaagcaacattttgtcgatgggcaaattctgctcgactttaaccgttgtggtgcaccgctaattgaagtagttaccgcgcccgtgattaagagtgctaagcagtctaaggcatacttgcaaaagctacgtcaaattttgattgttaacaacatttccaacgctaagctcgaagatggctcgatgcgcagtgactgtaatgtatcagtgcgcttaaagggacaaactgcttttggcaccaaggtcgaaattaagaacattaactcactcaataatgtggaaaaggcaattgatttggaaatagcacgtcaagtcaaagcactaattaaaggcgaaccggttcaacaagttaccctaacttatgacgacaaaaccaataccaatgtcttcatgcgtaaaaaggacaattcagtcgattaccgttatttcattgaacccaacattatgagcagtaacattgatgaactgctacaaaaacccaacaaggcctttaacttaactgagttctttaccaagctcaaggaagctggggttaatgagcagctaaatcaattagtagtcgatgatctgactctttttaatgcttacaccaagattaacagtgtcattaacagtccccaagataccattcgctggttgtgcattgagttaatgggacaactcaacaagctacaaaaaccgctcaaggacaaaacgattgatcacttaattatcctaatccaaatggtacagaagggcaccgtgaaccaaaaacaagcaaagcagttaattgagttaatgttagacaatgggcaagacccccaatcgctggctaaactacacaacttagaacagataactgatgaaaaacaactaacgcaaatcatccaacaaatctttaaggaaaacgagggtgaaatccttaagaacttagatcgagttgaacgaattcaaaagctaattataggtcaagttatgcaaagaacccacaatcgcgccaatccccagcaagtttttataattgttgaaaagttgcttcatgatttcagcgaaagagcaagctaa

SEQ ID NO: 28085 - DNA, 1437 bp, Mycoplasma pneumoniae
gtgaaatcgcaaatcttaaagctccagcaaacactaactaaaaaaccagcgtcaatcaatccgttattacaacaaattgatggagcaattaacgaacactgatcgagtaactttttgttgaaaaatacggttgagtgagcacaagcccaagcacccaaaaaccgcagtaaatcaccactcaacaacattccctttgttttaaaggacaacattgccacgaagggaattgttactactggtggttcgaggtttttggaagactatatcccgccgttttcagcaactgtgtttgaattgctaaacaacagtggcgctttattagttggtaaagcgaacctcgacgagtttggtttaggcggtacggggctccattcgggttttggttttgtccaccacccttgaaacgaaaccctaattcctggtggttcttcatccggttccgcttatgcagtggcgcgcggcattgttcccttttcaattggtacggacacgggagattcggtacgccgtccagctagcatttgtaacattgttggttttaagcccacctatggtttgatatcgcggaacggagtgtatccttacgcgcctagtttagaccatgtcgggatctttgcgcggtatgtgtatgatgtagcacttgttagtgatgaaatcattaaacatgacaaagctgatttttccgctcaaaaatctcctgatgctggcaagtttaccaggtccttaaaagagtccttcaacaagcaaatcaagataggttatctaaaaccgctagaggaatggtttgacattgaactgagcaaaaagtgaaacagcttaaaggaaagaattaccttggagggttgtgagttaattccgtttcactttccgcttgaactgctagaggtaattgatccagtttacaagctgattagttacagtgaagcggtgagctgttacagtaatctcactgggattgtctttggtcaaaaattgtttgaacccaaccaagcgagtgacttttccaaaacaattactgccaaccgcgaccgtttctttggtgagcagttaaaacgccgctttattattggtgcttttggtactgacaagaataactttaccaagtactttgaaaaggctcaaaagatccgccgggtaatggttgatgcttacttaaacctgtttaaagaagcggatttcattgtgtcacctagtgcatccggctttactaaaacaatagctgcggtgcaaaagggtgagagctttactaacctcgtggatgactttttacaactagctaactttgctggtaatccttcaattacgattccatgattggtcaaacaaaaggaccaaacgattggtttgagtgttaatgctaactgctttcacgacaagcaattattacaagtagctgcttgattggaggaattattccaaattgaacatgatgattaa

SEQ ID NO: 28086 - DNA, 1422 bp, Mycoplasma pneumoniae
atggtgtcaaataagcttgaacagacctttaagtttgccaacgacaagaacattgaacgtgctgagcgtgttttaatgcaagctttagtacaagatgccgttggtgtggacttaatcttaaccaagcttgaaccgaaggacttctttggttttccgtttaactttatctttcaaacagcacaggaaaactattctgagggcaataagttgtttggttcggcgcttttagaggccgttaagtttaagctggataccgattccaaaacacaaagggaaattgaaggtttatttgaggacgttttactcaaaggtcttccctttttggaaagggacatcaaggtctttgttgatgttgtcaaaaaagcttcgatttttcgccaacttaaacagttcgccaaaaaggttgaaaaggaagagtttaaggtcaaagatgaccgttttgagggctatttacaagcaattcaaaacgactttaccaagattattcacagcgcctttgtttctattcccggtttgagttatgacgaaattgttcgtgaagaggaagagttaattcccaaagtgtaccgtggtgaattaactgtaaaagggcttaaaagtggtttttaccctttagatcaattaacctctggttgaaaagagggtgagttaattgtggtagcagcgcgtccaggtcgcgggaaaacagcgcttctaattaactttttgcagggcgcggttaatgacagcgaaaagtttgataaaaacaaggatgtgttgctgttttttagcttagaaatgcgtaaccgtgaaatttatcagcgccatttaatgctagaaagccaggtaaattacacactcacgagtcgtcaaaggctcgctaatgtgtatgatgatttaattaaagcatcagaagtattgcgcgatcttcctattaaaatttttgattacagcacgattacgttggacgaaattcgtgctcaaatcacggaagtttcaaaaaccaataacgttaagttggtcgtaattgactatctccaactagttaatgcatttaaaaacagctataacatttcgcgtcaacaagaggtcaccatgatttccaaatcacttaaaagctttgccaaggagtttaacgtaccaattattgccgctgcacagctttctcgaagaatagaagaacgcaaagattcgcgtcccattttgtcggatttacgtgaatcgggttcgattgaacaggatgctgacatggttttattcatccaccgcgtcaaggatgaggacagtgaaaatcaagaagcaattggtcacaacaatatttttcaagtggagttaatcttggaaaaaaaccgtagtggtccgactggtaaagtacagtttgactttcaaagtgacgtttctacctttcgggttcgggaatacaatcctgatggttacagttag

SEQ ID NO: 28087 - DNA, 450 bp, Mycoplasma pneumoniae
atgaaggtaattttgaagcaagatgttagcaacctaggcaaacgctttgatgtggttgatgttaaagatggctatgcaatccactttttgtttcctaaaaaactggctgcacctttaacgaaaaagagtttacaagaccgtgatttgttcttaaagaaacaacaagaacactatgagattaacaaggcgttaagccacaagttaaaggaagtaattgaacaaacagaactccactttagcttaaaggagcacaacggtcggccgtatggctcgattattaccaagcaaattattaaccaagcccacactaaagggatggcgctgcaaaagtttatgtttaaagacaacgtgcgcttagggtttggggatcacgagattaccttacacatctttgaagatacaaccgcagttttaaaagttaaggtaaccccggataatggtgtcaaataa

SEQ ID NO: 28088 - DNA, 315 bp, Mycoplasma pneumoniae
atgatgaataacgaacacgataatttccaaaaagaagttgaaactacaactgaaacaaccttcaacagagaagaaggcaaaagaatggtacgtcctttatttaagcgttctaaaaagtactgccgtttttgtgccattggtcaacttagaattgacttaattgatgatttagaagcgttaaagcgtttcttgagtccctacgctaagattaacccacgccggattactggtaactgccaaatgcatcagcgccatgtagccaaggccttaaagcgtgcacgttacttagccttagttccgtttgtaaaagattag

SEQ ID NO: 28089 - DNA, 501 bp, Mycoplasma pneumoniae
atgaaccgcgtttttttatttggtaagctctcgtttgatcctaataaattgcaaacccgtaccaacaatattggcgcgtccttttccttagcgtgcattgattcgagcggttttaatgacagtaagtcctatattaggattactgcttggggtaaagttgctagctttgttttaactttaaaacccggtgacagtgtttttgtggaggggagattgtccacttacaagatgaacaaccgcagtgatgatcccaattcgaaggccacttacgcgctccaagttatcgctgataaggtttaccgtcccgatgaggaaaacagtttagagcaacctgttgataaggctacggtaattgattcaccctttttagcagcgaaaaccaatgctactgaaaatgaattagcccaagcatttccgattagtctggatgatgaagatgatgacattaaccccattttaaacaacgattcccaactagaggaggagagtgatgatgaataa

SEQ ID NO: 28090 - DNA, 648 bp, Mycoplasma pneumoniae
atgcaatacaacattattcttttagttgatggttcgctctcgttagagcaagctaaccaagtgaatgaaaaacaacagcaaacgttaaccaacgttgagggtttgcaaacagaataccttggtttaaaggagttggcatacccaattaagaaacaactctcagcgcattattaccgctggaagtttagtggtgataaccaatccacgaaggactttaagcgtaccgctaacattaacaagcaagtattacgtgaactgattattaacttagaacgtgagtacggctacttagcttcgataaatccaaaaaagcaacagctggcactgcaaaaacgcgctaagtatgacgaaatcattgcgcgggaaaacaaccccgaaaacccggatgtaccagtaacatcaggtttagcttccacccaaccacgcttatcacgtactgaaaaggcacaaaaaccaaaggaagagctgtgggatgtggtgcaaaagatgggaaactttgacagcgttcaagccaacccataccgcccacgtttcaaacgctttaacgcggaacacgttaaccaacggcaaaaccaacaaaacaataacaataaccgttttgaccgcaaccgcaaccgtcagcacaaccgctttaaggataagcaataa

SEQ ID NO: 28091 - DNA, 2067 bp, Mycoplasma pneumoniae
atggcgcgtacagtagatttaattaacttccgtaatttcggaattatggcccacattgatgcgggtaaaaccaccacctcagagcgaattttatttcactcaggccgaatccacaagattggggaaacccatgacggggagtccgtgatggactggatggagcaggaaaaggaacgcggtattacgattacctccgcagctacttcagttagttggaagaactgcagcttaaacctaattgacacccccggtcacgttgactttaccgtagaagtagaacgcagtctccgtgtccttgatggtgccattgctgtgttagatgctcaaatgggggtagaaccacaaaccgaaacggtgtgacgccaagcatcgcgttacgaagtgccccggattatctttgtcaataagatggacaaaacgggggctaacttcgagcgttctgtacaatcgattcaacagcgcttaggagtaaaggcggtacctatccaattaccaattggtgcggaaaacgactttaacggcattattgacctgattgaagagaaagtttacttctttgatggtggtaaggaagaaaaggccgaggaaaaaccaattcccgaccagtttaaggatcaggtcaaacaaatgcgtgcgcacctagtggaagaggtggctaactttgacgatcagttaatggctgattaccttgaaggtaaggaaattagtattgccgacatcaagcgctgtatccgcaaaggggtaataggttgtcagttcttcccggtgctttgtggttctgcctttaaaaacaaggggatcaaactgttattggatgctgtagtagatttcttaccttccccagttgacgtaccgcaagccaaggcttatggtgaagatggtaatgaggtgttaatctcggctagtgatgatgcaccgtttgttggtttagcctttaaggtagcgactgacccatttgtgggacgtttaacctttgtccgcgtttactccggagtacttaagtccggttcttacgttaagaatgtaagaaagaacaaaaaggaacgggtatcacgtttggtaaaaatgcacgcgcagaaccgcaatgaaatcgaggaaattcgtgctggtgatatctgtgctattattggattaaaggacaccactactggagaaaccctagttgatgacaagattgatgtccaactagaagcgatgcagttcgcacaacccgtgatctctttagcggtggaaccaaaaaccaaggcagatcaggaaaaaatgtcgattgcactctcgaagttagcggaagaagatccgacctttaagaccttcactgatcccgaaactgggcaaacgattattgcgggaatgggtgaattgcacctagacatcctagtggatcggatgcgccgcgagtttaaggttgaagttaatgtgggcgcaccacaagtaagcttccgtgaaaccttcaataaagaaagtgaagttgagggtaaatacattaaacaatcgggtggccgcggtcagtatggtcatgtcaagattcgctttgaaccaaacaaggacaagggctttgagtttgtcgacaagattgttggtggtcggattccgcgtgagtacattaaaccagtgcaagcgggtttggaaaacgctatggcatcaggtccgctagctggttatccgatgattgacatcaaagctaccttgtttgatggttcgttccacgaagttgattcgagtgaaatggccttcaagattgcggcatccttagctttaaaagaggcgggcaaggtatgtagtccggtactgttagagccaattatggcaattgaagtgacggtgccagaacaatactttggggacaccatgggtgacatatcatcgagaagaggtctcattgaggggactgaacaacgtgataacgtgcaggtaattaaggccaaagtaccactcaaagagatgtttggttacgccactgatttacgttccttctctcaaggtcggggtaactatgtgatgcagtttagccattacgctgaaacccctaagagtgtggtgaatgagataattgccaccaagaaatag

SEQ ID NO: 28092 - DNA, 468 bp, Mycoplasma pneumoniae
atgcgaaaaaatcgtgctcccaaacggactgttttacccgatcccgtttttaacaatacgctggtaacccggattattaacgtcatcatggaagatggcaagaagggtttagcacaacgaatcttatacggtgcttttgatctcattgaacaacgcactaaagaaaaacccttaaccgtgtttgaacgcgctgtgggcaacgtgatgccgcgcttggaactccgggtacggcggattgcgggatccaactatcaggtacctaccgaagtacctcaagaccgcaagattgctctagcactccgttgaattgcaatgtttgcgcgtaagcgtcatgaaaaaacgatgttagagaagattgctaacgaaattattgatgcatcgaataatactggtgcagccattaaaaagaaggacgatacgcataagatggctgaagccaacaaggcctttgcccacatgcgttggtaa

SEQ ID NO: 28093 - DNA, 420 bp, Mycoplasma pneumoniae
atggctacaatcgcacaattaattagaaaaccgcggaaaaagaagaaggttaaatctaaatcacccgctttacattacaacctcaatttactcaacaaaaaggtaaccaacgtgtattcaccacttaaacgtggtgtgtgtacccgggttggtaccatgactccaaaaaaaccgaactctgctttgcgcaaatatgccaaggtaagacttactaacggttttgaggtgttgacttatatccctggtgaaggacacaacctccaagaacacagtgtaacgctactccgtggcggtcgggtgaaagaccttcctggtgtgcgttaccacattgttcgtggtaccttagacactgttggtgtggaaaaacgccgtcaacaacgttcagcttacggggctaagaaaccaaaagccaagtcctaa

SEQ ID NO: 28094 - DNA, 939 bp, Mycoplasma pneumoniae
atgaaaaagttattagtcaaggagttaatcgaacaatttcaggattgtgttaacctcattgatgggcacactaacaccagtaatgtaattagagtacccggattaaagcgggtggtgtttgaaatgctggggttgttttccagccaaattggctcggtagccattttgggcaaacgcgagtttggctttttgagtcaaaaaacgctggttgaacaacagcaaattctccacaacttactcaaactcaacccaccagcgattattttgaccaagtcctttactgaccccacggtacttttacaggttaaccagacttatcaggtaccgatcctaaagaccgatttcttttccacggaactttcctttacggtcgaaacctacattaacgaacagtttgctactgttgcacaaattcacggcgtcttgctggaagtttttggtgtaggtgtcttattaactggtcgcagtggcattggtaaatcagagtgtgccttagatctaattaacaagaaccacctctttgtcggtgatgatgcgattgaaatataccgtttgggtaatcgcttgtttggtcgcgcgcaggaagtagcgaaaaagtttatggaaatccgtggtcttggtattattaacgtcgagcgcttttacggattgcaaattactaaacagcgcaccgaaatccagttaatggtgaacttactgagtttagaaaaacaaacgaccgtgacctttgagcgtttaggtaccgaattgaaaaaacaacgtttactcggagttgatttgagcttttatgaaattccgatttcccccgggcggaagacgagtgaaatcattgaaagcgctgtaattgattttaaacttaagcacagtggctataactctgctttagactttattgaaaaccagaaggccattttaaaacgtaaaaaagatgaatcctag

SEQ ID NO: 28095 - DNA, 870 bp, Mycoplasma pneumoniae
atgcctaaaacacaatacatagctggagtatcaggtggtcctgattcaatgttgttgttaaaactgtaccacaagaagattgcctgtgttgtacacgttaactacaataagcggactactgcactccgcgaccaaaaaatggtcgaagaatactgtaaacagctcaaagtgcccctcattgtgcacacggtacctgaagataccgtttgaaagaaaaactttcaagcacaagctagaaaaattcgctttgaacagtttcaaaaagcagctagcctttataaagtagataagctgctgttagcccaccaccgcgatgattttatcgaacaggccaaaatgcagttggacgcacgcaagcgtgccatgtattatggcattaaaacacgtggcgaattgtatgggatgaaggtctatcgtccctttattaagtactgaaaaaacgagatcttagccttgtgtgaagaacacaaagtgccttatggtattgatgaaaccaacgcgcagccaatttacaaacgtaatcaggtacgccaggagatcgctaactgatcgaaggaagagaaggaggagttttacattggtgtgtgcgccatgaaccgcgtcattggtcaaaagctcttttccttaatgaaacgtgcaaaacagtggttagctcatcctgatgtacgtgaattaaagcgttacccacttcccgatcaacgtcagttggtttacagctttttaattacccaccacattgatgtaacgggggacaagattgatgccattttagactttatccaaccgtttcaacaaaagcattaccgtctcaaggatgagatcttcttatccattaaagacgaacggctaactttactgtacaagagttag

SEQ ID NO: 28096 - DNA, 681 bp, Mycoplasma pneumoniae
atggctaaactatcaaagaaaatgaagatagctgttggtttggtcgataaaaccaagctgtacccgctccaagaagcagttgatttagtcaaaaaaacttcaattaccaaatttaatggctcagttgatattgccgttagccttaatttagacaccaccaaggcggaacaacagctccgcggtgcgattgcttttcctcacagtgttggcaaaccaatccgtattctagcgatcaccgatgatgaaaaggcggcactggaagcaggtgctgactttgttggtggcattgacaagatcaatgacattaaaaacggttgactagactttgacctgatcatcacttctccaaagtttatggccgcattaggtaaactcgggaagctgttaggtaccaagggtttaatgcctaacccaaaaacagaaaccgttactgatgatgttccagctgctgtacgcgcttacaagaaggggaaaaaggaataccgcgctgacagctttggtaacatccacatgtccttaggccgcgtggacagtgcgtccaaccacttggttgaaaacgctttggcactgcttgatctcattaaatcacgtaaaccagcaaccgttaaaggaatttacattaagaacattgccttgaccactaccatgggtccgagcttaaaggttaagctccctgattaa

SEQ ID NO: 28097 - DNA, 414 bp, Mycoplasma pneumoniae
atggcaaaaaagactattacaagaatcgctaagattaacctcttaggcgggcaagcaaagcccggtcccgcactcgcatctgttgggattaacatgggtgaattcaccaaacaatttaacgaaaaaaccaaggacaaacagggcgaaatgatcccctgtgtgatcaccgcttacaacgataagtcgttcgactttatcttaaaaactaccccagttagcatcttgcttaagcaggctgcaaaactggaaaagggggcgaaaaacgccaaaacaattgtgggtaagattacgatggccaaggccaaggaaattgcgcagtacaagttagtggatctgaacgctaacaccgtggaagcagcccttaaaatggttttaggtactgctaaacaaatgggaatcgaggtgatcgaataa

SEQ ID NO: 28098 - DNA, 1272 bp, Mycoplasma pneumoniae
atggcactaaaagcaactaatttttttacagaaccagagtacaaactgcaggatgatttgatcttagatatccgtgatcttcacgtgagttttaaggttaaagacggcattatgcaagctgtccgtggtgttgatctcaaagtcaaaaagggctccattgtcggcattgtgggcgaatctggtagtggtaaatcggtctgtgttaagtcgattattggctttaacgatggcgcaaaaacgaccgctaagttaatgaactttaagaacattgacattagcaagatgaaaaagcaccagtgacagtactaccgtggcacgtacgtgtcttacatttcccaagatccactgttctcgttaaaccccaccatgaccatcggtcgccaggttaaagaagcgatttatgtgtcgtgtaagcgccgatattaccaaactaagagtgacctcaaatacgatttgcaaacagaacgaattgacctggacacttacaaggaaaaactagcacaagccaaggaaacttacaaagctaaaacgactaaggcggcggtccatgcaaaaacgctagaaatccttaacttcattggcattgaccaagctgaaaagcgcttaaaggcctttccaagtgagttttccgggggaatgcggcaacggattgtgatcgcgattgccgtagccaccgaaccggatttaattattgccgatgaaccgaccacggcgttggatgtgaccatccaagcgaaggcgttgaacctaattaaacagctgcgtgacctgctcaacattaccattatttttattagtcacaacatctcgttaattgctaatttctgtgactttgtatacgtaatgtacgctggtcgattagtggaaaagggcttagttgaggaaatctttaccaatccggtgcacccctacacttgggcattaatggcttctatccctgaaggtacggacaaaaacgctccgctaacctcaattcctgggtatattcccaatatgttatccccgcctaagggcgatgcctttgcagcgcggaaccagtttgcacttgccattgatttcgagcaccaaccgccgttctttgatgtaacggaaactcataaggccgctacctggctactccatccccaagcaccgaaggtagagatgcccgccgatgtcaaggaaaagattgccattacccgcaaagcactcgccattaaaatgccatctcaacctgtaaaacaaccaaaaagcaatggaaacaaaaaaacaaaaacaaaatccgctcgttaa

SEQ ID NO: 28099 - DNA, 2427 bp, Mycoplasma pneumoniae
atgggtctgtttaacttcttgaagttagtctccccgcgtcatcggatttaccataaggcaagtaagattgccaacgaagtcgagggacacaaaaattactaccgcaacctcactgatgtacagctgctggaagagtccaataagctagtggatttagtgacaaagcaaaactacaccattttggatgtggcggtggctgctttggccttaattcgcgaagtggtctaccgtgaaaccggggagtttgcttacagagtgcaaattattggtgcttacatcgtcttgatcggtgactttgctgaaatgatgactggggaagggaaaaccctgaccattgttttagcagcctatgtctcggcgttagaaaaacgcggtgtccatgtggttacggtcaatgaatacctagcgcagcgggatgctactaacgccaccaagatcttaaagcgtgttggcatgaccgttggttgtaactttgctaacctagcaccacatttaaagcaagccgcgtttgcttgtgatgtaacttacaccactaacagtgaactcggttttgattacctcagggacaatatggtgcaccgctttgaggacaagaagatccgcgagttgcactttgcgatagtagacgaaggcgattcggttctcattgatgaagcgcgcacccctttaattatttctggtcctgccaaaaacgagtttgcagcatacgtggctgttgatcgctttgtcaaaaagctcaaggaagacgagtacaagattgaccccgaatcacgtgcccccgctttaacagaacttggcattaagcacgcggaaaagaactttaaaaccgataacctgtttgcgctagaaaacagtgacctgttccacaagattattaacgctttaaccgccgttaaagtttttgagcagggcaaggagtacattgtgcgtgatggtaaggtgttaattgtggaccactttactggccgaatcctggagggcaggagctacagtaatgggctccaccaagcggttcaggccaaggaaatggtcgaaattgaaccagaaaatgtgatagtagctacgattacctaccaatcgtttttccgtctgtacaaccggttgtcagcggtatcgggtaccgcttttactgaatcggaggaattcctcaagatttacaacatggtggtagtacccgtacctactaaccgacccaatatccgcaaagaccgtgctgacagcgtctttggtacgcccaacattaagtggctagcagtggtcaaggaagtcaaacggatccacgaaaccgggcgaccaatcctaattgggaccgccaacattgatgactcggaactacttcacaactacctccaagaagccaacattccccacgaagttctcaacgccaagaaccactctcgggaagcggaaatagtcgctaaggcgggccaaaaaggggcggtgaccatttctaccaatatggcgggaagaggtactgacattcgtttaggtgaaggggtcgctgaaatgggcgggttgtatgtccttggtacggaacgcaacgaatcgcgccggattgacaaccaactgcgcggtcgggcgggtcggcaaggcgatcgcggtgagaccaagttctttatctccttgggtgatgccctgttcaaacgctttgcccatgaccggattgaacgcgccattactaagttagggaacgatacctttgacagctccttcttttccaagatgttaagccgtacccaaaaacgggtcgaagcaattaactttgacaccagaaagaacttaattgattatgaccatgtgttggccagtcaacgggaattgatctacaaacaacgcgataagttcttattagccactgatctcagtgacatgatcgacaagatgttggaaaagtttgtcgagcagttctgtgaccagtaccgcaaccctaagaaccaaaacctcgttaaccacattgctttatcagaggccttaaacctggaattaaacatgcacggtgttattagtccgaagctgtttgaaaacatgacttttgatgcgactgtccataaaacccacagtttaattggtgaaaagattaccaataaggtcaaggtcttaacccccccaattgccctcatccgttttcgtgaaattatgatcacagcaatggacaagcactgaatcgaacacttagacaatgtctttaagctcagggaaggggttaccttgcgctcgatggaacaaacgagtcccctcaacgtttacattcgcgaaaccgacatcttgttccaaacaatgttgcaaaagattgctcgggacgtcattatccaaattgctaacttagcgactcccgaagagtttgatgaggaactaatgaaggctaacgccttgaagaagttgcaagcacttagagaagctcatgaaaagtccaacgaaggacagtaa

SEQ ID NO: 28100 - DNA, 2619 bp, Mycoplasma pneumoniae
gtgaataagtgaactgggttgagtgctgcggccgttttagaaagccgcgcacagcatggtgctaatttaattcctacaaaaaaattaacccctttttgactactgttcttagaacagttcaagagcttagtggtgatcttactgctggtagctaccatcctttcactagtggttgccattattagtggggttaatgctaactggttgtttgaccacaaccttgttattgagtgaacccaaccgtttgtaattttgataacggtgttggccaactccctgattggctccattcaggaatttaaagcgcaaaagtcagctcacaccttaaagtccctaacgcaaccctttacgcgggtattccgtgaagaaggcttggtttcgttaccggtgggtgaagttgttgtcggtgacattatctttctggaagcgggtgatattattcccgctgacgggaaggtgctgcaagcgaaccacctccgctgtatggagagctttttaactggtgaatcagtcccagttgataaaagtgtggttaacaccggtggcaagggtttgttggaacaaacaaacctactcttttctggtgcccaagtggtctttggtagtggtgtattcgaagtaactgctgtggggttaaatacccaagtcggtcaaattgtcaaaacagtggacagtagtgcaactaagctatcgcccctacagcaaaaactggaaaaagtggggaagtggtttagctggtttggccttggtttattcgttgtcgttttcctagtgcagttagggttacttggttttcacaactttagcgctaactgatcgattgccttaattggtgcaattgccttagtagtcgctattatccctgagggcttagtgacctttattaacgttatttttgccttaagtgtgcagaagctcaccaaacaaaaggcaattattaagtacctagctgcaatcgaaacactcggtggcgtgcaaatcatttgtaccgacaaaactggtactttaacacaaaacaagatgaaggtcgtggactatttctgttttagtaacactacccaaacagacttagcacgtgctttgtgtttgtgcaacaatgctacagtcaacactaacggagacagcaccggtgatccaactgaaattgcccttttgcaatggttggaccgtgatggtttggaattaaaccactacacacgcgtgtacgaaaaggcatttgattccaaccgcaagcttatgagtgtggtggtgcaaaaggacaaccgttttattgtgattgtcaagggcgcacacgatgtcttgttaccgttatgtaagggcttggatagcaaccaaattaagcctttaattgatgaacgtgctagcaacggcttgcgcaacttagcggtgggactcaaggttttatactgctttgatccagaaaatacccaaactgtcaacgaattggaaagcgaactcgactttttgggttctgttagcttacaagatccaccacgaattgaaagtaaagctgccattatggcgtgtcaccaagccaacattaccccaattatgatcactggtgatcacctcaaaaccgctactgcaattgccaaagaattgggcattctgaccgatgaaaggcaagccattttaggagtcgatttagaccccgctaaaattatggagtaccgcgtctttgccagagtaacgccgcagcaaaagctagaaatagttaatgcctgaaagcaagcgggttacacggtagccgttactggtgatggggtcaatgatgcgcccgctttagtgactagtgatgttggttgttgtatgggacaaacgggggttgacattgccaaagatgccgctgatgtcattattagcgatgacaactttgccacaattgttaacgggattgaacagggtcgtaaaacctttttgacctgtaaacgggtgttgtttaacctctttttaacctcaattgctggcacgattgtcgtgttattgggtttatttgtattaggggaagtctttcgtgaacaactcagcaaagcaaaccataacttccaggtctttacccctacgcaactgctaattattaacctctttgttcacggctttcccgctgtggccttagcgatccaacccgtccaggaaaaactgatgttaaaaccgttttccaccaaaaatctgttttacaaccgtggcgggttcgatttaatctgacaatccttgctgttgagctttttaaccctacttttctacagtttagggatggtctatgccattaatgatccggagttaggcaaatccggtgatttaattaaccgggctggtgcgacctgtggttttatggtgttagggggcagtgcagctttaaattccttaaacctaatggtggatcgaccattggtagctactaacccaaagcactatggcattgtgtgactaggggcgttgtcctcgatctttgtcttcttattaattattttcattaaccccttggggttagtgtttagtacattaaaagaccttactgcccacccggttttaattggttatagctttgggggcgtgcttttatatatgacaattaacgaagttgttaaacttattaggttaagttatgggtctgtttaa

SEQ ID NO: 28101 - DNA, 885 bp, Mycoplasma pneumoniae
atgtcagaactgattacaacacctgtagaaaccaccgccaaagcggaactcgtttccctagctaagctcggggaaatgcgtacccatgtcggaatggttaagcgttactggaaccccaaaatgggcttttttattgaaccagaacgcaagcacaataacgatcactttgtattagagttacaacgtcaatctttgcaaacagcttacaactacgtcaaggaagtagcacaaaacaacggtcaaattctcttcgttggtactaagaacgattatgtgaaaaaactcgttaataatatcgctaaacgggttgatgttgcttttattactcagcgctgattgggtggtactttaactaactttaaaacactttcaatttcaattaataaactcaataagttagtggaaaaacaagcggaaaacgcggctgatttaactaaaaaggaaaacttgatgctttcccgcgaaattgaacgcttggagaagttctttggcggggtaaaatcacttaaacgtttaccgaacttactaattgtggatgacccggtatacgaaaagaatgcggtagcggaggctaacatcttgagaattcctgtagtagcgttgtgtaacactaacaccaatccggaattagttgactttattattcccgctaacaaccaccaaccccaatcaacctgcttgttgatgaacttattagctgatgcggtggctgaagctaaggcaatgccaaccatgtttgcttacaaaccggatgaggaaattcaaattgaaattccccaaaaacaagaggcaccacgccaagttgtaaaccgtgcaaattctaaacaaattacctctcaacggttaaacattactcgcaacccagaagttctcacccgtgaataa

SEQ ID NO: 28102 - DNA, 2823 bp, Mycoplasma pneumoniae
atgcaaattaaagcacaggacacaggacagcaaaagaagtcctgtttattgtctaacatccgcaataaatggaaaaaccggaatcgcgggagtttccgccaatgagttggaaagctttccaatgggttgatgatcccgattgccgttttacctattgcgggtatttttttgggtgttggtgatgcaattgccggaaatgcaggtgatttaactggtctgcgttatttcggacttttcattaaaaatggtggtgatgttgtttttgctaacctacccattttgtttgctattgctatagcaataacgttctcacaagacgctggggtcgccggattttcggcctttgtcttttgagctgctatgaacgggtttatgagctcgttaatattgccttttgataaagcaggcaaaattattactgacacttcgactccaattgctggttttaaagtactttacaacaagagtgtccctgttcatgctattgctacaaccttgggactgcgaacattatcaacctcagtattcggtgggattattgtaggtgccttaacttcagtactttacaagaagttttatgccattaggttacctgatgtaattggattctttagcggtactcgttttgtccctattatttgttttgtggtagcgattcctgttgcgttaatcttgttaatgatctgaccagctgtctccattggacttaatgctattggtactggtttaggtttcttaggtggtaaaggttatggtgccaacagtttgatctttggttacattgaacgttccttaattccgtttggtgtgcaccacgccttctatgcaccactttgatacacctctgctggtggtagcttacaagaaattgttaaccaacaggtttggattcgtcccgacttccacttaagtgataactatgtagcacgggtaattggttgagttgatcctaataactctagcatgtacattattcctggtgcattaaatggtcaaaatggaagttcaaccggtaatacaatgtcaaaagatcttaatggagcactttctgcctacatgagtaaagaaagcacagctttcttaacttgaaaagatctagttgatggcttaacctttaaaggtaattttgataagatggccgaaaacggtttgttagacggttctaacaaaatttgattgggtctgaacggttctggtattttaggtaaaaaattgttactaagtgatggtaatgtttacactattacctttaaaacctttgccaacactactccaattgcttggagtaaaggtgcacaggcagtgttacctttaaatgctagctctacaatcgttaacaatccaaccgctttagcagcagctacacaaagtaataataacactaacaacattaaactttacccggtaaattcctttagggtagctgttgaaagtttaaatccagcgcaatactcccagggtaaattccccttcatgttgtttggaattccagcagctggtgtagccatgatcttggcagcacctaaagatagaagaaaggaagcagcttcgattgttggtagtgcagcatttaccagtttcttaactggtattactgaaccatttgaatttaccttcttgttcttagcgccttgattattctatggggtgcacgctgttttggcagctgtaagcttctggttaatgaacatcttgggtgctaatgtgggtcaaaccttctctggttcctttattgactttattctctatggtgctttaccagatggtcgtcgttggttagcaaactcttacttagtacctattattggactgttcttagctgccatctacttcccaaccttctacttcttaattaagcactttaacttggcaactccaggtcgtggtggtaagttaattaccaagaaggaatacttagcaagcaaagcagccgctaaagcagagggtgtaagtggtgtagcagaaaactttacccaaacgcaaattgaagcgggcatcttactccaagcttacggtggcaaggaaaacattgttgaactaggtgcatgtattaccaagttacgggttactgttaagaaccccgaactagttaaggaagaacctattaaagaacttggagctgctggggtaatgcgtaccaccccaaccttctttgtggccgtttttggtacccgcgctgccgtttacaaatctgctatgcaggacattatccagggcaaggttaactgggaagcgttgcaaaaggttattaatacagatcaactagctgttgagcctaaagaaaccactccaccaaaggaagtaatgccggtggtacaagacgaaattgtgattctgtccccagttaacggtaccttaaaatcactcaatcaagtacccgatgaaacctttaagcaaaagctagtgggtgaaggtgttgccattgtaccgagcgatggtcactttaaagcccctggtgaagcaggtgtgaaaacggagttagctttccctggtggtcacgcttacatctttgacattgatggcattaaggtaatgttgcacattgggattgacactgtgcaaattaacgccaaaaaacaaccgggcgaaccactagaagtgtttgacattaagaccaaacagggtgagtacactaaggaaaagagtgaaagtgtagtggaagttgatttaaagaaactcagcaagaagtacaacccaattaccccatttgtggtaatgaaggaatcactagaaaactttaaattagtgccaatccgccaacgcggtgagattaaagtgggccaaccaatctttaaactagtctacaagaagtcacaggcataa

SEQ ID NO: 28103 - DNA, 1317 bp, Mycoplasma pneumoniae
gtgcgcgataacactgccaagggcatcactgccggcagtggcagtcaacaaaccacgtatgatcctgcgcgaaccgaggccaccttgaccaccaccacctttgcgctgcgccggtatgacctcgccgggcgcgccttatacgacctcgacttttcgaagttaaacccacaaacgccaacgcgtgatgccaactgccagatcacctttaacccctttggcggctttggtttgagtggcagtgcaccccaacagtgaaacgaggtcaaaaacaaggtccccgtcgaggtggcccaagaccccaccgatccttatcggtttgccgttttactcgtgccgcgcagtgtggtgtactatgagcagttgcaaaggggattagcgctccctaaccaagggagttcgtcaggctccggtcaacaaaacaccaccattggcgcgtatgggctgaaggtgaagaacgccgaggcggacaccgcaaagagcaatgaaaaactccagggcgatgaatccaagtcttccaatggatcttcaagcacttccaccaccacccaacgtggttcgaccaattccgacaccaaagtcaaggctttaaaaatagaggtgaaaaagaaatcggactcggaggacaatggtcagctgcagttagaaaaaaatgatctcgccaacgctcccattaagcggggcgaggagtcgggtcagtccgtccaactcaaggcggacgattttggtactgccccttccagttcgggatcaggcggcaactccaaccccggttcccccaccccctgaaggccgtggcttgcgactgagcaaattcacaaggacctccccaaatgatccgcctcgatcctgattctgtacgatgcgccttatgcgcgcaatcgtaccgccattgatcgcgttgatcacttggatcccaaggtgatgaccgcgaactatccgcccagttgaagaatgcccaagtgaaaccaccacgggttgtgggactgaaaggcgcgcgatgttttgttccaaaccaccgggtttgatgaaagtaatacttcgaacaccaagcagggctttcaaaaggaagctgactccgacaagtcggcccccatcgccctcccgtttgaagcgtacttcgccaacattggcaacctcacctggttcgggcaagcgcttttggtgtttggtggcaatggccatgttaccaagtcggcccacaccgcgcctttgagtatttggctttatatatatttagtaaaggcagtcacttttaggttgcttttagctaactctttattatcaaaaagcaacatatataaaaaaacagctaattaa

SEQ ID NO: 28104 - DNA, 2283 bp, Mycoplasma pneumoniae
atgaaattcaaactatttttgggcagcagcttttttggtgttgccaccttacttattgcttgtggtactggtcgctttgatcaaatcgatgatggcaaaattaagcttgctgttgtcacatcccctagtgccgctagttcactgcaaaccttattagatcaatacaacaacactaaagcaccagctgattatccagtggaagtagtttcactagacagtactgggagctatactaaagggaaatttgatacccaaaaacggttagctgctaaagataaaaataacttttataacctaacctttaactaccccgacttagtttcatctttagcaattaacggaatggaactcaaccttgatggggttaatgtttctaacttcgaacagtctttcttagacttcaacaagaacattagtggcgtacgcaaacccggcatttacgccttaccagctaccatgagtggtgaagttttggttttaaatgggccagttctccactacatcttgaacagtgccaagaagaaggatggtaccgaatcaaaaattaaaactgctcaattaaaaacagcttcaactcaggcagaagttaagggtactatgaccatggctagtgatgaacaaaccacaaagctttggactaatattcaaaacgccgctaaggaaaatgccgctaacggtacaactgagaaagcggaaaaaacagtttccgctagttcgttgcaattaaaaaatacgaataaaaccaccgaaggtaccttaaaaattggtactgatgacaacactaaaaatctttgaaaaaagattgaagatgccgcaaaaactaacggggaaaaaggtaatgagaagcaagaagctactcaaagcaatgctagcgctagtctcgttaagttggatcaaaaaaatactagtcaggataaaactcaaaacacccagactagtgatgatgaaattaaaaaatcttgaggcgaatataaggaagtagaaggcggtcttaagggttatgaatttaaggctgatgtctttgagagttgggaaaagttaaacgattttgcagtacgggtagcaaagtcgtttagcaaggtttctgaagagaagaaaagtggtagtgacatccagggtgtttttggcattggtagtttagaaaatgcgctttacactgcatcatttgcagccggtggtggcgactataacaacttcttgtttaacattaaaaaaggtcgcgctgattttagtaacttctttaaccacaattcaaaaactttccaaagtctaagagatattttcaacagctttaagcctttaattgaccaaaagggtttaattagtaacaaacactttgatactccagtgaataattacgctaaatttcaccaattggcattctatgtatcatcgacagctcgctttccttactcgtttgccaaagataatgtaaaacgcttaattattggtaaacgcgaattggaagtaaaccctaaatcaatgtttgccattaagaaggaaaacggcaataacggtaacagcaacctcttaggtaaagttgcactagataacaataaatctattgaactttacgaaaataatattcctaacggtaaaactgatgccatcttaattaagaaccaaactttaattagtgcgttgaagaatccaaaacagacaaagagctctcaaagatcttctcagtctacaaacacccaaaatgatgccatttgttacttagccttcaacagcaagattagaccagacgataaagacattttcctattagacaaatttggtgaaaaatttgtcaccgcaattgttaactttgaagaaaaaacggaggtcaaaattaatacgctccaagaaaaggaagctgttgttttaccagcaccacaaaagtttaaacctactgatccaaaatcagtggcacttgttcaaggtccaagtttaatcggtattcacgctaacgctaacgaagaccgttcaaccattaagtttctcaactggtaccttaatgctgaagttgattgaaaagatggagaaaagaaaacaccagcagaatacttagcagaaaaagcttcttacctattgccgtttaaaaaagtattagaaaaatccaagcaaaacataaaagcgacctctaaggaaggagagcaaaatcaaggcaagaaaggtgatggtgcacagaaccaaggtaagaagggcgatggagctcaaaatggtaagaatgataaagcaaagcacaatggtttttgtcgatattgccgtcagccaatttttaaacggttctgtcgctaa

SEQ ID NO: 28105 - DNA, 732 bp, Mycoplasma pneumoniae
gtgcctaggtacttagcgattgtcgcttacaatggtgctccctttcgtggttgagccaaacaaccgggttaccacaccgttcagggtcaaatagaacaaaacctagccttaatttaccaaacaccaattaatatttatggttcgggtcggactgataagggagtgcatgccattaaccaaacctttcacgttgatctacctgataagttaccactcaaacagttaattgccaaactaaaccaattaaactaccctgacatttttgtaaaggccttagttccagtagcaccgcgatttcacgcgcggtttgcagtaaaaactaaggtttatgaataccttattaacacccgagcttttaacccagcacagtaccacaccgtgtgacagtacaaccacccattggatttagcacaacttgaagcggataccacgctctttttaggcaggaaggatttttggagttttagcaccgctagccaaaaggacacgcagcgcacaattagtaaaattatcgtgcaacaagatcacactggtacggttaaactgaccttttttggcaacggttttttaagaaaccagattcgaatgatggtagcttctctagtggccttaaacaatcgaaccctgatgcgagaaacagttcaacagctgtttgatcaaccacaaaagggtgggtgtaaggttaaagcccccgcttgtggtctttatttaaaaactgtcttatatgaataa

SEQ ID NO: 28106 - DNA, 1305 bp, Mycoplasma pneumoniae
atggatagtttttttattaatggttatgtaccacgagatacctttatccaccggctccacccgacaacgaaactgttaatctttttgctgttcgtgatcctggtgtttgtacccattggctttgtttttcaaagtgtgatctttgtctttgccacagttattttctttgtagccaaactacccggacggttttacctctcctcgattaagtcaatctcactgttattcttactactgttatttgtcaactggtttaccttccgtgaccccgggttctacattaccgctgatcaggttaatacagtaaaaccacactttaacggtaataactttaacttctgaaacatctccctgtttaactatcaggacaatgtgttttcgcaagtgtttaactttaaccgtgccaacatgacagagttaaacaagattaacttcttctttaaggaaacagctaatgctaatgcatacaccaaggtaacggggattgataaattggcagaaatgttggcttcaaagaatctctttaagttcaacggttctaccaatggcattgataaaaacaagattcttggtgcctttctagatcataagattgccgtttacctcggtcgtagttggggtggtgactttagtggttttgtgattgacgtaagtgtaagtgataaaacatctaccttcacgattaaaccctttttagctaactcgaactatgtgttgacactgcgtgccattattctagccttttacgttacccaaaagatcttgatcatgatcattttggcaacagtgttaacttccacttcaagctcggttgagttggcatacggaattgaacgcttgctgtgaccgttgaagctgttacgggttccagtcaatgtgtttgcgatgacaattgcaattgcaattcgctttgtcccttctttattgttggaatcacaacggattttaaatgcccaagcatcacgcggtttggactttaagaacggcaatttctttgtcaaaatgcgttcattgtcttccttggttgtaccgatgatttcgattgcattccgcaatgctggggagttggcgagtgccatggaagcacgtggttatgatccaactaagaaacgtactacctaccgcaagtttaagattgattgggttgatgccacagctttaattctcaccgctctttactttgtggtgattattttcttaaccgttaagggtgcagtgttcctagatttagggacacctgagtggttgctaaccggcaagattaaagagcaggtagagcgctcattatcagttaaaagtgcctag

SEQ ID NO: 28107 - DNA, 912 bp, Mycoplasma pneumoniae
atgaaaaaaatagttgaactcaaaaaccccttaagggatggagaaatcctcagtgttagtaacctttcgtgcttttttaacgaaaaaacagtccatgaagtcaaggtaattgacaactttagctatacctttgctaaaaataaggtctactgcattattggtgacagtggtagtggtaaatcaaccttagtcaaccattttaatggtttaataaagcccgcttacggagatatttgggtcaaggatatttacattggtcaaaagcaacgcaaaattaaggactttaaacgcttgcgcaaaacaatttcgattgtctttcagtttcccgaataccaactgtttaaggacacagtggaaaaggacattatgttcggtccaattgctttgggtcaatcgaaaaacgaagcacgccaaaaggcagcttactacctcgaaaaaatggggttaaagtacacttttttagagcgcaatccgtttgagttgagcggggggcaaaagcgccgtgtagcgattgctgggattttagcaattgaacccgaagttttaatctttgatgaacctaccgctggactagatcctgaaggggaacgagaaatgatgcgtttaattaaggatgctaaagctagtggtcgcaccgtctttatgattacccaccaaatggaaaatgttttggaagtagcggatgaagtgctggtgttgtccaagggccaactcgttaaatccggtgatccttacgaagtttttatggatgaagcatttttggcacacaccaccattattatgcctccagtcattcaagttatcaaagacctaattaacttaaacccgaagtttagttgtttattagactttaaaccgcgcaacttagaccagttggcggatgccattaacaacacaatagctcatggatag

SEQ ID NO: 28108 - DNA, 825 bp, Mycoplasma pneumoniae
atgctaaatacaaataaacaagcagctgcaagctttcaaggtgtttatttttcttacagcgaattaccattaattcgcaacctctcctttgatgttttcgaaggggagtatgtttgcatagttggccataacggctcgggtaaatccaccatctcgaagctgttaacgggcttgttaaaaccacaagcgggtaccatcaaaatctttggtaagacgatttcgagtgaaaacgtgacttacctacgcaaccacattggcattatcttccaaaaccccgataaccagtttattggtattaccgtggaagatgacattgcttttggactggaaaaccgccgttatacgcgcgaaaagatgaagagcatcattgaggatgtagcccaacaagcgggaataacggagttattgcaaaaagaaccgcataacctttcgggtgggcaaaagcaacgcgttgccattgcctcggtgttagccttaaacccagccatcattatctttgatgagtcgacttcgatgttggatcctaaagcgaagcgtaccattaagcagttcatggtggaactgcgcaaccagggcaagtgtgttatctccattacccatgacatggaagaggttaccaaagcagacaaggttttggtcatgaatgaaggtcgtttaattcgtcaaggtaaacccaaggatgtctttaacagtgcagccgaattgcaaaaaatccgcttggatattcccttttctttaagcctttccacgaaggttaatggtgtgactagtacaatagactaccaacaactaattgaggccattggtaagctatgaaaaaaatag

SEQ ID NO: 28109 - DNA, 375 bp, Mycoplasma pneumoniae
atgtcatacattaataaaccaggtaaaactagtgcgtgaagagtcatgaccgtgcgccaacaggtaagcgctgttttggcttatggcaagattgaaacaaccttaaagaaggccaagaacacccaaaagcgtttagataagttaattaccttagctaaagttgataactttaataaccgtcgtcaagtcaaaaagtggttgttaaacaccaacttgttcgatgttgatcaactaatggatcacttgtttagcaaagttgcccctaaatacgaaaaaacccccggtggttacagccgtgttttaaaattagggccacgtcgcggagatgccacggaaatggccatcttgcaactaactgatgctaaatacaaataa

SEQ ID NO: 28110 - DNA, 984 bp, Mycoplasma pneumoniae
atggaaaagtttttaaagtacgaaataaaggtaaataacgaacaagcacgcgctaaccccaactacggcatctttgaagttggaccactcgaatcgggctttgtcattaccatcggtaatgctatgcgccgggtgctgttgagctgtattccaggtgccagtgtgtttgcactctcaatttcgggtgccaagcaagagtttgctgctgtggaagggatgaaggaagatgtcactgaagtggtgttaaacttcaagcaattggtagtgaagatttctgaccttctgtttgaagatggtgaaatggtcgaaccaccactagaacgttgaccattgttaacggtaacagctgagaaagcgggaccggtgtatgcgaaggacttggagtgcccagctggctttgaagtggtcaacaaggacttgtacctgttctcgttgcaaactgacaaaaaggtaacagttaacgtgtatgtgaaacaaggacgggggtttgttactttcttggaaaaccgtgaaatgattaattctttggggattattgccactgactcgaacttctccccggtattacactgtggttatgaagtacaggaattgaaaacttccaagcaaaagattactgatcacttaactttcaaaattgctactaacggtgccatatccgctgtggatgcctttgcaatggctgcaaagatcttgatcgaacacctcaatccgattgttaatgtcaacgaatcgattaaggcgttgaatattatccaagagaaagccgaagaacgccgtgtccgttcgtttgcgaagcaaattgaagagttggactttaccgtgcgtacctttaactgtttgaagcgtagtgggatccacaccttacaagagttgttgtccaagtcattagctgatattcgtgaaatccgtaacctcggtaagaaatcggaacgcgaaattattaagaaggtacacgaattaggactcaaattaagatcttag

SEQ ID NO: 28111 - DNA, 366 bp, Mycoplasma pneumoniae
atggctaagaagaaaaagattaatgtatctagtggaattatccacgtatcctgttccccaaataacacaattgtatccgctagtgatccggggggcaacgtgttgtgctgagctagcagtggtaccatgggctttaagggatcgcgcaaaaagaccccgtactcagccggcatagcagccgataaggtggccaaaaccgtcaaggaaatggggatggcgaccgttaagctctttgtcaagggtacaggtcggggtaaggataccgccattcgcagctttgctaatgcgggactttctattactgaaattaacgaaaagaccccgattccccacaacggttgcaaaccaccaaaacgaccacgctaa

SEQ ID NO: 28112 - DNA, 375 bp, Mycoplasma pneumoniae
atggcacggattttaggtattgacattcccaaccagaaacgcatagaaattgcgttaacctatatttttggtatagggctttcgcgctcccaagccatcttaaagcaagcgaacattaaccccgataaacgggtcaaagacttaaccgaagaggagtttgttgccattaggaatgtagctagtgcttacaagattgagggtgatttgcgtcgtgaaattgcactcaacattaagcatttgagtgaaattggcgcatgaaggggcttgcgccaccgcaagaacttaccagtgcgcggccaacgtacccgtaccaatgcccgcaccagaaagggtccacgtaagaccgtggctaacaagaagattgaaagcaagtaa

SEQ ID NO: 28113 - DNA, 114 bp, Mycoplasma pneumoniae
atgaaagttagagcgagcgtaaagccaatttgcaaagattgcaagatcattaagcgccaccaaattgtgcgcgttatttgcaaaactcaaaaacataaacaacgacaaggataa

SEQ ID NO: 28114 - DNA, 237 bp, Mycoplasma pneumoniae
atgcaaccaaagtttaataaccaagcaaagcaggacaaactcgtcttaacgggcaaaatcttggaaatcatccacggtgacaagtttcgcgtgttgttggaaaacaacgttgaagtagatgctcacttagcgggcaaaatgcgaatgcgccggttacgaattttaccgggcgatttagttgaagtggaattttccccttatgatttaaagttaggtcgaataataggtagaaaataa

SEQ ID NO: 28115 - DNA, 648 bp, Mycoplasma pneumoniae
atggtaatggaaaataagttcttgtttttaggcgctccgggtgtgggtaagggtacactagctaagcaagtagccaacaccaccggattgtttcacctttccactggtgacatctttcgcagtgtgatgcaagagcagggtgcgttgagtcaaacgctagcgcactatatgaaccagggtttgtatgtccctgatgaattgactaaccaaaccttttggcactttgtcactacccaccaaaatgaactccacaagggctttatcctagatgggtatccccgtaccttaaaccaactcgagtttttgcaaagcaagttgcaattagaccaggtgtttcaccttaagctaagtgatccccaagtgctagtagcgcggatcttaaaccgtttggtttgtcctagttgtggtagtgtatacaacaagcagagcaaaccaccattgaaggccaatcagtgtgatcgttgccatgctacgttacaagcgcgcaatgatgacacggaagcggtaatcttaaagcgtttaacgctttacgaagacaccgttaaacccttaattgaggccttcaccaagcagggcattctcaccgtcattgaagcccaattaccgctcgaacaacaggtcaatttggttcaacagttagtgcattaa

SEQ ID NO: 28116 - DNA, 1434 bp, Mycoplasma pneumoniae
atgcaagccaaaccaacaactgcagttaaacaaaaacagaattttgggcaacgtttgttcactttgttgcgcaaccgtgacttcatgatctcgtttttaataacggtcgtgctgttggttttgtttcgtgttttagcgattattccgctccccggcatccaagtcaaccaaaccgggctagaccaaaactcaaacgatttcttctcactgtttaacctacttggtgggggtggattgaaccaactatcgctgtttgcggtgggaattagtccgtatatttcggcgcaaattgttatgcagctgttgtcaacggacttaattcccccgttatctaaactggtgaacagtggggaagtgggtcggcgtaaaatcgagatgattacgcggattattacgctaccgtttgcgttggtgcaatcgtttgctgtgatccaaattgccactaattccggtggcggttcttcacctattaccttaaaaaacaacggttcggattttgtcgcgttttacatcattgccatgactgctggcacctacctgtcggtctttttaggtgacaccatttccaaaaagggaattggtaacgggatcaccctgttaattctttcggggattttagcccagctacccgaaggatttatagctgcttacagcgtgttatcaggtgtagtggtaaccattaacgcaaccttaaccactgccattagcttcttcatttacttcatggcgtttgtgacattactgtttgccactacctttattacccaagagacccggaagattccgattcaacaatccggtcagggtttagtaaccgaatcctctgcgttaccttacctcccaattaaggtcaactccgccggggtaattccggtgatctttgcgtcttcgattatgtcaattccggtgacgattgcccagttccaaccgcaaaccgaatcacgctggtttgtggaggactatctttcactgtccaaaccaactggcattgtcctgtatggtatcttggtgattctctttagcttcttttacagctacatccagatcaatccagaacggttagccaaaaacttcgagaagtccgggcgttttatcccgggtattcgtcccggtaaggatactgagaaacacattgccagagtactcgtgcggattaactttattggcgcccctttcctaacggtgattgccattattccttacatagtgtcagccttaatccacttacccaactccttaagtttagggggtacggggattattatcattgttaccgctgtggttgagtttatgtcagcactccgctctgcagccaccgctactaactaccaacaactgcgccgcaacttggcgattgaagtgcaaaaaacagcccaacaagacaaggaggaacaactgcgcgctgaaacccctggtattggtaacctatggtaa

SEQ ID NO: 28117 - DNA, 456 bp, Mycoplasma pneumoniae
atggaactcaatcaactcaaaagtgtccccaaagcgcgaaaccacaagaccaaaactttaggtcgtgggcacggctcgggtttaggtaaaacatctggtcgaggccagaaggggcaaaaagcgcgcaagtccggtttaacccgtcctggttttgaaggaggacaaacgccactgtaccgtcgtttaccgaagtttggtaacgcacgcaagggctttttaaagcaggagtgggtggtgttaaacctcaataaaattgctaaattaaagctcgacaaaattaaccgcgctagcttaattgaaaagcaagtaattagcgcaaagagccaattaccaattaaactaattggccacactaagctcgaaaagccgttgcactttgaggtgcacaaggtttccaagcaagctttgaaagcggttgaaaacgccaacggtagtgtgaagctgttagagaaataa

SEQ ID NO: 28118 - DNA, 660 bp, Mycoplasma pneumoniae
atgactgatcaaaaccaaaaagcaaatcaaggtaacggcttgcaaaccactaacctccaagcccacgcacagcgtaaacacaacctccgtccttcctctgaagggattaagaaagccgtgtccaaaaaggaaggtggtggtcacaaccgtaacaaccaaaaccgtcgcttccaaaaaccggctttcaagagtgagtttgaagaacgcatcgtcaaactaaagcgcatttctaaaaccactaagggtggacggaacatgcggtttagtgtgctggtcgtagttggtaaccgcaagggcaagatcggttatgggattgctaaggccttggaagtaccgaatgcgattaagaaagccattaaagcagcgcacaactcactccacacaattgaaatccacaagggttcaatttaccacgaagtaattggccgtagtggggcgagtcgcgtgttgctcaaacccgctcctcaaggtacgggaattattgctggtggtgccattcgggccattattgagctcgctggttacagtgacatttacaccaagaacctcggtcgcaacacgccaattaacatgatccacgccaccatggatgggatcttaaagcagctctctccacgtcgggtagcgatcttacgtaacaaaaacctcaacgaactttag

SEQ ID NO: 28119 - DNA, 351 bp, Mycoplasma pneumoniae
atgaaaacacgaacagaacaacggcgcttacgccataaaaggattgtgaagaagatccgcgccactaaccacgacaaccgcgttgtgttaatggtgattaagtccttaaaccatattagtgtgcaagcgtgggacttttcccagaacattgttttagcgtcctcttcctcacttgctttaaaattaaagaatggtaacaaggacaatgccaagttagtggggcaagacattgctgataaactagtgaagctcaaactaaccaacgttgtctttgacactggtggtagtaagtaccacggccggattgcggcattggccgaagcagcccgcgaaagggggttaaacttctaa

SEQ ID NO: 28120 - DNA, 555 bp, Mycoplasma pneumoniae
atgtcaaaaataggaaacagaacgattacactagaccccgctaaggtcaaccttaacttccagaaggaccacattgccgttaagggtcctttgggtcaaattgagctcaaactaccccctaacttaccgctcaagtttgaactgaaggataataacctccaaattacgcggaacaacgagttaaagcaatccaagatcttccatggtacttacaacgcgttaattaccaacgccattattggggttactcaaggctttgaaaagaagctgcgcttagtcggtgtgggttaccgtgctaacgtggaaggggaaacgctcaacctccagttgggttactcccatcccattaaggaaaagattcccaaaggcttaacagttaaagtagaaaagaacaccgagattaccatttcgggaattagtaaggagttagtgggtcagtttgccactgaggtgcgcaagtgacgcaaacccgaaccgtataagggtaagggagtgttgtactttgatgaagtgattgtccgtaaagctggtaaaaccgcggagggtaaaaaatag

SEQ ID NO: 28121 - DNA, 429 bp, Mycoplasma pneumoniae
atgataacaactacaaaaccaattaaagcccactttgatccagtggctgacttactaacgaagattaacaatgcgcgcaaagcgaagttaatgacggtaaccacaattgcttccaagctcaagattgccatcttggaaattttggtcaaggaaggttatttagctaacttccaggtcttggaaaacaagagcaagaccaagcggattgtcacctttaacttaaaatacacgcagcgccggattccctccattaacggggtgaaacaaatttccaagccgggtctgcggatctaccggccctttgaaaagctcccgttagttttaaacggtcttgggattgccattatttccactagtgatggcgtgatgactgataaggtagcgcgcttaaagaaaattggaggggagattctcgcttacgtttggtaa

SEQ ID NO: 28122 - DNA, 186 bp, Mycoplasma pneumoniae
atggccaaaaaatcattaaaagtaaaacaaactagaatccccaaatttgccgtacgggcttacacccgctgtcagcgttgtggtcgagcccgggcagttttaagccactttggtgtgtgccgtttgtgcttccgcgaactagcatacgctggcgcaattccaggagttaaaaaagcatcatgataa

SEQ ID NO: 28123 - DNA, 543 bp, Mycoplasma pneumoniae
atgaataatctcaaagcacattaccaaaaaacaattgccaaagagctgcaaaagagctttgcgttttcctcgattatgcaagtaccgcgcttggaaaaaattgtgattaacatgggggtgggtgacgccattcgcgacagtaagttcttggaatcagccttaaacgaactccacctcattagcggtcaaaaaccagttgctactaaggctaaaaacgccatttccacctataagctgcgcgctggtcaactaatcggttgtaaggttaccttgcgcggtgagcggatgtgggcctttttggaaaaactgatttatgttgccctacctcgggtgcgggatttccgcggcctttctttaaagtcttttgatggtcggggtaactataccattggaattaaagaacaaattattttcccggaaattgtctatgacgacattaaacggatccgcgggtttgacgttactctggtaacttcaaccaataaggacagcgaagcattagctttacttagagcgttaaacctcccacttgtaaaaggataa

SEQ ID NO: 28124 - DNA, 336 bp, Mycoplasma pneumoniae
atgcaacgaattaaaaaaggtgataaagtagtcgtaattaccggtaagaataagggtggtagtggcattgttttgaaaattatgcccgcgcgccaacaagcaattgtagagggactcaacaaagtaacacgccacaaaaagaaggaccaaaccacaaagcgcgctgctaaacaatcgaccggtaaagtgcaacaagaagcgccaatcttcttgagcaagttagctttatttgaccaaaaggcaaaacaacaaacaattggcaaaattaagtacgttatggaccctaagactaataagaagacccgggtctttaagaaatccaacaacacgctctag

SEQ ID NO: 28125 - DNA, 369 bp, Mycoplasma pneumoniae
atggtaagtttcatgacaagactaaatgttgccgataacacgggcgccaagcaagtgggcatcattaaggtattaggttccacccggaaacgttatgcctttttgggtgatgtggtagtggtatcagttaaggatgctatccctagcggtatggtcaaaaagggtcaagtgctacgggcagtaattgtccgcactaaaaagggccaacaacgtaaggatggtacccaccttaagtttgatgacaacgcttgtgtgttaattaaggaagacaagtcaccaagaggcacacggatctttggtccggtagcgcgtgaactacgggaacgtggttacaacaaaattttgagtttagcagtggaggtagtgtaa

SEQ ID NO: 28126 - DNA, 258 bp, Mycoplasma pneumoniae
atgaaacgtaatcaaagaaaggtcctaattgggattgttaaaagtactaaaaacgccaagaccgctacggttcaagtagaatcacggtttaagcaccctttgtaccataagtccgtagtgcgacacaagaagtaccaagcccacaatgagggtgaagtactcgctaaggacggggacaaggtacaaattgtggaaacgcgaccgttgtctgcaaccaagcgcttccgcattgccaaaattattgagagggctaaatag

SEQ ID NO: 28127 - DNA, 336 bp, Mycoplasma pneumoniae
atgaccgttgcaaaagaattacgccaaaagagttccgaagagttggtaaaactcgtgattaagctcaaaggggaactgttagagtaccgctttaagttagcacacggggagctagacaaaccgcacttaattaaccaaaccaggcggttattggctaccattttaacgattcttaccgagcgtaagttgaactgacaagaagaacaagctaagtacaaactgctcactaaaaaaacgaacgaagcagctgtgaatgcttggaagcaacacctagaagctaacaaagcgaagctgttaaagtcacgtgctaaacgcgaggatgctagcaagaaataa

SEQ ID NO: 28128 - DNA, 420 bp, Mycoplasma pneumoniae
atgttacaaccaaaaagaacaaagtaccgcaaacctcacaacgtgagttacgagggcaaggctaagggcaacagctatgttgcttttggtgaatatggtctagtagctactaagggtaactggatcgatgcccgtgccatagaatcagcccggattgccattagtaagtgtttgggtaaaaccggtaagatgtggatccgcatcttcccccacatgtccaagactaaaaaaccgttagaagtacggatgggttctggtaagggtaacccggaattctgggtagcagtagtaaaacagggcacggtgatgtttgaggtagctaacatccctgaaagccaaatgattaaggctctaacccgtgctggtcacaagttacccgtgacctgaaagattctcaaacgcgaggaggtaagtgcataa

SEQ ID NO: 28129 - DNA, 822 bp, Mycoplasma pneumoniae
atgggacaaaaagtaaactccaacggcttgcgctttggtattaacaaaaactggatttcgcgttgaaccgctaactcccacgcccagactgccaagtggttaattgaagacgaaaaaattcgtaacctcttctttgtcaactaccgcaatgcccaagtttcgaacgtggagattgaacgtactcaagcaaccgtggacgtatttgtgtacgccgcccaacccgcttttctcattggtagtgaaaacaagaacatccaaaagatcaccaagcaaattaagcaaattattggtcgtaccaccaatttagacctcaccattaacgaaattggctcccctatgttatcagcgcgcattattgcgcgggatctagccaacgcgattgaagcacgggtaccgttacgaacggcaatgcgccaatccttaattaaggtgttgaaggctggcgctaacgggattaaggtgttggtatcgggtcggttaaacggtgccgaaattgcgcgcgacaagatgtacatcgagggcaatatgccactgtcaaccctgcgtgctgacattgactatgccttggaaaaagcgcaaactacgtacggtgtcattggtgttaaggtatggattaatcgcggcatgatttacaccaagggcttaaaccgcaccccggcccacattctccacccacaaaagaaacaaccaaaccgccaaaaccaacaaccacgccactttaaccagggccaggtgttgagtgctaataagttaactggtagtgatgtggagaccagcagtatccaagcacttactaagcctaacaaggaggacaaacaataa

SEQ ID NO: 28130 - DNA, 555 bp, Mycoplasma pneumoniae
atgacatggtggggcacaaactcggtgagttctccccgacccgtaacttcaaacaacacaccgctaaccgttagtatgatcgcctttgcaaaacaattccgtgtgagaatctcaccccaaaaagcccgcttagtgtgtcaactcattgtgggtaagaaaaccgctgatgcccaaaacatcctttccaatacacccaaaaaagcggctaccttaatcgctaaactactcaacagtgcgattgccaacgctaccaataaccacggcatgaatggggatgctctttatgtctttgagtgtgtggctaaccaaggtccgagtatgaagcgcactattccccgcgctaagggctcgagtaacatgattaccaagcgctcttctaatttagtggtgaaactatcggataacccgaatgaacgtcaagaattaattaaacaacaaaaggccctagttaaaaaacgggtcgaaggtcaacaaaaagcaaagatggcacgtcaaaaagcagtaacatcagtggtaaaagcgccaagtaaaactcaaggaggtgtacaaaagtaa

SEQ ID NO: 28131 - DNA, 264 bp, Mycoplasma pneumoniae
atgtcacgcagtgctaaaaaaggagcctttgttgatgctcacctcttaaagaaagtgatcgatatgaacaaacaagagaaaaaacgtccgatcaaaacctggtcccgtcgtagtaccatcttccccgaatttgtcggtaatacctttgctgtacataacggcaagaccttcattaatgtttatgtaactgatgacatggtggggcacaaactcggtgagttctccccgacccgtaacttcaaacaacacaccgctaaccgttag

SEQ ID NO: 28132 - DNA, 864 bp, Mycoplasma pneumoniae
atgcctattaagaaaattattagtcgttctaacagtgggatccaccactccacggtaattgactataagaagttattaaccaccaataagaacaaaccagaaaagtcgttgttagttacccttaaaaaacacgggggtcgcaacaaccaagggaaaattacggtgcgccaccagggtggacgcaacaagcgcaagtaccgcattattgactttaaacgaacgcactatgacaacatcgaagcgaccgttaagtcgatcgagtacgatccgaaccgttcttgctttgtgtcgttaattacttacgctaacggtgccaagagttacatcattagccctgatggcattaaggtaggtgataagatcttggcttccgaacacccgattgacattaaaccgggctttagtatgcccttagcctttatccctgaaggtacccaagtgcataacattgaactccaccctaagggaggtggtcaaattgccaggagtgcggggagttatgcccgcattttgggtcaagacgaaactggtaagtatgtcattttgcaacttttaagtggtgaaacacgcaagttcttaaaggagtgccgtgctactgtgggagtagtttctaacttagaccacaacctcgtagtcattggtaaggctggtcgcaaccgtcaccgcggcatccgtccaaccgttcgtggttcggccatgaaccccaatgaccacccccacggtggtggtgaaggtcgtagtcccgtgggtcgggatgcaccccggactccatggggtaagcgccacatgggtgtgaagacccgcaacatgaagaaagcatccactaacttaattattcgtaaccggaaaggagaacaatactaa

SEQ ID NO: 28133 - DNA, 714 bp, Mycoplasma pneumoniae
atggatgtaacgaacgtactgctaaaaccagttctaaccgaaaaggtgtacttcaaccaaatgggtgaaaccaagaagtacgtctttgtggtgaaccctaaagcaagtaaaacacgcgttaaactagcttttgaattagtgtatggcattaagccactgaaggttaacaccttaattagaaaaccaaccaccattcgcggtgggagccgttttcctggtttgagcaaactagaaaagttggctgtgattaccttaccaaagggtattgccatttcagttactggtgaagcgccagaaaaaaccgataagccagcggacaaaaccacccttaaggaaagtactgttaaggagattaaggacaccaaaaacagtccagaagctgttgtgaaaactgctgtggaagcgttgcaaattaaaccaactgccgctcctgtaaccaccgcccctctacaaaccgtggcggtgaaggtagctaaagaagttaaagaagttaaggtagaaaagccggttaaagtggaaaaaccaaccaaaccggcaaaggtagcaaaagaagctaaaacgaccaaagtagctaaggaaactaaagctgaaaagtcagttcaaacaaccaaagtagctaaggaaactaaaactgaaaagtcagctaaaactaccaaaactacagctacaaaaactactaaaactaaaaccaccaaaaaggaggttaaaaagtaa

SEQ ID NO: 28134 - DNA, 639 bp, Mycoplasma pneumoniae
atggctaagcttaaactaattaaaatcgacggttcctttgaaactgaaccagtgaaactaagccctggtttaattgctaaggaactcaaacaacaaccggtgtttgatgccgtgttagtagaacaagcttcctgacgccaaggcacccattccattttaaccaagggcgaagtccgtggtggtggtaagaagccttacaaacaaaaacacaccgggaaagcgcgtcaaggttcaacccgtaacccccactttgttggtggtggcattgtgtttggtcccaagcccaatcgtaactacagcttaaaactcaacaagaaagcgcacacggcagccttgcacactgtttggagtgaaaagttagcttcagacaacacccacctagtggaccaaaacctctttaacaaaactgagggtaaaaccaaggtgatgatgcaatttttaaagagtgccaagctcttggacaaaaacgtgttgtttgtagttaatacccttaacaccaacttagaacaaagcaccagcaacattaaaaacgtgcaggtcaaacacctagacaaggtttctgtaagggatctgatgttagctaacgctcttttagttgaaaaagaagttttaaaagctttggagggcaaatttaaataa

SEQ ID NO: 28135 - DNA, 864 bp, Mycoplasma pneumoniae
atggaaattcgtggtatttttggggttaaagtaggcatgagccaggtgtttacaaccaataatgagcgcctacctattaccgttatttattgtgaacctaaccaggtagcaggtgttaagactgaggctaaggacaagtacagtgctaccttgttgagttttgacaccgttgaaaacaaaaagctcaacaagcctcaacaaggcttctttgaaaaaaacaacttaaagccaaccaagcacttacaggaaatccgcaatatgaccgggtttgaaatggggcaacaaatcacaccgcaaaatctcttccaagtgggtgagtatgttgatgtaagtgccattagtaaaggtcgtgggtttactggtgccattaagcgctggaactttaagatcggtccgttaggtcatggggctggttatccccaccgcttccaaggttcagtccaagctggtcgtgggggtgcgagtgcacaaagagtgtttaagggcaaaaagatgtccggacactatggtcatgaaaaagtaacggtacaaaacttacgcattgttggttttgatgaagctaacatgttggtattagtatcaggggcgatcgcaggtcctgaaggtggtgtggtcttaatccgtaccgctaagaaaaaaccgggggtagtgaaaccaattgagttagctgttcaaaccgaaaaggcaccggaagcaaaaccggccaagctttccaaaaagaaacaagccaaggagttagcgaaagcacaagcagctaaccagcaaactgttgaagctaaggtagacactccagtagtagaaccaaaaccaactgaagttaaaaaagcagcaccagttgtagaaaagaaaggggaagataaataa

SEQ ID NO: 28136 - DNA, 327 bp, Mycoplasma pneumoniae
atgaacgccgctaacgcagttaagtaccctgagctcaagattaagctcgagtcctatgacagcacccttttagacctcactacgaaaaagatagtggaggtagtaaagggtgtcgatgtcaaaattaaaggtccattgcctctacctaccaaaaaagaggtaattacgatcatccgttcaccccatgtggataaagcatcacgcgaacagtttgaaaaaaaccgccacaaacgtttaatgatcttggtggatgttaaccaaggtgcgattgacagcttgaagcggatcaagatccccgttggagtaactttaagattttcaaagtag

SEQ ID NO: 28137 - DNA, 1275 bp, Mycoplasma pneumoniae
atggaaagtgcccccagtggtggcctgttggccttaattattatcagtattatcctcctggcttgtattagtgccgtggtttcggcttacgaaaccgccattacctcaattacatcatacaagtggagcaactatgtcaaaacgcataacaagcaaaagaagttaacgaccaagattgttaaccacttccaaaagaactattcggcttgtttaattaccatcttagtggccaataacattgtcgccattttggtttccaacatcctctttttggctttagatcaatcgattaagaatccggccatttccagtgccttgaacctcttaattagtggggtgttattgttaatgctgtgtgaaattactcccaaaaccttagcacggattaacatcatccgcgtcttggtctactttgcggtggtagtgtattttttctacatccttttttgaccaattaccaagttagccagcattatctttgccaaatacgaaaaggcacccccagtttcccgccgtgatgtttacttctttattgatgaaattgagcaaaacgggttatttaccaaagaagacgggcagctaattaaacggaccctaatctttgaccaggtcttagttgaccaaatcatgattaagtgaaaccgggtggtgtactgttatgaaggtgatccagtcaagaccattaaggaaaagttcttgcacggccagttttccagaatgcccgtactcgaccagacaagcaatgaagtggttggttttatccacctcaaggacttgtttagttcactcgaaaagagcaacgagccgtttgttttacaggagttattgtatccagctgttttagtaagtaacaccacacccatcaagcaagctttgcgccaaatgcggttacaccgggcccacttagcggtcgtgcaggacaaacaccaccacacgatcgggattgtttctatggaagacatcattgaggaattagtcggggaaatttacgatgaacatgatgaggtggaggcagtgcaaacgttggacaacaacacctggttagtgttaccgaacgtaaaagccgcctttttctttaacaagtggattaaacgggatttagtaaaatcaaaaaacatgacgatccaacgttacttggcatcgtttgaaaatgatgggttaaacacccagaataaactagaaacgccgtggtttattgctgaagcaattgtcgacagcgagaaccccgagcaaattcggtacgaaattcgcaaaaagagtgatgttgtggactag

SEQ ID NO: 28138 - DNA, 810 bp, Mycoplasma pneumoniae
atgcagcaaaccttgatcatcggtgcttttgatggtttacacaagggtcatcaattgttagcacaagcggctagtggtccagtggtggccttgttaattgctaacattcccagtctacaaagtgactggctatacgaaccgaagcaacggcaagtgcagttacaacaacactttcagtccgtggtgcacagctatgatgtgattgaacacaacattagtgcccaagcgtttttcgatcaaatcattagcccactacggtgtcagcaattagtcgtgggtgcggacttttgctttggtaaagacaaccagaatgctgattttttaagacgtttatttcccaataccacgattattcccaaagacagtcaaacgctgtccagttctaccattcgccaatggttaaagcagggccagatagaacaagccaacgccgtgttattggaaccctactttagggaaggggtggttattcgtggtaaccagcaagcccggtttttgggctgaccaaccgctaacattaccttaaagccgtacatggtgccgttgcgctgtgggagctatgtgattacggtgacttaccaccaaaccaattacccgggtgtagggtttatcagttacaaaaacgaccagttagtctgtgaaacccacttaattggttttagtggtgatctttacggtaaacaactacgctttaccttcaaccagtttattcgcccccagcaaaagtttagtggggtgcaagcgttgcaaaaagcgattagtggtgatttaaagcaagcgcagaagtggtttgctcaatcaacaaattaa

SEQ ID NO: 28139 - DNA, 1854 bp, Mycoplasma pneumoniae
atgtcaaagcataaaccacgtcattttcaaaagaataagtttgacaaccgggctaaaacgagtgccaaacaacagtttcgccaggtcaaaaccggtgttaaagatggtgtctttgtctataagggaccactcactgttagtgagttttgtctcaaaaccaatattccgacggccaacatcatcaagcacttctttttaaatggggttcccttaaccttaaattcggtgttatcgaccgaacaactagctgacgcttgtgttaactttggctttgactttaaggtagaaaccgaaatcacccacgacaacattatctccaacattaagtttgacgatgatcccacccagttaagtccaagacccccgatcgttaccattatgggtcacgtggatcacgggaaaacatccttgttagacgccattcgccaaactaatacagcagccaaagagtttggtggcattacccaaaagattggggcgtaccaggtcaaaaaccaggagggcaaaacgattaccttcattgatacccccggtcatgaagcctttaccggcatgcgcgcccgtggtgctcaagtgactgacattgttgtcttagtggtagcgggtgatgatggcttaaaacaacaaactgaggaagcgatttcccacgccaagagtgccaaaaccccgatcattgtctttattaacaagatggataaaccaaccgctaaccccgacatggtgatccaacagctcaacaagtttgatttagtccctgaagaatggggtggtgataccatctttgtcaagggcagtgccttaaccaaagaggggatccaggagctcttggacagtattctgttagtagcggaagtggaagattacaaggccaactttaacgcccactcatcgggttatgcgattgaggtgcaaaccaccaaggggttgggtcccaccgctaccattattgttaaacgtggtaccctaaagattggtgacatcgttgtcttgggtcccgcttggggtaaggttcgtaccatgcaagacgaaaacggagtccatctccaagaagctatgccctctaaaccagtacaaatttcggggtttgacattgtcccagttgctggggaaaaattcattgtctttgacgatgaaaaggatgcgaagttaattgccaataagttccgcgaacagcaaaaacaaaagctcaataccacccaaattaacgaggagctcaaacaaaagattaagagcaaggaaattaaggttttaaatctgatttttaaggttgacagtgatggtagtttagcggccattaaacaagctatgcagagcattgatgtgccggggatgagcgtcaacattatccactcaggtgttggtttaatctcggaaaacgacattatgttagccaaggcgtccggggcattactgtttagcttgaacctcggtttaagtcaagttgttaagaacattgctagtcttcaaggagtgaaggtcgatgtccactaccacatccctaagttagcggaagagatcgaaaacatcttaaagggccagttagaaccagtgtacgaagacgtggaactggggcgtgctgaagtgttacaactctggtaccactccaaggtggggcacattgctggtaccttagttaaaacaggtaaggttaaacggggcgccttgtgtaagctgttacgccgtaacgaaaccatctatgaaggccgggtggactcattgaagagtgaaaagaacccggtcaaccagatggaagcggggaagaactgcggtattgttattaatgggtgtgaggacattcaggtgtgcgacattatcttggtgtacgaaaagcaggaggtcaagtccaaaagttaa

SEQ ID NO: 28140 - DNA, 1623 bp, Mycoplasma pneumoniae
atgaacaatcaatcaaatcactttaccaatcctttgttacaactgattaagaacgttgccgagaccaagaatttagccatcgatgatgttgttttgtgtcttaaaacagcattagcacaaacatacaagaagcatttgaactatgtcaatgtggaagtcaacattgactttaacaagggcttaatgcaaattgaacagctcttcgatgttgtagatgataacaatgaggattatgatgactttttggaaatgcctttaagtgaggctaagaagctcaatccgaacctagaagttggcggggtgttgcgcaaaccggtttcactcaaagacattaagggcgatctcattagcaaaatggtattactcttcaaccaaaagattaacgaaacagcttttaaaacggtgatgagtgacttcattaatgaagtcggtcaggtaattgaagctagagtagaggacattgatacgaacaaagatggtggattgaagggttacattgttaacttggaaaccaccaagggttacatgcctaaacgtgagttgagtaagggcgaaaagctagatattggcaagaagtacctctttgtgattaaggaaatccaaaagcaatcttcgatgtgaccaattacgctttccaggagtgattcgcgtttactggaattcttgctaaattccaacactcccgaaattgctaacggtacgatcgaaattaaaaagatggaacgctctcctggtaccaagtctaaggtggccgtgatttccaaagacccagtagttgatccgattgcggccattttgggtcccaagggcgagcgcattcgcggcattagtgaagagtttaacggtgagatcattgatattgtcatctgaaatgaggacaagttaaagttcttggtcaacgctgttttaccggctgaagtggtcggttacaacatccttcaagacgatgagcgcgataccagcattgaaatcgtggtacccgccaaccagattgccaacgtctttggttttaaaggaattaacattcgcttaattagtaacctaacgggttggagtagtgtggacgtttacaccgaaaaagatgctgctgaacaagggattgaattcacccgggtcaactttcaaccccaaggtatttttggcatcaaaaagcgccgcgacaagatctccaacaatccacgcaacaacaaccaacagctcgcatctgataaggtgttttacacttcgaaggccaatgtggttgatgatgagatcatagtcgatctagcaaagcaagcggaagccaaacgggtcaagcaaatcaagcaggaagcaactaaacccgagttgcaattacaacaagaacttaacctcgaagcaacccctaaggtagctgctccaaccccaacccctgcaccccaaccaactcccgcaccaactaaagttgagccagtaccaccaccagtaagcgttacacctaagccaatccccaaggtcaataagcccaagccagtggttaaaccaaaatcagtcttttcgattacggttgaagcggatgacagtaagactaaaccagaaaagtcaagcgctaaaactaacaccccacaaacgaaacaaacctttgataactttgacgatctctag

SEQ ID NO: 28141 - DNA, 1524 bp, Mycobacterium tuberculosis
ttgaccgatgaccccggttcaggcttcaccacagtgtggaacgcggtcgtctccgaacttaacggcgaccctaaggttgacgacggacccagcagtgatgctaatctcagcgctccgctgacccctcagcaaagggcttggctcaatctcgtccagccattgaccatcgtcgaggggtttgctctgttatccgtgccgagcagctttgtccaaaacgaaatcgagcgccatctgcgggccccgattaccgacgctctcagccgccgactcggacatcagatccaactcggggtccgcatcgctccgccggcgaccgacgaagccgacgacactaccgtgccgccttccgaaaatcctgctaccacatcgccagacaccacaaccgacaacgacgagattgatgacagcgctgcggcacggggcgataaccagcacagttggccaagttacttcaccgagcgcccgcacaataccgattccgctaccgctggcgtaaccagccttaaccgtcgctacacctttgatacgttcgttatcggcgcctccaaccggttcgcgcacgccgccgccttggcgatcgcagaagcacccgcccgcgcttacaaccccctgttcatctggggcgagtccggtctcggcaagacacacctgctacacgcggcaggcaactatgcccaacggttgttcccgggaatgcgggtcaaatatgtctccaccgaggaattcaccaacgacttcattaactcgctccgcgatgaccgcaaggtcgcattcaaacgcagctaccgcgacgtagacgtgctgttggtcgacgacatccaattcattgaaggcaaagagggtattcaagaggagttcttccacaccttcaacaccttgcacaatgccaacaagcaaatcgtcatctcatctgaccgcccacccaagcagctcgccaccctcgaggaccggctgagaacccgctttgagtgggggctgatcactgacgtacaaccacccgagctggagacccgcatcgccatcttgcgcaagaaagcacagatggaacggctcgcggtccccgacgatgtcctcgaactcatcgccagcagtatcgaacgcaatatccgtgaactcgagggcgcgctgatccgggtcaccgcgttcgcctcattgaacaaaacaccaatcgacaaagcgctggccgagattgtgcttcgcgatctgatcgccgacgccaacaccatgcaaatcagcgcggcgacgatcatggctgccaccgccgaatacttcgacactaccgtcgaagagcttcgcgggcccggcaagacccgagcactggcccagtcacgacagattgcgatgtacctgtgtcgtgagctcaccgatctttcgttgcccaaaatcggccaagcgttcggccgtgatcacacaaccgtcatgtacgcccaacgcaagatcctgtccgagatggccgagcgccgtgaggtctttgatcacgtcaaagaactcaccactcgcatccgtcagcgctccaagcgctag

SEQ ID NO: 28142 - DNA, 1209 bp, Mycobacterium tuberculosis
atggacgcggctacgacaagagttggcctcaccgacttgacgtttcgtttgctacgagagtctttcgccgatgcggtgtcgtgggtggctaaaaatctgccagccaggcccgcggtgccggtgctctccggcgtgttgttgaccggctcggacaacggtctgacgatttccggattcgactacgaggtttccgccgaggcccaggttggcgctgaaattgtttctcctggaagcgttttagtttctggccgattgttgtccgatattacccgggcgttgcctaacaagcccgtagacgttcatgtcgaaggtaaccgggtcgcattgacctgcggtaacgccaggttttcgctaccgacgatgccagtcgaggattatccgacgctgccgacgctgccggaagagaccggattgttgcctgcggaattattcgccgaggcaatcagtcaggtcgctatcgccgccggccgggacgacacgttgcctatgttgaccggcatccgggtcgaaatcctcggtgagacggtggttttggccgctaccgacaggtttcgcctggctgttcgagaactgaagtggtcggcgtcgtcgccagatatcgaagcggctgtgctggtcccggccaagacgctggccgaggccgccaaagcgggcatcggcggctctgacgttcgtttgtcgttgggtactgggccgggggtgggcaaggatggcctgctcggtatcagtgggaacggcaagcgcagcaccacgcgacttcttgatgccgagttcccgaagtttcggcagttgctaccaaccgaacacaccgcggtggccaccatggacgtggccgagttgatcgaagcgatcaagctggttgcgttggtagctgatcggggcgcgcaggtgcgcatggagttcgctgatggcagcgtgcggctttctgcgggtgccgatgatgttggacgagccgaggaagatcttgttgttgactatgccggtgaaccattgacgattgcgtttaacccaacctatctaacggacggtttgagttcgttgcgctcggagcgagtgtctttcgggtttacgactgcgggtaagcctgccttgctacgtccggtgtccggggacgatcgccctgtggcgggtctgaatggcaacggtccgttcccggcggtgtcgacggactatgtctatctgttgatgccggttcggttgccgggctga

SEQ ID NO: 28143 - DNA, 2145 bp, Mycobacterium tuberculosis
atgggtaaaaacgaggccagaagatcggccctggcgcccgatcacggtacagtggtgtgcgaccccctgcggcgactcaaccgcatgcacgcaacccctgaggagagtattcggatcgtggctgcccagaaaaagaaggcccaagacgaatacggcgctgcgtctatcaccattctcgaagggctggaggccgtccgcaaacgtcccggcatgtacattggctcgaccggtgagcgcggtttacaccatctcatttgggaggtggtcgacaacgcggtcgacgaggcgatggccggttatgcaaccacagtgaacgtagtgctgcttgaggatggcggtgtcgaggtcgccgacgacggccgcggcattccggtcgccacccacgcctccggcataccgaccgtcgacgtggtgatgacacaactacatgccggcggcaagttcgactcggacgcgtatgcgatatctggtggtctgcacggcgtcggcgtgtcggtggttaacgcgctatccacccggctcgaagtcgagatcaagcgcgacgggtacgagtggtctcaggtttatgagaagtcggaacccctgggcctcaagcaaggggcgccgaccaagaagacggggtcaacggtgcggttctgggccgaccccgctgttttcgaaaccacggaatacgacttcgaaaccgtcgcccgccggctgcaagagatggcgttcctcaacaaggggctgaccatcaacctgaccgacgagagggtgacccaagacgaggtcgtcgacgaagtggtcagcgacgtcgccgaggcgccgaagtcggcaagtgaacgcgcagccgaatccactgcaccgcacaaagttaagagccgcacctttcactatccgggtggcctggtggacttcgtgaaacacatcaaccgcaccaagaacgcgattcatagcagcatcgtggacttttccggcaagggcaccgggcacgaggtggagatcgcgatgcaatggaacgccgggtattcggagtcggtgcacaccttcgccaacaccatcaacacccacgagggcggcacccacgaagagggcttccgcagcgcgctgacgtcggtggtgaacaagtacgccaaggaccgcaagctactgaaggacaaggaccccaacctcaccggtgacgatatccgggaaggcctggccgctgtgatctcggtgaaggtcagcgaaccgcagttcgagggccagaccaagaccaagttgggcaacaccgaggtcaaatcgtttgtgcagaaggtctgtaacgaacagctgacccactggtttgaagccaaccccaccgacgcgaaagtcgttgtgaacaaggctgtgtcctcggcgcaagcccgtatcgcggcacgtaaggcacgagagttggtgcggcgtaagagcgccaccgacatcggtggattgcccggcaagctggccgattgccgttccacggatccgcgcaagtccgaactgtatgtcgtagaaggtgactcggccggcggttctgcaaaaagcggtcgcgattcgatgttccaggcgatacttccgctgcgcggcaagatcatcaatgtggagaaagcgcgcatcgaccgggtgctaaagaacaccgaagttcaggcgatcatcacggcgctgggcaccgggatccacgacgagttcgatatcggcaagctgcgctaccacaagatcgtgctgatggccgacgccgatgttgacggccaacatatttccacgctgttgttgacgttgttgttccggttcatgcggccgctcatcgagaacgggcatgtgtttttggcacaaccgccgctgtacaaactcaagtggcagcgcagtgacccggaattcgcatactccgaccgcgagcgcgacggtctgctggaggcggggctgaaggccgggaagaagatcaacaaggaagacggcattcagcggtacaagggtctaggtgaaatggacgctaaggagttgtgggagaccaccatggatccctcggttcgtgtgttgcgtcaagtgacgctggacgacgccgccgccgccgacgagttgttctccatcctgatgggcgaggacgtcgacgcgcggcgcagctttatcacccgcaacgccaaggatgttcggttcctggatgtctaa

SEQ ID NO: 28144 - DNA, 2517 bp, Mycobacterium tuberculosis
atgacagacacgacgttgccgcctgacgactcgctcgaccggatcgaaccggttgacatcgagcaggagatgcagcgcagctacatcgactatgcgatgagcgtgatcgtcggccgcgcgctgccggaggtgcgcgacgggctcaagcccgtgcatcgccgggtgctctatgcaatgttcgattccggcttccgcccggaccgcagccacgccaagtcggcccggtcggttgccgagaccatgggcaactaccacccgcacggcgacgcgtcgatctacgacagcctggtgcgcatggcccagccctggtcgctgcgctacccgctggtggacggccagggcaacttcggctcgccaggcaatgacccaccggcggcgatgaggtacaccgaagcccggctgaccccgttggcgatggagatgctgagggaaatcgacgaggagacagtcgatttcatccctaactacgacggccgggtgcaagagccgacggtgctacccagccggttccccaacctgctggccaacgggtcaggcggcatcgcggtcggcatggcaaccaatatcccgccgcacaacctgcgtgagctggccgacgcggtgttctgggcgctggagaatcacgacgccgacgaagaggagaccctggccgcggtcatggggcgggttaaaggcccggacttcccgaccgccggactgatcgtcggatcccagggcaccgctgatgcctacaaaactggccgcggctccattcgaatgcgcggagttgttgaggtagaagaggattcccgcggtcgtacctcgctggtgatcaccgagttgccgtatcaggtcaaccacgacaacttcatcacttcgatcgccgaacaggtccgagacggcaagctggccggcatttccaacattgaggaccagtctagcgatcgggtcggtttacgcatcgtcatcgagatcaagcgcgatgcggtggccaaggtggtgatcaataacctttacaagcacacccagctgcagaccagctttggcgccaacatgctagcgatcgtcgacggggtgccgcgcacgctgcggctggaccagctgatccgctattacgttgaccaccaactcgacgtcattgtgcggcgcaccacctaccggctgcgcaaggcaaacgagcgagcccacattctgcgcggcctggttaaagcgctcgacgcgctggacgaggtcattgcactgatccgggcgtcggagaccgtcgatatcgcccgggccggactgatcgagctgctcgacatcgacgagatccaggcccaggcaatcctggacatgcagttgcggcgcctggccgcactggaacgccagcgcatcatcgacgacctggccaaaatcgaggccgagatcgccgatctggaagacatcctggcaaaacccgagcggcagcgtgggatcgtgcgcgacgaactcgccgaaatcgtggacaggcacggcgacgaccggcgtacccggatcatcgcggccgacggagacgtcagcgacgaggatttgatcgcccgcgaggacgtcgttgtcactatcaccgaaacgggatacgccaagcgcaccaagaccgatctgtatcgcagccagaaacgcggcggcaagggcgtgcagggtgcggggttgaagcaggacgacatcgtcgcgcacttcttcgtgtgctccacccacgatttgatcctgttcttcaccacccagggacgggtttatcgggccaaggcctacgacttgcccgaggcctcccggacggcgcgcgggcagcacgtggccaacctgttagccttccagcccgaggaacgcatcgcccaggtcatccagattcgcggctacaccgacgccccgtacctggtgctggccactcgcaacgggctggtgaaaaagtccaagctgaccgacttcgactccaatcgctcgggcggaatcgtggcggtcaacctgcgcgacaacgacgagctggtcggtgcggtgctgtgttcggccggcgacgacctgctgctggtctcggccaacgggcagtccatcaggttctcggcgaccgacgaggcgctgcggccaatgggtcgtgccacctcgggtgtgcagggcatgcggttcaatatcgacgaccggctgctgtcgctgaacgtcgtgcgtgaaggcacctatctgctggtggcgacgtcagggggctatgcgaaacgtaccgcgatcgaggaatacccggtacagggccgcggcggtaaaggtgtgctgacggtcatgtacgaccgccggcgcggcaggttggttggggcgttgattgtcgacgacgacagcgagctgtatgccgtcacttccggcggtggcgtgatccgcaccgcggcacgccaggttcgcaaggcgggacggcagaccaagggtgttcggttgatgaatctgggcgagggcgacacactgttggccatcgcgcgcaacgccgaagaaagtggcgacgataatgccgtggacgccaacggcgcagaccagacgggcaattaa

SEQ ID NO: 28145 - DNA, 1881 bp, Mycobacterium tuberculosis
atgaccaccccttcccacctgtccgaccgctacgaacttggcgaaatccttggatttgggggcatgtccgaggtccacctggcccgcgacctccggttgcaccgcgacgttgcggtcaaggtgctgcgcgctgatctagcccgcgatcccagtttttaccttcgcttccggcgtgaggcgcaaaacgccgcggcattgaaccaccctgcaatcgtcgcggtctacgacaccggtgaagccgaaacgcccgccgggccattgccctacatcgtcatggaatacgtcgacggcgttaccctgcgcgacattgtccacaccgaagggccgatgacgcccaaacgcgccatcgaggtcatcgccgacgcctgccaagcgctgaacttcagtcatcagaacggaatcatccaccgtgacgtcaagccggcgaacatcatgatcagcgcgaccaatgcagtaaaggtgatggatttcggcatcgcccgcgccattgccgacagcggcaacagcgtgacccagaccgcagcagtgatcggcacggcgcagtacctgtcacccgaacaggcccggggtgattccgtcgacgcccgatccgatgtctattccttgggctgtgttctttatgaagtcctcaccggggagccacctttcaccggcgactcacccgtctcggttgcctaccaacatgtgcgcgaagacccgatcccaccttcggcgcggcacgaaggcctctccgccgacctggacgccgtcgttctcaaggcgctggccaaaaatccggaaaaccgctatcagacagcggcggagatgcgcgccgacctggtccgcgtgcacaacggtgagccgcccgaggcgcccaaagtgctcaccgatgccgagcggacctcgctgctgtcgtctgcggccggcaaccttagcggtccgcgcaccgatccgctaccacgccaggacttagacgacaccgaccgtgaccgcagcatcggttcggtgggccgttgggttgcggtggtcgccgtgctcgctgtgctgaccgtcgtggtaaccatcgccatcaacacgttcggcggcatcacccgcgacgttcaagttcccgacgttcggggtcaatcctccgccgacgccatcgccacactgcaaaaccggggcttcaaaatccgcaccttgcagaagccggactcgacaatcccaccggaccacgttatcggcaccgacccggccgccaacacgtcggtgagtgcaggcgacgagatcacagtcaacgtgtccaccggacccgagcaacgcgaaatacccgacgtctccacgctgacatacgccgaagcggtcaagaaactgactgccgccggattcggccgcttcaagcaagcgaattcgccgtccaccccggaactggtgggcaaggtcatcgggaccaacccgccagccaaccagacgtcggccatcaccaatgtggtcatcatcatcgttggctctggtccggcgaccaaagacattcccgatgtcgcgggccagaccgtcgacgtggcgcagaagaacctcaacgtctacggcttcaccaaattcagtcaggcctcggtggacagcccccgtcccgccggcgaggtgaccggcaccaatccacccgcaggcaccacagttccggtcgattcagtcatcgaactacaggtgtccaagggcaaccaattcgtcatgcccgacctatccggcatgttctgggtcgacgccgaaccacgattgcgcgcgctgggctggaccgggatgctcgacaaaggggccgacgtcgacgccggtggctcccaacacaaccgggtcgtctatcaaaacccgccggcggggaccggcgtcaaccgggacggcatcatcacgctgaggttcggccagtag

SEQ ID NO: 28146 - DNA, 2316 bp, Mycobacterium tuberculosis
atgcccactggcttgggctatgactttctgcgccctgtcgaggactcggggatcaacgacctgaagcactattacttcatggcggatttggccgatgggcaaccgctaggccgggcaaacctctatagcgtctgtttcgacctggccaccaccgaccgcaagctcactccggcctggcgaacgaccatcaaacggtggtttccggggtttatgaccttccgtttcctcgagtgcgggttgctcaccatggtgagcaacccgctggcgttgcggtccgacaccgacttggagcgggtattgcctgtgctggccggccagatggaccagttggcgcatgacgacgggtcggatttcttgatgatccgggacgtggacccggaacactaccagcgataccttgacatcctgcgcccgttgggctttcggcctgcgctgggcttttcccgggtagacacgaccatcagctggtcgagcgtggaagaggcactgggctgcctgtctcacaaaaggcgcctgccgttgaagacgtcgctggagtttcgtgagcggttcggtatcgaggtcgaggaactcgacgagtatgccgagcatgcgccggtattggcccggctttggcgcaacgtcaagacggaggcaaaggattaccagcgcgaggacctgaaccctgagttcttcgcggcgtgttctcggcatctgcatggacgtagcagactgtggttgttccgctaccagggcacgccaattgccttctttttgaacgtttggggtgcggatgagaactacatactgcttgagtggggcatcgatcgtgattttgaacattataggaaggcgaatctgtaccgggcggcgctgatgctcagcctaaaagatgcgatcagccgagataaacggcgaatggaaatgggtattacgaactatttcacaaaacttcgcattccgggtgcccgagtcataccgaccatctatttcctgcgtcacagcacggatccggtgcatacggcaacgttagcgcgaatgatgatgcacaatattcaacggccaacgctacccgacgatatgtcggaggaattctgtcgctgggaagagcgaatacgtctggaccaggacgggctacccgaacacgatatctttcgcaagatcgatcgtcagcacaaatacacggggctcaaactcggcggagtctacggtttttatccccgattcaccggaccgcagcgatccacggtcaaggccgcggagctgggcgagatcgtgttgctgggcacgaactcgtatctgggcctggccacccatccagaggtggtggaggcctcggcggaggccacgcgacggtacggcaccggctgctcgggttcgccgttgctgaacggcacgttggacttgcacgtctcgcttgagcaggaactagcctgttttttgggcaaacccgccgccgtgttgtgctccaccggatatcagagcaacctggcggcgatcagcgcgctatgcgaatccggggacatgatcatccaagacgcgctgaaccaccgcagcctgttcgacgccgccaggttgtccggggccgacttcaccttgtaccggcacaacgacatggaccacctggcgcgggtgctacgccgcaccgaggggcgccgccggatcatcgtcgtggacgcggtgttcagcatggaaggcaccgtcgccgacctggccaccatcgccgagcttgccgaccggcacggctgccgggtctatgtggacgagtcccatgcgctgggcgtgctcggccccgacgggcgaggagcttcggccgcgttgggtgtcttggcgcgcatggacgtggtgatgggcacgttcagcaaatcctttgcctccgtcggcgggttcatcgccggagatcggcccgtcgtggactacatccggcacaacggttcaggtcatgtgttttccgccagcctgccgccggccgccgcggctgccacccacgcggctctgcgcgtcagtcggcgtgaacccgaccggcgggctcgggtgctggccgcggccgagtacatggccaccggcctggcacggcagggctatcaggccgagtatcacggaaccgcgatcgtgccggtgatcctgggcaacccgaccgtggcgcatgcgggctatctgcggctgatgcgctccggggtgtatgtgaacccggtggcccccccagccgtgccggaggagcgttcgggattccgcaccagctacctagccgaccaccgacaatctgacctcgaccgggccttgcacgtgtttgccggccttgccgaggacctgaccccgcaaggagccgcgctatga

SEQ ID NO: 28147 - DNA, 1326 bp, Mycobacterium tuberculosis
gtgcccagggtggaagtgggtttagtgattcactcccggatgcacgcacgcgcacccgtcgacgtttggcggtcggtgcgcagcttgcccgacttctggcgtctgctgcaggtgcgggttgcgagtcagttcggcgacgggttgtttcaggcggggctggccggagcgttgctgttcaacccggaccgggcggccgacccgatggccatcgcgggggccttcgcggtgctgtttctgccctattcgctgctggggcccttcgccggggccctaatggaccggtgggatcggcggtgggtgctggttggcgccaacaccggccggctagccctgatcgccggggtcggcacgatactcgcggtcggagccggcgacgtgccgctgttggtcggagcgctggtcgccaacggcttggcacgattcgtcgcctcgggactgtcggcggcactgccccacgtggtgccgcgcgaacaggtggtcacgatgaactcggtggccatcgcgtcgggggcggtctccgcgttcctgggcgccaacttcatgctgttgcctcgttggctgctcggcagcggcgacgagggggcctccgcgatcgtcttcctggtggcgatccccgtatcgatcgcgttgctttggtcgctgcggttcggcccgcgggtactcggcccggacgacaccgaacgcgcgatccacggatctgctgtctacgccgtggtcaccggttggctacatggagcgcgcaccgtggtgcaacttccgaccgtcgctgccggcctgtccggtttggcagcgcatcggatggtggtcggtatcaactcactgctgatcttgctcctggtccgccacgtgaccgcccgggccgttggggggttgggtaccgcactgctgttcttcgcggccaccgggctgggagccttcctggccaacgtcttgactccgaccgcgatccggcgctggggacgctacgccacggcaaatggcgcgttggctgcggccgccactatccaggtcgcggccgccgggctgctggtcccggtgatggtggtatgcggcttccttttaggtgtggccggccaggtggtcaagctgtgcgccgattcggcgatgcagatggacgtcgacgacgcattgcgcgggcacgtgttcgccgtgcaggatgcactgttttgggtctcatacatcctctcgattaccgtggccgcagccttgattcccgagcacgggcacgcgcccgtatttgtgctgttcgggtcggcgatctacctagccgggctggtggtgcacaccatcgtcgggcgccgcggccagcctgtgatcggtcgctag

SEQ ID NO: 28148 - DNA, 2910 bp, Mycobacterium tuberculosis
gtgaccgaatcgccaaccgctgggcctggcggcgtgccccgtgccgacgacgcggactccgacgtgccacggtaccgctataccgccgagctcgcggctaggctggaacggacctggcaggaaaactgggcccggctagggacgttcaacgtgcccaacccggtcggctcgctggccccaccggatggtgccgcggtgcctgacgacaagctcttcgtgcaggacatgttcccctacccctcgggtgagggactccacgttggtcatcccctcggctacatcgcgaccgacgtctatgcccgctatttccggatggtgggccgtaatgtgctgcatgcgctagggttcgacgcgttcgggctgcccgccgagcaatacgcggtacaaaccggcacccatccgcgtacccggaccgaagccaacgtcgtcaactttcgccgccagttgggccggctgggcttcggccacgacagccgacgaagcttctcgaccaccgatgtcgacttctacaggtggactcagtggatcttcctacagatatacaacgcgtggttcgacaccacagccaacaaggcgcgcccgatatcagagctggtcgccgaattcgagtccggtgcaaggtgtctcgatggcggccgggattgggccaagttgaccgcgggggagcgagccgatgtgatcgacgagtaccggctggtctatcgggcggattcgctggtgaactggtgcccggggctaggtacggtgcttgccaacgaagaggtgaccgccgacggccgcagcgaccggggcaattttccggtgttccggaagcggttgcggcaatggatgatgcggatcaccgcctatgccgaccggctgctcgacgacctggatgtgctggattggcctgagcaggtcaagaccatgcagcgcaactggatcgggcgttcgacgggtgcggtggcgctgttctcggcgagagcggccagcgatgacgggttcgaagtcgacatcgaggtgttcaccacgcggcccgacaccttgttcggcgccacgtatctggtgctggctcccgagcacgacttggtcgacgagttggtcgccgcgtcctggccggctggggtcaaccccttgtggacatacggcggcggcacacctggtgaggccatcgccgcctaccggcgtgcgatcgccgccaaatcagacctcgagcgccaggagagcagggaaaagaccggcgtcttcttgggcagctacgccatcaacccggccaacggtgagccggtgccgatcttcatcgccgactacgtgctggccgggtacggtaccggggcaatcatggcggtgccgggtcatgaccagcgggactgggacttcgctcgggcatttggtctaccgatcgtggaagtaattgccggcggcaatatttcggaatccgcgtatacaggcgatggcatcctggtcaactcggattacctcaatggaatgagcgtgccagcagcaaagcgggccatcgtcgaccggttggagtccgcgggccgcggccgggctcgaatcgaattcaaattgcgcgactggctttttgcgcggcagcggtattggggtgaaccattcccgatcgtctatgacagcgacgggcgtccgcatgcgctcgacgaagctgcactgcccgtcgagctgcctgatgtcccggactactcgccggttttgttcgaccccgacgatgcggacagcgagccttcgcccccactggccaaggcgactgagtgggtacacgtcgacctggacctcggtgatggcctgaagccctacagccgcgacaccaacgtgatgccgcagtgggcgggcagctcctggtatgaactgcgctacaccgatccgcacaactcagaacggttctgcgccaaggaaaacgaggcctattggatgggaccgcggccggctgagcacggcccggacgaccccggtggcgtcgacttgtacgtcggcggtgctgaacacgcggttttgcacctgctgtattccaggttctggcacaaggtcttgtacgacctgggtcacgtcagctctcgcgagccttaccgcaggctggtcaatcagggctatattcaagcttacgcttacaccgatgcgcgcggatcctatgtccctgccgagcaggtgatcgaacgcggtgacagatttgtctatcctggacctgacggtgaggtcgaagttttccaggaattcggcaaaatcggtaagagcctgaagaattcggtatcgccggacgaaatctgcgacgcatacggggcagatacgcttcgggtttacgagatgtcgatggggccgctggaggcttcacgtccatgggccacaaaggatgttgtcggcgcgtaccgttttctgcagcgggtgtggcgcttggtcgtcgacgagcacaccggcgaaactcgggtggctgacggcgtggaactcgacatcgatacgctacgggcgttgcaccgcaccatcgtcggcgtgtcagaagactttgcggcacttcgcaataacaccgcaacggctaagttgatcgaatacacgaaccacctcaccaagaagcatcgtgatgcggtgcctcgggccgccgtggagccgcttgtacaaatgctggctccgctggccccacatattgccgaggagctgtggctgcgactgggcaacaccacctcgttggcacacggcccgttcccgaaggccgatgccgcctacctcgtcgacgagacggtcgagtatccggtgcaggtgaacggcaaggtacgtggccgggtggtggtggccgccgacaccgacgaggaaacgctgaaagccgccgttctgaccgacgaaaaggtccaggcattcttggctggtgccaccccgcgcaaggttatcgtggtcgccggccggctggtcaatctcgtcatctag

SEQ ID NO: 28149 - DNA, 897 bp, Mycobacterium tuberculosis
gtgctatctgacgacgaactgaccggactggacgagtttgccctgctggctgagaacgctgagcaggccggtgtcaatggtccactgcctgaagtcgagcgggtccaagcgggagccatcagcgcgctgcgctggggcggctctgcgccgcgggtgatctttctgcacggcggcggacagaacgcccatacctgggacaccgtgatcgtcggcctgggtgagccggcgctggcggtggaccttccagggcacggccattccgcttggcgggaggacggcaattactcgccgcagctcaactccgagaccttggcgccggtgctacgcgagcttgcgccgggtgccgaattcgtggtcggcatgtcgctgggcgggttgactgcgatacggctggccgcgatggcacccgacctggtcggcgaactcgttctcgtcgacgtcaccccgtcggcattgcaacggcacgccgagctgaccgccgagcagcgcggcacggtggcgctgatgcacggcgagcgggaattccccagctttcaggccatgctggacctaacgatcgccgcggccccgcaccgcgatgtcaagtcgttgcgccgcggcgtgttccacaactcccgccggctggacaacggcaactgggtgtggcgctatgacgcgatccgcacgttcggagatttcgcagggctctgggacgacgtcgacgccctgtccgcgccgatcacactcgtgcgcggcggctcgtcgggcttcgtcaccgaccaggacaccgccgaactccacaggcgtgcaacgcatttccgtggcgttcacatcgtcgagaagtcaggccactcggtgcaaagtgaccaaccgcgcgccctgatcgagatcgtgcgcggggtgctcgacacacgctga

SEQ ID NO: 28150 - DNA, 2037 bp, Mycobacterium tuberculosis
gtggtgatcctgttgccgatggtcaccttcacgatggcctacctgatcgtcgacgttcccaagccaggtgacatccgtaccaaccaggtctccacgatccttgccagcgacggctcggaaatcgccaaaattgttccgcccgaaggtaatcgggtcgacgtcaacctcagccaggtgccgatgcatgtgcgccaggcggtgattgcggccgaagaccgcaatttctattcgaatccgggattctcgttcaccggcttcgcgcgggcagtcaagaacaacctgttcggcggcgatctgcagggcggatcgacgattacccagcagtacgtcaagaacgcgctggtcggttccgcacagcacgggtggagcggtctgatgcgcaaggcgaaagaattggtcatcgcgacgaagatgtcgggggagtggtctaaagacgatgtgctgcaggcgtatctgaacatcatctacttcggccggggcgcctacggcatttcggcggcgtccaaggcttatttcgacaagcccgtcgagcagctgaccgttgccgaaggggcgttgttggcagcgctgattcggcggccttcgacgctggacccggcggtcgaccccgaaggggcccatgcccgctggaattgggtactcgacggcatggtggaaaccaaggctctctcgccgaatgaccgtgcggcgcaggtgtttcccgagacagtgccgcccgatctggcccgggcagagaatcagaccaaaggacccaacgggctgatcgagcggcaggtgacaagggagttgctcgagctgttcaacatcgacgagcagaccctcaacacccaggggctggtggtcaccaccacgattgatccgcaggcccaacgggcggcggagaaggcggttgcgaaatacctggacgggcaggaccccgacatgcgtgccgccgtggtttccatcgacccgcacaacggggcggtgcgtgcgtactacggtggcgacaatgccaatggctttgacttcgctcaagcgggattgcagactggatcgtcgtttaaggtgtttgctctggtggccgcccttgagcaggggatcggcctgggctaccaggtagacagctctccgttgacggtcgacggcatcaagatcaccaacgtcgagggcgagggttgcgggacgtgcaacatcgccgaggcgctcaaaatgtcgctgaacacctcctactaccggctgatgctcaagctcaacggcggcccacaggctgtggccgatgccgcgcaccaagccggcattgcctccagcttcccgggcgttgcgcacacgctgtccgaagatggcaagggtggaccgcccaacaacgggatcgtgttgggccagtaccaaacccgggtgatcgacatggcatcggcgtatgccacgttggccgcgtccggtatctaccacccgccgcatttcgtacagaaggtggtcagtgccaacggccaggtcctcttcgacgccagcaccgcggacaacaccggcgatcagcgcatccccaaggcggtagccgacaacgtgactgcggcgatggagccgatcgcaggttattcgcgtggccacaacctagcgggtgggcgggattcggcggccaagaccggcactacgcaatttggtgacaccaccgcgaacaaagacgcctggatggtcgggtacacgccgtcgttgtctacggctgtgtgggtgggcaccgtcaagggtgacgagccactggtaaccgcttcgggtgcagcgatttacggctcgggcctgccgtcggacatctggaaggcaaccatggacggcgccttgaagggcacgtcgaacgagactttccccaaaccgaccgaggtcggtggttatgccggtgtgccgccgccgccgccgccgccggaggtaccaccttcggagaccgtcatccagcccacggtcgaaattgcgccggggattaccatcccgatcggtcccccgaccaccattaccctggcgccaccgcccccggccccgcccgctgcgactcccacgccgccgccgtga

SEQ ID NO: 28151 - DNA, 291 bp, Mycobacterium tuberculosis
atgcgtccatacgaaatcatggtcatcctcgacccgaccctcgacgaacgcaccgtagccccgtccttggagacgttcctcaacgtcgtccgtaaggacggcggaaaagtcgaaaaggtggacatctggggcaagcgtcggctggcgtacgagatcgccaagcatgccgaaggcatctacgtggtgatcgacgtgaaagccgccccggcgacggtgtccgaactcgaccgccagctcagcctcaacgagtcggtgttgcgcaccaaggtaatgcgcaccgacaagcactaa

SEQ ID NO: 28152 - DNA, 495 bp, Mycobacterium tuberculosis
gtggctggtgacaccaccatcaccatcgtcggaaatctgaccgctgaccccgagctgcggttcaccccgtccggtgcggccgtggcgaatttcaccgtggcgtcaacgccccggatctatgaccgtcagaccggcgaatggaaagacggcgaagcgctgttcctccggtgcaatatctggcgggaggcggccgagaacgtggccgagagcctcacccggggggcacgagtcatcgttagcgggcggcttaagcagcggtcgtttgaaacccgtgagggcgagaagcgcaccgtcatcgaggtcgaggtcgatgagattgggccttcgcttcggtacgccaccgccaaggtcaacaaggccagccgcagcggcgggtttggcagcggatcccgtccggcgccggcgcagaccagcagcgcctcgggagatgacccgtggggcagcgcaccggcgtcgggttcgttcggcggcggcgatgacgaaccgccattctga

SEQ ID NO: 28153 - DNA, 255 bp, Mycobacterium tuberculosis
atggccaagtccagcaagcggcgcccggctccggaaaagccggtcaagacgcgtaaatgcgtgttctgcgcgaagaaggaccaagcgatcgactacaaggacaccgcgctgttgcgcacctacatcagcgagcgcggcaagatccgcgcgcgtcgggtcacgggcaactgcgtgcagcaccagcgagacatcgcgctcgcggtgaagaacgcccgcgaggtggcgctgctgccctttacgtcttcggtgcggtag

SEQ ID NO: 28154 - DNA, 459 bp, Mycobacterium tuberculosis
atgaagctcattctcacggccgatgtcgatcacctcgggtccatcggcgacactgtcgaggtcaaggacgggtatggccgtaactttctgctcccgcgcggcctggcgatcgtcgcctcgcgcggagcccagaagcaggctgacgagatccgccgggcccgcgaaaccaaaagcgtacgcgacctagagcacgccaacgagatcaaggcggcgatcgaggcgctcggcccgatagcgctgccggtgaagacttcagctgattctgggaagttgttcggctcggtgaccgccgcagatgtggttgctgccatcaagaaggccggtggaccaaacctcgataagcggatcgttcggctgcccaagacgcacatcaaggccgtgggcacgcattttgtgtcggtgcacctgcacccggaaatcgatgtcgaggtatcgctggacgtcgtggcgcagagctaa

SEQ ID NO: 28155 - DNA, 2625 bp, Mycobacterium tuberculosis
atggcggtcgttgatgacctagcgcccggcatggactcctcaccgcccagtgaagattacggccgtcaaccaccgcaggatctcgccgccgagcagtccgtgctgggcgggatgttgctgagcaaggacgccatcgccgatgtactggaacggctacggcccggcgatttttatcgtccggcgcatcagaacgtctacgacgccattttggacctgtatgggcggggagaaccggctgatgcggtgacggtggccgccgaactggatcgccgtgggctgctgcgccgcatcggcggtgctccctacctgcacaccctgatctcgacggtgccgacggccgccaacgcgggctactacgcgagcatcgttgccgaaaaggcgctgctgcgccggctggtagaggccggaacccgggtggtgcagtacggctatgccggcgccgaaggcgcggatgtggccgaggtggtcgatcgcgcgcaggccgaaatctacgacgtcgcggatcggcggctgtcggaagactttgtggcgcttgaggacctgctgcaaccgacgatggacgagatcgatgccatcgcttccagtggcggcctggcgcgcggggtggctaccggcttcaccgaactcgacgaggtcaccaacggcctgcatccggggcagatggtcatcgtggcggcgcgcccgggcgtgggaaagtccacccttgggctggacttcatgcggtcatgctcgatcaggcatcggatggccagcgtcatcttctcgctggagatgagcaagtccgagattgtcatgcgactgctgtcggcggaggccaaaatcaagctctccgacatgcgttcgggccggatgagcgatgacgactggacccggctggcgcggcggatgagcgaaatcagcgaagcgccactgtttatcgacgactcgcccaacctgaccatgatggagatccgtgccaaggcgcgccgcctgcggcaaaaggccaacctgaagttgatcgtggtcgactacctgcaactgatgacctcgggcaagaagtatgaatcacggcaggtggaggtgtcggagttctcgcggcatctgaagctgttggcaaaagagcttgaggttcccgtggtcgcgatcagccagctcaaccgtgggcccgagcagcgtaccgataagaaaccgatgctggccgacctcagggaatcgggctgcctgaccgcgtccaccagaatcttgcgcgccgataccggcgctgaggtcgccttcggtgagctcatgcgaagcggtgaacgtcccatggtgtggtcgctggacgagcggctgcgcatggtggcccggccgatgatcaacgtgttcccgagcgggcgcaaggaagtgtttcggcttcggctggcttccggacgcgaagtcgaggccaccggcagccacccctttatgaagttcgaaggctggactcccttggcgcagttgaaggttggtgaccggatcgcagcaccgcgccgggtacctgagcccatcgacactcagcggatgcccgagtctgagctcatttcgctggctcgcatgatcggtgacgggtcgtgcctgaagaaccagccgatccgctacgagccggtggatgaggcgaacctggccgcggtgacggtctcggcggcgcactcggatagggctgcgatccgcgacgactacctcgcagctcgagtgccgtcgttgcgcccggcgcggcaacgactaccgcgcgggcggtgcacgccgattgcggcgtggctggctggcctagggctattcacgaaacgcagccacgaaaaatgcgtaccggaggctgtatttcgcgcccccaatgaccaggtggcgttgtttctgcggcatctgtggagcgctggtggctctgttcggtgggatcccacgaatggtcaaggccgggtctactacggctcaaccagtaggcgtctcatcgacgatgtggctcaattgctgcttcgggttgggattttttcctggatcacacacgccccaaagttgggcggccacgattcgtggcggctgcacattcatggcgcgaaggatcaggtcaggttccttcgtcacgtcggcgttcacggcgccgaagcggtggcggcccaagagatgctgcgtcagctcaaaggaccggttcgcaacccgaacctggacagcgcgccgaaaaaagtatgggcgcaagtccgcaaccgactgtccgccaaacagatgatggacatccagctccacgaaccgacgatgtggaagcattccccgagccggtcaaggccgcatcgcgcggaggcgcggatcgaagatcgagcgatccatgagctggcgagaggcgacgcgtactgggacaccgtcgtggagatcaccagcattggagatcaacatgttttcgatgggactgtaagcggcacacacaatttcgtcgccaatggcattagtttgcacaattcgctggaacaagatgccgacgttgtcatcctgctgcatcgacccgacgcctttgaccgcgacgatccacgtgggggagaagcggatttcattctcgccaaacaccgcaacggtccgacgaagacggtcaccgtagcgcatcaactgcacctgtcacgcttcgccaacatggctcggtga

SEQ ID NO: 28156 - DNA, 1386 bp, Mycobacterium tuberculosis
atgaccatcagcgtcttcgacctgttcaccatcggcatcgggccgtccagttcccacaccgtgggaccgatgcgcgcggcaaaccagttcgtagttgcgctgcgccgccggggccacctggatgacctcgaggcgatgcgagtggatctgttcggctcgctcgcggccaccggagccggtcatggcaccatgtcggcgatattgctggggctggaaggctgccagccagaaacgattaccaccgaacacaaggaacgccggctcgccgagatcgcagcgtccggcgtgacgcgaatcggcggtgtcattccggtcccgctgaccgagcgtgatatcgacctgcatcccgacatcgttctgccaacgcatcccaacggaatgacgttcactgccgcgggcccacacggccgcgtcttggccaccgagacttatttttcggtgggcggagggttcatcgtcacggaacagaccagcggcaacagcggccaacatccatgctcagttgcccttccctacgtgtcggcccaagaactgctggacatctgtgaccgcctcgacgtgtcaattagcgaagcggcgctgcgcaacgaaacatgttgccgcaccgagaacgaggtacgcgccgcgctgctgcacctgcgcgacgtcatggttgagtgcgaacagcggagcatcgctcgcgaagggttgcttcctggcggcctccgggtgcgccggcgagcgaaggtgtggtatgaccgcttgaacgccgaagaccccactcgcaagccggaattcgctgaggactgggtcaacctggtcgcgctggcagtcaacgaggagaacgcctccggtgggcgcgtcgtcaccgccccgaccaacggtgccgccggcatcgtgccggcggtcctgcactacgcaatccactacacgtcggccggcgcgggggaccccgacgatgtcaccgtgcgattcctgctcactgctggagccatcggatcgttgttcaaggagcgagcatcgatctccggagccgaggtcggctgtcagggcgaggtcggctccgcggccgccatggccgccgccggattggctgaaatcctcggcggcacaccgcgacaagtggaaaacgccgccgagatcgccatggaacacagcctcggcctgacctgtgaccccatcgccgggctggtgcagatcccctgcatcgaacgcaacgcgatttccgccggcaaggccatcaacgccgcacggatggcattgcgcggcgacggcatccatcgcgtcaccctcgaccaggtcatcgacaccatgcgcgccaccggcgcggacatgcacaccaagtacaaggaaacctcggccggcgggctcgccatcaacgtcgcagtcaacatcgtcgagtgttga

SEQ ID NO: 28157 - DNA, 1278 bp, Mycobacterium tuberculosis
atgaacaccctcaacgactccctgaccgccttcgacccggacatcgccgccctgatcgacggcgagctgcgccgtcaagaatccggcttggagatgatcgcttcggagaactatgcaccgctggccgtgatgcaggcccaaggttcggtcttgaccaacaagtacgccgaaggctacccgggccggcgctactacggtggctgtgaattcgtcgacggtgtcgagcagttggctatcgaccgcgtcaaagcgctctttggcgccgaatacgccaacgtgcaaccacattcgggggccaccgccaacgccgccaccatgcatgcgctgctaaaccccggcgacaccatcctggggttgtcgctggctcatggcggtcacctgacccacgggatgcggatcaacttttccggcaagctctaccacgccaccgcctacgaggtgtccaaagaggactacctggtcgacatggatgccgtcgccgaggcagcgcgcacacaccggcccaaaatgatcatcgccggctggtcggcgtacccacgccagctggatttcgcccgcttccgcgccatcgccgacgaagtcgacgccgtgctcatggtggatatggcgcatttcgccggcctggtcgccgctggcgtgcaccccagcccggtgccgcacgcccacgtcgtcacctccaccactcacaagacgctcggcgggccccgcggcggcatcatcttgtgcaatgacccggccatcgccaagaagatcaattccgcggtcttccctgggcagcagggcgggccgctcgagcatgtcatcgcagccaaggccaccgcattcaagatggcagcacaacctgaattcgcgcagcgccaacaacgttgcctcgacggcgcgcgcatccttgccggccggttgacccagcccgacgtcgccgaacgtggcatcgcggtgctaaccggcggcaccgatgtgcacctcgtcctagtcgacctgcgcgacgccgaactcgacggccagcaagccgaagaccggttggccgccgtggacatcaccgtcaaccgcaacgcggtacccttcgaccctcgtcccccgatgatcacctcgggcctgcgaatcggcaccccggcgctggccgcacgcggcttctcccacaacgacttccgcgccgtggcagacctcatcgcggcggcactgacggccaccaacgacgaccagctgggtccgctgcgcgcccaggtccagcggctggccgcacgctatccgctctacccggaactgcaccggacatga

SEQ ID NO: 28158 - DNA, 768 bp, Mycobacterium tuberculosis
atggcggtgacggtcggcgtcatttgtgcgatcccgcaagagctggcgtatctgcgcggtgtcctggtcgatgcgaaacgccagcaggtcgcgcagatcctcttcgatagcggccaactcgacgcgcaccgggtcgtgttggccgccgccggcatgggcaaagttaacacgggcctgaccgcaacgctgcttgccgatcgattcggctgccgcaccatcgttttcacgggagtggccggcgggctggatcccgagctatgcatcggtgacatcgtcatcgccgatcgggtcgtccaacacgacttcggtctgctcaccgatgagcggctgcgcccctatcagcccggacacatccccttcatcgaaccgaccgagcggctcggatacccggttgatcccgcggtcatcgatcgggtcaaacaccgcctcgacgggttcacgctggcgccgctgtccaccgccgcgggaggtggtggccggcagccacgcatctactacggcaccatcctgaccggtgaccaataccttcactgcgagcgcacccgcaaccggctgcaccacgaactcggcggtatggccgtcgaaatggaaggcggtgcggtggcgcaaatctgcgcgtccttcgatatcccatggctggtcattcgcgcgctctccgatctcgccggagccgattcgggggtggacttcaatcggtttgtcggcgaggtggcggccagttcggcccgcgttctgctgcgcttgctgccggtgttgacggcctgttga

SEQ ID NO: 28159 - DNA, 7539 bp, Mycobacterium tuberculosis
gtgcaccgagttcggttaagccgctcgcagcgcaacctctacaacggcgtgcgccaggataacaatcccgcgttatatctgatcggcaagagctatcggttccgccggttggagctggcgagattcctggccgctctgcacgcaacggtactggacaaccccgtgcaactttgcgtcctggagaattcgggggcagactatccggatctggtgccgcggctacggttcggcgacatcgtgcgggtggggtcagccgatgagcacctgcagagcacatggtgttcgggcatcctgggcaagccactggtgcggcatacggtgcacaccgacccgaacgggtatgtgaccggtctggacgttcacacccaccacatcctgctggacggcggcgcgaccgggacgatcgaagctgacctggcgcgttacctgaccaccgacccggcgggcgaaacccccagtgtcggtgcgggtctagccaagctcagggaggcgcaccgtcgtgagacggccaaggtggaagaatcgcgggggcgcctgtcggctgtcgtgcagcgtgaactcgccgacgaagcataccacggcgggcacgggcacagcgttagcgacgctcccgggaccgcggccaagggcgtcctgcacgaatcggcaacgatctgcggcaacgcgtttgatgccatcctgaccctttcggaagcgcagcgggtcccgcttaatgtgctggtggctgcggcggccgtcgcggtggacgcgagccttcggcagaacaccgaaaccctcttggtgcacacggtggacaaccggttcggagattctgatctgaatgtcgcgacctgtttggtcaattcggttgcccagaccgtccggtttcccccatttgcgtcggtgtccgatgtcgttcgaacgcttgaccgcggctatgtcaaggcggtaagacgccggtggcttcgtgaggagcattaccgccgaatgtatttggcgatcaaccggacatctcacgtggaggcgttgacgctaaatttcattcgcgagccatgcgcacctggcctgcgcccgttcttgtcggaggtcccgattgccacggatatcggtccggtcgagggcatgacggtggcgtctgttctggacgaagaacagcgcacactgaacctagccatctggaaccgagccgatctgcccgcgtgcaagacacaccccaaggtcgcggaacggatagcggcagcgttggaatcgatggcggcgatgtgggatcggccgatcgccatgatcgtcaacgactggttcgggatcggcccggacgggactcgctgccaaggcgattggccagcccgtcagccgtcgacgcccgcgtggtttctcgattccgcaaggggcgtccaccaatttctcggcaggcgccgcttcgtctacccgtgggtcgcgtggttggtgcaacgcggcgccgcaccgggtgatgttctggtgttcaccgacgacgacaccgacaagaccattgacctgctcatcgcgtgtcaccttgcgggttgcgggtacagcgtctgcgacaccgctgacgaaatttccgtgcggaccaatgcgattaccgagcacggcgatggcatcttggtgacagtggtcgacgtggccgccacccagctggcggttgtcggccatgacgagctgcggaaggtcgttgacgagcgcgtcacacaggtgacacacgacgcactgctggccaccaagaccgcctacatcatgccgacctcgggaactaccggacaacccaagctggtgcgaatctcacacggctcgctcgcggttttctgtgatgcgatcagccgcgcctacggttggggagcccacgacaccgttctgcagtgcgctccgttgacatcggacatcagcgtcgaggagattttcggtggcgcggcctgtggcgcgcgactggtgcgatccgcggctatgaaaaccggcgacctggcggcgctggttgacgatctcgtcgcccgcgagacgacaatcgtcgacctgccgaccgccgtctggcagctgttgtgcgccgacggcgacgccattgacgcgatcggccgctcgcgcctgcggcagatcgtaatcggcggtgaagccatccgctgtagcgccgtggacaagtggcttgaatcggctgcttcacaagggatctcgctgctctcgagctatggtccaacagaagccacggtcgtcgccaccttcttgccgatcgtttgcgaccagaccaccatggacggcgcactgctcaggctcggccggccgatcctaccgaacacggtgttcctcgcgttcggtgaagtcgtcattgtcggggatttagtcgccgacggctacctcgggatcgacggcgacggcttcggcaccgtgacggccgcagacggttcccgacgccgtgcctttgccactggcgaccgggtgaccgtcgacgccgaaggatttccggtcttctccggacgcaaagacgccgtcgtcaagatctccggcaagcgtgtcgatatcgctgaggtaaccaggcgcatcgccgaagaccccgcggtgtcagatgtcgccgtcgagttgcacagcggaagcctcggagtgtggttcaagagccaacggacccgcgagggcgaacaagacgctgccgcggcgacccggatcaggctcgtcctcgtgagtctgggagtgtcgtcgtttttcgttgtcggcgtgccgaatatcccgaggaagcccaacgggaagatcgacagcgacaacctgccgaggctgcctcagtggtcagctgctgggctaaacaccgccgagacgggtcagcgagcggccggcctctcgcagatctggagccggcagctcggccgggcaatcgggccggactcgtcgctgcttggtgagggcatcggctcgttggatctcatcagaatactgcccgagacgcgtaggtatctggggtggcgcctctcgctgctggatctgatcggtgccgataccgccgccaatctggccgattacgcgccaacgcccgacgcgccgacgggcgaagatcggtttaggccgctggtggccgcgcaacggcccgcggcgattccgttgtcgtttgcccagcggcgactatggtttctcgaccagttacagcgacccgctccggtctacaacatggcggtggcgttgcggctgcgcgggtatctcgataccgaggcgttgggcgcggcggtcgccgatgtcgtgggccgccacgaaagcctacggacggtgtttccggcggtcgacggggtccctcggcagctggtcatcgaagcgcggcgggcagatcttggctgcgacatcgtcgatgccaccgcatggccggctgaccggctgcaacgggccatcgaggaggcggcgcgccacagcttcgatttggcaaccgagatacctttgcggacgtggcttttccggatcgccgacgacgaacatgtgctggtggcggttgcacaccatatcgccgccgacggctggtcggtggctccgctgacggccgatctgagtgcggcatatgccagccgttgtgcgggtcgggcaccggactgggcgccattgccagtgcagtatgtcgattacacgctgtggcagcgggaaatcctcggtgatctcgacgacagcgacagcccgatcgccgcgcagctggcctactgggaaaatgcgttggccggtatgccggaacggctgcggctgcccaccgctcggccctatccaccggttgccgatcagcgcggcgccagtttggtggtggattggccggcgtcggtgcaacagcaggtgcgtcggatcgcccgccagcacaacgcgaccagcttcatggtggtagctgccgggcttgccgtgctgctgtcgaaactcagcggaagccccgatgtggcggtcggatttcccatcgccggccgcagcgatcctgcgctggataacttggtgggcttttttgtcaacaccttggtgttgcgggtcaacctggccggtgatcccagcttcgccgaactgctggggcaggtgcgagcgcgcagcctggccgcctacgaaaatcaagacgtacctttcgaggtgctcgttgatcgcctcaaacccactcgagccctgacccatcacccgctgatccaggtgatgttggcctggcaggacaatccggttggacagctgaatttgggtgatctgcaggccaccccgatgccgatcgacacccgcaccgcccgcatggacttggtgttttcgttagcggaacgcttcagcgagggtagcgaacctgccgggatcggcggagcggtggaataccgcaccgatgtgtttgaagcccaagcaatcgacgtgcttatcgagcggttgcggaaggtgttggtggcggtggccgctgctccggaacggacggtgtcgtcgatcgatgcgctggatgggaccgagcgtgcccggttggatgagtggggtaaccgcgctgtgctgactgcgcccgcgcccacgccggtgtcgatcccgcagatgttggccgcccaggtggcacgtatccccgaagcggaggcggtgtgttgcggggacgcgtcgatgacgtatcgggaactcgacgaggcgtccaaccggttagcgcatcggctggcaggttgtggggccggcccgggcgagtgtgtggcgctgctgttcgagcggtgcgcgccggcggtcgtggcgatggtggcagtgctcaaaaccggggcggcgtatctgccgatcgatccggcgaatcctccgccgcgggtggcgttcatgctcggcgacgcggtgcccgtggccgcggtcaccacggctgggctgcgctcccggttggcgggacacgacttgccgatcatcgatgtcgtcgatgctttagcggcatatccgggcacgcccccacccatgccggccgcagtgaacctcgcctacatcctgtacacctcgggcactaccggcgagcccaaaggcgtggggatcacccatcgcaacgtcaccaggctgttcgcatcactgccggcacgcttgtcggcggcgcaggtgtggtcgcagtgtcattcctatggcttcgacgcctcggcgtgggagatctggggcgcgttgctaggtggtgggcgactggtgatcgtgcccgagtcggtggcggcctcgccgaacgactttcatgggctgctcgtggccgaacacgtcagcgtgctgactcagactccggctgcggtggcaatgttgccgacgcagggtttggagtcggtggcgttggtggtggccggtgaggcatgtccggcagcgctggtggatcggtgggcgcccgggcgggtgatgctaaatgcttatggcccaaccgagaccacgatctgtgcggcgataagtgcgccgttgcgaccgggttcggggatgccgccgattggtgttccggtgtcgggggcggcgttgtttgtgctggatagctggttgcgcccggtaccggccggggtggccggagagttgtacattgccggtgcgggcgtcggtgttgggtattggcgtcgggcggggctgaccgcgtcacggtttgtggcctgcccattcggcggttccggggcacgcatgtatcgcaccggggatctggtgtgttggcgcgccgatggccagttggagttcctggggcgcaccgacgatcaggtcaagatccgcgggtatcgcatcgagctcggcgaggttgcgaccgcgctggccgagctggctggggtaggtcaagcggttgtaatcgcccgtgaagaccgccctggggacaagcgcctagtcgggtatgccaccgaaattgcccccggggcagtggacccggccgggctgcgggcgcaactagcccagcgattgcccggttacctggtgccagccgcggtggtagtgatcgatgcgcttccgttgacggtcaacggcaaacttgatcatcgtgcgttgccggcaccggaatacggtgataccaacggatatcgcgctccggccgggccggttgagaagaccgtggccggcatctttgcccgggttcttgggcttgagcgggtcggcgtcgacgactcgttcttcgagctcggcggcgattcgctggcggcaatgcgggttatcgccgcgatcaacaccaccctaaacgccgatctgccggtgcgcgcgttgctgcacgcgtcgtcgacgagaggtttaagccagctgttggggcgagatgcccgaccgaccagcgatccgcgcttggtgtctgtgcacggcgacaaccccaccgaggtgcatgccagcgacctcacgctggaccggttcatcgacgccgacacgctggccaccgccgtcaacctgccgggcccgagccccgagctacggacggtcctgctgacgggcgcgacgggtttcctcggacggtatctggtccttgaattgctgcggcggctggacgtcgacggcaggctgatctgtttggtgcgggcggagtccgacgaggatgcgcggcgtcgtctggagaagaccttcgatagcggtgacccggaattgctgcggcacttcaaggagcttgccgccgaccggctggaggtcgtcgcaggcgacaagagcgaacccgacctgggcctggaccaaccgatgtggcggcggctggccgaaaccgtggatttgattgtcgattccgcggcgatggtcaacgcgtttccctaccacgaattgttcgggcccaacgtcgcgggcaccgccgagctgatccgaatcgcgcttaccaccaagctcaaacccttcacctacgtgtcaaccgccgacgtgggtgctgcgatcgagccgtcggcgttcaccgaggacgccgacatccgggtaatcagccccacccgcaccgtcgacggcggctgggctggcggctacggcaccagcaagtgggccggtgaggtgctgctgcgcgaggccaacgacctgtgcgcgctgccggtcgcggtgtttcgctgcgggatgatcctggccgacaccagctatgccggacagctcaacatgtcggactgggtcacccggatggtgttgagcttgatggctaccggcatcgcgcctcgttcgttctacgaaccggactccgagggcaatcggcaacgcgcgcacttcgacgggctgccagtcaccttcgttgccgaggcgatcgcggtgctgggcgcgcgggtggccggctcatcgttggcgggatttgcgacctatcacgtgatgaacccgcacgacgacggtatcgggctcgatgagtatgtggactggctgattgaggccggctacccgatacgccgcatcgatgactttgcggagtggttgcagcggtttgaggccagcctgggcgctctgccggatcggcaacgccggcactcggtgctgccgatgctgctggcgagcaattcccagcgattgcagccgcttaagccgaccagggggtgctccgcgccgaccgaccgattccgtgccgcggtgcgagcggcgaaagtcggctccgacaaggacaatccagacatcccgcacgtgtcggcgccgaccatcatcaactacgtcaccaacctacaactgctcggactgctgtag

SEQ ID NO: 28160 - DNA, 2058 bp, Mycobacterium tuberculosis
gtgccggcacgttctgttccccggccccgttgggtggccccggtgcgccgggtcggtcggctggccgtatgggatcggccggagcggcgcagcggaattccagcgttagatggccttcgtgcgatagcggtcgcgctggtactcgccagccatggcggcatccccggtatgggcggcgggttcatcggcgtcgacgccttcttcgtcttgagcggatttctcatcacctcgctgctgctcgacgagctggggcgcaccggtcgtatcgatctgagcgggttctggattcgccgtgcgcggcggctgctgccggcgctggtgctgatggttctcaccgtgagcgccgcacgcgcactatttcctgaccaagctctcaccgggctacggagcgatgcgatcgccgcgttcctatggacggcgaattggcggtttgtggcccaaaataccgattacttcacccagggcgctccaccctcgcccctacagcacacctggtcgttgggggtggaggagcagtattacgttgtctggccactgttgctgatcggggcgacgctactgttggcggcccgggcgaggcgccgttgcagacgggccacggtgggcggggttcggttcgccgcgttcctgattgccagtctcggcacgatggcttccgccaccgccgcggtcgcatttacctcggcggccacccgcgaccggatttacttcggcaccgatacccgtgcgcaggcgttgctgatcggctccgcggcagcggctctgctggtgcgggattggccatcgctgaaccgcgggtggtgcctgatccggactcgctggggacggcggattgcccgtctgttgccgttcgtcgggctggctgggctggcggtgacgactcacgtcgcaacgggcagtgtgggcgagttccgccatggtctgctgatcgtggtggcaggtgcggccgtcatcgtggttgcctcggtagccatggagcagcgcggagcggtggcccgcatcctggcctggcgaccgttggtgtggctgggcaccatatcgtacggcgtctatctgtggcactggccaatctttctggcgctcaacggccaacgtacgggctggtcgggcccggccctgtttgccgctaggtgtgcagccacggtggtgctggccggtgcgtcgtggtggctgatcgagcaacctattcggcgctggcgaccggcacgggttccgctgttgccgctggcagcggcgaccgttgccagcgctgccgccgtgacgatgctcgttgttccggtcggagccggaccggggctacgcgagatcggccttccgcccggcgtttcggcggtcgccgcggtctcgccgtcgccgccggaagcgagtcagcccgcgcccgggccacgagatcccaaccggccgttcaccgtttcggtattcggtgattcgatcgggtggactttgatgcattacctgccgccgactcccggattccggttcatcgaccacaccgtcatcggctgcagcctggtacgcggcacaccgtatcggtacatcggtcaaaccctggagcagagggcggaatgcgacggctggccggccagatggtcggcgcaggtcaaccgggaccaaccggacgttgcgttgctgatcgtcggccgctgggagacggtagaccgggtcaatgaggggcggtggacacatatcggcgacccgaccttcgatgcgtacctcaacgccgagctacagcgagcgctcagcatcgttggatccaccggggttcgagtgatggtcaccaccgtgccctacagccgcggcggcgaaaagccggacggccgcttgtatccggaggatcaacccgagcgtgtgaacaaatggaacgccatgttacataacgccattagccaacactcgaacgtcggaatgatcgacctcaacaaaaagctttgtccagacggcgtttacacggccaaggtcgacggcatcaaggtccgcagtgatggtgttcatctcacccaggaaggcgtgaagtggctgataccgtggcttgaggattcggtgcgggtcgccagttaa

SEQ ID NO: 28161 - DNA, 945 bp, Mycobacterium tuberculosis
gtgctcttccgtcagctggagtacttcgtcgcggtcgcccaggagcggcatttcgctcgggccgctgagaagtgctacgtgtcgcaacctgcgctgtcttcggcaatcgccaagctcgaacgcgaactcaacgtcaccctgatcaatcgcggacacagtttcgaaggccttactcgcgagggtgagcggttggtggtatgggccaagcggatacttgccgagcacgctgcgttcaaggccgaggtggatgcggtgcggtccgggataaccgggacgcttcggctaggcacggttcccaccgcgtcaacgacggcatccctggtgctgtcggcgttttgctcggcgcacccgttggcgaaggtgcaagtctgttcccggctggctgcgaccgagctgtaccgacggctgcgcgaattcgagctcgatgccgtcatcgtgcaccccgagacccaagacagtgatgatgttgatctggtgccgctctatgaggagcagtacgtgctgttgtcgccggcggatatgctgccgccggggacatcgacgttggtgtggcgggatgccgcgcaactaccgttggcattgctcactgcggatatgcgggaccgccaggttatcgacgccgcgttcgccgaccacgcggtctcggcgatcccgcaggtcgaaaccgattccgttgcttcgctgttcgcacaggtggcaaccggcaactgggcgtccatcgttccgcacacctggctatgggcaatgccaatgagcgggccgacgggtggtgagatccgcgcggtcgaattggtcgatccggtgctgaaagcccagatcgccctggctaccaacgccttgggaccgggatctccggttgcccgagcgctcataacatgcgcgcaggcgctggcgctgaacgaattctttgacacgcagctgcgggggatcacccgtcgccgctga

SEQ ID NO: 28162 - DNA, 369 bp, Mycobacterium tuberculosis
atgacgaagaagccacgtaaccccgccgactacgtgatcggcgacgatgtcgaggtgtctgacgtcgatctcaagcaagaggaggtctatgtcgatggcgagcggctaacggacgagcgcgtcgagcagatggcttcagagtcgctgcggctggcgcgcgaacgagaagccaacctgattcctggcggcaagtctctgtccggcggctctgcgcactcgccggctgtgcaggtggtcgtttcgaaggctacccacgccaagctcaaggagctggcgcgcagccggaagatgagcgtatctaagctgctgcgtcccgtgctcgacgagttcgtacagcgagaaacgggtcggattctcccacggcgttag

SEQ ID NO: 28163 - DNA, 1464 bp, Mycobacterium tuberculosis
atgtcgtttgtcagcgtagccccggagattgtggtggccgcggcaacagacctggcgggtatcggatcggcgatcagcgcggccaatgccgccgcggctgcgccgaccaccgccgtgctggccgcgggtgccgatgaggtgtcggcggcgatcgcggcgctgttttccggccacgctcaggcctatcaggcgctcagcgcccaggcggcggcgtttcatcagcagttcgtgcagacgcttgccggtggcgctggagcatatgcggccgccgaggcccaggtcgagcagcagctgctggccgcgatcaacgcgcccacccaggcgctgctggggcgccccttgatcggcaacggtgccgatggggcgccggggactgggcaggccggcggggctggggggatcttgtacggcaatggcggcaatggcggctccggggcggctgggcaggccgggggtgccggcgggccggccgggctgatcggccatggcgggtccggcggggccggcggctccggcgcggccggcggggccggcgggcacggcggatggctgtggggcaacggcggcgtcggcggatccggcggggcgggtgtcggcgcaggcgtggctggcggtcacggcggtgcgggcggtgccgccgggctgtggggcgccggcggcggcggtggcaatggcgggaacggcgccgatgccaacatcgtcagcggtggagacggtggcctcggcggtgccggtggcggtggcggatggctctacggcgacggcggggccggcggacacggcggacaaggcgcaatcggcctcggcggcggcgccggcggcgacgggggccagggcggcgccggccgcggactgtggggtactggcggcgccggcggacacggcgggcaaggcggtggtaccgggggcccaccgctgcccggtcaggcaggcatgggcgccgcgggtggcgccggtgggctgatcggcaacggcggggccggcggcgacggcggtgtcggcgcgtccggcggggtcgccggagtaggcggtgccggcgggaacgccatgctgatcgggcacggcggcgccggcggcgccggcggagacagcagtttcgctaatggcgcggccggcggcgcgggcggtgccggagggcacctcttcggcaatggcgggtccggcggccacggcggagccgtcacggccggcaacaccggtatcggtggcgccggcggcgtcggtggggacgccaggctgatcggccacggtggcgccggcggtgccggcggggaccgcgccggagccttggttggccgtgacggcgggcccggtgggaacgggggcgctggcggccagctatacggcaacggcggcgacggcgcccccggcaccggcggaacactgcaggcggcggtgagcggattggtgacggctttgttcggtgcacccggccaacccggcgacaccggccaacccggctag

SEQ ID NO: 28164 - DNA, 1101 bp, Mycobacterium tuberculosis
atgacagatccgcagacgcagagcaccagggtcggggtggttgccgagtcggggcccgacgaacgacgggtcgcgctggttcccaaggcggtcgcgtcgctggtgaaccgtggtgtggcggtcgtggtcgaggccggtgcgggcgagcgcgcgctgcttcccgatgagctctacaccgctgtcggtgccagcatcggggatgcttgggccgccgacgtcgttgtcaaggtcgcgccgccgacggcggcggaggtcggccggttgcgcggtgggcagacactgatcggctttctagcgccccgtaatgctgacaactcgatcggcgcgctgacccaggccggggtgcaggcgttcgcgctcgaggccatcccgcgcatctcgcgggcgcaggtgatggacgcgctgtcgtcgcaagccaacgtgtctgggtataaggctgtgctgctcgcggcctcggaatcgacccggttctttccgatgctgacgacggcggccggaacggtgaagccggccacggtgctggtgctcggcgtcggcgtggccggcctgcaggcgctggcgacggccaaacggctaggcgcgcgcaccacgggctacgatgtgcgtcccgaggtggccgaccaggtccgatcggtgggcgctcaatggcttgatttgggcatctcagcgtccggtgagggcggttacgcccgcgaactgaccgacgacgagcgcgcccagcagcaaaaggcattggaagaagcgatcagtggcttcgacgtggtgatcaccaccgcgctggtgccgggccgcccggcgccaacgttggtgaccgccgctgcagtggaagcgatgaagcctggcagcgtggtggtggatctcgccggcgagacgggcggcaactgcgaattgaccgagcccggccggacagtcgtcaagcacgacgtcaccattgccgcaccgctgaacctgccggccacgatgcccgagcacgccagcgagctctacagcaagaacatcaccgcgctactcgacttgttgatcaaagacggcaggctggccccggacttcgacgacgaggtgattgcccagtcgtgtgtcacccgcgggaaggactcctag

SEQ ID NO: 28165 - DNA, 795 bp, Mycobacterium tuberculosis
ttgataaagcatgatgttgtctgggtcacactatggcctgagcggcccaacaacaagcccccgccaagcccccggcaagtccccggcaatcccggcccgaccctgaaagtcctggcaagccacgtgaacgcacctctatcggcgaagccgcggagccagcttcccctgcgccgggcacagttgtccgacgaggtcgcgggccacctgcgggccgccatcatgtcgggcgccctgcgctctggaacgttcatccgtctcgacgagacggcagccgagctcggagtcagcgtcacgccggtgcgggaggcgctgctgaaactgcgcggtgaggggatggtcgggctggagccacatcgcggccacgtggtgctgccgttgacccgccaagacatcgacgacattttctggctgcaggccaccattgcccaagaacttgccacatcggccaccgctcacatcaccgacgttgagatcgacgagctggaccgcatcaacaatgcgctggccggtgctatcgggtccggtgatgccaaaaccatcgcgtcgatcgagttcgcgttccaccgcgtcttcaacaaagcgagccgccggatcaagttggcctggttcctgcttaatgccgcgcgctatatgggcgcaggtgttcgcggccgacccgcgatggggcgcggacgcggtgaacagtcatcggcagctgatcgccgcgctgcgccgccgcgacacagccgccgtaatcgagcacaccgtctggcagttcaccgatggggcacgcaggctgacggaggccctggctga

SEQ ID NO: 28166 - DNA, 972 bp, Mycobacterium tuberculosis
gtgtgggcggagaagtccccgcgccgttcgtcggcgggctcgcggccagagttttctgcgagcacactcacgtcaatgagcctacgcagagtctccgacactctcaccggagcagccgttacgctcccggtaatgactaccacccggactgaacggaatttcgcgggcatcggcgatgtgcgcatcgtctacgacgtctggacgccggacaccgcgccgcaagcggtggtcgtgctggcccatggtctgggcgagcatgcccgccgctacgaccatgtcgcgcagcggctcggcgcggccggcctggtcacctatgcgcttgaccaccgcgggcatggccgctcgggtggcaaacgggtgctagtgagagacatctccgagtacaccgctgacttcgacaccctcgttgggatcgccacccgggaatatcccgggtgcaagcgcatcgtgctcgggcacagcatgggcggcggcattgtgttcgcttacggtgtcgaacgtccagacaactacgacctgatggtgctttcggcgccggcggtggcggcacaggacctggtgagcccggtagtggcggttgccgccaagcttctgggcgtcgtggtgcccggcctgccggtgcaggaactggattttactgccatctctcgcgaccctgaggtggtccaggcttacaacaccgacccactcgtgcaccacggacgggttccggccgggattggccgcgcgctgctgcaggtgggcgagaccatgccgcggcgagcaccggcattgaccgcgccgctgctagtgctgcacggcaccgatgaccggctgatccccatcgagggcagccgtcgcctggtcgaatgtgtgggatcggccgacgtgcagctgaaggagtatcccgggctgtaccacgaggtgttcaacgagccggagcgcaaccaggtgctcgacgatgtggtcgcctggctcaccgagcggttgtag

SEQ ID NO: 28167 - DNA, 2076 bp, Mycobacterium tuberculosis
atgaccgacgacgagcgattctcactgttggtcggcctgaccggggccagcgatctgtggccggtgcgcgatgaacgcatcccacagggcgtgccgatgtgtgccgggtatgtgccggggattccccggctcggggtcccggccttgttgatgagcgatgccggtctgggcgtcaccaaccctggctaccgccccggtgacaccgctacggcgctgcccgccggccttgccctagcggccagctttaacccggtgctggcccggtcctcgggcaaagcgatcggccgggaggcgcgcagtcgcgggttcaacgtgcaactggccggcgcaatcaatctggcgcgcgacccgcgtaacggccgcaacttcgagtacctttccgaggacccgttgttgagtgccacgatggccgcggagtcgatcatcgggattcagcagcagggtgtcattgcgacgacgaaacacttctcgctgaactgcaacgaaaccaatcggcactggctggacgcggtcatcgatcccgacgcgcaccgcgagtcggacttgttggcgttcgagatcgtcatcgagcggtcgcagcccggcgccgtgatggcggcgtacaacaaggtcaacggagattacgctgccggcaacgaccacttgctcaacgacgtgctgaaaggtgcttggggataccgcggttgggtgatgtcggattggggcggaacacccagctgggagtgcgcgctggccggcctggaccaagagtgcggtgcgcagatcgatgcagtgctgtggcagtcggaagcattcaccgaccgcctgcgtgccgcctacgccgacggcaatctacccaaggggcgcctgtcggacatggtacggcggatcctgcggtcgatgtttgccgtcggaatcgaccgatggaaaccagcgccggcgccggacatgaatgcgcacaacgagattgccgcacagatggcgcggcaaggaatcgtgctgctgcaaaaccgagggctgctgccgctcgctcccgaatcggccgggcgtattgccgtcatcggcggctatgcacacctcggtgtgccagccggttacggttcgagcgccgtcaccccgccggggggctatgcgggcgtgataccgatcggtgggtctggcttggcagccgggttgcgtaatctctacctgctgccgtcaagcccgctgagtgagttgcgaaagcggttgcccaacgcgcagttcgagttcgatcctggcatcaacccggcggaggcggtgctggctgcgcggcgagcagacatcgcgatcgtgttcgcgatccgtgccgaaggagagggcttcgacagcgccgatctgtcgctgccatggggtcaggatgcgctgatcgccgcagtcgcgtccgccaacgcgaataccgttgtggtgcttgagacgggcaacccggtgaccatgccctggcgcgactcggtgaacgccatcatgcaggcctggtatccgggccaggcgggtggccaggccgttgcggagattgtgaccgggcaggtgaatccttcgggccggctgccgatcaccttcccggtcgatctcggtcagacgccacgctcgcaaccgcccgagctcggtgccccgtgggggacatcgaccacgatccactacaccgagggcgccgatgttggttaccgctggtttgccagcacaaatcagaccccgatgttcgcgttcggtcacggcttgtcctataccagtttcgagtatcgtgacctggtggtgacgggcggccacaccgtgcacgccagtttcagcgttaccaacacgggcgaccgcagcggggcggatgtcccgcagctgtatatgatcgcagctcccggcgaatcgcggttgcggttgctgggattcgagcgggtcgagctcgaacccggccagactcggcgggtaaggatcgaggcggacccgcgactgctcgcccgctacgacggcgaggccagaagctggcgcatcgagccgggcggttacacggtggcggtgggcgcttcggcggtagcgctgaagctggcagccaaggtcaagctggccggccgtgggttcgggcggtga

SEQ ID NO: 28168 - DNA, 1728 bp, Mycobacterium tuberculosis
atgccgcaaaccaccgacgaagccgcttccgtctcgacggtcgccgacatcaagccccgcagtcgagacgtcaccgacggcctggagaaggccgctgcccggggcatgttgagggcggtgggcatggacgacgaagacttcgcgaagccacagatcggggtcgcgtcgtcgtggaacgaaatcacgccgtgcaatctctcattggaccggctggccaacgcggtcaaggagggggtgttttcggccggcggctatccgcttgagttcggcacgatctcggtttcggacggcatctccatgggtcatgaggggatgcacttctcgctggtttcccgtgaggtgatcgccgacagcgtcgaagtcgtgatgcaggccgaacgactcgacggttcggtgctgctggccggatgcgacaaatcgctgcccggaatgctgatggccgccgcacgactggatctggcggcggtgttcctctacgcgggctctattttgcccggccgggccaagctctccgacggtagcgaacgagacgtcaccatcattgacgccttcgaggcggtcggagcgtgctctcgcggtttgatgagtcgcgccgacgtcgatgccatcgagcgggcaatctgccccggcgaaggggcatgcggcggcatgtacaccgctaacaccatggccagcgccgccgaggcgctcggcatgtcgttgccgggcagcgcggcaccgccggcgaccgaccgccggcgcgacgggttcgcgcgtcgcagcggtcaggccgtcgtcgagctgctgcgccgcggcatcaccgcccgcgacatcctcaccaaggaggcgttcgagaacgccatcgcggtggtaatggcgttcggcggctcgaccaacgcggtgctgcatctgctggccatcgcccacgaggccaacgtcgcactatcgcttcaggacttcagccggatcgggtcgggggtgccgcatttggccgatgtcaagccgttcggccgccatgtgatgtccgacgtcgatcacatcggcggtgtgccggtggttatgaaggcgctgctggacgccggtctgctacacggcgactgcctgacggttaccggtcacaccatggccgagaatctggctgccatcaccccgccggatccagatggcaaggtgctacgtgcgttggcaaacccgatccacccgagcggtggcatcaccatcctgcacggatcgctggcacccgaaggtgcggtggtcaagaccgccggattcgattccgacgtattcgaaggcaccgcaagagttttcgacggcgagcgcgctgcgctggacgcccttgaggatggcaccattaccgtgggcgacgccgtggtaatccggtacgaaggacccaagggcggccccgggatgcgcgaaatgctcgccatcacaggcgcgatcaaaggcgcaggactcggtaaagatgttctactgctgaccgacggccggttctccggtggaaccaccggcctgtgcgttggccacatcgcaccggaggcggtcgacggcggaccgatcgcacttctgcgcaacggcgaccggatccggctcgacgtggccggccgcgttctcgatgtgttggccgatccggccgaattcgcgtcccgacaacaggatttcagtcctccaccgccgcgctacactactggcgtactgtccaagtacgtcaagctggtcagctctgccgcggtcggcgcggtctgcggctag

SEQ ID NO: 28169 - DNA, 291 bp, Mycobacterium tuberculosis
atgacagcagcacacggctacacgcagcaaaaggacaactacgccaagcggttgcgtcgcgtcgaggggcaagtgcgcggcatcgcgcgaatgatcgaggaagacaagtactgcattgacgttctgacccagatcagcgccgtcaccagtgcgttgcggtcggtggcgctgaacctgctggacgagcacctgagccactgcgtcacccgtgccgtggccgagggcggtcctggggctgacggcaagctggcagaggcctcggcagcaatcgcgcgcctggttcgttcctga

SEQ ID NO: 28170 - DNA, 1242 bp, Mycobacterium tuberculosis
atgactgccccaaccggaacctccgccactacgacgcgaccgtggacgccacggatcgccacgcaactgtccgtgctggcttgcgcggcctttatctatgtcaccgccgaaatcctgccagtgggcgcgctgtcggcgatagcgcggaacttgcgcgtcagcgtggtcctagttgggaccttgctgtcctggtatgcccttgtcgcggccgtgacaacggttccgctggtgcgttggaccgcacactggccgcgccgccgggccctggtggtcagcctggtctgcctgaccgtctcgcaactcgtctcggcgctggcgcccaacttcgcggtgctggccgccgggcgggtgctctgcgcggtcacccatggcctgctgtgggcggtcatcgcgccgatcgccacccggctggtgccgcccagtcacgccgggcgcgccacgacgtcgatctacatcggaaccagtctggcgctggtcgtcggtagcccactcacggctgccatgagcctgatgtggggttggcggctggcggcggtgtgcgtgaccggcgcggcggccgcggtcgccctggccgcccggctggcgttgccggagatggtgctgcgcgccgaccagctcgagcacgttggccgacgggctcgtcaccaccgtaatcctcgcctggtcaaggtcagtgtgctcacgatgatcgcggtaaccggccatttcgtgtcctacacctacatcgtggtgatcatccgcgacgtcgtcggtgtacgtgggccgaatctggcctggctgctcgccgcctatggggtcgccggcctggtgtccgtgcccctggtggcgcggccgttggaccgttggcccaagggcgccgtcatcgtcggtatgaccggactgacggcggcgttcaccttgctgaccgcgctggcattcggtgaacgccacaccgcggcgacggcactgctgggcaccggtgcgattgtgctgtggggagccttggccactgccgtgtcaccgatgctgcaatcggcggcgatgcgtagcggcggcgacgaccccgacggggcctcaggtttgtatgtgacggcgtttcagatcggcatcatggccggcgctctgctgggtgggctgctctacgagcgcagcttggcgatgatgctgaccgcgtcggcgggtttgatgggtgttgcgttgttcgggatgacggttagccagcacttgttcgagaatccgactctgagtcccggcgacggctaa

SEQ ID NO: 28171 - DNA, 1329 bp, Mycobacterium tuberculosis
atgagtgatccagcaagaggggcggaagccgaggatgcctacggttttcccgccgggctgtggcgctggctgcagcggcatccaccgccggcgttgcaccggctcacccggtttcgcagcccgttgcgtggtccgtggttgacgtcggtgttcggcctggtgctattggtggcgttgcctttcgtcatcatcaccgggctactttcttatatcgcctatgcgccgcagctgggccaggccatccccggtgacgtcggctggctgcgactccccgctttcacctggcccacccgtccgtcctggctgtaccggttgacccaggggctgcatgtggggctggggctggtgatcattcccgtggtgctggccaagttgtggtcggtgataccgcggctgtttgtgtggccgccggcgcgctcgattgcccaggtgctcgaacggttgtcggtgctgatgctggtcggtgggatcctgttccagatcgtcaccggcgtgctcaacattcagtatgactacatcttcgggttcagcttctacaccggccactattttggggcttgggtcttcattgcgggtttcctgttgcatatcgtggtcaagatcccccacatggtcaccgggttgcgatcgataccgatgcgagaagtgttgggtaccaacgtggctgacacccgggcgcagccgtgcgatccggacgggctggtgtcggtcaatccgggcgaggccacgctaagcagacgcggtgccctgggattggtcggtgccggggtgctgctgatcggggtgctgacggttgggcaaaccctgggcgggttcacccgcaaggccgccctgctgctgccccggggccgtgtcgtgagcccgggcgacttcccggtcaacaagaccgccgccgccgccgggatcaccgcggaggccattggccccgactggcggctggtgctgtgtggcgggcctgcggaagtagtgctggatcgcgccacgctggccggcctgccgcaacgcaccgcccggctgccgctggcctgcgtcgaagggtggtcggccgtgcgcacctggagcggcgtgccgctggccgagctggcgctgctggcgggcgtgccggcggcgcgctcggcacgggttacatcgctgcagcgcggcggggcgttcggcgaggcgaagctggcggcaaaccagatcgccgaccccgatgcgctgctggcgttgcgggtcgacggggcggatctgtcgctggatcatggctacccggcccgcatcatcgttcccgcactgcccggtgtgcacaacacgaaatgggtcgctggcatcgaattccacaagaggtga

SEQ ID NO: 28172 - DNA, 981 bp, Mycobacterium tuberculosis
gtgccagaactaaataccgctcgcggacccatcgacaccgctgatctcggcgtcacgctgatgcacgagcacgtcttcatcatgaccaccgagattgcgcagaactacccggaagcctggggcgacgaggacaagcgggtggccggcgccatcgcccggctaggcgaactcaaggcccgcggcgtggacaccatcgtcgacctcacggtgatcgggctgggccgatacatcccgcgcatcgcccgggtggccgcggccaccgagctgaacatcgtcgtggccaccggcttgtacacctacaacgacgtcccgttctacttccactacctcgggccgggcgcacagctggacggcccggagatcatgaccgacatgttcgtccgcgacatcgagcacggcatcgccgacaccggcatcaaggcgggaatcctcaagtgcgccaccgacgaacccggcctcacccctggtgtcgagcgggtgttgcgcgcggtcgcccaagcacacaaacgcaccggggcgccgatctccacccacacccacgccgggctgcggcgcggccttgaccagcaacgcatcttcgccgaggagggggtggacctgagccgggtggttatcggacactgcggcgacagcaccgacgtcggctacctggaagagctcatcgccgccggctcctacctcgggatggaccggttcggcgtcgacgtgatctcaccgtttcaggaccgggtgaacatcgtggcccgaatgtgcgagcgcggccatgccgacaagatggtgctatcacacgacgcctgctgctatttcgacgcgcttcccgaggagctggtgccggtggcgatgccgaattggcattacctccacatccacaacgacgtcatccccgcactgaagcagcacggcgtcaccgacgagcagctgcacaccatgctcgtcgacaacccgcgccgcatcttcgagcggcagggcggctatcagtga

SEQ ID NO: 28173 - DNA, 1167 bp, Mycobacterium tuberculosis
atggcttttccacgcacactggcgatactcgctgcggcagcagcgttggtggtggcctgcagccatggcggcacacccaccggatcgtcgacgacctccggcgcgtcgcccgcaactccggtagccgttcccgtgccccggagctgcgccgagccggcggggatcccggcgctgctgtccccccgtgacaagctggcccagctgctggtggtcggcgtgcgagatgctgcggacgcccaagccgtggtcaccaactaccacgtcggcggcatcctcatcggcagcgacaccgacctgacgatttttgacggcgcgctggccgagatcgttgccggcgggggtccgctgccgctggcggtgagtgtcgacgaggaaggcgggcgggtgtcccggttgaggtcgctgatcggcggtacggggccgtcggcccgcgaactggcacaaacccgaaccgtccagcaggtgcgcgacttggctcgagaccgcggccggcagatgagaaagctgggtatcaccatcgacttcgccccggtggtcgacgtcaccgacgccccggatgacacggtgatcggggaccggtcgttcggctcggatccggctacggtcaccgcgtatgccggggcgtacgcgcagggtctgcgcgatgccggggtgctgccggtgctcaagcatttccccggtcacgggcgtggctcgggtgattcgcacaacgggggtgtcacgacaccaccgcttgatgacctggtgggcgatgacctggtgccctaccgaacgctggtgacccaggcgccggtcggtgtgatggtgggtcatctgcaggttcctgggttgaccggctccgagccggccagtctgagcaaggccgcggtgaacctgctgcgcaccggcacgggatacggcgcaccgccgttcgatggtccagtgttcagcgacgacctctctggtatggccgcgatctcagaccggtttggcgtcagcgaggcggtgttgcgcaccttgcaagccggtgccgatatcgcactgtgggttaccaccaaagaggtgcccgcggtgctggaccgcctggaacaggcgctgcgcgccggtgaattgccgatgtcggcggtcgaccggtcggtggtgcgggtggcgaccatgaaggggcccaacccggggtgtggccgttag

SEQ ID NO: 28174 - DNA, 1323 bp, Mycobacterium tuberculosis
gtggcccctgctgctaagaacacttcacagaccaggcggcgagtcgccgtactgggcggcaaccgcatcccgttcgccagatcggacggtgcctacgcggatgcgtccaaccaggacatgttcaccgcggcgctgagcggcttggtggaccgattcggactcgccggcgagcggctggacatggtggtgggcggtgcggtgctcaaacacagccgcgacttcaatctaatgcgcgaatgcgtgctgggctccgaactctcgccgtacacgccggcgttcgacctgcagcaggcctgcgggacgggcctgcaggccgcgatcgcggccgccgacggcattgccgccgggcggtatgaggtggccgccgctggcggggtggacaccacctcggacccgccgatcggcctgggcgacgacctgcgccgcaccctgctcaagctgcgccgatctaggtccaacgtgcaacgcctcaagctggtgggcacgctgccggccagcctgggcgtggagatccccgccaacagcgagccgcgcaccgggctgtcgatgggcgagcacgccgccgtcaccgccaagcagatgggcatcaaacgcgtagaccaggacgagctggccgccgccagccatcgcaatatggccgacgcctacgaccggggtttcttcgacgacctggtcagtccgtttttagggctgtaccgagacgacaatctgcggcctaactccagcgtcgagaaactggccacgctgcgtccggtcttcggagtgaaggccggtgacgcgacgatgacggccggcaattcgactccgctgaccgacggcgcctcggtggcattgctggccagcgaacagtgggcggaggcacactcgctggctccgctggcctatctcgtggatgccgagaccgccgcggtcgactatgtcaacggcaacgacggcctgttgatggcgccgacctacgcggtaccccggctgctggcccgtaacgggttgagcctgcaggacttcgacttctacgaaatccacgaggcgtttgcctccgtggtgctcgcgcatctggcggcgtgggagtccgaggagtactgcaagcggcggctgggcctggacgccgcgctggggtcgatcgatcggtccaagctcaacgtcaacgggtcgtcgttggccgccgggcaccccttcgcggcgaccggtgggcggattttggcgcagaccgccaagcagctcgccgagaagaaggcggcgaaaaaaggcggcggaccgctgcgcgggctgatttcgatctgcgcggccggcggccaaggtgtggccgcgattttggaggcctga

SEQ ID NO: 28175 - DNA, 2562 bp, Mycobacterium tuberculosis
atgcctacggctgggagttcgcgcgcgcctgccgcggctcgcgagatcgtcgtggtcggccacggcatggtgggccatcggctggtcgaagcggtgcgtgcccgtgacgcggacgggtcgctgcggatcacggtgctggccgaggagggcgatgcggcctatgaccgggtcggcctgacgtcctataccgaaagctgggaccgcgccctgttggccttgccgggtaacgattacgccggtgaccagcgggttcggttgctactaaacacccgagtcacccagattgaccgggcaaccaagtcggtggtcaccgcggcagggcaacggcatcgctacgacaccctggtgctggccaccggctcctacgcattcgtcccgccggtgcccggccacgacctgcccgcgtgccacgtctaccgcacctttgacgatctcgacgctatccgcgccggcgcccagcgcaccctggacggcggtcacaccgatggcggggtggttatcggtggcggcctgctgggcctggaagccgccaatgcgctgcgccagttcgggttgcagacacacgtcgtcgagatgatgccacgattgatggcccaacagatcgacgaggccgggggtgcactactggccaggatgatcgccgatctcgggatcgcggtgcacgtcgggaccggtaccgagtcgatcgagtcggtgaagcattcggatggctcggtgtgggcgcgggttcgcctgagcgacggcgaggtgatcgatgctggggtggtgatctttgccgccggcatccggccgcgcgacgagttggccagggcggcggggctggcgatcggcgaccggggcggtgtgctcaccgacttgtcctgccggacaagcgatcccgatatctacgcggtcggcgaagtcgccgcgatagacgggcggtgttacggcctggtcgggcccggatacaccagcgccgaggtggtggccgaccgactgctggacgggtcggccgagttccccgaagcggacctgtcgaccaaactcaagctgttgggtgtcgacgtcgccagcttcggcgacgcgatgggggcaaccgagaactgcctcgaggttgtcatcaatgacgcggtgaagcgcacatatgccaagttggtgctctccgacgacgccaccacgctgctcggtggcgtgctggtgggcgatgcctcgtcgtacggggtgctgcggccgatggtcggcgccgaactgcccggggatcccctggcgctgatcgcgccggccggatctggggccggcgctggcgctttaggtgttggggcgctgccggattcggcccagatctgctcgtgcaacaacgtcaccaagggcgagctgaagtgcgcgattgccgacggttgtggggacgttcccgcgctgaagtcatgcaccgcggccggcacgtcgtgtgggtcgtgcgtgccgctgctcaagcagctgctagaagccgagggtgtggagcagtccaaggcgctgtgcgagcacttcagccagtcgcgcgcggagctttttgaaatcatcaccgccaccgaagtccggactttctccgggttgcttgaccgctttggacgcggaaagggttgcgacatctgcaaacccgtggtcgcctctatcctggcatccaccggctccgaccacattttggacggcgagcaggcctcgctacaagattccaacgaccacttcctggccaacatccagaagaacggcagttactcggtggtgccgagggtgcctggcggtgacatcaagccagaacacctgattttgatcggccagatcgcacaggacttcggcctctacaccaagatcaccggcggtcagcggatcgacttgttcggcgcccgggtggatcagctgcccttgatctggcagcgactggttgatggcggcatggaatctgggcacgcctacggcaaggcggtgcggaccgtgaagagctgcgtgggcagcgactggtgccgctacggtcagcaggattcggtgcagctggccatcgacctggaactgcgttatcgcgggctacgggcaccgcacaaaataaagctgggcgtctcgggttgcgcgcgggaatgcgccgaggcgcgcggcaaggatgtgggcgtgatcgccaccgagaaaggctggaacctttacgtcgccggcaacggcggcatgacgcccaagcacgctcaactactggccagcgacctcgacaaagagacgctcatccgctacatcgaccgctttctcatttactacatccgcacggccgaccggctgcagcgaaccgcgccatgggtggaatcgcttgggctggaccatgtgcgcgaggtggtctgcgaggactcgctgggtctggccgaggaattcgaggccgcgatgcaacgccatgtcgccaactacaagtgcgagtggaagggcgtgctggaggacccggacaagctgtcccggttcgtttccttcgtcaacgcccccgatgccgtcgactcgacggtgaccttcaccgagcgtgccgggcgcaaagtacctgtgtccattggtatcccgcgggtccgatcatga

SEQ ID NO: 28176 - DNA, 1392 bp, Mycobacterium tuberculosis
atggcactcaccaccgccccggcaatcgattatgcgctgccacgccagcaggatgagggcgatcactggatcgacgactggcgcccggaagacccggtgttctgggagacgatcggcaggccgatcgcccgccgtaacctgatcttctccatcttcgccgagcacgtcggcttcagcgtgtggatgctgtggagcatcgtggttgtccagatgaccgccgccgctcccgggcaccccgccgcgtccggctgggcgctgtccgccagccaggccctatgtttggtcgccgtccccagcggtgtcggggcgttcctccggctgccgtacaccttcgcgatcccgatctttggtggccgcaactggacgaccgtctcggcggcgctgctggtgatcccgtgcctgctgctggcttgggcggtgagccacccttccctgccgttcgcggtgttggtggtgatcgcggccaccgccggtttcggtggcggcaactttgcctcatcgatggccaacatctcgttcttctacccggagaaggacaagggttgggcgctgggcctgaacgcggccggaggcaacatcggggtggcggtggtgcagaagatcattccgcccatcgtggtcgccggcagtggggtggcactgtcgcgtgccggactgttcttcgtgcccttggccgtcgccgccgcggtgtgcgcattcctgtttatgaacaacctcacggaggccaaggccgatgtgaagccggtgtggcagtcgctgcggcatgccgacacctggatcatgtcgctgctgtacatcggcacctttgggtcgttcatcgggtattcggcggccttcccgacgttgctcaagaccgtgtttggccgtggtgacatcgcgttgggttgggccttcctcggcgcgggcatcggttccctggtccgtccgctgggcggcaagctcgccgaccggatcggcggtgcgcggatcaccgcggccagtttcgtcatgctggcggccggggcggctgcggcgttgtggtcggtgcagtcggtcaatctgccggtgttcttcgtcagcttcatgttcttgttcgttgccaccggcatcggcaatggttcgagctaccggatgatctcgaggatcttccaggtcaaaggcgaagtcgccggcggggatccggaaacgatggtgaacatgcgccgacaggccgccggagcgctgggcatcatctcctcgatcggcgcgttcggcgggtttgtggtgccgctggcctacgcctggtcgaaggtgcacttcggcaatatcgaacccgccctgcacttctacgtggcgttcttccttgccctgctcgtcgtcacctggtactgctacctgcgtagaaccacccccatgggccaggtgggggtgtag

SEQ ID NO: 28177 - DNA, 2874 bp, Mycobacterium tuberculosis
atgtcgtttgtgattgcggcgccagaggttatcgcggcagcggcaacggatttggccagtctcggatcgagcatcagcgcggcaaacgcagccgcggcggccaacaccacggcactgatggccgcgggcgccgacgaggtgtcgacagccatcgccgcgctgttcggcgcccacggccaggcctatcaggcgctcagcgcccaagcgcaggcgtttcatgcccagttcgtgcaggcattgacctccggtggcggcgcctatgcggccgccgaggccgccgcggtgtcgccgctgctggatccgatcaacgagttcttcctggcgaataccgggcgcccgttgatcggcaacggcgccaacggcgcccccggcaccggggccaatggcggggacggcggctggttaatcggcaacggcggcgccggaggatccggcgcggccggcgtcaacggcggcgccggcggcaacggcggcgccggcggcaacggcggcgccggcgggctcatcggcaacggcggcgccggcggcgctggcggggtcgccagcagtgggatcggcgggtccggcggagccggcggcaacgccatgctgttcggcgccggcggcgccggcggcgccggcggcggcgtagtagccctcacgggcggggccggcggcgccggcggggctggcggcaacgccggcctgctcttcggcgccgccggagtcggcggggccggcggattcacgaacggcagtgcactcggcggggcgggcggcgccggcggggccggcgggctgttcgccaccggcggggtcggcggatccggtggggccggcagctccggcggggccggtggggccggtggcgctggcgggctgttcggcgccggcggcaccggcgggcatggcgggttcgccgacagcagcttcggcggagtcggcggggccggcggggccggcgggctgttcggcgcaggcggggaaggcggcagcggcggacacagcctggtcgccggcggggacggcggggccggcggcaatgccggcatgctcgccctcggcgccgcgggcggcgccggcggaatcggtggggacggcggtactctcacggccggcggcataggcggcgccggcggcgccggcggcaacgctgggctgctcttcggctccggcggctccggcggcgccggcggattcggcttcgccgacggcgggcaaggcggccccgggggcaacgccggcacggtcttcggctccggcggcgccggcggcaacggcggagttggccagggcttcgccggcgggatcggtggggctggcggcacccccgggctgatcggtaacggcggcaacggcggtaacggtggcgccagcgcggtgaccggcggcaacggcgggatcggcggcaccggcgtgttgatcggcaatggcggtaacggcggtagcggtgggattggcgcgggcaaggccggagtgggcggcgtcagcgggctgctgctcggtctagacggattcaatgctcccgcgagcacctcgccactgcacaccctgcagcaaaatgtgctcaatgtggtgaacgagcccttccagacgctcaccggccgcccgctgatcggcaacggcgccaacgggactcctggaaccggggctgacggcggggccggcgggtggctgttcggcaacggcgccaacgggaccccggggaccggggctgccggcggggccggcgggtggttgttcggcaacggcggtaacggcgggcacggtgcgaccaacaccgccgccacggctacgggcggggccggcggggccggcgggatcttgttcggtaccggtggcaatggcgggaccggcgggatagccaccggtgctggagggatcggcggggccggcggcgccggtggggtctccttgctgatcggctccggcggcaccggcggcaacggtgggaactccataggcgtcgctggcatcggcggggccggcgggcgcggcggcgacgccggtttgctcttcggcgcggccggcaccggcggccacggcgccgctggcggtgtcccggccggcgtcggcggcgccggcggcaacggcggactgttcgccaacggcggagccggaggggccggcgggttcaacgcagccggcgggaacggcgggaacggcggactgttcggaactggcggcaccggcggggccggcacgaacttcggggccggtgggaacggcgggaacggcggactgttcggagccggcggcaccggcggcgccgccggctcgggagggtccgggatcaccaccggcggcggcgggcacggcggcaacgccggcctactctccctcggcgcctccggtggcgccggcggcagcggtggcgccagctcccttgccggcggggccggcggaaccggcgggaacggcgccttactcttcggcttccgcggcgccggcggcgccggcgggcacggcggggcagcacttaccagcatccagcaaggcggcgccggcggcgccggcgggaacggcggcttgctcttcggctccgccggcgccggcggcgccggcggcagcggtgccaacgctctaggcgccggtaccggcggcaccggcggtgacggtggccacgccggggtgttcggcaacggcggtgacgggggttgccggcgggtttggcgccggtaccggcggcagcggtggtgtcggcggcaacgccgtgctgatcggcaacggcggcaacggcggcaacgccggcaaagccggggccacgcccggtgccggcggcaccggcgggctgctgctcggcgagaacggactcaacggcttgccatagcaggcagacctgcgaccacacgcggcgttgagggcatcagttgctcaccgcagatgatgccgtag

SEQ ID NO: 28178 - DNA, 2514 bp, Mycobacterium tuberculosis
atgtcgtttgtgattgcggcgccagaggttatcgcggcagcggcaacggatttagccagtctcgagtcgagcatcgccgcggccaacgcggccgcggcggccaacaccacagcactgctggccgcgggtgccgatgaagtctcgacggcggttgcggcgctgttcggcgcccacggccaggcctatcaggcgctcagcgcccaagcgcaggcgtttcatgcccagttcgtgcaggcgttgacctccggtggcggcgcgtacgccgccgccgaggccgccgccacctcgccgctgctcgccccgatcaacgagttcttcctggcgaataccgggcgcccgctgatcggcaacggcaccaacggcgcccccggcaccggggccaatggcggggacggcggctggttaatcggcaacggcggcgccggaggatccggcgcggccggcgtcaacggcggggccggcggcaacggcggcgccggcgggctcatcggcaacggcggcgccggcggcgccggcgggagggccagcacggggaccggcggcgccggcggcgccggcggggccgccggcatgctgttcggggccgccggggtcggcggtcccggcggattcgcagccgctttcggcgccaccggcggcgccggcggggccggcggaaacggcgggctgttcgccgacggcggggtcggtggcgccggcggggcaaccgacgccggcaccggcggggccggcggatccggcggaaacggcgggctgttcggcgccggcggcaccggtgggcccggcggattcggcatctttggcggcggcgccggcggggatggcggctctggcgggctgttcggcgccggcggcaccggcggtagtggcgggacgagcataatcaacgtcggcgggaacggtggggccggcggcgacgccggcatgctcagcctcggtgccgccggcggcgccggcggcagcggcggatccaacccggacggtggcggcggtgccggtgggatcggaggcgacggcggcacgttgttcggctccggcggcgccggcggcgtctgcgggctgggcttcgacgccggcggggcgggcggcgccggcggaaaggcgggtctgctcatcggggcgggcggtgccggcggcgccggcggcgggtccttcgcgggcgccggcggaaccggtggggccggcggcgcgcccgggctcgtcggcaacgccggcaacggcggcaacggcggcgccagcgcgaacggcgccggcgccgccggcggcgccggcggaagcggcgtgctgatcggcaatggcggtaacggtggtagtggcggcactggcgcacccgccggcacggccggcgccggcggcttaggcgggcagctactaggtcgagacggattcaacgcccccgccagcacgccactgcacaccctgcagcaacaaatcctcaacgcgatcaacgagcccacccaagccctcaccgggcgaccgctgatcggcaacggcgccaacggcactccggggaccggggccgacggtggggccggcgggtggttgttcggcaacggcggcaacggcggccacggagcgaccggcgccgacggcggagacggcggatccggcggggccggcggaatcctgtcaggtattggcggcaccggcgggtccggcggcatcggaacgacgggccaaggcgggaccggcgggaccggcggagccgccttgctgatcggctccggcggcaccggcggcagcggcgggtttggcctggacaccggcggggccggcgggcgcggcggtgacgccggcttgttcctcggtgccgcagggaccggcggccaggccgccctctcccaaaactttatcggtgccggcggcaccgccggagccggtggtaccggtgggctgttcgccaacggcggggccggcggggccggcgggtttggcgcgaatggcgggaccggggggaacggattgctcttcggcgccggcggcaccggcggggcgggcacgctcggcgccgacggcggcgccggggggcacggcgggctgttcggcgccggcggcactggcggtgctggcggcagcagcggcggcaccttcggcggcaacggcggcagcggcggcaacgccggcctactcgccctcggcgcctccggcggcgccggcggcagcggcggcagcgccttaaatgtcggcgggaccggcggggtcggcgggaacggcggcagtggcggctcgctcttcggcttcggcggtgccggcggcaccggtggctccagcggcatcggcagcagcggcggcaccggcggtgacggcggtacggccggggtgttcggcaacggcggcgacggcggcgccggcgggtttggcgctgacaccggtgggaattcgagctcggtccccaacgccgtgctgatcggcaacggcggcaacggcggcaacggcgggaaagccggcggcacacccggcgccggcggcaccagcgggctgatcatcggcgagaacgggctcaacggcctgtaa

SEQ ID NO: 28179 - DNA, 1776 bp, Mycobacterium tuberculosis
gtgtcctttgtgatcgcacaaccggagatgatcgcggcggcggccggtgagttggccagcatcagatcggcgatcaacgcggccaatgcggcggccgcggcccagaccaccggagtcatgtcggcggccgccgacgaggtgtctacggcggttgccgcgctgttttcctcgcatgcccaggcctatcaggccgccagcgcgcaagcggccgcctttcacgcccaggtggtgcggaccctgaccgtggacgcgggagcgtatgccagcgccgaggccgccaacgccgggccgaacatgctggccgcggtcaacgcccccgcccaggcgctgttggggcgcccactgatcggcaacggtgccaacggggcgccgggcaccgggcaggccggcggcgacggtgggctgttgttcggcaacggcggcaacggcgggtccggcgcacccggacaggccggcggggccggcggggcggccgggttcttcggcaacggtggcaacggcggggacggcggggccggagcgaacggcggcgccggcggcaccgccggctggttcttcggcttcggcggcaacggcggggccggcgggatcggtgttgccggcatcaacggcggtctcggcggcgccggcggcgacggcggcaacgccgggttcttcggcaacggcggcaacggcggcatgggcggggccggggcggccggcgtgaacgccgtcaatcccggcctggccaccccggtcaccccggcggccaacggcggcaacggcctcaacctcgtcggcgttcccggcaccgccggtggcggcgccgatggcgccaacggcagtgccattggccaggcgggcggcgctggcggtgacggcggcaacgcctccacgagtgggggcatcgggatcgcgcaaaccgggggcgccggcggcgctggcggtgccggcggcgacggcgcacccggtggcaacggcggcaatggtggcagcgtcgagcacactggcgctaccggctcctctgcgagcggcggcaatggtgccaccggcgggaacggcggggtcggtgcgcccggcggtgccggcggcaacggcggccacgtcagcggcggatcggtcaacacagccggcgccggtggcaaaggcggcaacggcggcaccggcggcgccggcggcccgggcggccacggcggcagcgttctatccggcccggttggcgacagtggcaacggtggtgccggcggggacggcggggccggggttagcgccaccgatatcgccggcaccggcgggcgcggcggcaacggtggtcatggcgggctgtggatcggcaacggcggcgacggtggtgcgggcggtgtcggcggtgtcggcggggccggtgcggctggcgcgatcggcggccacggcggcgatggcggctccgtaaatacccctattggcggcagcgaggccggtgacggcggtaagggcggcctgggcggggacggcggtgggcgcgggatattcggccagtttggggccggcggggccggtggtgccggaggcgtcggcggcgccggcggggctggcgggaccggcggcggcggcggcaacggtggggccattttcaatgccggtacccccggcgccgccggcacgggcggtgacggcggtgttggcgggaccggtgcggccggcgggaaaggcggggccggcggtagcggcggcgtcaacggcgccaccggcgccgacggcgccaagggcctcgacggtgccaccggcggcaaaggcaacaacggcaaccccggctga

SEQ ID NO: 28180 - DNA, 6615 bp, Mycobacterium tuberculosis
atgaacctggtctccacaacgtcgggaatgtcgggcttcctcaacgtcggcgcgctgggatcgggtgtggcgaatgtgggcaacaccatctcgggtatctacaacgtgggcacgtcggacctctcgacgcccgccgttaactccgggttggcaaatatcggaaccaatattgccggcctgctgcgcgacggcgcgggtactgcggctattaacttgggcttggccaaccacggcaacctcaacgtgggcttcgcaagtctcggcggctttaacttcggcggcgccaccatcggccacaacaacgtcggcatcgggaacaccggaatcttcgatgtcggcctggcgaacctgggcagctacaacatcggcttcggaaaccttggcgacgacaacctgggcttcggcaacttcggcagctacaacatcggcttcggcaacgtcggcaacgacaatctgggtttcgctaacgcgggcggcggcaacatcggctttgcgaacaccggcagcaacaatgtcggctttgggaacacgggcagcaacaatgtcggcatcgggctcacgggcaacggacagatcgggttcggcagcttcaactcgggcagcggaaacatcggcctgttcaactcgggcagcaacaacatcggattcttcaattccggcagcggcaacttcggcatcgcaaactcgggcagcttcaacactggcatcggaaacaccggcaacaccaataccggcctattcaactccggcgacgtcaacacgggcgccttcaacccgggcagcttcaacaccggtagcttcaacaccggcagcttcaacaccggtggcttcaatccgggcaataccaacaccggctacctcaacattggcaactacaacaccggcatcgccaacaccggcgacgttgacaccggggctttcatcaccggaaactacagcaacgggttgttcttaagcggcgattaccagggcctggtcggcctcaacctggtgatcgatatgcctctccccataagcctcggcgtgaatattcccatcgatatcccgatcaccgcctcggccggcaacatcacccttatgggcgtcacgattccgcccaccggcgatatcgtcctttcgtcaatagcgggccagcgagcccactttggccccattaccattccgaacatcacggttgtcggccccacgacgacagtcgccataggagggccgaataccgcgatcaccataactggcggtggcgccattaggatcccgctcatcagtatcccggcggcgccaggtttcggaaactcgaccaccaacccgtcgtcaggtttcttcaataccggcgccggcggcgcctcgggcttcggcaacttcggcggcgccaattcgggcttttggaacctggcctccgcgacctcgggggcgtcggggctcctcaacgtcggcgccctgggatcaggtctggcgaacgtgggcaccaccgtctcggggttctacaacaccagcacgtcggacctcgcgacgccggccttcaattcaggcctggccaacatcagcaccagtatcgccggcctgctgcgcgacagcacgggcaccatggtcctcaacctgggcttggcaaaccacggcaccctcaacgtcggcattgcaaacctcggcgactacaacatcggctttgcaaacctcggcagcgccaacttcggcagcgccaatatcggtggcaacaacatcggcggcgcaaacaccggaatattcgacatcggtttggcaaatctgggcagttacaacatcggcttcggaaacttcggcgatgacaacctgggcttcggaaacctcggcagctacaacgtcggcttcggaaacttgggcaacgacaacctgggcttcgccaacaccggcagcaacaatatcgggttcgcgaacaccggcagcaacaatatcggcattgggctcacgggcgacggccagatcgggttcggctccctgaattctggcagcggaaacatcggcttgttcaactcgggcagcggaaacatcggctttttcaactcgggcaacggaaacgttggcatcggcaacaccggcaccgcaaacttcgggcttggaaacaccggcagcaccaacaccggcttcttcaactccggcgacgtcaataccggtatcggcaacaccggcagcttcaacaccggcagcttcaatccgggcgattccaacaccggggatttcaacccaggcagctacaacacgggactcggaaacaccggcgatgttgacaccggcgccttcatctccggcagctacagcaacgggttcttgtggagtggaaattatcagggcctcattggcttgcacgcggcgctagcgattcccgaaatcgccctaacctttggcgtcgacatcccgatacatatacccatcaacatcgacgccggggtcgtcaccctccagggcttcagcatcgtagctgccgaaaataatatcgacttcacccccatcatcatcccgaccatcaatatcaccttgcccacggcggcgatcaccgtgggcggacccaccacctcgatcggtatcaccgccagcgccggtatcggctccatcaccatcccgatcatcgacattcccgcgacatcgggcttcggcaactcgaccactagtccgtcgtcgggcttcttcaactccggagcgggcagcgcgtcgggctttttgaacgtggtcgccggcgcctcagggatttcgggttatctcaatgtcggtgcgctggggtcgggtgtgactaacgtgggtcacaccgtctcgggtttctacaacgcgagcgcgttggacctcgtgacgccggcctttgcctccggtctcatgcgcgacggtatgggcacgatgactctgaaccttgggctggcaaacctgggcagcaataacgccggcttcggcaacaccgggatctttgacgtcggcgtggcgaatctgggcaactacaacatcggcttcggaaacttcggcgacgacaacctgggctttgccaacctaggcagctacaacatcggcgttgccaacaccggcagcaacaatatcggctttgccaacaccggcagcaacaatatcggcatcgggctcaccggtaccggccaaatcgggatcggcgctctgaactcgggcagcggaaacatcggcttgttcaactcgggcgacggaaacatcggcttctttaactcgggcaccgggaacttcggcatcggcaacaccggcaccggaaacttcggcatcggcaactcgggcagcaccagcacgggcttgttcaactcgggcgacggcaacaccggcggcttcaaccccggtaacttcaacaccggcaatttcaataccggcagcttcaacaccggcggcttcaacgcgggtaacaccaacaccggccacttcaacaccgggaactacaacaccggcatcgcgaatacgggcgacgtcagcaccggcgctttcatctccggcaactacagcaacggcatcttgtggcggggcgactaccagggcctgatcggttactcctacgcgctgactattccggagattccggcgcacttggacgtcaatatcccaatcgacataccgatcaccggcagtttcaccgacctcgtggtggacaatttcactatccccatcatcggcttcgaatccttcgcgtttagctttcacatccataccgagccggacatcggtcccatcattgtcccgagcttcgtgctcagcgttcccacgttcgcgatcgccgtgggcggacccacgaccgcgatcaacatcagcgccaccgccggcctcggccccatcaccatcccgatcatcgacattccggcagcgccgggcatcggaaactcgaccaccagcccgtcgtcaggcttcttcaacaccggcgccggcaccgcatccgggttcggcaacgtcggcggcaacacatcgggcctgtggaaccttgcgtcggcagcctcaggagtctcgggcttgctcaacgtcggcgcgttgggatcgggtgtggcgaatgtgggcaacaccatctcgggtatctacaacacgagcccgctggacctcgggacgccggccttcggctccggcctcgcaaacatcgccggcctgctgcagggcggcgccggcacgacgatcctcgacttggccggcctcggcaacctcaatgtcggcttggcaaacctcgggggctctaacttcgggatcgggaacaccggaatcttcaatgtcggtttcgcaaacgtgggcaaccacaacattggcttggcaaacctgggcaactacagcgtcggcttcgccaactcgggcaactaccatatcggcattgctaacaccggcagtgccaatatcggcttcgccaacaccggtagcggcaatatcggcatcgggctcaccggcaccggtcagatcgggttcggcagcttcaactcgggcagccacaacatcggcttgttcaactccggtgacggaaacgtaggattcttcaactcgggcaccggcaacgtgggcatcggaaacaccggcaccgcaaacttcggcatcgcaaactcgggcagcttcaacaccggcctcgggaacacgggcagcaccaacacgggcctgttcaacccgggcaacgtcaacaccggcgtcggcaacaccggcagcatcaacaccggcagcatcaacaccggcagcttcaacactggcagcaccaataccggcagcttcaacctcggcgatcacaacaccggcagcttcaactccggtgactacaacacgggctacttcaacgcgggtgactacaacacgggtgtggccaacacgggcaacgtcaacaccggcgcgttcatctccggcaattacagcaacgggttcttctggcgaggtgactaccaggggttgattggcctttccacaacgatcaccattcccgaaatcccctaccgctacgacttgagtgttccaatcgacatacccatcaccggcaccgtcgtcgccaccacgccaaacagtttcaccattcccggtttccagatacgagtcttgcttggtcctgcggcggtgcttgtcaacgagatgatcggccccatcacgatcgatgtcaatcaagtcatcgccatcgattcgcccattcagcaaaccatcagcatggttggcaccggcggcttcggcccgatccccatcggcatcagcatcggtggtaccccgggtttcggcaactcgaccaccggcccgtcgtcgggtttcttccacaccggcgccggccatgtatcgggcttcgggaacttcggcgccggcaacatgtcgggctccgggaacttcggcgctggcaattcgggcttctttaacgccggcggcttgggcaattcgggcctactgaatttcggcgcgctgcagtcgggtctggcgaacctgggcaacaccatctcgggcgtctacaacacgagcacgctggacctcgcgacgcccgccttcggctcgggcatcgcaaacatcggcgccaacctggccggcctgttcctcgacaacaccggcaacctgacgctgaacttcggcgtcgcaaaccagggcggcctcaacgcgggcatcgggaacctgggcagcgtcaacatcggcttcgttaataccggcgactccaacctgggcatcggcaacctcggcgacctcaacttcggcggggtcaacatcggcggtaacaacatcggcatcgccaacaccgggatcttcgatatcggcttggcgaacctgggcagctacaacatcgggttggcaaatctgggcgacgacaacctgggctttggcaacgccggcagctacaacatcggcttcgcgaacttcggcagcgacaacctgggctttgccaacaccggcagctacaacatcggcttcgcgaataccggtaacaacaacatcggcgtcgggctcaccggcaacggccagatcgggatcggcagcctcaactcgggcagcaacaacatcgggctgttcaactccggcagcggaaacatcgggttcttcaactcgggcaccggcaacgtcggcatctttaacaccggcaccggcaacttcggtctcgcgaactcgggcggcttcaacaccggcatcggcaacgcgggcagcaccaacacgggcgtgttcaaccccggggacctcaacaccggcagcttcaacccgggcagcttcaacaccggcggcttcaacccgggcagtggcaacacgggctacctcaacaccggtgactacaacacgggcgtggcgaacacgggcgatgtggacaccggtgcgttcattaccggcagctacagcaacggcttcttggtgagtggcgactatcagggcctgatcggcctgccgctgttgggcattccggtgacccccggctacttcaacctcactggcggcccgtcgtcgggcttcttcaacagcggcgccggaagcgtatcgggattcgtgaactccggtgccggcctgtcgggctacctcaataccggcgcgctgggatcgggtgtcgccaacgtgggcaacaccatctcgggctggttgaacgccagcgcgctggatctcgcgacgccggggttcctttccggcatcggtaactttggcaccaacctggcgggtttctttaggggataa

SEQ ID NO: 28181 - DNA, 771 bp, Mycobacterium tuberculosis
gtggaatttcttcgccatggggggcggattgccatggcgcacagaggatttacgtcgttcagattgcccatgaacagcatgggggcgttccaggaggcggccaagctcggattccgctacatcgagaccgacgttcgcgccacccgggacggcgtagccgtgatcctgcatgaccgtaggctggcgcccggggtggggttatccggcgcggtcgaccggttggattggcgtgatgtccgcaaggcgcagctgggtgcggggcagtcgatcccaaccctggaagacctgcttaccgcgctgccagacatgcgggtcaacatcgacattaaagccgcatcggcgatcgagccgaccgtcaacgtcatcgagcggtgcaacgcgcacaaccgggtgctgatcggttcgttttccgagcgccgtcgccggcgcgcattgcgcctgctgaccaagcgggtcgctagttcggcaggaacgggcgcgctgctggcgtggctgaccgcgcgtccgctgggcagccgggcatatgcctggcggatgatgcgcgacatcgactgcgtgcaactaccgtcacggcttggcggtgtaccggtcattacgccggcacgggtccgcggctttcatgctgcgggacgccaagtgcatgcctggaccgtcgacgaacccgatgtgatgcacacccttctcgacatggacgtggacggcatcatcaccgatcgcgcggacctacttcgtgatgttctcatcgcccgcggcgagtgggacggcgcctaa

SEQ ID NO: 28182 - DNA, 1332 bp, Mycobacterium tuberculosis
gtgcgatgcagcgtcttcggcactgggtatctgggtgccacccacgccgtcggtatggcgcaactgggacacgaggtcgtcggggtcgatatcgatcccggtaaggtcgccaagctcgccgggggtgacattccgttctacgaacccggcctgcgaaagctgttgactgataacctggctgccggccgcttgcggttcaccaccgactacgacatggcggccgatttcgccgacgtgcatttcctgggggtcggcacgccgcaaaagataggcgaatatggcgccgacctgcggcatgtccacgccgtcatcgatgcgctggtgccgcgtctggtcagggcgtcgattctggtcggcaagtcgacagtcccagtgggcaccgcagccgaactgggacatcgggccggtgcactggcaccccggggagtcgacgtggaaattgcctggaatccggaattcctgcgcgagggcttcgcggtgcacgacaccctcaaccccgaccgtatcgtccttggggtacaagatgattcgacgcgcgccgaggtagccgtccgcgagctgtacgcgccgctgctggcagcgggcgtgccgtttctggtgaccgatctgcagaccgcggagttggtcaaggtatccgccaatgcctttctggcgaccaagatttcgtttatcaatgcgatctccgaagtgtgcgaggcggcgggtgccgacgttagccagctggccgatgcgctcggatacgacccgcggatcggacgccaatgcctcaacgcgggcttgggtttcggcggcggctgcttgcccaaggacatccgcgctttcatggcccgcgccggcgaactgggagccgaccaggcgttgacgttcctgcgtgaagtggacagcatcaacatgcgccggcgcaccaagatggtggaactggccaccaccgcatgcggtggctcgttgctgggcgccaatattgcggtgctcggcgcggcgttcaaacccgaatccgatgacgtgcgcgattcgcccgccctcaatgtggcgggccagctgcagctcaacggcgccacggtccacgtgtacgatccaaaggccttggacaacgcccaccgactgttccctaccttgaactatgcggtttcggttgcggaggcctgcgagcgcgcggacgccgtgttggtgcttaccgaatggcgggagttcatcgatctcgaacccgctgatctagccaaccgggtgcgggcccgggtgatcgtggacggccgcaactgcctcgacgtgacccgctggcggcgggcaggctggcgggtgttccggctgggagtgccgcgattagggcactga

SEQ ID NO: 28183 - DNA, 681 bp, Mycobacterium tuberculosis
atggctggacagtccgatcgtaaggcggcgttgttggaccaggtagcgcgcgtgggcaaggcgctggccaatgggcggcgattgcaaatcctggacttgctcgcccaaggtgagcgcgcggtagaagcgatcgcgacggcgaccgggatgaacctgaccacggcatcggcgaatctgcaggcgctgaagagcggcgggctggtcgaggctcgccgcgaggggacccggcagtactaccggattgctggggaagacgtggcaaggctgttcgcgctggtgcaagtggttgccgacgagcatctggccgacgtggcggtcgcggccgcagacgtgctcggttcgccggaggatgcgatcacccgtgcggagctgctgcggcggcgcgaagccggcgaggtcaccctggtcgacgtgcgaccgcacgaggaataccaggccggccatatcccgggcgccatcaatatcccgatagccgaactggccgaccggctcgccgaactaactggcgaccgcgacattgtcgcctactgtcgtggtgcctactgcgtcatggcccccgatgccgtccgcatcgcgcgcgacgcggggcgggaggtgaaacgcctcgacgacggaatgctcgaatggcgattggccggactgccggtcgacgagggtgcaccggtcgggcatggggattga

SEQ ID NO: 28184 - DNA, 1878 bp, Mycobacterium tuberculosis
atggctcgtgcggtcgggatcgacctcgggaccaccaactccgtcgtctcggttctggaaggtggcgacccggtcgtcgtcgccaactccgagggctccaggaccaccccgtcaattgtcgcgttcgcccgcaacggtgaggtgctggtcggccagcccgccaagaaccaggcagtgaccaacgtcgatcgcaccgtgcgctcggtcaagcgacacatgggcagcgactggtccatagagattgacggcaagaaatacaccgcgccggagatcagcgcccgcattctgatgaagctgaagcgcgacgccgaggcctacctcggtgaggacattaccgacgcggttatcacgacgcccgcctacttcaatgacgcccagcgtcaggccaccaaggacgccggccagatcgccggcctcaacgtgctgcggatcgtcaacgagccgaccgcggccgcgctggcctacggcctcgacaagggcgagaaggagcagcgaatcctggtcttcgacttgggtggtggcactttcgacgtttccctgctggagatcggcgagggtgtggttgaggtccgtgccacttcgggtgacaaccacctcggcggcgacgactgggaccagcgggtcgtcgattggctggtggacaagttcaagggcaccagcggcatcgatctgaccaaggacaagatggcgatgcagcggctgcgggaagccgccgagaaggcaaagatcgagctgagttcgagtcagtccacctcgatcaacctgccctacatcaccgtcgacgccgacaagaacccgttgttcttagacgagcagctgacccgcgcggagttccaacggatcactcaggacctgctggaccgcactcgcaagccgttccagtcggtgatcgctgacaccggcatttcggtgtcggagatcgatcacgttgtgctcgtgggtggttcgacccggatgcccgcggtgaccgatctggtcaaggaactcaccggcggcaaggaacccaacaagggcgtcaaccccgatgaggttgtcgcggtgggagccgctctgcaggccggcgtcctcaagggcgaggtgaaagacgttctgctgcttgatgttaccccgctgagcctgggtatcgagaccaagggcggggtgatgaccaggctcatcgagcgcaacaccacgatccccaccaagcggtcggagactttcaccaccgccgacgacaaccaaccgtcggtgcagatccaggtctatcagggggagcgtgagatcgccgcgcacaacaagttgctcgggtccttcgagctgaccggcatcccgccggcgccgcgggggattccgcagatcgaggtcactttcgacatcgacgccaacggcattgtgcacgtcaccgccaaggacaagggcaccggcaaggagaacacgatccgaatccaggaaggctcgggcctgtccaaggaagacattgaccgcatgatcaaggacgccgaagcgcacgccgaggaggatcgcaagcgtcgcgaggaggccgatgttcgtaatcaagccgagacattggtctaccagacggagaagttcgtcaaagaacagcgtgaggccgagggtggttcgaaggtacctgaagacacgctgaacaaggttgatgccgcggtggcggaagcgaaggcggcacttggcggatcggatatttcggccatcaagtcggcgatggagaagctgggccaggagtcgcaggctctggggcaagcgatctacgaagcagctcaggctgcgtcacaggccactggcgctgcccaccccggcggcgagccgggcggtgcccaccccggctcggctgatgacgttgtggacgcggaggtggtcgacgacggccgggaggccaagtga

SEQ ID NO: 28185 - DNA, 9903 bp, Mycobacterium tuberculosis
atgagcttcgcggtgctgcccccggagatcaattcggcgcgcctgtacgtgggtgccgggttggcgccgatgctggacgcggcggccgcttgggatggactggccgacgaattgggttcggccgcggcctcgttttcggcggtgacggcggggctggcaggttcctcgtggctgggcgcggcgtcgacggcgatgacgggagcggccgccccctatctgggctggttgagcgcggcggcggcgcaggcccagcaggcggccacccaaacccggctggcggcggccgccttcgaggcagccctggcggcgacggtacatccggcgatcatctcggccaaccgggcactgttcgtgtcgctggtggtctcgaacctgctgggccaaaacgccccggcgatcgcggccaccgaggccgcctacgagcagatgtgggcccaggacgtggcggcgatgtttggctaccatgccggggcttcggcggccgtctcggcgttgacaccgttcggccaggcgctgccgaccgtggcgggcggcggtgcgctggtcagcgcggccgcggctcaggtgaccacgcgggtcttccgcaacctgggcttggcgaacgtcggcgagggcaacgtcggcaacggtaatgtcgggaacttcaatctcggctcggccaacatcggcaacggcaacatcggcagcggcaacatcggcagctccaacatcgggtttggcaacgtgggtcctgggttgaccgcagcgctgaacaacatcggtttcggcaacaccggcagcaacaacatcgggtttggcaacaccggcagcaacaacatcggcttcggcaataccggagacggcaaccgaggtatcgggctcacgggtagcggtttgttggggttcggcggcctgaactcgggcaccggcaacatcggtctgttcaactcgggcaccggaaacgtcggcatcggcaactcgggtaccgggaactggggcattggcaactcgggcaacagctacaacaccggttttggcaactccggcgacgccaacacgggcttcttcaactccggaatagccaacaccggcgtcggcaacgccggcaactacaacaccggtagctacaacccgggcaacagcaataccggcggcttcaacatgggccagtacaacacgggctacctgaacagcggcaactacaacaccggcttggcaaactccggcaatgtcaacaccggcgccttcattactggcaacttcaacaacggcttcttgtggcgcggcgaccaccaaggcctgattttcgggagccccggcttcttcaactcgaccagtgcgccgtcgtcgggattcttcaacagcggtgccggtagcgcgtccggcttcctgaactccggtgccaacaattctggcttcttcaactcttcgtcgggggccatcggtaactccggcctggcaaacgcgggcgtgctggtatcgggcgtgatcaactcgggcaacaccgtatcgggtttgttcaacatgagcctggtggccatcacaacgccggccttgatctcgggcttcttcaacaccggaagcaacatgtcgggatttttcggtggcccaccggtcttcaatctcggcctggcaaaccggggcgtcgtgaacattctcggcaacgccaacatcggcaattacaacattctcggcagcggaaacgtcggtgacttcaacatccttggcagcggcaacctcggcagccaaaacatcttgggcagcggcaacgtcggcagcttcaatatcggcagtggaaacatcggagtattcaatgtcggttccggaagcctgggaaactacaacatcggatccggaaacctcgggatctacaacatcggttttggaaacgtcggcgactacaacgtcggcttcgggaacgcgggcgacttcaaccaaggctttgccaacaccggcaacaacaacatcgggttcgccaacaccggcaacaacaacatcggcatcgggctgtccggcgacaaccagcagggcttcaatattgctagcggctggaactcgggcaccggcaacagcggcctgttcaattcgggcaccaataacgttggcatcttcaacgcgggcaccggaaacgtcggcatcgcaaactcgggcaccgggaactggggtatcgggaacccgggtaccgacaataccggcatcctcaatgctggcagctacaacacgggcatcctcaacgccggcgacttcaacacgggcttctacaacacgggcagctacaacaccggcggcttcaacgtcggtaacaccaacaccggcaacttcaacgtgggtgacaccaataccggcagctataacccgggtgacaccaacaccggcttcttcaatcccggcaacgtcaataccggcgctttcgacacgggcgacttcaacaatggcttcttggtggcgggcgataaccagggccagattgccatcgatctctcggtcaccactccattcatccccataaacgagcagatggtcattgacgtacacaacgtaatgaccttcggcggcaacatgatcacggtcaccgaggcctcgaccgttttcccccaaaccttctatctgagcggtttgttcttcttcggcccggtcaatctcagcgcatccacgctgaccgttccgacgatcaccctcaccatcggcggaccgacggtgaccgtccccatcagcattgtcggtgctctggagagccgcacgattaccttcctcaagatcgatccggcgccgggcatcggaaattcgaccaccaacccctcgtccggcttcttcaactcgggcaccggtggcacatctggcttccaaaacgtcggcggcggcagttcaggcgtctggaacagtggtttgagcagcgcgatagggaattcgggtttccagaacctcggctcgctgcagtcaggctgggcgaacctgggcaactccgtatcgggctttttcaacaccagtacggtgaacctctccacgccggccaatgtctcgggcctgaacaacatcggcaccaacctgtccggcgtgttccgcggtccgaccgggacgatcttcaacgcgggccttgccaacctgggccagttgaacatcggcagcgcaaatctcggcgacttcaacctgggcagcggaaacgtcggcagcttcaacgtcttctccggaaaccagggctcatacaatatcggtccggcgaacctgggtaactacaacatcggtttcgcgaacctgggtaactacaacatcggcttcggcaacgccggcgatttcaaccaaggctttgccaacaccggcaacaacaacatcggatttgccaacaccggcaacaacaacatcggcatcgggctgtccggcgacaaccagcagggcttcaattttgctggcggctggaactcaggcaccgcgaacatcggcttgttcaactccggcaccaacaacgtcggcatcggcaactcgggcaccggcaactggggtatcggcaactccggcagcggcaacaccggcatcggcaacaccggcagcactaacacgggcttcttcaacaccggcatcgtcaacaccggtgtcgccaacgcgggcagctacaacaccggctggtacaacaccggcgacaccaacaccggcatcgccaacctgggcgacttcaacacgggcttctacaacaccggcaatttcagtacgggctttgccaaccagggtgatatcgccaccggggctttcatcaccggcgacatgggcaacggcgccttctggcgcggcgaccagcagggcctattcagcgcgggctatcgggtccatgttcccgaaatacccgcacacgtcaccgtggaagttcccgtcaacatccccatcaccgccagcttcaccaacaccgtctacagcggcataacgcttgagcaaatcaacttcggtttcaccatcgacatcgcagggatccccctgctggccggtgcaatcagcaaggccgttctcccgcccatcaccgggaccggtcccgcgatcacggtcaacatcggcgaccctggcggttcgaccgcgatcaggatcccggccaccgcaagcgtcggtcccttcgatgtcacgttcgtcaacattgcggctaccacgggctttttcaacgccaccaccgatccgtcctcgggcttcttcaacggcggccccggaaccgtatcgggcatcgccaacatcggcgccaacatttccggcttccagaacgtcgcgaactccgcgacctcgggcttcaacaactacggctcgctgcaatcgggactggcgaacctgggcgataccgtctcgggcgtattcaacaccggcatcggggcaccggccaacgtctcgggcatgttcaacatcggcagcaacctcgcggggttcttccacgaccaggcgaccgggatgtcgatgttcaacctcggcctgggaaacatcggccaattcaacgtcggcttctccaacgtaggcgacagcaacgccggcttggcgaacatcggcagcttcaacctcggcagcggcaacctcggcagcttcaacgtcttcggcggaaaccagggctcatacaacatcggcccggcgaacctgggtaactacaacatcggcctaggcaacctgggcagctacaacttcggattcggcaacgccggcgacttcaacctgggcttcgccaacaccggcaacaacaacatcgggtttgccaacaccggcaacaacaacatcggtatcggcctgtccggcgacaaccagcagggcttcaattttgccggtggctggaactccggcagcggcaacagcggcctgttcaactctggcaccaacaacatcggtttgttcaactcgggcaccggcaacatcggcatcggcaactcgggcaccggaaactggggcatcgccaacaccggtgacaccaacaccggcatcttcaacaccggcgacgtcaacaccggcttgctcaacgccggcaacgtcaacaccggcatcttcaacaccggccattacaacaccggcagcttcaacgccggcagcttcaacacggccggcttcaacccgggtagctacaacacgggttatttgaacaccggcagctacaacaccggactggccaactcgggcgatgtcaacaccggcggcttcatcaccggcaattacagcaacgggttctggtggcggggcgattaccaaggcctggcggggatcagccaaacgatcaccgtgcccgacaccgccgttccggtgaaactgcacgtgccgatcttcctcgatatcccggtcaccggcacacttggcacgttcaccgttcatggcttcagattcccggagatcaccggcgatatcttcttgatcggcataccgttcaatgccgccacactcgatgcattcagtttcccgaacatctcgattgtccttcccaatatcggcatcaacctgggtagcgggccggacccgctgatcgatatcgccggcaccggcggtctattgccgatcaagattccactcatcgatataccggcggccccgggattcgggaactcgacgaccaccccgtcgtcgggattcttcaacgccggtaccggtaccgtgtcgggcgttggcaacgtgggcagcaatagttccggcttcttcaacctcacctctggaagctcgggaatctcgggcgtccagaacttcggcgagctgatctccggcgggttcaacttcggtaacactgtctccggccttgtcaatgcgagcacgcttgggctttcgatgccggccaatctctccggcggagggaatgtcggtgctacggtcgccggcttcgtcaacaacacccagatcctcaacctcgggtttggcaacgtaggcagcgggaatgtcggccacggcaatatcggcgactccaacgtcggcctcggaaacctcggcaacgcgaacgtcggccatggcaacatcggcagcttcaacgtcttctccggaaaccggggctcatacaatatcggcccggcgaacctgggtaactacaacatcggcctaggcaacctgggcagctacaacttcggattcggcaacgccggcgatttcaacctgggcttcgccaacagcggcagcaacaacatcgggtttgccaacaccggcaacaacaacatcggtatcgggctgtccggccacaatcaacaggggttcggctcctggaactccggtaccgccaacaccggcctgttcaactcgggcaccaacaacatcggtttgttcaactcgggcaccggaaacatcggcattggcaactcgggcatcggaaacaccgggatcggcaacccgggtgtcggcaacaccggcttggggaactcgggcaccggcaactggggcctgtggaacccaggcaccggcaatatgggcgtcgccaacgtgggcacctacaacaccggtggctacaacgtgggcagcaccaacaccggcatcgccaacgtgggcatcgccaacacgggcagctacaacaccggcagcaccaacaccggcagcttcaacgacggcgacttcaataccggcttctacaacaccggcgactacaacaccggcttctacaacaccggcgacgtgaacaccggcgccttcatcgggggcaacttcagcaacggcgccttctggcagagcgatcaccaaggccagtggggcgcacactacgcaatcactgttccccagatcccgctactgaactttagcctcaacattccggtcaacatccccatccatctcgacttcggtacccttgccgtcaacggcttccagattccggctatcaccctccgcgccctcggggtcacccacttcagcgtcggacccatcatcgttccgaggatcgccggcaccttaccggtgatcgatatcaacatcggcgaccccggcggttcatcctcgatacccatcacgatcaccagcggcgccggcccggtcgtcatcccgctactggacatcccgccggcccccggtttcggaaactcgaccaccggcccctcatcgggcttcttcaactccggcaccggcagctcgtctggattcggaaacgtcggcgccaacaattcgggcttctggaacaccgctttcgccggcataggaaactctggcttgcagaacttcggctcgctgcaatccggctgggcgaacttgggcaacaccgtctcgggcttctacaacaccagtgcggcggacttcgcgacgccggctaacctctcgggactctccaacgtcggcgccgacctgaccggcgtgctccgcggcccgaacgggtcgaccttcaacgcgggcctggcaaacctcggccaattcaacgtgggcagtgcaaacctcggcagtgcaaacctcggcagtgcaaacctcggcagtgcaaacctcggcaattcaaacgtcggcttcggcaacattggcaacgcgaacatcggcggcgcaaacatcggcgactttaacgtcgggatcgcaaacaccggtccggggctaacggcggctgtcaacaacatcggtatcggcaacaccggcaactacaacatcggtgtcggcaacaccggtaactacaacatcggcttcggcaacaccggcaacaacaacatcggcatcggcctgtccggcgacaaccagatcgggttcggcccgctgaacgccggcatcgccaacatgggcctgttcaacctgggcgacaacaactttggcatggccaacgcgggcaacttcaaccagggcattgccaacaccggcaacaacaacatcggcttgttcaacaccggcaacaacaacgtcggcatctggctgaccggcgacggcttgtccggcttcagctccctgaactccggcgccggcaacaccggtttcttcaactccggcaccgccaacaccggcttgttcaactccggcaccggcaacaccggcttgttcaactcgggcaccggcaacgtcggcatcggcaacatgggcaccggcggcttcggcgtcggcctatccggcgacagccaggtgggcatcggcggcaccaactcgggcagtttcaacatcggcttgtttaactcgggcaccggcaatgtcggcatcggcaactcgggcaccggcaacgtcggcatcggcaacaccggcaccggcaacaccggcatcggaaacagcggcaactacaacaccggcttgctcaacgcgggcctggtcaacaccggcatcgccaacccgggcaaccacaacaccggcctgttcaacatcggcaccttcaacaccggcatcgccaacccgggccactacaacaccggctcctacaacaccggtagctacaacaccggcatggcaaacgccggagactacggcaccggcgcgttcatcaccggcagcatgaacaacggcttgctctggcgcgccgaccggcagggcctgctggcggccaactacaccatcaccatcgagcgacctgccgcgttcctcaatgtcgacatcccggtcaacatccccatcaccggcgacatcaccaatgtctccatccccgccattacgttccccagaatcgacgccagcggaagcgtcgacataggcatcctcagtggcaccgtcttggccccggtcggtccgatcaccctgcatggcggggacgcgtcggccccgctggacacacccatcgaaattgacttcggcccctcgccggcgatcaacctcaacatcggcaagcccgacggctccaccgtgatcaacatcgtgggcggcgccggcgccggcccgatcagcattccgatcatcgacttgcggccagcgcccggcttcttcaacgccaccaccggcccgtcgtcgggcttcctcaactggggtgctggcagcgcatcgggcttgctgaacttcggcaacaactcgggcctctacaacttcgccactagcagcatgggaaattcgggcttccaaaactatgggtcgctgcagtcgggctgggcgaatttgggcaacagcatctcgggcatctacaacaccggcttgggagcaccggcaaatgtctcgggcttgctcaacatcggcaccaacctggctgggtggttgcagaacggcccgaccgagacgaccttcagcgtgggcttggccaacctcgggttctggaatctgggtagcgcaaacatcggcaactacaacctgggcagcgccaacatcggcgtctacaacctgggcagcgccaacatcggcgacttcaacctgggcagcgccaacatcggcgacttcaacctgggcagcgccaacatcggcagctccaacatcgggttcggcaacgtcggtccggggctgacggcggccatcggcaacatcggcttcggcaacaccggaaacggaaacatcggcatcggcaataccggcaccggcaacatcggcttcggcaacaccggaaacggaaacatcggcatcgggctgaccggcgacaccatgaccgggttcggcggctggaactcgggcaccggcaacatcgggctattcaactccggcaccggcaacatcggcttcggcaactccggcaccggcaactggggcatcggaaactccggtgactacaacaccggcatcggcaacaccggcagcaccaactccggcttcttcaacaccggcctggtcaacaccggcattggcaactccggtgactacaacaccggcctattcaacgccgggaacaccaacaccggcagcttcaaccccggcgactacaacaccggcggcttcaaccccggtaactacaacaccggctacttcaacccgggcaactccaacaccggcatcgccaactccggcgatgtcaacaccggcgccttcaattcgggcaactacagcaacggcttcttctggcggggcgactaccagggcctaggcggtttcgcctaccagagcgccgtttccgaaatcccgtggagctacgacaggttccaacattga

SEQ ID NO: 28186 - DNA, 1299 bp, Mycobacterium tuberculosis
atgccggcgatcgtcctcatcggcgcccaatggggcgacgagggcaagggtaaggccaccgacctgttgggtggccgcgtgcagtgggtggtgcgctatcaggggggcaacaacgccgggcacaccgtcgtcttgcctaccggcgagaatttcgcattgcatctcatcccgtcgggtgtgctgacgcccggggtcaccaacgttatcggcaacggcgtggtgatcgatcccggtgtcctgctcaatgagctgcggggactgcaagaccgcggcgtggacaccgccaagctgttgatctccgccgacgcccatctgctgatgccttaccacattgctatcgacaaggtcaccgagcgctatatgggcagcaagaagatcggcaccaccggccgtggtatcgggccgtgctaccaggacaagatcgcccgtattgggatccgggtcgccgatgtgctggacccggaacaattgacccacaaggtcgaggccgcgtgcgagttcaagaaccaagtgctggtcaagatctacaaccgcaaggccctggaccccgcgcaggtggtcgacgcgctgctggagcaggccgagggtttcaagcatcgcatcgccgacacccggctgctactcaatgctgccctggaggccggcgaaacggtgctgctggaaggctctcaaggcaccctgctcgatgtcgaccacggcacctacccgtatgtgacatcgtcgaatccgacggcgggtggcgcggccgtgggctctggtatcggcccgacccgcatcggcaccgtgctggggattctcaaggcctacaccactcgggtgggctccggcccgttccccaccgagctgttcgacgaacacggcgaatacctgtccaagactggccgcgagttcggtgtgaccaccggccggcgccggcgctgcggctggttcgacgccgtcattgcccgctacgccgcccgggtcaacggcatcaccgactacttcctgaccaagctcgacgtgctgtccagcctggaatcggtgccggtctgcgtcggatatgagatcgacggccggcgcacccgcgatatgccgatgacccagcgggatctttgccgcgccaagccggtttacgaggagctgccgggctggtgggaagacatctccggggcgcgcgagttcgacgacctgcccgccaaagcgcgtgattatgtgctgcgactggaacagcttgccggagcaccggtttcgtgcattggagtcggtccggggcgggaacagaccatcgtgcgccgggacgtcctgcaggatcgcccgtga

SEQ ID NO: 28187 - DNA, 1383 bp, Mycobacterium tuberculosis
gtgagcatccgccccgccgagaactcaacactcgacatccgccacgtcatcggtatcggcaccccgaaagccgtcgatttgtggctcgacgtcgtcaccgagctgccggatcgcgcccgcgaactcgggtcgttatccaaagccgaactcggaaagcttggcccactgctcgacggcaccaacgccgtcgagctattcgagtcgatcgacgacaagctggccgcagaggcactgcacgcgatggatccgtcgctggccgccaccttcctcgaggccctcgactccgaccacgccgccaacatcctgcgcgaattcaaggagcccaagcgggaggcgctgctgacgttgctaccgctggagcgggcgatggtgctgcgtggcttgttgagctggccggaggactgcgccgcggcccacatggtgcccgaaacgctgaccgtacgcccgaacatgacggtgtcgcaggccgtcgccagcgtgcgggaacgcgcctcgggcctgcgcagcgatgcacgaaccaccgcctacgtctatgtgacagacgccgactcccacctgctgggtgtgatcgcctttcgcgccctggtgctggccaatcccgaacagcgagtccgtgagctgatgggtgacgacctcatcgtcgtgtcgccgttgactgacaaggagctcgcggcgcagacaatcatgggccacaacctgatggcggttcccgtcgtcgatgccgacaaccggctactgggcatcatcgccgaagacgaagccatcgacattgccgaggaggaagcaaccgaagacgccgagcgccagggtgggtcggccccgctcgaggtgccctacctgcgggcgtcgccgtggctgctatggcgcaagcgggtcgtctggctcctggtactttttgctgccgaggcctacaccggcagcgtcctgcgggcgttctccgacgaaatggaggcggtgatagcgctcgcgttcttcatcccactgctgatcggcaccggcggcaacaccggcacccagatcgccaccactctggtccgcgcgatggccaccggtcaggtccggtttcgcgatgtgcctgcggtgttagccaaggagctgtcaaccggtgtgctggtcggcctcactatggccgccgccgcggtggtgcgcgcctggacattgggcgtgggcccgcaggtgaccctgacggtcgcgctgacggtggccgccatcgtggtgtggtcgtcgctggtggctgccgtccttccgccgctgctgaagaagttgcgcatcgacccggccatcgtttcggggccgatgatcgccaccatcgttgacggcacgggtctgctcatctacttcctggtcgcgcacctgacgctgaccgagctgcacggcttgtga

SEQ ID NO: 28188 - DNA, 1035 bp, Mycobacterium tuberculosis
atgcctatcgcaacgcccgaggtctacgcggagatgctcggtcaggccaaacaaaactcgtacgctttcccggctatcaactgcacctcctcggaaaccgtcaacgccgcgatcaaaggtttcgccgacgccggcagtgacggaatcatccagttctcgaccggtggcgcagaattcggctccggcctcggggtcaaagacatggtgaccggtgcggtcgccttggcggagttcacccacgttatcgcggccaagtacccggtcaacgtggcgctgcacaccgaccactgccccaaggacaagttggacagctatgtccggcccttgctggcgatctcggcgcaacgcgtgagcaaaggtggcaatcctttgttccagtcgcacatgtgggacggctcggcagtgccaatcgatgagaacctggccatcgcccaggagctgctcaaggcggcggcggccgccaagatcattctggagatcgagatcggcgtcgtcggcggcgaagaggacggcgtggcgaacgagatcaacgagaagctgtacaccagcccggaggacttcgagaaaaccatcgaggcgctgggcgccggtgagcacggcaaatacctgctggccgcgacgttcggcaacgtgcatggcgtctacaagcccggcaacgtcaagcttcgccccgacatccttgcgcaagggcaacaggtggcggcggccaagctcggactgccggccgacgccaagccgttcgacttcgtgttccacggcggctcgggttcgcttaagtcggagatcgaggaggcgctgcgctacggcgtggtgaagatgaacgtcgacaccgacacccagtacgcgttcacccgcccgatcgccggtcacatgttcaccaactacgacggagtgctcaaggtcgatggcgaggtgggtgtcaagaaggtctacgacccgcgcagctacctcaagaaggccgaagcttcgatgagccagcgggtcgttcaggcgtgcaatgacctgcactgcgccggaaagtccctaacccactaa

SEQ ID NO: 28189 - DNA, 2400 bp, Mycobacterium tuberculosis
atgacaacgatcgagtcacgccctccgtcgccggaagacctagccgacaacgctcagcagccgtgcgggcacggccggatgatgcgcaaagaggacccgcgattcatccgcgggcgcggaacctacgtcgacgacgtcgcgctgccgggcatgttgcatctggccatcctgcgttcgccgtatgcgcatgcccgcatcgtgcgcatcgatgtgactgccgcgcaggcacatccgaaagtcaaggccgtggtgaccggcgccgatctggccgccaagggcctggcttggatgccgacactagccaacgacgtacaagccgtgctggccaccgacaagacgcgcttccagggccaagaggtggcgttcgtggttgccgaggaccggtattcggcccgcgatgcatgcgagttggtcgacgtcgactacgaaccgcgggatcccgtcgtggatgcccgcacggcgctggacccgtcggcgccggtcatccgcaccgatctggagggaaagagcgacaatcacatcttcgactgggagaccggcgacgcggcggcgaccgaggcggtgttcgccaaggccgacgtcgttgtccagcaggagatcgtctacccgcgggtgcacccggcgccgatggaaacctgtggcgcggtggccgatctagatccggtcaccggaaagctgacgctgtggaccaccagccaggcgccgcacgcgcatcgcacgctatacgcgctggtggccgggttgcccgaacacaagattcgggtgatctcgcccgacatcggcggcggcttcggcaacaaggtgccgatctatcccggttatgtctgtgccattgtcgcgtcgctgctgctggacaagccggtcaaatggatggaggaccgcagcgagaacctgacgtccaccggattcgcccgcgactacatcatggtcggcgagattgccgccaaccgtgacggcaagatcctggcgatccggtccaatgtgctggccgaccatggtgcgtttaacgcccaggccgcgccggcgaagtacccagccgggttcttcggggtgttcaccggcagctacgacatcgaggccgcctactgtcacatgaccgcggtgtataccaacaaggcgcccggcggggtcgcctacgcgtgttcgttccgcatcaccgaagcggtctacttcgtcgagcggctggtggactgcctggccttcgagctgaagatggatccagccgagctgcgcttgcggaatctattgcggcccaaccagtttccgtatcagagcaagactggttgggtgtacgactcgggcgactacgagaccacaatgcgtaaggcgatgaacatgatcggctacgaggcgttacgcgccgaacaaaagcagcggcgagcgcgcggcgagctgatgggcatcgggatgtcatttttcaccgaggccgtgggcgccgggccgcgcaaggacatggacatcctcggcctgggcatggccgacggctgcgagctgcgcgtgcacccgacgggcaaagccgtgctgcggctttcggttcagacccagggccagggccacgagacgacgttcgcgcagatcgtcgccgaggagctggggattgcgcccgacgacatcgaggtggtgcacggcgacaccgaccagacaccgttcgggttgggcacctacggcagccggtccacacccgtctcgggtggtgccgcggcgctggtcgcccgcaaggtgcgcgacaaggccaagatcatcgcctcgggcatgctcgaggtttcggtcgccgacttacagtgggagaaagggaagttccacgtcaagggtgacccgtcggccgcggtgaccatcgccgacatcgcgatgcgcgcgcacggcgccggcgatctgcccgagggcatcgagggcgggctggatgccgaggtctgctacaacccgtcgaatctgacctacccgtacggcgcctacttctgtgtggtcgacatcgacccgggcaccgcggtggtgaaggtgcggcgctttttggccgtcgatgattgcggaacccggatcaacccgatgatcatcgagggtcaggtacacggcggcatcgtcgacggcatcggcatggcgctgatggagatgattgccttcgacgaggacggcaactgtctgggcggatcgttgatggactacctgatcccgaccgcgctcgaggtgccacacctagagaccgggcacaccgtgaccccgtcgccgcatcacccgatcggcgccaagggcatcggtgagtcggccacggtgggttccccgccggcggtggtgaacgcggtggtggatgcgttggcgccgttcggggttcggcacgccgacatgccgttgacgccgtcgcgggtctgggaggccatgcagggccgggccacaccaccgatctag

SEQ ID NO: 28190 - DNA, 540 bp, Mycobacterium tuberculosis
gtggccggacctgaccgcgcagagttggctgagttggtgcgccggctgtcggtggtgcacggccgcgtcacgctgtcgtctggccgggaggccgactattacgtcgacctgcgtcgcgccaccttgcaccatcgggcgtccgcgctgatcggccggctaatgcgcgaactcactgccgactgggactattcggttgtcggcggcctgacactcggggccgatcccgtggcgaccgccatcatgcatgccccgggccgtccgatcgacgcgttcgtggtccgcaagtcggcgaaagcccatggcatgcagcgacttatcgaagggtcggaggttaccgggcagcgggtgctggtggtagaggacaccagtaccaccggtaactccgcgctgacggcggtgcacgccgtccaagacgtgggtggtgaggttgtcggcgtggctaccgtggtggatcgcgccaccggggccgcagaggctatcgaagccgagggactgcgctaccgcagcgtgctgggcctggccgatctggggctggattag

SEQ ID NO: 28191 - DNA, 2547 bp, Mycobacterium tuberculosis
gtggactcgtttaacccgacgaccaagacgcaggcggcgctaaccgcggcgttacaggcggcttcgaccgccggcaatcccgagatccggcccgctcacctgctgatggcgctgctgacccaaaacgacggtatcgccgcaccgctactggaggctgtcggtgtcgagcccgccaccgtccgcgccgaaacccagcgcctgctcgaccgtttgccgcaggcgactggagccagcacgcagccgcagctgtcccgcgagtcgttagcggcgatcaccaccgcgcagcagctggccaccgagctggacgacgagtacgtctccaccgagcacgtgatggtcgggctggccaccggtgactccgacgtcgccaagctgttgaccggccacggcgcctcgccgcaggcgctgcgggaggcgttcgtcaaggtgcgcggcagcgcccgggtcaccagccccgaaccggaggcgacctatcaggcgctgcagaagtactccaccgacctgaccgcccgcgcccgcgaaggcaaactcgacccggtcatcggccgcgacaacgagatccgccgcgtggtgcaggtgctgtcccgtcgcaccaagaacaacccggtgctgatcggtgagcccggcgtcggcaagaccgcgatcgtggagggcctggcgcagcgcatcgtggccggcgacgtgccggagagcttgcgcgacaagaccatcgtcgcgctcgatctcggctcgatggtcgccggctccaaataccgcggcgaattcgaggaacggctcaaggccgtcctcgacgacatcaagaactcggccggccaaatcatcacgttcatcgacgagctgcacaccatcgtcggcgccggcgccaccggcgagggggcgatggacgccggcaacatgatcaagccgatgctggcccgcggcgagttacggctggtcggggcgaccacgctggacgaataccgcaagcacatcgagaaggacgccgcgctcgagcgccgtttccaacaggtgtacgtcggcgagccgtcggtggaggacaccatcggcatcctgcgcgggctcaaagaccgctacgaggtgcaccacggggtgcgcatcaccgactcggcgctggtggcagctgccactttgagcgaccggtatatcaccgcccgcttcctgcccgacaaggccatcgacctggtcgacgaggcggccagccggctgcggatggagatcgactcgcggcccgtcgagatcgacgaggtcgagcggctggtgcgccggctggagatcgaagagatggcgctgtccaaagaagaagacgaggcgtcggcggagcggttggccaagctgcgctccgagctggccgaccagaaagagaagttggccgagctcaccacccgctggcagaacgagaagaacgcgatcgaaatcgtccgcgacctcaaggagcagctggaagccctgcgcggggaatccgagcgggccgaacgcgacggcgacctggccaaggccgccgagctgcgctacggacgcatccccgaggtggagaagaagctcgacgcggcgttgccgcaggcgcaggcccgggagcaggtgatgctcaaggaggaggtcggtcccgacgacatcgccgacgtggtgtcggcgtggaccggcatcccggccggtcggctgctggaaggcgagaccgccaagctgctgcgcatggaagacgagctgggcaagcgggtcatcgggcagaaggccgcggttaccgcagtctctgatgcggtgcggcgcagccgggccggggtgtccgaccccaaccggcccaccggggcgttcatgttcctcggcccgaccggtgtcggcaagaccgagctggccaaggcgctggccgacttcctgttcgacgacgagcgggcgatggtccgcatcgacatgagcgagtacggcgagaagcacaccgtggctcggttgatcggcgccccgcccggctatgtgggatacgaggcgggcggtcagctgaccgaggcggtgcgccggcgtccctacacggtggtgctgttcgacgagatcgagaaggcgcacccggacgtgttcgacgtgctgctgcaggtcctcgacgagggccggctcaccgacgggcacggccgcacggtcgacttccgcaacaccatcttgatcctgacgtccaacctggggtcgggtggcagcgccgagcaggtgctggccgcggtgcgcgctacgttcaagccggagttcatcaaccggctcgacgacgtgctcatctttgagggtctcaaccccgaagagctggtgcgcatcgtcgacatccagctggcgcagctgggcaagcggctggcgcagcggcggctgcagctgcaggtctcgctgccggccaagcgctggttggcgcagcgcggattcgacccggtgtacggggcgcggccgttgcgccggctggtgcagcaggccatcggtgaccagctggccaagatgctgttggccggccaggtgcacgacggcgataccgtgccggtcaacgtcagccccgacgccgactcgctgatcctgggctga

SEQ ID NO: 28192 - DNA, 2073 bp, Mycobacterium tuberculosis
ttggctgactcctcggcgatctacctcgccgcaccagaatcgcagacgggtaagtcgacgattgcactggggcttttgcaccgactgaccgcgatggtcgccaaagtcggtgtgttccggccgattacgcggctctctgcggagcgggactacatcctggaactactgctcgcgcacaccagtgcgggcctgccctatgagcggtgtgttggcgtgacctaccagcagctgcatgctgaccgcgacgacgcgatcgccgaaattgtcgattcgtatcacgcaatggccgacgagtgtgacgcggtggtggtcgtcggcagtgactacaccgacgtcaccagccccaccgagctctcggtcaacggccggatcgcggtgaacctcggcgcgccagtgttgttgacggttcgggcgaaggaccgcacccccgatcaggtcgccagcgtcgtcgaggtctgcttggccgagctggacacccagcgcgctcataccgcggcggtagtggcgaaccggtgcgagctgtccgcgataccggccgtgaccgacgcgctgcgcaggttcaccccgcctagctatgtagtgcccgaggaaccactgctgtcggcgccgaccgttgccgagttaacgcaggctgtgaacggggcggtggtaagcggtgatgttgcgctgcgcgaacgtgaggtgatgggcgtgctggccgcgggtatgaccgccgaccatgtgttggagcggctgaccgatggcatggcggtgattactcccggcgaccgctcggacgtggtgttggccgtcgctagcgcccatgcggccgaagggtttccgtcattgtcatgcatcgtcctcaatggcgggttccagttgcatccggcgatcgccgccctggtttccggcctgcgattgcggttacctgtcatcgccaccgcgttgggcacctacgacaccgccagcgctgccgcgtcggcccgcgggctggtaacggcgacgtcgcaacgcaagatcgacaccgcgttggagctgatggaccgccacgtggacgtcgccggtctattggcgcagctgaccattcccatccctacggtcactacaccacagatgttcacttatcggctgctgcagcaggcccgttcggacctcatgcgcatcgtccttcccgaaggggacgacgatcgcatcctcaaatcggcgggccgcctgcttcagcgcggcatcgtcgacctgaccatcctgggcgatgaagccaaagtccgtctgcgggcagcggaactcggtgtggacctggacggcgccacggtaatcgagccatgcgcaagcgaactgcacgatcaattcgccgaccagtatgcgcagttgcgtaaggcgaagggaatcaccgtggagcatgcccgcgaaatcatgaacgatgccacatatttcggcaccatgctggtgcacaactgtcatgccgacggcatggtatcgggtgctgctcacaccacggcgcacaccgttcgtccggcgctggagatcatcaagaccgttccgggcatatccaccgtgtccagcattttcctgatgtgtctgccggatcgggtactggcgtacggcgactgcgcgatcatcccgaacccgacggtggagcagctcgctgatatcgccatctgctcggcacgcaccgccgcacagttcggcatcgagccccgggtggccatgctgtcctactccaccggtgactcggggaaaggtgccgacgtcgacaaggtcagagcggcaacggagttggtgcgcgctcgggagccgcagctgccggtcgagggtcccattcaatacgacgccgcagtggaaccgtcggtcgcggccaccaagttgcgcgattcgccggtggccggccgcgcgacggtgctgatcttccccgatctcaataccggcaacaacacctacaaagcggtgcagcgttctgcgggtgcgatcgcgatcggcccggtgctgcagggcttacgcaagccggtgaacgacctatctcggggtgcactggtcgacgacatagtcaacaccgtggccatcacggcgattcaggcgcagggcgtccatgagtag

SEQ ID NO: 28193 - DNA, 669 bp, Mycobacterium tuberculosis
gtgcacgaatcccgtctggcatcggcaaggctgtatctgtgcaccgacgcccgtcgggaacgcggcgacttggctcagttcgccgaggccgccctggccggcggagtggacatcatccagttgcgcgacaagggctcacccggtgagctgcggttcggcccgctacaggcgcgtgacgaactggccgcctgcgagatcctggccgacgcagcgcaccggtacggcgccctattcgcggtcaacgaccgcgccgatattgcccgcgcggccggcgccgacgtgctgcatctgggtcaacgcgacctgcccgtgaacgtcgcacgacagatcctggcaccggataccctcatcggccggtccacccacgaccccgaccaggttgctgcggccgccgccggcgacgccgactatttctgtgtcggaccatgttggccgacaccgaccaagcctggccgtgcggcgccgggtctggggctggtacgggtcgccgccgaactcggcggcgacgacaagccgtggttcgctatcggcggcatcaacgcgcaacggctgccggccgtgctcgatgccggcgctcgccggatcgtggtggtgcgggcgatcacctcggctgacgacccacgtgcggcggccgagcagctccggtcggcgcttacagcagcgaactga

SEQ ID NO: 28194 - DNA, 1131 bp, Mycobacterium tuberculosis
ttgcctgcccgcaggtcggccgcccgaattgatttcgcaggctcaccgcggcccaccctcggtgtggagtgggagttcgcgctcgttgactcgcagacccgcgatctgagcaatgaagccaccgcggttatcgccgaaatcggcgaaaacccgcgggtccacaaggaattgctgcgcaacaccgtagagattgtcagcggtatctgcgaatgtaccgccgaggcaatgcaggatctgcgcgataccctgggccccgcccgtcagatcgtgcgcgaccgcgggatggagctgttctgcgcgggtacccaccccttcgcgcggtggtcggcccagaagctcaccgacgcgccgcggtacgcggagctgatcaaacgcacccagtggtggggccggcagatgctgatctggggtgtacacgtgcatgtcgggattcgctcggcgcacaaagtgatgccgatcatgacgtcgctgctcaactactacccgcatctgttggcgctctcggcctcatcaccctggtggggtggcgaagacaccgggtatgccagcaaccgggcgatgatgttccagcagttgcccaccgccgggctgccgtttcactttcagaggtgggcggagttcgaaggtttcgtgtacgaccagaagaagaccggcatcatcgaccatatggacgaaatccgttgggatataagaccctcaccccatctgggcaccctggaggtgcggatctgcgatggcgtgtccaacctacgagagctcggcgcgctggtcgcgctgacgcattgcctgatcgtcgatctggaccgccgcttggacgccggcgaaacgctaccgaccatgcctccctggcacgtccaggagaacaagtggcgtgccgcccgctacggcctggacgcggtgatcatcttggacgccgacagcaacgaacggctggttaccgatgacctcgcggatgtgctgacccggctggagccggtcgccaagtcgctgaactgtgccgacgagcttgccgcggtctccgatatctaccgcgatggcgcctcctaccagcggcagctgcgagtggcgcagcagcatgacggcgatttgcgcgcggtagttgacgcgctggttgccgagctggtgatttag

SEQ ID NO: 28195 - DNA, 1218 bp, Mycobacterium tuberculosis
gtgcggtcagtccaggagcatcaacgtgtcgtagcggagatgatgcgcgcctgtcgcccgattacggttccgctgacccaggctcaaggtctggtcctgggcggcgacgtggtcgcaccgctgtcgctgccggttttcgacaactccgcaatggatggctatgcggtgcgcgccgaagacacctcaggtgccacaccgcaaaatccggtgatgttgccggtcgccgaggacattcccgccgggcgcgccgacatgctgacgctgcagcctgtgactgcgcaccggatcatgaccggtgcgccagtgcccaccggtgcgacggcgatcgtgccggtcgaagccaccgacggcggcgtcgattcggtggcgatccgccaacaggccaccccaggcaagcacatccgacggtcgggcgaagacgtcgccgccggtaccacggtgctgcacaacggccagatcgtgaccccggcggtgctcggcctggccgccgcgctgggtttggccgagctgccggtgctcccccgtcagcgggtgctggtgatctccacagggtcggagctggcgtcgccaggcacgcccctacaaccgggtcagatctacgagtccaactcgatcatgctggccgctgccgtccgcgatgcgggcgccgctgtggtcgccaccgcaaccgccggcgacgacgtcgcgcagttcggcgcgatccttgaccggtacgcggtggacgccgacctgatcatcaccagcggcggtgtcagtgccggagcctacgaggtggtcaaagacgcgttcggcagcgctgactaccggggaggcgaccacggtgtcgaattcgtcaaggtggcgatgcaacccggaatgccccagggcgtcgggcgggtggcaggtacgccgatcgtcacccttcccggcaacccggtcagcgcgctggtgtccttcgaggtgttcatccgtcccccgctgcgcatggccatgggcctgccggatccgtaccggccgcaccgaagcgcggtactcaccgcgagcctgacatcgccgcgcggcaaacgtcagttccgacgcgcaatactcgatcaccaggcaggcacggtcatcagctacggcccaccggcgtcgcaccatttgcgttggttggcatcggccaacggacttctggacatcccggaggacgtcgtggaggtggctgccggaacgcagctgcaagtctgggacttgacctaa

SEQ ID NO: 28196 - DNA, 1623 bp, Mycobacterium tuberculosis
atggccaagacaattgcgtacgacgaagaggcccgtcgcggcctcgagcggggcttgaacgccctcgccgatgcggtaaaggtgacattgggccccaagggccgcaacgtcgtcctggaaaagaagtggggtgcccccacgatcaccaacgatggtgtgtccatcgccaaggagatcgagctggaggatccgtacgagaagatcggcgccgagctggtcaaagaggtagccaagaagaccgatgacgtcgccggtgacggcaccacgacggccaccgtgctggcccaggcgttggttcgcgagggcctgcgcaacgtcgcggccggcgccaacccgctcggtctcaaacgcggcatcgaaaaggccgtggagaaggtcaccgagaccctgctcaagggcgccaaggaggtcgagaccaaggagcagattgcggccaccgcagcgatttcggcgggtgaccagtccatcggtgacctgatcgccgaggcgatggacaaggtgggcaacgagggcgtcatcaccgtcgaggagtccaacacctttgggctgcagctcgagctcaccgagggtatgcggttcgacaagggctacatctcggggtacttcgtgaccgacccggagcgtcaggaggcggtcctggaggacccctacatcctgctggtcagctccaaggtgtccactgtcaaggatctgctgccgctgctcgagaaggtcatcggagccggtaagccgctgctgatcatcgccgaggacgtcgagggcgaggcgctgtccaccctggtcgtcaacaagatccgcggcaccttcaagtcggtggcggtcaaggctcccggcttcggcgaccgccgcaaggcgatgctgcaggatatggccattctcaccggtggtcaggtgatcagcgaagaggtcggcctgacgctggagaacgccgacctgtcgctgctaggcaaggcccgcaaggtcgtggtcaccaaggacgagaccaccatcgtcgagggcgccggtgacaccgacgccatcgccggacgagtggcccagatccgccaggagatcgagaacagcgactccgactacgaccgtgagaagctgcaggagcggctggccaagctggccggtggtgtcgcggtgatcaaggccggtgccgccaccgaggtcgaactcaaggagcgcaagcaccgcatcgaggatgcggttcgcaatgccaaggccgccgtcgaggagggcatcgtcgccggtgggggtgtgacgctgttgcaagcggccccgaccctggacgagctgaagctcgaaggcgacgaggcgaccggcgccaacatcgtgaaggtggcgctggaggccccgctgaagcagatcgccttcaactccgggctggagccgggcgtggtggccgagaaggtgcgcaacctgccggctggccacggactgaacgctcagaccggtgtctacgaggatctgctcgctgccggcgttgctgacccggtcaaggtgacccgttcggcgctgcagaatgcggcgtccatcgcggggctgttcctgaccaccgaggccgtcgttgccgacaagccggaaaaggagaaggcttccgttcccggtggcggcgacatgggtggcatggatttctga

SEQ ID NO: 28197 - DNA, 711 bp, Mycobacterium tuberculosis
gtgcgttatcctctggcggtggcgcaactcggcttccagcgcgcccgcaccgaggaaaacaagcgccaacgtgcggcggcgctggtggaagccgcgcggtcgctggcgctggagacgggcgtggcatcggtgacgttaacggctgtcgcaggtcgtgccgggattcactactctgcggtgcgccgctacttcacctcgcacaaagaagtgctgctgcacctcgccgccgagggttgggcgcggtggtcgggcacggtatgcgagcagctgggcgagccggggccgatgtcggcaccgcgggtggccgaggcactggccaacggtctggccgccgatccgctgttttgtgatctgcttgccaatctgcatctgcatctcgagcaggaggtggatgtcgaccgggtcatcgaggtcaagcggaccagcatcgcagccgtgatagcgctcgtcgacgcgatcgaaagcgcattgccggcactcgggcgttctggggcattcgacatcctgctggccgcttactcgctggcggccaccctgtggcagatcgccaatccgccggagcggctcaccgacgcctatgccgaggagccagagttgctcccaccggagtggaacctcgactttgctgccgcgcttactcgcctgctcaccgctacgcttctcggcctgctcgccggatccccatgcgaatgccggtcgccaacgcgctga

SEQ ID NO: 28198 - DNA, 1524 bp, Mycobacterium tuberculosis
atgactgtcttttcccgtcccggttccgccggggcgctgatgtcctatgaatcccggtaccaaaacttcatcgggggccagtgggtcgcgccggtccatgggcgctacttcgagaacccgacgccggtgaccggccagccgttctgcgaggtgccgcgctccgacgcggccgacatcgacaaggcgctcgacgccgcgcacgcggcggcgccggggtggggcaagaccgcaccggccgaacgggcggcgatcctcaacatgattgccgaccgcatcgacaagaacgccgccgcgctggcggtggccgaggtctgggacaacgggaaaccggtccgggaagcgctggccgccgatatcccgttggcggtcgatcacttccggtacttcgccgcggcgattcgcgcccaggagggcgcgctgagccagatcgacgaggacaccgtggcctaccacttccacgagccgctcggcgtggtgggccagatcattccgtggaacttccccatcctgatggcggcctggaagctggcgccggcgttggcggccggcaacacggcggtgctcaaacccgccgagcagacacccgcttcggtgctctacctgatgtcgctgatcggtgatctgttgccgcccggggtggtcaacgtggtcaacggattcggcgccgaggccggcaagccgttggcctccagcgaccgcatcgccaaggtcgcgttcaccggggaaaccaccacggggcggctgatcatgcaatacgcctcgcacaacctgatcccggtcaccctggaactcggcggcaagagccccaacatcttcttcgccgacgtgctggccgcccacgacgacttctgcgacaaggcgctggaaggcttcaccatgttcgccctcaaccagggcgaggtgtgcacctgcccgtcgcgcagtctgatccaggccgacatctacgacgagttcctggagctggcggcgatccggaccaaggcggtccggcagggcgacccgctggacaccgaaaccatgctgggttcccaggcctccaacgaccagctggaaaaggtgttgtcctacatcgaaatcggcaagcaagagggtgcggtgattatcgccggaggcgagcgcgccgaactaggcggcgacctgtccggcggttattacatgcagccgacgatcttcaccggcaccaacaacatgcggattttcaaggaggagatcttcgggccggtggtcgcggtgacgtcgttcaccgattacgacgacgcgatcggcatcgccaacgacaccctctacggcttgggtgccggtgtgtggagccgcgacggcaacactgcctatcgggccgggcgggacatccaggccggccgggtgtgggtcaactgctaccacctctaccccgcgcacgcggcgttcggcggctacaagcagtccggcatcggccgggagggccaccagatgatgctgcagcactaccagcacaccaagaacctgctggtgtcctactcggataaggcgctggggttcttctga

SEQ ID NO: 28199 - DNA, 1395 bp, Mycobacterium tuberculosis
gtgacccactatgacgtcgtcgttctcggagccggtcccggcgggtatgtcgcggcgattcgcgccgcacagctcggcctgagcactgcaatcgtcgaacccaagtactggggcggagtatgcctcaatgtcggctgtatcccatccaaggcgctgttgcgcaacgccgaactggtccacatcttcaccaaggacgccaaagcatttggcatcagcggcgaggtgaccttcgactacggcatcgcctatgaccgcagccgaaaggtagccgagggcagggtggccggtgtgcacttcctgatgaagaagaacaagatcaccgagatccacgggtacggcacatttgccgacgccaacacgttgttggttgatctcaacgacggcggtacagaatcggtcacgttcgacaacgccatcatcgcgaccggcagtagcacccggctggttcccggcacctcactgtcggccaacgtagtcacctacgaggaacagatcctgtcccgagagctgccgaaatcgatcattattgccggagctggtgccattggcatggagttcggctacgtgctgaagaactacggcgttgacgtgaccatcgtggaattccttccgcgggcgctgcccaacgaggacgccgatgtgtccaaggagatcgagaagcagttcaaaaagctgggtgtcacgatcctgaccgccacgaaggtcgagtccatcgccgatggcgggtcgcaggtcaccgtgaccgtcaccaaggacggcgtggcgcaagagcttaaggcggaaaaggtgttgcaggccatcggatttgcgcccaacgtcgaagggtacgggctggacaaggcaggcgtcgcgctgaccgaccgcaaggctatcggtgtcgacgactacatgcgtaccaacgtgggccacatctacgctatcggcgatgtcaatggattactgcagctggcgcacgtcgccgaggcacaaggcgtggtagccgccgaaaccattgccggtgcagagactttgacgctgggcgaccatcggatgttgccgcgcgcgacgttctgtcagccaaacgttgccagcttcgggctcaccgagcagcaagcccgcaacgaaggttacgacgtggtggtggccaagttcccgttcacggccaacgccaaggcgcacggcgtgggtgaccccagtgggttcgtcaagctggtggccgacgccaagcacggcgagctactgggtgggcacctggtcggccacgacgtggccgagctgctgccggagctcacgctggcgcagaggtgggacctgaccgccagcgagctggctcgcaacgtccacacccacccaacgatgtctgaggcgctgcaggagtgcttccacggcctggttggccacatgatcaatttctga

SEQ ID NO: 28200 - DNA, 1287 bp, Mycobacterium tuberculosis
atgtctgtcgtcggcaccccgaagagcgcggagcagatccagcaggaatgggacacgaacccgcgctggaaggacgtcacccgcacctactccgccgaggacgtcgtcgccctccagggcagcgtggtcgaggagcacacgctggcccgccgcggtgcggaggtgctgtgggagcagctgcacgacctcgagtgggtcaacgcgctgggcgcgctgaccggcaacatggccgtccagcaggtgcgcgccggcctgaaggccatctacctgtcgggctggcaggtcgccggcgatgccaacctgtccgggcacacctaccccgaccagagcctgtatcccgccaactcggtgccgcaggtggtccgccggatcaacaacgcactgcagcgcgccgaccagatcgccaagatcgagggcgatacttcggtggagaactggctggcgccgattgtcgccgacggcgaggccggctttggcggcgcgctcaacgtctacgagctgcagaaagccctgatcgccgcgggcgttgcgggttcgcactgggaggaccagttggcctctgagaagaagtgcggccacctgggcggcaaggtgttgatcccgacccagcagcacatccgcactttgacgtctgctcggctcgcggccgatgtggctgatgttcccacggtggtgatcgcccgtaccgacgccgaggcggccacgctgatcacctccgacgtcgacgagcgcgaccagccgttcatcaccggcgagcgcacccgggaaggcttctaccgcaccaagaacggcatcgagccttgcatcgctcgggcgaaggcctacgccccgttcgccgacttgatctggatggagaccggtaccccggacctcgaggccgcccggcagttctccgaggcggtcaaggcggagtacccggaccagatgctggcctacaactgctcgccatcgttcaactggaaaaagcacctcgacgacgccaccatcgccaagttccagaaggagctggcagccatgggcttcaagttccagttcatcacgctggccggcttccatgcgctgaactactcgatgttcgatctggcctacggctacgcccagaaccagatgagcgcgtatgtcgaactgcaggaacgcgagttcgccgccgaagaacggggctacaccgcgaccaagcaccagcgcgaggtcggcgccggctacttcgaccggattgccaccaccgtggacccgaattcgtcgaccaccgcgttgaccggttccaccgaagagggccagttccactag

SEQ ID NO: 28201 - DNA, 861 bp, Mycobacterium tuberculosis
gtgagcgatgcgatccagcgggtaggggttgtcggggccgggcagatggggtccggcatcgccgaggtctcggctcgcgccggcgtcgaagtgacggtgttcgagccggccgaggcgttgatcaccgcgggacgcaaccgcatcgtgaagtcgctggagcgggccgtcagcgccggcaaggtaaccgagcgcgagcgtgaccgcgccctcggcctgttgaccttcaccaccgacctcaacgacctatccgataggcaactggtgatcgaggccgttgtcgaggacgaggccgtcaagtccgagatcttcgccgagctcgaccgggtcgtcaccgatccggacgcggtgctggcgtcgaatacctccagcatcccgatcatgaaggtcgccgcggccaccaagcagccgcaacgggttcttggcctgcatttcttcaatccggtcccggtgctgccgctggtcgagttggtgcgcacgctggtcaccgacgaagccgccgccgcgcgcacggaggagtttgccagtactgtgctgggcaaacaggtcgtgcgttgctccgaccgctccggattcgtggtcaatgcgctcctggtgccgtatttgctgtcggcgattcggatggtcgaggccgggtttgccaccgtcgaagatgtcgacaaggccgttgttgcggggttatcgcacccgatgggtccgctgcggctttccgatcttgtcggcctagacaccctcaagctgatcgcggacaagatgttcgaagaattcaaagaaccgcactacgggccccctccgctgttgctgcgtatggttgaggcgggccagttgggaaagaaatcgggtcgaggtttctacacgtactga

SEQ ID NO: 28202 - DNA, 675 bp, Mycobacterium tuberculosis
gtgctcggccaaccgactcgggcgcagttggccgcgctggtagaccacaccctgctcaagcctgagaccacccgtgccgatgtggccgcgctggtcgccgaagccgccgaactcggcgtctacgcggtctgcgtgtcgccgtcgatggtgccagttgcggtccaagccggtggtgtgcgggttgcggcggtgacgggcttcccgtcgggcaagcacgtgtcctcggtcaaggcgcatgaggcggctgcggccctggcatccggcgccagtgagatcgacatggtcatcgacatcggggctgcgctgtgcggtgacatcgacgcagtgcgctccgacatcgaggcggtgcgtgccgctgcggccggggctgtgctcaaggtgatcgtggagtcggcggtgctgttgggacagtcaaacgcgcacacgttggtggatgcgtgtcgtgccgccgaggatgccggtgccgacttcgtcaaaacctcgactgggtgtcatccggccggcggggccacggtgcgtgccgtcgagctgatggccgagacggtcggccctcggctaggggtcaaagccagcggtgggatccgcaccgccgccgacgcggtcgcgatgctcaacgccggtgccaccaggttgggcctgtccggcacccgggcggtgctcgatgggctcagctga

SEQ ID NO: 28203 - DNA, 1110 bp, Mycobacterium tuberculosis
atgaaacggagcggtgtcggttcgctctttgccggtgcgcatattgccgaggcggtcccgttggcgccgctgaccactttgcgtgtgggcccgatcgcccgacgtgtcatcacttgcaccagcgccgaacaggtggtggctgcgctgcggcacctggattcggcggccaagaccggagctgaccgcccgctggtgtttgctggtggctccaatttggtgatcgccgagaacctgaccgacctgaccgtggtgcggttggccaatagcggcatcaccatcgacggtaacttggtgcgggccgaggccggtgcggtcttcgatgacgtggtggttagggccatcgaacagggtctgggcggactggaatgcctgtctggcatcccaggatcggccggggcgacacccgtgcagaacgtgggggcgtatggcgcggaggtgtctgacaccatcactcgggttcggcttttggatcggtgcacgggtgaggtgcgttgggtatccgcgcgcgacctgcgcttcggctatcgcacgagcgtgctcaaacacgctgatgggcttgcggtgcccaccgtggtcttggaggtggagtttgcgctggatccgtcgggccgcagcgcaccgctgcgctacggcgagctgatcgccgcgctgaatgcgaccagcggcgagcgcgccgacccgcaagcggtccgcgaagcggtgctggccctgcgggcacgcaagggcatggtgctggacccgaccgaccatgacacctggagcgtgggatcgttcttcacaaacccggtggtcacccaggatgtttacgaacggctggccggtgacgcggccaccagaaaggacggtccggtcccgcactatcccgcgcccgacggcgtcaagctggccgccggctggctggtggaacgggccggcttcggcaagggctatccggatgccggcgccgccccatgccggctttccaccaaacatgcgctggcgctgacaaatcgtggcggggccaccgccgaagatgtggtgacgctggcgcgcgccgtgcgcgatggggtccatgatgtgtttggtatcacactaaaacccgaacccgtgctgatcggctgcatgttgtag

SEQ ID NO: 28204 - DNA, 1233 bp, Mycobacterium tuberculosis
gtgactgtgttctcggcgctgttgctggccggggttttgtccgcgctggcactggccgtcggtggtgctgttggaatgcggctgacgtcgcgggtcgtcgaacagcgccaacgggtggccacggagtggtcgggaatcacggtttcgcagatgttgcaatgcattgtcacgctgatgccgctgggcgccgcggtggtggacacccatcgcgacgttgtctacctcaacgaacgggccaaagagctaggtctggtgcgcgaccgccagctcgatgatcaggcctggcgggccgcccggcaggcgctgggtggtgaagacgtcgagttcgacctgtcgccgcgcaagcggtcggccacgggtcgatccgggctatcagtgcatgggcatgcccggttgctgagcgaggaagaccgccggttcgccgtggtgttcgtgcacgaccagtcggattatgcgcggatggaggcggctaggcgtgacttcgtggccaacgtcagtcacgagctcaagacgcccgtcggtgccatggctctactcgccgaggcgctgctggcgtcggccgacgactccgaaaccgttcggcggttcgccgagaaggtgctcattgaggccaaccggctcggtgacatggtcgccgagttgatcgagctatcccggctacagggcgccgagcggctacccaatatgaccgacgtcgacgtcgatacgattgtgtcggaagcgatttcacgccataaggtggcggccgacaacgccgacatcgaagtccgcaccgacgcgcccagcaatctgcgggtgctgggcgaccaaactctgctggttaccgcactggcaaacctggtttccaatgcgattgcctattcgccgcgcgggtcgctggtgtcgatcagccgtcgccgtcgcggtgccaacatcgagatcgccgtcaccgaccggggcatcggcatcgcgccggaagaccaggagcgggtcttcgaacggttcttccggggggacaaggcgcgctcgcgtgccaccggaggcagcggactcgggttggccatcgtcaaacacgtcgcggctaatcacgacggcaccatccgcgtgtggagcaaaccgggaaccgggtcaacgttcaccttggctcttccggcgttgatcgaggcctatcacgacgacgagcgacccgagcaggcgcgagagcccgaactgcggtcaaacaggtcacaacgagaggaagagctgagccgatga

SEQ ID NO: 28205 - DNA, 684 bp, Mycobacterium tuberculosis
atgaccagtgtgttgattgtggaggacgaggagtcgctggccgatccgctggcgtttctgctgcgcaaggagggctttgaggccacggtggtgaccgatggtccggcagctctcgccgagttcgaccgggccggcgccgacatcgtcctgctcgatctgatgctgcctgggatgtcgggtaccgatgtatgcaagcagttgcgcgctcggtccagcgttccggtgatcatggtgaccgcccgggatagcgagatcgacaaggtggtcggcctggagctgggcgctgacgactacgtgaccaagccctattcggcacgcgagttgatcgcacgcatccgcgcggtgctgcgccgtggcggcgacgacgactcggagatgagcgatggcgtgctggagtccgggccggttcgcatggatgtggagcgccatgtcgtctcggtgaacggtgacaccatcacgctgccgctcaaggagttcgacctgctggaatacctgatgcgcaacagcgggcgggtgttgactcgcggacaactgatcgaccgggtctggggtgcggactacgtgggcgacaccaagacgctcgacgtccatgtcaagcggctgcgctccaagatcgaagccgacccggctaacccggttcacttggtgacggtgcgcgggctgggctacaaactcgagggctag

SEQ ID NO: 28206 - DNA, 750 bp, Mycobacterium tuberculosis
gttgtcgattcgcccactatattggttgagccaatgaaccagtcaagtgtctttcagccgccggatcggcagcgggtggatgagcggatcgcgacgacgatcgccgacgccatcctcgacggcgtcttcccgccgggctcgaccctgccgcccgagcgagacctggcagagcggctcggtgtcaaccgcacctcgctacgccagggtctggcgcgactgcaacagatgggcctgatcgaggtgcggcacggcagcggcagtgtggtccgtgaccccgaggggctcacccatcccgcggtggtcgaggcgctggtgcgcaaactgggccccgacttcctcgtcgagttgctggagatccgcgcggcgttaggcccgttgattggccgcctggcggccgcccggagcacgcccgaggatgccgaggcgttgtgtgcggcgctggaagtggtgcaacaggcggacacggccgcggcgcggcaggcagccgatcttgcctacttccgggtgctcatccacagcactcgcaaccgcgcattggggttgctctaccgctgggtggagcacgccttcggcggccgcgagcatgcgctcaccggggcctacgacgacgcggacccagtgttgaccgacctgcgggcgatcaacggggcggtgctggccggtgacccggcggccgctgccgcgaccgtcgaggcgtatctgaacgccagtgcgctgcgcatggtcaagtcctaccgcgaccgcgcttag

SEQ ID NO: 28207 - DNA, 1407 bp, Mycobacterium tuberculosis
gtgagcgtgctgctcttcggggtgtcgcatcgtagcgcgccggtcgtcgtccttgaacaactcagtatcgacgaatccgatcaagtcaagatcatcgaccgagtgctggcttcgccgctggtgaccgaggcgatggtgctgtcgacttgcaaccgcgtcgaggtctacgccgtagtggacgcgttccatggcggcctgtcggtgatcgggcaggtgcttgccgaacactccggtatgtcgatgggggagctgaccaagtacgcatatgtccgctacagcgaggcagcagttgagcacctgttcgcggttgccagcggcctggactcggcggtgatcggcgagcagcaggtgcttggtcaggtgcgccgcgcctatgccgtcgccgaatccaaccgcacggtcggccgcgtgctgcacgaattggcccagcgggcgctgtcggtgggcaagcgagtgcactccgaaaccgccattgacgctgccggtgcctccgtggtgtcggtcgccctgggaatggccgagcgcaaattgggctcgttggcgggcacgaccgcggtggtgatcggcgccggggcgatgggcgcgctgtcggcggtacatctgacccgtgccggcgtcgggcacattcaggtgctcaaccggtcgttgtcccgggcgcagcggttggcccgaaggatccgcgaatctggcgtgccggccgaggcgctagcgctcgaccgcctggctaatgtcctggccgatgccgacgtggtggtcagctgtactggggcggtgcgtccggtggtgtcgctggccgatgtgcatcatgcgctggccgccgcccgccgtgacgaggccacccgtccgttggtgatatgcgacttgggcatgccgcgtgacgtcgatcctgcggtggccagattaccgtgtgtgtgggtcgtggacgtggatagcgtgcaacatgaaccctcggcacatgccgcggctgccgacgttgaggccgcccgccacatcgtcgccgccgaagttgccagctatctggtggggcagcggatggccgaggtcaccccaaccgtgacggcgttgcgccagcgagccgccgaagtggtcgaagcggaattgctgcgcctggacaaccggctgcccggcctgcagagtgtccagcgcgaggaggtggcccgcaccgtacggcgagtcgtggacaagctgttgcacgcgcctaccgtgcggatcaagcagctcgccagtgcgcccggcggtgacagctacgccgaggcgctgcgcgaactcttcgagcttgaccagaccgccgtcgatgccgtcgccactgcaggtgaattaccggtggtgccaagcggattcgacgctgaaagtcgccgcggtggaggcgacatgcaaagcagcccgaagcgatcgccgagtaactga

SEQ ID NO: 28208 - DNA, 930 bp, Mycobacterium tuberculosis
gtgatccggataggtacccggggcagcttgctggccaccactcaggccgccactgtcagagacgccctcatcgctggtggccactccgcggagttggtgaccatcagcaccgagggtgaccgatccatggcgccgatcgccagtctcggggttggcgtcttcaccacggcgttgcgcgaggcgatggaggcaggcctcgtcgatgcggcggtgcattcgtacaaggatttgccgactgccgccgatccaaggttcacggttgcggcgataccgccgcgcaatgacccccgcgacgcggtggtagcccgtgacgggctgacgctgggggaattgccggtcggatcgttggtgggcacatcctcgccgcggcgggccgcacagcttagagcattgggtctcggtttggaaatccgccccctacgaggcaacctagataccaggttgaacaaggtaagtagcggcgatcttgacgccatcgtggtggcccgggctggtctggcgcggctgggccgcctcgatgacgtgaccgagacgttagagccggtgcagatgttgcccgcgccggctcagggcgcgctcgcggtcgaatgccgcgccggcgacagccggttggtggcagtgctggcggagttggatgacgccgacacgcgtgcggcggtcaccgccgagcgagccctgcttgccgacctggaggcaggttgctccgcaccggtgggagcgatcgcagaagtggtcgagtccatcgatgaggacggccgtgtcttcgaggagctgtcgctgcgcgggtgcgtggcggcgctggacggatccgacgtgatccgcgcgtccggcatcggcagttgcggtcgggcacgggagctggggctctcggtcgccgcggagctgttcgagctgggcgcccgggagctgatgtggggagtgcggcattag

SEQ ID NO: 28209 - DNA, 1698 bp, Mycobacterium tuberculosis
atgacgcgagggcgtaagccgagaccgggccgcatcgttttcgtgggctccggtccgggcgaccccggcttgcttacgacacgggctgccgcggtgctggccaacgccgcgctggtgttcaccgatcccgacgtaccggagccggtggtggcgctgatcggcacggatctgccccccgtgtccggcccggcgcccgccgagccggttgccgggaacggcgatgcggccggcggaggaagtgcgcaggaacacggccgggccgcgtccgcggtagtctccggtggtcctgacatccgcccggcgctgggcgatcccgccgatgtggccaagacgctgaccgccgaggcccgttcgggtgtcgacgtggtgcggctggtggcgggcgatccgctcacggtggatgcggtaatcagcgaggtgaacgccgtcgcacgcacccacctgcacatcgaaatcgtgcccggcctggccgccagcagcgcggtcccgacctatgccgggttgccgctgggttcgtcgcacaccgtcgccgacgtgcgtatcgaccccgaaaacaccgactgggacgcgctggctgccgcacccgggccgctgatcctgcaggccaccgcatcgcatctagccgaatcggcccgcagcctgatcgatcaccagctggccgagtccactccgtgcgtggtgaccgcacacggcaccacctgtcagcagcgttcggtcgagaccacacttcagggattgaccgacccggccgtcctgggcgctaccgaccccgcgtgctccgcaaacgggagggactcccaggccggaccgctgatagtgaccatcggcaagacggtgaccagtcgggcaaagctgaactggtgggagagccgcgccctctacggctggacggtgttggtgccgcgcaccaaggaccaggccggcgagatgagcgagcggctcacgtcgtacggcgcgctgccggtggaggtgccgaccatcgccgtcgagccgccgcgcagccccgcgcagatggagcgcgccgtcaagggcctggtcgatggccgattccagtggatcgtgttcacctccaccaacgcggtgcgtgcggtgtgggagaagttcggcgagttcggtctggatgcccgcgcgttctccggggtgaagatcgcctgtgtcggcgagtcgacggccgaccgggtgcgcgccttcggaatcagtcccgagctggtgccctccggggagcagtcctcgcttggcttgctagacgacttcccgccctacgacagcgttttcgacccggtgaaccgggttttgctgccgcgcgccgacatcgccaccgaaacgctggccgagggactgcgagagcgtggctgggagatcgaggacgtcaccgcctaccggaccgtgcgggccgcgccgccgccggccactacccgggaaatgatcaagacgggcgggtttgacgcggtatgtttcacctccagctcgacggtgcgaaacctggtcggcatcgccggcaagccgcacgcgcggacgatcatcgcctgcatagggccaaagaccgccgagaccgcagccgagttcggcttgcgggtcgatgtccagccggacaccgccgccatcggcccgctggtcgatgcgctggccgagcatgccgcccggttgcgcgctgagggtgcgctgcccccgccgcgcaagaagagccgcaggcgctag

SEQ ID NO: 28210 - DNA, 990 bp, Mycobacterium tuberculosis
atgagcatgagttcctatccgcggcagcgaccgcgccggctccgctccaccgtcgcgatgcgccgtctggttgcgcaaacctcgttggagccaaggcatttggtgctgccgatgttcgttgccgacggcattgacgagccgcggccgattacctccatgccgggcgtggtacagcacacccgggattcgctacgtagggccgcggcagccgcggtggccgccggcgtgggtgggctgatgcttttcggcgtgccgcgcgaccaggacaaggacggtgtcggttcggcgggcatcgaccccgacgggatcctcaacgtcgcccttcgcgatctggccaaggacctgggtgaggccacggtgttgatggccgacacctgtctggacgagttcaccgaccacgggcactgcggtgtgctcgatgaccggggccgggtcgataacgacgccaccgtggcccgctatgtggaactggctgtggcgcaagcggaatcgggcgcccacgtggtcggacccagtgggatgatggatggccaggtagccgcgatccgggacggtttggacgccgccggctacatcgatgtggtgatcttggcctacgccgcgaagtttgcttcggcgttctacggcccgttccgcgaggcggtgagctctagcctgtccggggatcggcgcacctaccagcaggagccgggcaacgccgccgaggcgctgcgtgagatcgagctcgatctcgacgaaggcgccgacattgtgatggtcaaacccgcgatgggctacctcgatgtggtggcggccgcggcggacgtctcgccggtcccggtggccgcctatcaggtctcgggagagtacgcgatgattcgtgcggcggcggccaataattggatcgatgagcgtgccgcggtgctagagtcgctgaccggtatccggcgtgccggcgccgacatcgtgctcacctactgggcggtagacgcggcgggctggcttacgtga

SEQ ID NO: 28211 - DNA, 780 bp, Mycobacterium tuberculosis
atgaccgggttcaccgagattgccgcggtggggccactgctggtggcggtgggggtatgtctgctggctggtctggtgtcgttcgcctcaccatgtgtggtgccgctggtgcccggctacctgtcgtatctggcggccgtcgttggggtggacgagcagctgccggccggcgtcgtcaaacccccggtggctgcccgctggcgggtcgccggatcggcggcgctgttcgtggcggggttcacgacggtgttcgtgctgggcaccgtcgccgtcttgggcatgaccaccacgctgatcacgaatcagctgctgctgcagcgggtcggaggcgtgctgatcgtcgtcatgggcctggtgttcgtggggttcatcggagccctgcagcgccaggcgaggttcacgccgcgccagttgacgagcgtagcgggggcgccggtgcttggcgcggtgttcgcgctcggctggacaccgtgcctggggccgacgctgaccggggtgatcaccgttgcctcggccaccgagggtgccagcgtggcgcgtgggatcgtgctggtgattgcctattgcctggggctggggattccgttcgtgcttttggcgttcggttcggcgtgggcggtggcgggcctgggctggctgcgccggcacaccagggccatccagatcttcggcggggcgctgctgatcgcggtcggtgccgcgctggtcaccggggtgtggaacgacgtcgtgtcgtggctgcgcgacgccttcgtttccgacgtgaggttgccgatttga

SEQ ID NO: 28212 - DNA, 975 bp, Mycobacterium tuberculosis
ttgaacacgctgcacgtcaacgtcggcctggcccgctactccgactgggcgttcacctcggccgtggtggcgctggtggtcgcgctgctgctgctggcgttcgagttcgcccaggttcgcggtcgcggactcgcgccgctggccgtgccggccggatcggtggccaccgatagcgctacccctgggatcgtggcggaccaacggcaccggccgttcgacgaacgcgtcgggcggggcgggctggccgtcgcctatctgggcatcgggctactgctggcgtgcgtcgtgctgcgcggcctggccacccagcgggtgccgtggggcaacatgtacgagttcatcaacctgacctgcttgtccgggctcatcgccggcgcggtcgtgctgcgccgtgcgcgataccggccgctgtgggtcttcctgctggtcccggtgctgatcctgctcaccgtgtccggacgctggctctacgccaatgccgccccggtgatgccggcactgcagtcctactggctgcccattcatgtgtcggtggtcagcctcggttctggggtattcctggtcgccggtgtcgccagcatcctgttccttgtgcgcacatcgcggctgggtgagccaaccggtgaaggcgcgctggcgggtatggtgcggcggctccccgatgcccaaaccctggacggaatcgcctaccggaccacgatcttcgccttccccgttttcggcttcggggtgatattcggtgccatctgggccgaggaagcctggggccgctactggggctgggaccccaaggagacggtgtccttcgtcgcgtgggtggtgtacgcggcgtacctgcacgcgcggtcaacggcgggttggcgggaccgcaaggccgcctggatcaatgtcgccggcttcgtggccatggtcttcaatctgttcttcgttaacctggtgaccgtcggcctgcactcgtatgcgggcgtgggctga

SEQ ID NO: 28213 - DNA, 1785 bp, Mycobacterium tuberculosis
atgtctaatttgctggtaaccccggagctggtggcggctgcggcggcggatttggcgggtattgggtcggctatcggtgcggccaatgcggcggccggggccccgacgatggcgctgttggccgccggtgccgatgaggtgtcggcggcggtggcggccgtgttttcctcctacgcccagcaatatcaggcgctgagcgctgcggcggcggcgtttcacgaccagttcgtgcgggcgttggccgcgggtgcgggtgcgtatgcgggcgccgaggccgccaacgtggagcagcagttgctgaacgcgatcaatgcgcccaccctcgcgttgttggggcggccgctgatcggcaacggcgccgacggggcggccgggaccggtcaggccggcggggcaggcgggctgttgtacggcaacggcggtaacggcgggtcgggtgcggccgggcaggccggcggggccggcggcgccgccgggctgatcggccacggcgggaccggcggggccgtcaccggggtcagcaccaccggcgggccgggcggtcacggcggtgacgccggcctgtacgggtttggcggggccggtggcgcgggtgggttcggccagagcggggcggccggcggggccggtggggccggtgggtggttgtacggcgacggcggcgacggcggcgcaggcgacaacggcggtaacgagtccggcaccggcgtcagtgccgttgggggtgtgggtggggccggtggtgctggtgggttgttgttcggtaacggcggcgacggcggcgtcggcggcgacggcggcgacggcagcagcacccaggattccggtggtgatgggggtgcgggtggggccggtggtgctggtgggtggttgcttggtaatgggggggccggcggggccggcggggccgcctcaatcaaggttgccactggtgggctgggtggtgatggtggcgatgccgggctgttcgggtttggtggggacggcggctggggcggacgcggagtggatgctcgattcggtgcggctgggggtgccgctggggccggcggtgcgggcgggtggttgtacggcgatggcggcgccggcggcgtcggcggtgtcggcggtgctgtcttcagcctttcctccggtgacggcggggccggcggggccggtggcggtggtgggtggttgttcggtaacggcggcgacggcggcgccggtggcggcggcggtggccgcttcggcagcggcagcggtgccggtggtgatggggctgtcggtggggccggtggtgcgggcgcgtggttcggcaacggtggcgccggcggcgtcggcggcggcggtggccgcggcaccaccgccatcggtggcgacgggggtgccggtggggccggtggtgcgggtgggtggttgtacggcgacggcggcgccggcggtgccggcggcggtggtggccgcggcggcaccggcaacgatggtggcgacggcggggacggcggccgcggcggtgatgcccagctgcttggcaacggcggtgacggcggggccggcggggccggcgggcccgccgggttggcgcttcccccggggccggcgcggccggcgggggcggcggtgccggcggttcgctgttcggcagccccggcacgaccggcccgcacggctgatccctggctagcgccgatcttcgcgcgctcaacccttcggcattcgcaccacctgggcggcatagctcagaccggcgccgtagccgatcaacagggccagatcgccgggcttggccgcgccggtcgtcagtaa

SEQ ID NO: 28214 - DNA, 1008 bp, Mycobacterium tuberculosis
atgacggagatcgccacgaccagcggcgccaggagcgtcgggctgctcagtgtcggggcgtaccggcccgaacgcgtggtcaccaacgacgagatatgccagcacatcgactcgtccgacgagtggatctacacccgaaccggcatcaagacccgccgattcgccgccgacgacgagtcggcggcttccatggcgactgaggcctgtcgacgggcactgtcgaacgccggcctgtcggcggccgacatcgatggcgtgatcgtcaccaccaacacccatttcctgcaaaccccgccggccgccccaatggtcgcggcgtcgctgggcgccaagggcatactcgggttcgatctttcggcggggtgcgccggattcggatatgcgcttggcgcagcggccgacatgatccggggcggaggtgcggccacgatgctggtggtcggcacggaaaaactgtcccccacgatagacatgtacgaccgcggcaactgcttcatcttcgccgacggcgcggccgcagtggtggtgggcgagacaccgtttcaaggcattggaccaaccgtggcgggtagcgacggcgaacaggccgatgccatacggcaggacatcgactggatcactttcgcccagaatcccagcggcccacgcccgtttgtgcggctcgaaggtcccgcggtcttccgttgggcagcgttcaaaatgggcgacgtcggtcggcgcgcgatggacgccgccggggtgcgacccgaccagatagacgtgttcgtccctcatcaggccaatagccgcatcaacgagctgctggtcaagaacctgcagttgcggcccgacgcggtggtcgccaacgatatcgagcacaccggaaacacctcggcggcctccattccgctcgcgatggccgaattactgacgaccggcgcggccaagcccggcgatctggccctgttgatcggctacggcgccggtctgagctatgccgcccaggtggtgcgaatgccgaagggttga

SEQ ID NO: 28215 - DNA, 1254 bp, Mycobacterium tuberculosis
gtgaaccttcagttgttccttttgctcattgtcgtcgtgacggcattggcgttcgacttcaccaacgggttccacgacaccggaaacgccatggcgacctcgattgccagcggcgccctggcaccgcgggtagcggtagcacttcctgccgtgctgaacctgatcggtgcgtttttgtccaccgccgtggcggccacaatcgccaagggtctgatcgacgcgaatctggtgacgctggagttggtgttcgccggcctggtcggcgggatcgtctggaacctgttgacctggttgctgggcattccgtcgagttcctcacatgcgctgatcggcggcatcgtcggcgccacaattgccgccgtcggcctgcgtggggtgatctggagcggagtggtgtccaaggtgatcgtgccggccgtggtagccgcgctgctggccacgctggtcggagcagtcggcacctggctggtctaccggacgacgcgcggggttgccgaaaagcgtacggaacgcggtttccggcgcggccagatcggctcggcgtcgctggtctcgctggcgcacggcaccaacgacgcgcagaagacgatgggcgtgatcttcctggcgttgatgtcctacggcgcggtcagcacgacggcatcggtgccgccgctgtgggtgatcgtgagttgcgccgtggccatggccgccggtacctacctgggtggctggcgcatcatccgcaccctaggcaaagggctggtcgagatcaaaccaccgcagggtatggccgccgagtcgtcatcggccgccgtcattctgttgtccgcgcacttcggctatgcgctgtccacaacgcaggtcgcgaccgggtccgtgctgggcagcggcgtcggcaagcccggcgccgaggtgcgctggggggtagccggccgcatggtggtcgcgtggctggtgacgctcccgttggccgggctggtcggggccttcacctacgggctggtgcatttcatcggtggctaccccggtgcgatcctcggtttcgcactgttgtggctgaccgccaccgccatctggctgcggtcgcgcagggcgccgatcgaccacaccaacgtcaacgccgactgggaaggcaacctgacggccggcctggaagcgggtgcgcagccgcttgcggatcagaggccgccggtgcctgcaccgccggctccgactcccccaccgaaccaccgagcaccacagttcggcgtcaccacgaggaacgccccgtga

SEQ ID NO: 28216 - DNA, 705 bp, Mycobacterium tuberculosis
atgagtcgcgccgccttggacaaggatccccgcgacgtggcgtcgatgttcgatggcgtcgcccgcaagtatgacctgaccaataccgtgttgtccctgggccaggaccggtattggcggcgagccactcggtcggcgctgcggatcgggcccggccaaaaggtcctggacctggccgcgggcaccgccgtgtccaccgtagagctcaccaaatcgggcgcgtggtgtgtggctgccgatttttcggtcggcatgcttgcggcgggcgctgcgcgcaaggttcccaaggtcgccggtgacgccacccggctgccgtttggtgacgacgtgttcgatgcggtcaccatcagtttcgggctgcgtaacgtcgcaaaccagcaagcggcgctgcgggaaatggctcgtgtcacccggccgggcgggcggctactagtgtgcgaattctccacgcccaccaatgcgttgttcgccaccgcctacaaggaatacttgatgcgggcgctgccccgggtggcgcgggcggtgtctagcaaccccgaggcctacgagtacctcgcggagtcgatcagggcctggcccgaccaggcggtgctggcgcaccagatttcgcgggccgggtggtcgggggtgcggtggcgcaacctgaccggcggcatcgtagctctgcatgccggatacaaacccggcaaacaaaccccgcagtga

SEQ ID NO: 28217 - DNA, 726 bp, Mycobacterium tuberculosis
atgtcaactgtgttgacatatatcagggccgttgatatatatgaacacatgactgaatcgctggatcttgagttcgaatccgcctaccgcggtgaatccgtcgccttcggggagggagtccgaccgccatggagcatcggcgaaccccagcccgagctggccgccctgatcgtgcagggcaagttccgcggcgacgtcctcgacgtgggctgcggggaggccgcgatttcgctggcactggccgaacggggacacaccacggtcggactggacctctcccccgccgccgtagaactggctcggcatgaagcagcgaagcgcggcctggccaatgccagcttcgaggtggccgacgccagttcgtttaccggctatgacggcaggttcgacaccatcgtcgacagcacgctgttccactccatgccggtcgagtcccgggagggctatctgcaatcgatcgtgcgtgcggcggcaccgggcgcctcctacttcgtgttggtattcgaccgggcggcgatacccgaggggccgatcaatgcggtcaccgaggacgagctgcgcgcggcggtgtccaagtactggatcatcgatgagatcaagcccgcgcggctgtacgcgaggttcccggccggcttcgccggcatgcccgcactcctggacatccgcgaagagcccaacgggctgcagtcgatcggtggctggctgctctcggcccacctgggctga

SEQ ID NO: 28218 - DNA, 1227 bp, Mycobacterium tuberculosis
gtgagcgtggatgacagtgccgacgtggtggtcgtgggcgccggaccggccgggtcagctgcggccgcctgggctgcccgcgcgggccgcgacgtcctcgtcatcgacaccgccaccttcccccgcgacaagccttgcggcgacgggctgacaccacgcgcggtcgccgaactgcaccagctgggactaggtaagtggctggcggaccacatccggcatcgtgggttgcggatgagcggcttcggaggcgaggtggaagtggactggcccggtccgagcttcccgtcgtacggcagcgcggtggcccgtctcgagctggacgaccggatccgaaaggtcgccgaggacaccggtgcgcgcatgctacttggcgctaaagccgttgctgttcaccatgattcatcgaggcgggtggtatcgctgaccctggccgacggcactgaggtgggctgccgccagctgatcgttgccgacggggcccgatccccgctgggacgcaagctgggccggcgatggcatcgggagacggtctatggcgtcgcggtccgggggtacctgagcacggcgtacagcgatgacccgtggctgacgtcgcatctggaactgcgctcccccgacggcgccgtgctacccggctacggctggatctttccgctgggcaacggcgaagtgaacatcggcgtgggagcgttgtcgacctcaagacggccagccgatctggccctgcgcccgctgatctcctactacaccgacctgcgccgtgacgagtggggcttcaccggccagccgcgcgcggtgtcgtcggcgctgttgccgatgggcggcgcggtttctggagtggccgggtccaactggatgctcatcggcgacgccgcggcctgcgtcaacccgctcaatggcgagggcatcgactacgggctggaaaccgggcggctggccgccgaactgctggattcgcgtgacctggcacggctgtggccgtcgctgctggccgaccgctacggtcgcggcttctcggttgcgcgccggctagcgttgttactgaccttcccacggttcctacccacgactgggcccatcacgatgcgctccaccgcattgatgaacatcgccgtgcgggtgatgtccaatctggtcaccgacgacgaccgcgactgggtggcgcgggtgtggcgcggtggcggtcaattgtcccggctcgtcgatcgacgaccgccgttcagctga

SEQ ID NO: 28219 - DNA, 1008 bp, Mycobacterium tuberculosis
gtgaggactccggcgacggtggtggcaggcgttgacctgggcgacgctgtctttgccgcggccgtgcgtgctggtgtcgcgcgagtcgagcaactcatggacaccgagctgcgccaggccgacgaggtgatgagcgattcgctgctgcacttgttcaatgccggcggcaagcggttccgtccactgttcaccgtgctgtcggcgcagatcgggccgcagccggatgccgcagcggtgacagtcgccggggcggtgatcgagatgatccacctggcgaccctctaccacgatgacgtgatggacgaggcccaggtccgccgcggcgcgcccagcgccaacgcgcaatggggtaacaacgtcgcgatcctggctggcgactacctactggccaccgcatcgcggctggtggcgaggttgggaccggaggcggtgcggatcatcgccgacaccttcgcccagttggtgaccgggcagatgcgtgagacgcgcggcacgtcggagaacgtggactccatcgagcagtacctgaaggtggtccaggagaagaccggcagtctaatcggggcggccggccggctgggtgggatgttctccggtgccaccgacgaacaggtcgaacggctgagccgcctcggcggcgtggtgggcaccgcgtttcagatcgccgacgacattatcgacatcgacagcgagtctgacgagtcgggcaagctgcccggtaccgatgtgcgcgaaggagtacacaccctgccgatgctctacgcgttacgggaatcagggcccgattgcgctcggttgcgcgcactgctgaacggaccggtcgacgacgacgccgaggtgcgcgaggcgctgacattgttgcgggcgtcgccgggcatggcccgggccaaagacgtcctggcgcagtacgcggctcaggcacgtcacgagctggccttactgcccgacgtcccgggacggcgtgccctggcggcgctggtcgactacaccgtgagccggcacggctag

SEQ ID NO: 28220 - DNA, 1392 bp, Mycobacterium tuberculosis
atggcgatccgccaacacgtcggcgcgctgttcaccgacctgtacgaggtgacgatggcccaggcctactgggccgaaagaatgtcgggcacagcggttttcgagatattcttccgcaagcttccgcctggcaggtcctacatcatggccgccgggctggccgatgtggtcgagttcctcgaagcgtttcgattcgacgagcaggatctgcgttacctgcgtggcctgggccagttttccgacgagttcctgaggtggctggccggagtgcgtttcaccggagatgtctgggccgcgccggaaggaaccgtgatttttccgaacgaacccgcggtccagctgatcgcgccaatcatcgaggcccagcttgtcgagacgtttgtgctgaaccagattcatctgcaaagcgtgctcgcgagcaaggccgcgcgggtggtcgccgccgcgcgcggacgaccggtggtggatttcggcgcgcggcgcgctcacggcaccgacgcggcctgcaaggtcgcgcgcaccagttatctcgcgggcgctgcgggcacgtcgaatctgctcgcggcccgccaatatgggatcccgacgttcggcaccatggcgcacagctttgttcaagccttcgacagtgaggtggccgcgttcgaggcgttcgcccggctctacccagccaccatgctgctcgtggacacctacgacacgctacgcggcgtcgatcacgtcatcgagttggccaagcggctgggcaatcgcttcgatgtgcgcgcggtccggctggattccggcgacctcgatgagctgtccaaggcgacccgtgcacggctcgacaccgccggtctcgagcaggtcgagatcttcgcgtcgtcgggcctcgacgaaaaccgcatcgccgcgcttttggctgcccgctgtccgatcgacggcttcggcgtgggcacccagctcgtcgtggctcaagacgcgcccgcgctggacatggcctacaagctggtggcatacgacggcagcgggcgcaccaagttctccagcggcaaggtgatctacccgggacgcaagcaggtgttccgtaagctcgagcacggagtcttttgcggcgacacgctcggcgagcacggtgaaaaccttcccggggacccgttgctggtgcccatcatgaccaacggccgacgcatccggcagcatgcacccacattggacggcgcgcgggactgggcccgccagcagatcgacgcgctcccgccggagctgcgctcgctcgaggacaccggctactcgtatccggtggcggtcagcgacaggatcgtgggcgaactcgcccggctgcggcacgccgacacggccgaagcccaccccgggtccaacgtcgtcggggcgaaggccaaacgaccctag

SEQ ID NO: 28221 - DNA, 3921 bp, Mycobacterium tuberculosis
atgtcgttcgtaatcgcgacgccggagatgctgaccacggcggcaacggatttggcgaaaattggttcgacgatcactgcggccaacaccgcagcggccgcggtggcgaaagtgctgcccgcgtcagccgacgaggtgtcggtggccgttgcggcgttgttcggcacgcacgcccaggaatatcagaccgtcagcgcccaagtggcgacgtttcatgaccggttcgtgcagaccctgtccgcggccgcgagctcgtacgtggccgccgaggcggtcaacgttgaacagagtttgctagccgcggtcaatgcgcccacccaggcgctgttcggacgcccgctgatcggcaacggcgccgacggctcccccgggaccgggcaggccggcgggccaggcggcatcttgtacggcaacggcggcaacggcgggtctggggcgccaggacaacgaggcggggccggcggggcggcgggcctaatcggtaacggcggcaacggtggagccggcggcgtgggtaccaccggcggggccggtggtcacggcggcgcgggcgggtggctgtatggcaacggaggcgccgggggttttggcggggccggggcggtcggcggcaacggcggggccggcggtaccgccgggttgttcggtgtcggcggggccggtggggccggaggcaacggcatcgccggtgtcacgggtacgtcggccagcacaccgggtggatccggcaccgctggcggggccggcgggatcggcggcaacggcggggccggcggggccggcggggtgctgatgggcaacggcggcaacggcggggccggcggcgagggcgggcccggcggcgccggcggtgcgggcgccagcggcgcccacgccaccaacttgggcgctgacggtcaagccggcggaaacggcgggaatggtggggctggcgggaccggcggggtcggcgggcccggcggcggccacggtctgctcggcctcggcggcagccacggcgccggcggggctggcggtagcggcggtgacggcggagctcccggtgacggcggcaacggcgctaccgggacgtggggtcacaaccttggtgccggcgggaccggtggcaatggcggcaacccgggcgccggtggggccggtggcgccggtggcgccagcgtcggcggcagcgcgcatggcgcgaacggcgcgcccggcaccacctccaccagcggtggtaacggcggcgacggcggcaaaggcgccgacgctatcagcagcggacagaccggcgcgaacggtggcaggggtggcgacggcggtcaggtgggtaatggcggtgccggtggggccggtggccgcggcggggccggcggtctcggatttggatccgaagcgcccggtcgccccggcggggccggcggcaccggcggggccggcggcaacggcggaactcaggccggtgacggcggcaccggaggtgctggcggggccggcggcgatggcggatccggaggtgctggcagcatcggcttcaatgcgtccgctcccggggccgcaggctcacccggcgggaatggcggtaacggtgggcctggcggagccggcggcgagggcggggccggcggtctcgcgttggccgcctcgggccagaacggcagccagggcgctggcggtgacggcggagccggcgggaacggcgggactcctggcaacggcggtcacggcgccgccggcgcgctcggtgtcaacggtggtgtaggtggcgccggtggccacggcggtgatcccggtgtcggcggtgccggcggccagggcggaagcggctccacccccggtgccaacggcgcacccggcaacacccccaccagcggcggcaacggcggcaacggcggcagaggcgccgatgccaccggctttggccagaccggcgcgtccggcggcaggggcggtgatggcggtttggtcggcaacggcggcgccggcggcgccggcggcaacggcagcaaaggcctgcccggtctgggcaggctcggcaaccccggcctggatggcggcaccggcggaaacggtggggccggtggatccggcggcgcctgggcgggcaacggtggcaccggcggggccggcggcaccggcggcgtcggcgggactggagggtccggcagcgacggtgtcaacggttccagcgcgggcgcggacgggcaccccggcggcaccggcggagttggcggtaccggcggaaaaggtggggacggcggggacggcggggccgcacccaacggcgtcgccggcagccaaggccccggcggtgccggcggcgacggtgggaccggcggagttggcggtaacggcggccgcggcattgacggcgccgacggcgccaccgcgggtgcccgcggccaggatggcggcgccggcggggccggcggaaagggcggccgaggcgggaccggcgggccgggcggggccgggccggcgggcacaaccggcagccaaggcgccggcggcaacggcggcagcggcggcaccggcggggaccccggtgacggcggcaacggcgctaacggcagcgtgttcaccaacaacggcatcggcggcaacggcggcaacggcggcaacgccggccccagcggggccggcgggagtggcggcgccggctccactttcggtgcgaccggctcaagcagcagcattcatgtcaacggcggcaacggcggcaacggcggcaacggcgaccatgccctcagcggcaacggcgcggccggcggcaacggcggcaacggcggcaacggcagcctgcgcggcagcggtggggccggcggccacggcggcaacggcggcaatgccagcaggggcatgggcggtgacggcggaaccggtggcgccggcggaaacgccgggcagattggcaacggcggagcgggcggcaatggcggagacggcggcaccggtagtgacggcaatcccggagccattaccggcagcggcggccgcggcggcgacggcggcgtaggcgggcaaggtgggagcgtcgccggcgacggcgctgacggcggccggggcggggccggcggcacgggcgggacgggcctgcggggcaccaccggcgccaccggtgcgaccggcacattcgacgctggcgcggacggtcacggcggtaacggtggcaccggcggggttggcgggaccggcggcgccggcggcggcggcggcaacggcggggccggcggcaaagcgctgtcgccaacgggcaacaacggcagccaaggcgccggcggagatggtggggccggtggcgccggcggcaccggcggcaccggcggcgacggcggcagaggtgcccacggcactctcttcagcagcctcgctggcactggcgggactggcggaaatggcggcaccggcggcaccggcggcaccggtggtgccggcggtgccggcgggaccggttccaccctgggcgcgaccggtgcgacaggggcggccggccgcgccggaaacggtggcgtcggcggcagtggcggccttggctccgcctttggccccggcggcaccggcggcatgggcggcgccggcggcaccagcaccgtcagcgccggcggtgacggcggaaggggcggcttcggcggcgacggccttgatgccagttccggtgggaatggcggggacggcgggcacggtggcgacggcttcaggaccgctggggcgggcgggcgaggtggggacggcggcaaaggggccgaccccggcggtttattcccgatccctggggctggcggtaagggtggcaccggtggcaccggcggcaccgcacacctcgggcccctggccatcatcggccaatccggccagcccggccagttcggcagccccggcgccgacggccgcggcggggccgggggcgcaggcgggggcggcggcgccggcggcagcttctag

SEQ ID NO: 28222 - DNA, 723 bp, Mycobacterium tuberculosis
atggcgctgcagccggtgactcgccgatcggtgcccgaagaggtcttcgagcagatcgctaccgatgtgctcaccggcgagatgccgcccggcgaggcgttgcccagcgagcgtcggttggctgagttgctcggagtgtcgcgacccgcggtccgcgaggcgctcaaacggctgtcggccgcaggtctggtcgaggtgcgtcagggcgacgtcaccaccgtgcgtgacttccggcggcacgccggcctggatctgttgccccgattgttgtttcgcaacggtgagctggatatctccgtcgtccgcagcatcctcgaggcccggctgcgcaattttccgaaggtcgcggaactagcggccgaacggaacgagcccgagttggcggaattgctgcaggattcgctgcgtgcgctggacactgaggaagatccgatcgtgtggcaacgccacacgctcgacttttgggatcatgtggtcgacagcgccggttcgatcgtagatcgattgatgtacaacgcatttcgtgctgcttacgagccgacgctagctgctctgaccaccacgatgaccgctgcggctaagcgtccgtcggactaccggaaactcgcggatgcgatctgctcaggtgatcccaccggagcgaagaaagccgcccaagacctactcgaacttgcgaacacatcgttgatggccgtactcgttagccaggcgagtcggcaatga

SEQ ID NO: 28223 - DNA, 1728 bp, Mycobacterium tuberculosis
gtgaagctcaccgacgtcgattttgccgtcgaggcctccgggatggtgcgggccttcaaccaggccggtgtgctggacgtgtcggatgtgcatgtggcgcaacgtctctgtgcactggccggggagagcgacgagcgggtggcgttggcggtagcggtggcggtccgcgcgctacgggccggttcggtgtgtgtggatctgttgtcgatcgcgcgggttgctggacacgacgacctgccgtggccggatccggcggactggttggcggcggtgcgggccagtccgttgctcgccgatccacccgtgctgcacctgtatgacgatcggctgctctatctggaccgctactggcgcgaagaagagcaggtgtgcgcggacctgctcgcgttgctgacatccaggcgaccggccggggtacccgacttgcggcgactgttcccgaccggctttgacgagcagcggcgcgcggcggaaatcgcgctctcgcaaggtgttacggtgttgactggcgggcctggcaccgggaagacgacgacggtcgcgcggctgctggcgttggttgccgagcaggcggagctggccggtgagccgcggccgcggatcgcgctggccgcacccaccggcaaggcggcggcccggctggccgaggcggtacggcgcgagatggccaagctcgacgccaccgaccgggcacggctcggcgacctgcacgcggtcacgctgcatcgtctgctgggtgccaaaccgggagcgcggtttcgccaggatcgccagaaccggttgcctcacaacgtgatcgtggtcgacgagacctcgatggtgtcgctgacgctgatggcccggctggccgaggcggtgcgcccgggcgcccggttgatcctcgtcggcgatgccgaccagttggcgtcggtggaagccggagcggtgctggcggatttggtcgatggcttctcggtacgcgacgacgcgctggtggcgcagctgcgaacgtcgcatcggttcggcaaggtgatcggtaccttggccgaagcgatccgggccggcgatggcgatgccgtactgggcctgctgcgctcgggtgaggagcggatcgagttcgtcgacgacgaggatccggcgccgcggttgcgcgcggtgctggtgccacacgcgttgcggctgcgcgaggcggcgctgttgggtgcctccgacgtcgcgttggccaccctggacgagcaccggctgctgtgtgcgcatcgggacgggcccaccggcgtgctgcactggaaccgccgggttcaagcctggctcgccgaggagaccggccagccgccctggacgccgtggtacgccgggcgtccgctgctggtgacggccaacgactacggccttcgcgtctacaacggcgacaccggtgtcgtgctggccggccccaccggtctgcgggccgtcatttctggtgcatccgggccacttgacgttgccaccggccgcctcggcgacgtcgagaccatgcacgcgatgaccatccacaagagtcagggcagccaggtcgacgaggtgacggtgctgatgccgcaagaggattcgcggttgctgacccgggagttgctgtacaccgcggtgacccgggccaaacgcaaggtccgggtggtcgggtccgaagcttcggtgcgggccgcgatcgcacgccgggcggtgcgggccagcgggttgcggatgcggttacagtcgacggggtgtggctga

SEQ ID NO: 28224 - DNA, 486 bp, Mycobacterium tuberculosis
gtgagcgacgaaggcgacgttgccgacgaggccgtagccgacggcgccgagaatgcggacagccgcgggagcggtggccggacggccctggtgacaaagccggtggtgcggccgcaacgtcccaccggcaagcggtcgcggtcgcgtgcggcaggagccgacgcagacgtcgacgtcgaagagccgtcgaccgcggcttcggaagctaccggggtcgccaaggacgattcgaccaccaaggccgtgtcgaaggctgccagggcaaaaaaggccagtaaaccgaaggcccggtcggttaacccgatcgcattcgtctacaactacctcaagcaggtcgttgccgagatgcggaaggtaatctggccgaaccgcaaacaaatgcttacctacacgtcggtggtgctggcgtttctggccttcatggtggcgctggtcgccggtgctgacttgggcctgaccaagctggtgatgttggtgttcggctga

SEQ ID NO: 28225 - DNA, 717 bp, Mycobacterium tuberculosis
gtgactaccttcgacggtgacacgtccgcgggtgaggcggtcgatctaacagaggccaacgccttccaggatgcagcggccccggctgaagaggtcgatccggccgccgcgctcaaagcggagctgcgcagcaagcccggcgactggtacgtcgttcactcctacgcagggtacgagaacaaggtcaaggccaacctggaaacccgggtgcagaaccttgatgtcggcgactacatcttccaggtggaggtgcccaccgaagaggtcaccgagatcaaaaacggccaacgcaagcaggtcaaccgtaaggtgctgcccggctacattctggtgcggatggacttgaccgacgactcctgggccgcggtgcgtaacacgccgggggtcacggggttcgttggggcaacatctcgcccgtcagcgctcgccctcgacgacgtggtgaagtttctgcttccgcgggggtcgacgaggaaggctgccaagggtgcggccagcacggctgccgccgccgaggcgggcgggctagagcgtccggtcgtcgaggtcgactacgaggtgggcgaatcggtaaccgtcatggacgggccgtttgccacattgccggccacgatcagcgaggtcaacgccgaacagcagaaactcaaggtgctggtctccatcttcggccgcgaaacaccggtggagctgacctttggccaagtctccaagatctag

SEQ ID NO: 28226 - DNA, 429 bp, Mycobacterium tuberculosis
atggccccgaagaagaaggtcgccgggttgatcaagctgcagatcgtggcgggccaggccaaccctgccccgccagtgggccccgcgctcggtcagcacggcgtcaacatcatggagttctgcaaggcgtacaacgccgcgacggagaaccagcgcggcaacgtcatcccggtggagatcaccgtttatgaagaccgtagcttcactttcacgctgaagacgccgcccgccgccaagctgctgcttaaggccgctggtgtggcgaagggttcggcggagccgcacaagaccaaggtcgccaaagtcacctgggatcaagtccgcgaaatcgccgagaccaagaagacggacctcaacgccaacgacgtcgacgctgcggccaagatcatcgccggtaccgctcggtcgatgggcatcaccgtcgaatag

SEQ ID NO: 28227 - DNA, 708 bp, Mycobacterium tuberculosis
atgagcaagaccagcaaggcatatcgcgccgccgccgcgaaggtggaccgcaccaacctctacaccccgctgcaggcggccaagcttgccaaagagacctcgtcgaccaagcaggacgcgaccgtcgaggtggcgatccggcttggcgtcgacccgcgtaaggcagaccagatggttcgcggcacggtcaacctgccacacggcactggtaagactgcccgcgtcgcggtattcgcggttggtgaaaaggccgatgctgccgttgccgcgggggcggatgttgtcgggagtgacgatctgatcgagaggattcagggcggctggctggaattcgatgccgcgatcgcgacaccggatcagatggccaaagtcggtcgcatcgctcgggtgctgggtccgcgcggcctgatgcccaacccgaaaaccggcaccgtcaccgccgacgtcgccaaggccgtcgcggacatcaagggcggcaagatcaacttccgggttgacaagcaggccaacctgcacttcgtcatcgggaaagcgtcgttcgacgagaagttgttggcggagaactacggcgcggcgatcgacgaggtgctgcggctcaagccgtcctcgtcgaagggccgctacctgaagaagatcaccgtgtcgacgacgacgggcccgggcattccggtcgacccatccatcacccgcaacttcgcgggggagtag

SEQ ID NO: 28228 - DNA, 537 bp, Mycobacterium tuberculosis
atggccagggctgacaaggccaccgccgtcgcagacatcgcagcgcagttcaaggagtcgaccgcgacgttgatcaccgaataccgcggcttgacggtggccaacctggccgagctacgcaggtctctgacggggtcggcgacctacgcggtggccaaaaacacactcatcaagcgggcggcctccgaggccggcatcgagggcctcgacgaactgtttgtgggccccaccgcgatcgcgttcgtcaccggtgagccggtcgacgccgccaaggccatcaagaccttcgccaaggagcacaaggcgctggtcatcaagggcggctacatggacggccacccattgaccgtggccgaagtcgagcgcatcgccgacctggagtcccgcgaggtgttactggccaagctggccggtgcgatgaagggcaacctggccaaggcggccgggttgttcaacgcgccggcctcgcagctggcccggctcgcggccgccctgcaggaaaagaaggcctgcccaggcccagactcagccgagtag

SEQ ID NO: 28229 - DNA, 393 bp, Mycobacterium tuberculosis
atggcaaagctctccaccgacgaactgctggacgcgttcaaggaaatgaccctgttggagctctccgacttcgtcaagaagttcgaggagaccttcgaggtcaccgccgccgctccagtcgccgtcgccgccgccggtgccgccccggccggtgccgccgtcgaggctgccgaggagcagtccgagttcgacgtgatccttgaggccgccggcgacaagaagatcggcgtcatcaaggtggtccgggagatcgtttccggcctgggcctcaaggaggccaaggacctggtcgacggcgcgcccaagccgctgctggagaaggtcgccaaggaggccgccgacgaggccaaggccaagctggaggccgccggcgccaccgtcaccgtcaagtag

SEQ ID NO: 28230 - DNA, 3519 bp, Mycobacterium tuberculosis
ttggcagattcccgccagagcaaaacagccgctagtcctagtccgagtcgcccgcaaagttcctcgaataactccgtacccggagcgccaaaccgggtctccttcgctaagctgcgcgaaccacttgaggttccgggactccttgacgtccagaccgattcgttcgagtggctgatcggttcgccgcgctggcgcgaatccgccgccgagcggggtgatgtcaacccagtgggtggcctggaagaggtgctctacgagctgtctccgatcgaggacttctccgggtcgatgtcgttgtcgttctctgaccctcgtttcgacgatgtcaaggcacccgtcgacgagtgcaaagacaaggacatgacgtacgcggctccactgttcgtcaccgccgagttcatcaacaacaacaccggtgagatcaagagtcagacggtgttcatgggtgacttcccgatgatgaccgagaagggcacgttcatcatcaacgggaccgagcgtgtggtggtcagccagctggtgcggtcgcccggggtgtacttcgacgagaccattgacaagtccaccgacaagacgctgcacagcgtcaaggtgatcccgagccgcggcgcgtggctcgagtttgacgtcgacaagcgcgacaccgtcggcgtgcgcatcgaccgcaaacgccggcaaccggtcaccgtgctgctcaaggcgctgggctggaccagcgagcagattgtcgagcggttcgggttctccgagatcatgcgatcgacgctggagaaggacaacaccgtcggcaccgacgaggcgctgttggacatctaccgcaagctgcgtccgggcgagcccccgaccaaagagtcagcgcagacgctgttggaaaacttgttcttcaaggagaagcgctacgacctggcccgcgtcggtcgctataaggtcaacaagaagctcgggctgcatgtcggcgagcccatcacgtcgtcgacgctgaccgaagaagacgtcgtggccaccatcgaatatctggtccgcttgcacgagggtcagaccacgatgaccgttccgggcggcgtcgaggtgccggtggaaaccgacgacatcgaccacttcggcaaccgccgcctgcgtacggtcggcgagctgatccaaaaccagatccgggtcggcatgtcgcggatggagcgggtggtccgggagcggatgaccacccaggacgtggaggcgatcacaccgcagacgttgatcaacatccggccggtggtcgccgcgatcaaggagttcttcggcaccagccagctgagccaattcatggaccagaacaacccgctgtcggggttgacccacaagcgccgactgtcggcgctggggcccggcggtctgtcacgtgagcgtgccgggctggaggtccgcgacgtgcacccgtcgcactacggccggatgtgcccgatcgaaacccctgaggggcccaacatcggtctgatcggctcgctgtcggtgtacgcgcgggtcaacccgttcgggttcatcgaaacgccgtaccgcaaggtggtcgacggcgtggttagcgacgagatcgtgtacctgaccgccgacgaggaggaccgccacgtggtggcacaggccaattcgccgatcgatgcggacggtcgcttcgtcgagccgcgcgtgctggtccgccgcaaggcgggcgaggtggagtacgtgccctcgtctgaggtggactacatggacgtctcgccccgccagatggtgtcggtggccaccgcgatgattcccttcctggagcacgacgacgccaaccgtgccctcatgggggcaaacatgcagcgccaggcggtgccgctggtccgtagcgaggccccgctggtgggcaccgggatggagctgcgcgcggcgatcgacgccggcgacgtcgtcgtcgccgaagaaagcggcgtcatcgaggaggtgtcggccgactacatcactgtgatgcacgacaacggcacccggcgtacctaccggatgcgcaagtttgcccggtccaaccacggcacttgcgccaaccagtgccccatcgtggacgcgggcgaccgagtcgaggccggtcaggtgatcgccgacggtccctgtactgacgacggcgagatggcgctgggcaagaacctgctggtggccatcatgccgtgggagggccacaactacgaggacgcgatcatcctgtccaaccgcctggtcgaagaggacgtgctcacctcgatccacatcgaggagcatgagatcgatgctcgcgacaccaagctgggtgcggaggagatcacccgcgacatcccgaacatctccgacgaggtgctcgccgacctggatgagcggggcatcgtgcgcatcggtgccgaggttcgcgacggggacatcctggtcggcaaggtcaccccgaagggtgagaccgagctgacgccggaggagcggctgctgcgtgccatcttcggtgagaaggcccgcgaggtgcgcgacacttcgctgaaggtgccgcacggcgaatccggcaaggtgatcggcattcgggtgttttcccgcgaggacgaggacgagttgccggccggtgtcaacgagctggtgcgtgtgtatgtggctcagaaacgcaagatctccgacggtgacaagctggccggccggcacggcaacaagggcgtgatcggcaagatcctgccggttgaggacatgccgttccttgccgacggcaccccggtggacattattttgaacacccacggcgtgccgcgacggatgaacatcggccagattttggagacccacctgggttggtgtgcccacagcggctggaaggtcgacgccgccaagggggttccggactgggccgccaggctgcccgacgaactgctcgaggcgcagccgaacgccattgtgtcgacgccggtgttcgacggcgcccaggaggccgagctgcagggcctgttgtcgtgcacgctgcccaaccgcgacggtgacgtgctggtcgacgccgacggcaaggccatgctcttcgacgggcgcagcggcgagccgttcccgtacccggtcacggttggctacatgtacatcatgaagctgcaccacctggtggacgacaagatccacgcccgctccaccgggccgtactcgatgatcacccagcagccgctgggcggtaaggcgcagttcggtggccagcggttcggggagatggagtgctgggccatgcaggcctacggtgctgcctacaccctgcaggagctgttgaccatcaagtccgatgacaccgtcggccgcgtcaaggtgtacgaggcgatcgtcaagggtgagaacatcccggagccgggcatccccgagtcgttcaaggtgctgctcaaagaactgcagtcgctgtgcctcaacgtcgaggtgctatcgagtgacggtgcggcgatcgaactgcgcgaaggtgaggacgaggacctggagcgggccgcggccaacctgggaatcaatctgtcccgcaacgaatccgcaagtgtcgaggatcttgcgtaa

SEQ ID NO: 28231 - DNA, 3951 bp, Mycobacterium tuberculosis
gtgctcgacgtcaacttcttcgatgaactccgcatcggtcttgctaccgcggaggacatcaggcaatggtcctatggcgaggtcaaaaagccggagacgatcaactaccgcacgcttaagccggagaaggacggcctgttctgcgagaagatcttcgggccgactcgcgactgggaatgctactgcggcaagtacaagcgggtgcgcttcaagggcatcatctgcgagcgctgcggcgtcgaggtgacccgcgccaaggtgcgtcgtgagcggatgggccacatcgagcttgccgcgcccgtcacccacatctggtacttcaagggtgtgccctcgcggctggggtatctgctggacctggccccgaaggacctggagaagatcatctacttcgctgcctacgtgatcacctcggtcgacgaggagatgcgccacaatgagctctccacgctcgaggccgaaatggcggtggagcgcaaggccgtcgaagaccagcgcgacggcgaactagaggcccgggcgcaaaagctggaggccgacctggccgagctggaggccgagggcgccaaggccgatgcgcggcgcaaggttcgcgacggcggcgagcgcgagatgcgccagatccgtgaccgcgcgcagcgtgagctggaccggttggaggacatctggagcactttcaccaagctggcgcccaagcagctgatcgtcgacgaaaacctctaccgcgaactcgtcgaccgctacggcgagtacttcaccggtgccatgggcgcggagtcgatccagaagctgatcgagaacttcgacatcgacgccgaagccgagtcgctgcgggatgtcatccgaaacggcaaggggcagaagaagcttcgcgccctcaagcggctgaaggtggttgcggcgttccaacagtcgggcaactcgccgatgggcatggtgctcgacgccgtcccggtgatcccgccggagctgcgcccgatggtgcagctcgacggcggccggttcgccacgtccgacttgaacgacctgtaccgcagggtgatcaaccgcaacaaccggctgaaaaggctgatcgatctgggtgcgccggaaatcatcgtcaacaacgagaagcggatgctgcaggaatccgtggacgcgctgttcgacaatggccgccgcggccggcccgtcaccgggccgggcaaccgtccgctcaagtcgctttccgatctgctcaagggcaagcagggccggttccggcagaacctgctcggcaagcgtgtcgactactcgggccggtcggtcatcgtggtcggcccgcagctcaagctgcaccagtgcggtctgcccaagctgatggcgctggagctgttcaagccgttcgtgatgaagcggctggtggacctcaaccatgcgcagaacatcaagagcgccaagcgcatggtggagcgccagcgcccccaagtgtgggatgtgctcgaagaggtcatcgccgagcacccggtgttgctgaaccgcgcacccaccctgcaccggttgggtatccaggccttcgagccaatgctggtggaaggcaaggccattcagctgcacccgttggtgtgtgaggcgttcaatgccgacttcgacggtgaccagatggccgtgcacctgcctttgagcgccgaagcgcaggccgaggctcgcattttgatgttgtcctccaacaacatcctgtcgccggcatctgggcgtccgttggccatgccgcggctggacatggtgaccgggctgtactacctgaccaccgaggtccccggggacaccggcgaataccagccggccagcggggatcacccggagactggtgtctactcttcgccggccgaagcgatcatggcggccgaccgcggtgtcttgagcgtgcgggccaagatcaaggtgcggctgacccagctgcggccgccggtcgagatcgaggccgagctattcggccacagcggctggcagccgggcgatgcgtggatggccgagaccacgctgggccgggtgatgttcaacgagctgctgccgctgggttatccgttcgtcaacaagcagatgcacaagaaggtgcaggccgccatcatcaacgacctggccgagcgttacccgatgatcgtggtcgcccagaccgtcgacaagctcaaggacgccggcttctactgggccacccgcagcggcgtgacggtgtcgatggccgacgtgctggtgccgccgcgcaagaaggagatcctcgaccactacgaggagcgcgcggacaaggtcgaaaagcagttccagcgtggcgctttgaaccacgacgagcgcaacgaggcgctggtggagatttggaaggaagccaccgacgaggtcggtcaggcgttgcgggagcactaccccgacgacaacccgatcatcaccatcgtcgactccggcgccaccggcaacttcacccagactcgaacgctggccggtatgaagggcctggtgaccaacccgaagggtgagttcatcccgcgtccggtcaagtcctccttccgtgagggcctgaccgtgctggagtacttcatcaacacccacggcgctcgaaagggcttggcggacaccgcgttgcgcaccgccgactccggctacctgacccgacgtctggtggacgtgtcccaggacgtgatcgtgcgcgagcacgactgccagaccgagcgcggcatcgtcgtcgagctggccgagcgtgcacccgacggcacgctgatccgcgacccgtacatcgaaacctcggcctacgcgcggaccctgggcaccgacgcggtcgacgaggccggcaacgtcatcgtcgagcgtggtcaagacctgggcgatccggagattgacgctctgttggctgctggtattacccaggtcaaggtgcgttcggtgctgacgtgtgccaccagcaccggcgtgtgcgcgacctgctacgggcgttccatggccaccggcaagctggtcgacatcggtgaagccgtcggcatcgtggccgcccagtccatcggcgaacccggcacccagctgaccatgcgcaccttccaccagggtggcgtcggtgaggacatcaccggtggtctgccccgggtgcaggagctgttcgaggcccgggtaccgcgtggcaaggcgccgatcgccgacgtcaccggccgggttcggctcgaggacggcgagcggttctacaagatcaccatcgttcctgacgacggcggtgaggaagtggtctacgacaagatctccaagcggcagcggctgcgggtgttcaagcacgaagacggttccgaacgggtgctctccgatggcgaccacgtcgaggtgggccagcagctgatggaaggctcggccgacccgcatgaggtgctgcgggtgcagggcccccgcgaggtgcagatacacctggttcgcgaggtccaggaggtctaccgcgcccaaggtgtgtcgatccacgacaagcacatcgaggtgatcgttcgccagatgctgcgccgggtgaccatcatcgactcgggctcgacggagtttttgcctggctcgctgatcgaccgcgcggagttcgaggcagagaaccgccgagtggtggccgagggcggtgagcccgcggccggccgtccggtgctgatgggcatcacgaaggcgtcgctggccaccgactcgtggctgtcggcggcgtcgttccaggagaccactcgcgtgctgaccgatgcggcgatcaactgccgcagcgataagctcaacggtctgaaggaaaacgtgatcatcggcaagctgatcccggccggtaccggtatcaaccgctaccgcaacatcgcggtgcagcccaccgaggaggcccgcgctgcggcgtacaccatcccgtcgtatgaggatcagtactacagcccggacttcggtgcggccaccggtgctgccgtcccgctggacgactacggctacagcgactaccgctag

SEQ ID NO: 28232 - DNA, 759 bp, Mycobacterium tuberculosis
gtgctcattggttcgcatgtcagcccaaccgatccgctggccgcagcggaggccgaaggcgctgacgtagtgcagattttccttggcaatccgcagagctggaaggctcccaagccgcgggacgacgccgccgcgctgaaagccgcgaccctgcccatctacgtgcatgcgccctacctgatcaaccttgcgtcggcgaacaatcgcgtgcggatcccgtcgcgcaagatcctgcaagagacctgtgctgcggcggccgacattggcgcagcggcggtgatcgtgcacggtgggcacgtcgccgacgacaacgacatcgacaagggcttccagcgctggcgcaaggcgctggaccggctggaaaccgaggttcccgtctacctggaaaacaccgccggcggcgatcacgcgatggcgcgccgcttcgacaccatcgcccggctctgggacgtcatcggcgacaccggaatcgggttttgcctggacacctgccacacctgggcggccggcgaggcgctgaccgatgccgtcgatcggatcaaagcaattaccggccgcatcgatctggtgcactgcaacgactccagggacgaagcgggatcgggccgtgaccgccacgccaacctcggcagcggccagattgatcctgacctgctggtggctgccgtcaaggcggccggcgcgccggtgatctgcgaaaccgccgaccaaggtcgcaaggacgacatcgcgtttctgcgggaaagaaccggcagctga

SEQ ID NO: 28233 - DNA, 723 bp, Mycobacterium tuberculosis
atgccggccatgaccgcccgttcggtggtactcagcgtgctgctcggtgctcatcccgcgtgggccaccgcaagcgaattgatccagctgacagcggatttcggtatcaaggagacgacgttgcgggtcgcgctgacccgcatggtcggtgccggggatctggtccggtccgcggacggctaccggctctcggatcggttgctggcccgccagcgccgacaagatgaggccatgcgcccacggacccgcgcttggcacggaaactggcacatgctgattgtcaccagcatcggcaccgatgctcgtacccgggccgcactgcgaacctgcatgcaccacaagcgtttcggtgaattgcgggaaggggtgtggatgcggccggacaatctcgacctcgacttggagtccgacgttgcggcccgggttaggatgctgacggcccgcgacgaggcccccgccgacttggccgggcagctgtgggatctgtcggggtggaccgaggccggccaccggttgctcggcgacatggcagcggccaccgacatgcccgggcgatttgtggtggctgcggcgatggtgcgccacctgctcaccgatccgatgttgcccgctgaactgttgcccgccgactggccgggcgccgggttacgggcggcgtaccacgacttcgccactgcaatggcgaaacgacgcgatgcaactcaactcctggaggtgacatga

SEQ ID NO: 28234 - DNA, 375 bp, Mycobacterium tuberculosis
atgccaaccatccagcagctggtccgcaagggtcgtcgggacaagatcagtaaggtcaagaccgcggctctgaagggcagcccgcagcgtcgtggtgtatgcacccgcgtgtacaccaccactccgaagaagccgaactcggcgcttcggaaggttgcccgcgtgaagttgacgagtcaggtcgaggtcacggcgtacattcccggcgagggccacaacctgcaggagcactcgatggtgctggtgcgcggcggccgggtgaaggacctgcctggtgtgcgctacaagatcatccgcggttcgctggatacgcagggtgtcaagaaccgcaaacaggcacgcagccgttacggcgctaagaaagagaagggctga

SEQ ID NO: 28235 - DNA, 471 bp, Mycobacterium tuberculosis
atgccacgcaaggggcccgcgcccaagcgtccgttggtcaacgacccggtctacggatcgcagttggtcacccagttggtgaacaaggttctgttgaaggggaaaaaatcgctggccgagcgcattgtttatggtgcgcttgagcaagctcgcgacaagaccggcaccgatccggtgatcaccctcaagcgggctctcgacaatgtcaaacccgccctggaggtgcgcagccgtcgcgtcggcggcgcgacctatcaggtgcctgtcgaggtgcgccccgaccggtcgaccacgctggcgctgcgctggctcgtcggctactcgcggcaacgccgtgagaagacgatgatcgagcgcctggcaaatgagatcctggatgccagcaatggccttggggcctccgtcaagcggcgtgaggacacccacaagatggccgaggcgaaccgagcctttgcgcattatcgctggtga

SEQ ID NO: 28236 - DNA, 2106 bp, Mycobacterium tuberculosis
gtggcacagaaggacgtgctgaccgacctgagtagggtccgcaacttcggcatcatggcgcacatcgatgccggcaagaccacaaccaccgagcgcatcctgtactacaccggtatcaactacaagattggtgaggtgcacgacggcgcagccaccatggactggatggaacaggaacaggagcgcggcatcaccatcacctctgcggccacgaccacgttctggaaagacaaccagctcaatatcatcgacacgccagggcatgtggatttcaccgtcgaggtggagcgcaatctgcgcgtgctcgacggcgcggtcgcggttttcgacggcaaagagggtgtcgaaccgcagtccgaacaggtgtggcggcaggccgacaaatacgatgtcccccgaatctgcttcgtcaacaagatggacaagatcggtgcggacttctacttctcggttcgcacgatgggggagcggcttggggccaacgccgtgcccattcagcttcccgtcggtgcggaggccgacttcgaaggcgtcgtcgacctggtggagatgaacgccaaggtgtggcgcggcgagacgaaactcggcgaaacctacgacaccgtggaaataccggccgacctggccgagcaggctgaggagtaccggaccaagctgctcgaggtggtcgccgagtccgacgagcacctgttggagaagtacctgggcggtgaggagctcaccgtcgacgagatcaagggcgcgatccgcaagctgacaatcgccagcgagatctacccggtgctgtgcggcagcgcgttcaagaacaagggcgtgcagccgatgctggatgccgtcgtcgactacctgccgtcgccgctggacgttccgccggcgatcgggcacgcgcccgccaaggaggacgaggaggtggtgcgcaaggcgaccaccgacgagccctttgcggccctggcgttcaagatcgctactcacccgttcttcggcaagctcacctacatccgggtgtactcgggcaccgtcgagtcgggtagccaggtcatcaatgccaccaagggcaagaaagaacggctgggcaagctgttccagatgcactccaacaaggagaacccggtcgatagggctagtgccggtcacatctacgcggtgatcggtctcaaggacaccaccaccggtgacaccttgagcgacccgaaccagcagatcgtgctggagtcgatgaccttccccgacccggtgatcgaggtggccatcgagccgaagaccaagagcgaccaagagaagctgagtctgtcgatccagaagctcgccgaagaggatccgaccttcaaggtgcacctggattccgagaccggccagaccgtcatcggcggcatgggcgagctgcatctggacatcctggtggaccgcatgcgccgggaattcaaggtcgaggccaacgtcggcaagcctcaggttgcctacaaggagaccatcaagcggctcgtgcagaacgtcgagtacacccacaagaagcagacgggtggctcgggccagttcgccaaggtcatcatcaacctcgagccgttcaccggtgaagagggcgcgacctacgagttcgagagcaaagtcaccggcgggcgtatcccgcgggagtacatcccgtcggtggatgccggcgcacaggacgccatgcagtacggcgtgctggccggctatccgctggtgaacctgaaggtcacgctgctcgacggcgcctaccacgaggttgactcctcggaaatggcgttcaagatcgcgggctcgcaggtgctcaaaaaggctgccgcacttgcgcagccggtgatcctggaaccgatcatggcggtcgaggtgaccacacccgaggactacatgggtgacgtgatcggcgacctgaactcccgccgtggccagatccaggccatggaggagcgggctggtgcgcgcgttgttagggcgcacgtgccgctgtcggagatgttcggctacgtcggtgaccttcggtccaagactcaaggccgggcaaactactccatggtgttcgactcgtactccgaagtgccggcgaacgtgtcgaaggaaatcatcgcgaaggcgacgggcgagtga

SEQ ID NO: 28237 - DNA, 1191 bp, Mycobacterium tuberculosis
gtggcgaaggcgaagttccagcggaccaagccccacgtcaacatcgggaccatcggtcacgttgaccacggcaagaccaccctgaccgcggctatcaccaaggtcctgcacgacaaattccccgatctgaacgagacgaaggcattcgaccagatcgacaacgcccccgaggagcgtcagcgcggtatcaccatcaacatcgcgcacgtggagtaccagaccgacaagcggcactacgcacacgtcgacgcccctggccacgccgactacatcaagaacatgatcaccggcgccgcgcagatggacggtgcgatcctggtggtcgccgccaccgacggcccgatgccccagacccgcgagcacgttctgctggcgcgtcaagtgggtgtgccctacatcctggtagcgctgaacaaggccgacgcagtggacgacgaggagctgctcgaactcgtcgagatggaggtccgcgagctgctggctgcccaggaattcgacgaggacgccccggttgtgcgggtctcggcgctcaaggcgctcgagggtgacgcgaagtgggttgcctctgtcgaggaactgatgaacgcggtcgacgagtcgattccggacccggtccgcgagaccgacaagccgttcctgatgccggtcgaggacgtcttcaccattaccggccgcggaaccgtggtcaccggacgtgtggagcgcggcgtgatcaacgtgaacgaggaagttgagatcgtcggcattcgcccatcgaccaccaagaccaccgtcaccggtgtggagatgttccgcaagctgctcgaccagggccaggcgggcgacaacgttggtttgctgctgcggggcgtcaagcgcgaggacgtcgagcgtggccaggttgtcaccaagcccggcaccaccacgccgcacaccgagttcgaaggccaggtctacatcctgtccaaggacgagggcggccggcacacgccgttcttcaacaactaccgtccgcagttctacttccgcaccaccgacgtgaccggtgtggtgacactgccggagggcaccgagatggtgatgcccggtgacaacaccaacatctcggtgaagttgatccagcccgtcgccatggacgaaggtctgcgtttcgcgatccgcgagggtggccgcaccgtgggcgccggccgggtcaccaagatcatcaagtag

SEQ ID NO: 28238 - DNA, 1191 bp, Mycobacterium tuberculosis
gtggccgaagcgtggtttgaaacggtagccatcgcgcagcaacgcgcgaagcggaggctgccgaaatcggtttactcgtccctgattgcggccagtgaaaagggaatcacggtcgccgacaatgtcgcagcattcagcgagctcgggttcgcgccgcacgtcatcggggcgacagataaacgtgacttgtcgacgaccgttatggggcaagaagtttcgttgccagtgattatttcgccgaccggtgttcaggcggtcgatcccggcggtgaagtcgccgtcgcgcgggccgcggccgcccggggtactgtgatgggattgtcctcgtttgccagcaagccgatcgaggaggtcattgccgccaaccccaagaccttcttccaggtctactggcagggcgggcgcgacgcgctcgctgaacgcgtcgaacgggcgcggcaggccggcgcggtcggcctggtcgtcaccaccgactggacgttctcgcacgggcgcgactggggcagccccaagatccccgaagagatgaacttgaagaccatcctgcggctatccccggaggcgatcacccggccgaggtggttgtggaagttcgccaagacgctacggccaccggacctacgggtgcccaaccagggccggcgcggcgagcccggcccaccgttcttcgcagcctacggcgaatggatggcaacacctccgccgacctgggaagatatcggctggctgcgcgaactgtggggcggaccgttcatgctcaagggcgtcatgcgggtcgacgatgccaaaagagctgtggatgccggggtttcggcgatctcggtatccaaccatggtggcaacaatttggatgggacgccagcatcgatccgggccctgcccgcggtctcggcggcggtcggcgatcaggtcgaagtgttgctcgacggcggcatccggcggggcagcgatgtcgtcaaggcggtggcgctgggcgcgcgcgcggtaatgattggtcgcgcttacctgtggggcttggccgccaacggccaagccggggtcgagaatgtactcgacatcctgcgcggtggtatcgactcggctctgatgggtctcgggcatgcctctgtccatgacctcagcccagccgacatcctcgttcccaccgggttcatccgcgacctgggtgtgccctcccgacgggacgtttag

SEQ ID NO: 28239 - DNA, 306 bp, Mycobacterium tuberculosis
gtggcgggacagaagatccgcatcaggctgaaggcctacgaccatgaggccattgacgcttcggcgcgcaagatcgtcgaaaccgtcgtccgcaccggtgccagcgtcgtagggccggtgccgctaccgactgagaagaacgtgtattgcgtcatccgctcaccgcataagtacaaggactcgcgggagcacttcgagatgcgcacacacaagcggttgatcgacatcatcgatcccacgccgaagaccgttgacgcgctcatgcgcatcgaccttccggccagcgtcgacgtcaacatccagtag

SEQ ID NO: 28240 - DNA, 654 bp, Mycobacterium tuberculosis
atggcacgaaagggcattctcggtaccaagctgggtatgacgcaggtattcgacgaaagcaacagagtagtaccggtgaccgtggtcaaggccgggcccaacgtggtaacccgcatccgcacgcccgaacgcgacggttatagcgccgtgcagctggcctatggcgagatcagcccacgcaaggtcaacaagccgctgacaggtcagtacaccgccgccggcgtcaacccacgccgatacctggcggagctgcggctggacgactcggatgccgcgaccgagtaccaggttgggcaagagttgaccgcggagatcttcgccgatggcagctacgtcgatgtgacgggtacctccaagggcaaaggtttcgccggcaccatgaagcggcacggcttccgcggtcagggcgccagtcacggtgcccaggcggtgcaccgccgtccgggctccatcggcggatgtgccacgccggcgcgggtgttcaagggcacccggatggccgggcggatgggcaatgaccgggtgaccgttcttaaccttttggtgcataaggtcgatgccgagaacggcgtgctgctgatcaagggtgcggttcctggccgcaccggtggactggtcatggtccgcagtgcgatcaaacgaggtgagaagtga

SEQ ID NO: 28241 - DNA, 672 bp, Mycobacterium tuberculosis
atggctgcgcaagagcagaagacactcaaaatcgacgtcaagacgccggcgggcaaggtcgacggcgctatcgagctgccggccgagctgttcgacgtcccggccaacatcgcgctgatgcaccaggtggtcaccgcccagcgggcggcggcacgccagggtacccactcgacgaagacgcgcggcgaggtcagtggcggtggccgcaagccctaccggcagaaggggaccggtcgtgcccggcagggctcgacgcgggcgccgcagttcaccggcggtggcgtggtacacggtcccaagccgcgcgactacagccagcgcacacccaagaagatgatcgccgcggcgctgcgcggggcgctgtccgaccgggcccgcaacgggcgtatccacgcgatcaccgagctagtggaaggtcaaaacccgtcgaccaagagcgccagggcatttctggccagcctgacagaacgtaaacaggtgctggtggtcatcgggcgcagcgacgaggccggcgcgaaaagcgtgcgcaatctgccgggcgtgcacatcctggcgccggaccagctcaacacctatgacgtgctgcgtgccgacgacgtggtgttcagcgttgaggcgctgaatgcctatatcgcggccaacaccacgacgtccgaggaggtttcggcctga

SEQ ID NO: 28242 - DNA, 303 bp, Mycobacterium tuberculosis
atggcgacgctcgctgacccccgcgacatcatcctggccccggtgatctcggagaaatcctatgggttgctggatgacaacgtgtacacgtttttggtgcgcccggattccaacaagacgcagatcaagatcgccgtcgagaagatttttgccgtcaaggtcgcatcggtgaacaccgcgaaccggcagggcaagcgtaaacgcacccggaccggatacggcaagcgcaagagcaccaagcgcgccatcgtcaccctggcgccgggcagcaggccgatcgacctgttcggggcaccggcctag

SEQ ID NO: 28243 - DNA, 843 bp, Mycobacterium tuberculosis
atggcaattcgcaagtacaagcccacgacgcctggtcgtcgcggcgccagcgtatctgatttcgccgagatcacccggtcaaccccggagaagtcgctggtgcgcccgctgcacggtcgcggtggacgcaacgcgcatggccggattaccacccggcacaaaggcggcggtcataagcgcgcttaccggatgatcgactttcgccgcaatgacaaagatggtgtcaacgccaaggtcgcgcacatcgagtacgacccgaaccgtaccgcacggattgcgttgctccactatctcgatggggagaagcgctacatcattgcacccaacggactttcgcaaggggatgtggtggaatccggcgctaacgccgacatcaagccgggcaacaacctgccattgcgcaacatcccggccggtaccttgatccacgccgtggagctccgcccgggaggtggcgctaagcttgcgcgctcggccgggtcgagcatccagctgctcggcaaggaggccagctacgcgtcgctgcgtatgcccagcggtgagatccgccgggtcgacgtccgctgccgcgcgaccgtcggcgaagtgggcaatgccgagcaggcaaacatcaactggggcaaggccggtcggatgcggtggaagggcaagcgcccgtcggtccggggcgtggtgatgaacccggtcgaccacccgcacggcggtggtgagggtaagacctccggcggccgtcacccggttagcccgtggggcaagcctgaggggcgtacccgcaatgcgaacaagtcgagcaacaagttcatcgtccgacgccggcgcaccggcaagaagcactcgcgttag

SEQ ID NO: 28244 - DNA, 282 bp, Mycobacterium tuberculosis
atgccacgcagcctgaagaagggcccgttcgtcgacgagcatctgctcaagaaggtcgatgtccagaacgagaagaacaccaagcaggtcatcaagacctggtcgcgtcggtcgaccatcattccggacttcatcggccatacctttgcggtgcacgacggccgcaagcacgtccccgtgttcgtcaccgaatcgatggtgggccacaaacttggtgagttcgcgccgacacgcaccttcaagggccacattaaagacgaccgaaagagcaagcggcgatga

SEQ ID NO: 28245 - DNA, 594 bp, Mycobacterium tuberculosis
atgactgcggctactaaggctaccgagtatccctcggcggtcgccaaggcccgatttgtgcgggtgtcgccaagaaaggcgcgccgggtgatcgatctggtgcgtggcaggtcggtgtcagacgcgctcgacatcctgcgctgggcgccgcaggccgccagcggtccggtggccaaagtgatcgccagtgcggcggccaacgcgcaaaacaacggcgggctggacccggcaaccttggtggtggccaccgtgtacgccgaccagggaccgaccgccaagcgcatccgtccgcgcgcccagggccgcgcgttccgcatccgccggcgcactagccacatcacggtggtggtggaaagccggccggccaaagatcaacggtcggcgaaatcgtcgcgggcccgccgcaccgaggccagcaaggccgccagcaaggtcggggctacggcgccggccaagaaagcggccgccaaagcgcccgccaagaaggcacccgccagttccggcgttaagaagacacccgcaaagaaagcgcccgccaagaaggcgcccgccaaggcttctgagacttctgcagcgaagggaggctcagactag

SEQ ID NO: 28246 - DNA, 825 bp, Mycobacterium tuberculosis
gtgggccaaaagatcaatccgcatggcttccggctgggcatcaccaccgactggaagtcgcgctggtatgccgacaagcagtatgccgagtacgtcaaggaggacgtggcgatccgccggctgctgtccagtggcctagagcgtgctgggatcgccgatgtagagatcgagcggacccgcgaccgggtccgggtggacattcacaccgcgcgtccgggcatcgtcattggtcggcgtgggaccgaggccgaccggattcgtgccgacctggaaaagctgaccggcaagcaggtccagctcaacatcctggaggtcaaaaacccggagtcgcaagcgcaattagtggcccagggggtagccgagcagttgagcaaccgggtggcgttccgccgcgcaatgcgcaaggcgatccagtcggcgatgcgtcagcccaacgtcaagggaatccgggtgcagtgctcgggccgcctcggcggcgcggaaatgagccgctcggagttctaccgcgagggccgcgtcccgctgcacaccttgcgggcagatatcgactacggcctatacgaggccaagaccaccttcggccggatcggtgtgaaggtgtggatctacaagggtgacatcgtgggcggcaaacgtgaattggctgccgccgcgccagcgggcgccgaccgtccgcgccgtgagcggccgtcgggcacgcgcccccgtcgcagcggtgcttcgggcaccacggcgaccggtaccgacgcgggtcgggccgcgggtggcgaagaggccgcgcctgacgccgcagcgcccgttgaagcgcagagcacggagagctga

SEQ ID NO: 28247 - DNA, 417 bp, Mycobacterium tuberculosis
atgttgattccccgtaaggttaaacatcgcaagcagcaccatcctcgccagcgcggcatcgccagcggcggcaccacggtgaacttcggcgactacggcattcaggcccttgagcacgcctatgtcaccaaccggcagatcgaatcggcgcgtatcgccatcaaccggcacatcaagcgtggcggcaaggtttggatcaacatcttccctgaccgcccgctgaccaagaagcccgccgaaacccgcatgggttcgggcaagggctcgccggagtggtgggtagccaacgttaagccgggccgggtgctgttcgagctcagttaccccaatgaaggtgtcgcccgggccgcgctcacccgagcgatccacaagctgccgatcaaggcacgcattattactcgagaggagcagttctga

SEQ ID NO: 28248 - DNA, 234 bp, Mycobacterium tuberculosis
atggcagtgggtgtctcgccgggcgaactgcgtgagctcaccgacgaggagctggccgagcggttgcgcgagtccaaggaagagttgttcaacttgcgtttccagatggcgaccggccagctcaacaataaccgccggctccgtacggtgcgtcaggaaatcgcgcgcatctacaccgtgctgcgcgaacgagaactgggtctggcgactgggcccgatggtaaggaatcgtga

SEQ ID NO: 28249 - DNA, 411 bp, Mycobacterium tuberculosis
gtgatggcagaggctaagaccggcgcgaaggcggcgcctagggtggctaaggccgccaaggcggcccccaagaaggccgcacccaacgacgctgaggccataggtgcggccaacgcggcaaacgttaaggggcccaagcacactccgcgtactccgaagccacgcggccgccgcaagacacgaatcggctatgtggtgagcgacaaaatgcagaagaccattgtggtggagctggaagaccgcatgcggcacccgctatacggcaagatcatccggaccactaagaaggtcaaggcacacgacgaagacagcgttgccggcattggcgaccgtgtctcgctgatggagacgcgtccgctgtcggcgaccaagcgctggcggctcgtcgagatcctcgagaaggctaagtaa

SEQ ID NO: 28250 - DNA, 2364 bp, Mycobacterium tuberculosis
atggcacccgaggccaccgaggcgttcaacggcaccatcgagctggatattcgtgattcggagccggattggggcccatacgcagcgccggtggcaccggagcactcaccaaacatcctgtatctggtctgggacgacgtcggcatcgcgacctgggactgctttggcggcctggtcgagatgcccgcgatgacgcgcgtcgccgagcgtggcgtgcgactgtcgcaatttcacaccaccgcactgtgctcgccgacccgggcgtcgctgctgaccggtcgcaacgccaccaccgtaggcatggctaccatcgaagagttcaccgacgggttccccaactgcaacgggcggatcccggctgacaccgcgttgctcccagaggtgctggccgaacatggctacaacacctactgtgtgggcaagtggcacctgacgccactcgaagaatccaatatggcgtcgacgaagcggcactggccgacctcgcgtgggttcgagcggttctacggattcctaggcggggagaccgaccagtggtatcccgacctggtatacgacaaccacccagtgagtcctcccggcacacccgagggtggctaccacctgtcaaaagacatcgccgacaagacgatcgagttcattcgtgatgccaaggtgatcgcgcccgacaagccgtggttcagctacgtgtgcccaggcgccgggcatgcgccgcaccacgtcttcaaggaatgggcggacagatacgccggccgattcgacatggggtatgagcgctatcgcgagatcgtgctggaaaggcaaaaggcgctagggatcgtgccacccgacaccgaactgtcgcccataaacccttatctggatgtgccggggccaaacggcgagacctggccgctgcaggacacggtgcggccgtgggactcgctgagcgatgaagaaaagaagctgttttgccggatggccgaggtgttcgccggctttctgagctacaccgacgcccagatcggacggatcctggactacctcgaggaatccggccagctggacaacaccatcatcgtggtgatctccgacaacggcgccagcggcgagggcggacccaacggatcggtcaacgaaggcaagttcttcaacggctacatcgacaccgtcgctgaaagcatgaagctcttcgaccacctcggtggcccgcagacctacaaccactaccccatcgggtgggcaatggccttcaacaccccctacaagctgttcaagcgctacgcctcgcatgaaggcggcattgccgacccggcaatcatctcctggcccaacggcattgccgcacacggtgaaatccgcgacaactacgtcaatgtcagcgacatcacgcccaccgtctacgacctgttgggcatgacaccgccggggaccgtcaaggggattccgcagaaaccgatggacggcgtgagcttcatagcggcccttgccgacccggccgccgacaccggcaagaccacccagttctacaccatgctgggcacccgcgggatctggcatgaaggttggttcgccaacaccattcacgcggccacgcccgccggctggtcgaatttcaacgctgaccgctgggaactgttccacatcgcagcagaccgcagccagtgccacgacctggccgccgagcatcccgacaaacttgaggagctcaaggcgctgtggttctccgaagccgccaagtacaacgggctgccgctggccgatctgaacctcctggaaacgatgactcggtcgcggccttacctggtcagcgaacgagccagctacgtctactatcccgactgcgctgacgtcggcatcggcgcggccgtagagattcgcgggcgctcgttcgccgtgctggccgatgtgaccatcgataccaccggcgccgagggcgtgctgttcaagcacggcggcgcccatggcgggcacgtgctgttcgtccgggacggacgcttgcactacgtctacaacttcctcggtgagcgccagcagctggtcagctcgtcgggtccggtcccgtcgggaagacatctactcggggttcgttatttgcggaccggaaccgtgcccaacagtcacacgccggtgggcgatcttgagctgttcttcgacgagaacctggtcggcgccctgaccaatgtgctgacccaccctggaacgttcgggttggccggcgccgctatcagcgttggccgcaacggcggttcggctgtgtccagccactacgaagcgccgttcgcgttcaccggcggtaccatcacccaggtcaccgtcgacgtgtcaggccgaccgttcgaagatgtggaatccgatcttgcgcttgctttttcgcgtgactga

SEQ ID NO: 28251 - DNA, 369 bp, Mycobacterium tuberculosis
gtgattcagcaggaatcgcggctgaaggtcgccgacaacaccggcgccaaggagatcttgtgcatccgggtgctgggcggttcgtcgcgacgctacgccggcatcggtgacgtcatcgtcgccaccgtgaaggacgccattccgggcggcaacgttaagcggggggatgtcgtcaaggccgtcgtggtgcgcacagtcaaggaacgccgacgtcccgacggcagctacatcaagttcgacgagaacgccgcggtgatcatcaagcccgacaacgacccgcgcggcacccgcatttttggaccggtcggtcgcgagctgcgggagaagcggtttatgaagatcatttcgctggccccggaggtgttgtag

SEQ ID NO: 28252 - DNA, 318 bp, Mycobacterium tuberculosis
atgaaggtccacaaaggcgacaccgtgctggtgatttcgggcaaagataaaggggccaagggcaaagtcttgcaggcgtatccggaccgcaaccgggtattggtcgagggtgtcaaccggatcaagaagcacaccgcgatctcgaccacccagcggggcgcgcgttcgggtgggatcgtcacccaggaagcgccgatccatgtctccaacgtgatggtggttgactccgacggcaagcccacccgaatcggctatcgggtcgacgaggagaccggcaagcgcgtccgtatctccaagcgcaacggcaaggacatttga

SEQ ID NO: 28253 - DNA, 564 bp, Mycobacterium tuberculosis
atgaccactgcacagaaggttcagccgcgcctcaaggagcgctaccgcagtgagattcgggatgcgctgcgcaagcagttcggctacggcaatgtcatgcagatcccgacggtgacgaaagtcgtcgtcaacatgggtgtcggcgaggccgcccgggacgccaagttgatcaacggggcggtcaacgatttggcgctgatcaccgggcagaagccggaagtccgccgggcgcgcaagtccatcgcgcagttcaaattgcgtgagggcatgccggtgggcgtccgagtcacgctgcgcggtgaccggatgtgggagttccttgaccggctcacgtcgatcgcactgccacgcatccgtgacttccgtgggctttcgcccaaacagttcgacggtgtgggcaactacaccttcgggctggccgagcaggcggtattccacgaggtcgacgtggacaagattgaccgggtccgtggcatggacatcaacgtcgtcacttccgcggcgaccgacgacgaaggccgagcgctgttgcgggccctcggctttcccttcaaggagaactga

SEQ ID NO: 28254 - DNA, 186 bp, Mycobacterium tuberculosis
atggcgaagaaggcactggtcaacaaggccgcaggcaaaccgaggtttgccgtgcgcgcctacacccgttgcagcaagtgcggccgcccgcgtgcggtctaccgcaagttcgggctgtgcaggatttgcctgcgcgagatggcgcacgcgggtgagttgcccggcgtgcagaagagcagctggtaa

SEQ ID NO: 28255 - DNA, 399 bp, Mycobacterium tuberculosis
atgacgatgacggacccgatcgcagactttttgacccgtctgcgtaacgccaactcggcgtatcacgacgaggtcagcttgccgcactccaagctcaaggccaacatcgcgcagattctcaagaacgaggggtacatcagcgacttccgaaccgaggacgctcgggtcggtaaatcgctggttatccagctcaagtacggccctagccgggagcgcagcatcgccgggttgcggcgggtgtccaagcccggcctgcgggtgtacgcgaaatccaccaatctgccgcgggtgctcggcggcctgggcgtggcgatcatctcgacctcctcgggcctgctgactgaccggcaggcagctagacagggcgtgggcggcgaagtcctcgcatatgtctggtga

SEQ ID NO: 28256 - DNA, 540 bp, Mycobacterium tuberculosis
atgtcgcgtattggtaagcagccgattccggtgcccgccggggtcgacgtcacgatcgagggacagagcatctcggttaaggggcccaagggcaccctaggactgacggtcgccgagccaatcaaagtggcacgcaatgacgacggcgctatcgtggtcacccgtcccgacgatgagcggcgtaatcgctccttacacgggctgtcccgtaccctggtgtccaacctggtcactggcgtgacgcaggggtacaccaccaagatggagatcttcggggttggctatcgggtgcagctcaagggctccaatctggagtttgcgctggggtacagccacccggtggtgatcgaggctcccgaaggaatcacgttcgccgtccaggcaccgacgaagttcaccgtttccgggatcgacaaacaaaaagtcggccagatcgccgccaatatccgccgtcttcgccgtcccgatccgtacaagggcaagggcgtgcgctacgagggcgagcagatccgccgcaaggtcggaaagacaggtaagtag

SEQ ID NO: 28257 - DNA, 369 bp, Mycobacterium tuberculosis
atggcgcaatcagtttccgcgactcgacgaatctcccgcctgcgccggcacacgcggctgcggaagaagctctcgggcaccgcggagcgcccgcggctggtggtgcatcggtccgcgcggcacatccacgtgcaactggtgaacgacctcaacggcaccaccgtggccgccgcttcgtcgatcgaggccgatgtgcgcggcgtgccgggtgacaaaaaggcccgcagtgtgcgggtcggccagttgatcgccgagcgggccaaagccgccggcatcgacaccgtggtattcgaccgcggcgggtatacctacggcggacgaatcgccgcgctggccgacgccgcacgcgagaacggattgagtttctga

SEQ ID NO: 28258 - DNA, 663 bp, Mycobacterium tuberculosis
atggcggagcagccggccggacaggcaggcactaccgacaaccgtgacgcacggggtgatcgggagggccggcgccgcgacagcggccgcggcagtcgtgaacgggatggcgagaagagcaactatctagagcgggtcgtcgccatcaaccgcgtctccaaggtggtcaagggtggtcggcgcttcagcttcaccgctttggtcatcgtgggcgacggtaacgggatggtcggtgtcggctacggcaaggccaaggaagtaccggccgcgatcgccaagggcgtcgaagaggcgcgcaaaagcttcttccgggtaccgctgatcggcggcaccatcacgcacccggtgcagggcgaggcggccgccggtgtggtgttgctacggccggccagcccgggtaccggtgtgatcgccggtggtgcggcccgcgcggtgctggaatgtgcgggggtgcacgacatcttggccaagtcgctgggcagtgacaacgcgatcaatgtggtgcacgccaccgtggccgcgctcaagctgctgcagcgtccggaggaggtggcggcgcgccgcggtttgccgatagaggacgtcgccccggccgggatgctgaaggcgcgtcggaaaagtgaagcgctggccgccagcgttttgccggatagaacgatatag

SEQ ID NO: 28259 - DNA, 198 bp, Mycobacterium tuberculosis
atgtcacagctgaagatcacccaggtgcgcagcaccatcggagcacgctggaagcagcgcgagagcctgcgcactctgggcttacgaaggattcgtcattcggtgatccgcgaagacaacgcagcgactcgcggactgatcgcggtggtgcgtcacctcgtggaggttgagcccgcgcagaccggagggaagacatag

SEQ ID NO: 28260 - DNA, 441 bp, Mycobacterium tuberculosis
gtgacgctcaagctgcatgacctgcgccccgcgcgggggtccaagatcgcccgcacccgagtcggtcgaggtgacggctccaagggcaagacggccggccgtggcaccaagggcaccagggcccgcaagcaggtgccggtgaccttcgagggcgggcagatgccgatccacatgcggctgcccaagctcaagggcttccgtaaccggtttcgcaccgaatacgaaattgtcaacgtcggcgacatcaaccggctgtttccgcagggtggtgccgtcggcgtggacgacctggtggccaagggggccgtccgcaagaacgctctggtcaaggtgttgggtgacggcaagctgaccgccaaggtcgacgtgtccgcgcacaagttcagcggcagcgcgcgcgcgaagatcaccgcagcgggcggttcagccaccgagctctag

SEQ ID NO: 28261 - DNA, 1326 bp, Mycobacterium tuberculosis
gtgctttcggctttcatctcgtcgctgcgaacagtcgacttgagacgaaagatcctcttcacgctgggcatcgtcattctctaccgtgtcggtgccgcgctgccgtcccccggtgtcaattttccgaacgtgcagcagtgcatcaaagaagccagcgcgggcgaagccggacagatctattccctgatcaacctgttctccggcggtgcgttattaaagctcacggtgttcgcggtgggggtgatgccctacatcaccgccagcatcatcgtgcagctgctcaccgtggtcatcccgaggttcgaggaactccggaaggaaggccaggcgggtcagtcgaagatgacccagtacacccgttacctagcgatcgcgttggctatccttcaagccaccagcatcgtggcgttggctgccaacggcgggttgctacaaggttgctcgctggacatcatcgccgaccagagcattttcacactggtcgtcatcgtgctcgtgatgacgggcggcgccgcgttggtgatgtggatgggcgagttgatcaccgaacgcggcatcggcaacggcatgtcgctgctgatcttcgttggcatcgctgcccgcatcccggccgaaggtcaaagcatcctggaaagccgcggtggagtcgtcttcaccgcggtctgcgcggccgcgttgatcatcatcgtcggtgtggtgttcgtcgaacagggtcagcgccggattccagtgcaatacgccaagcgcatggtgggccggcggatgtatggcgggacttcgacttatctgccgctcaaggtcaaccaggccggcgttatcccggttatcttcgcgtcgtcgctgatctacattccgcacctgatcacccagctgattcgcagcggcagcggtgtcgtgggaaacagctggtgggacaaattcgtcggcacgtacctgtccgacccgagcaacctggtctacatcggcatctacttcggcctcatcatcttcttcacctacttctacgtgtcgatcaccttcaaccccgacgaacgtgccgacgagatgaagaagttcggcggcttcattccgggaattcggccgggccgtccgaccgcagactatctgcgctatgtgctgagccggattaccttgccgggctcgatttacctcggcgtgatcgccgtgctgcccaacctgttcctccagatcggcgccggtggaaccgtgcagaacctgccctttgggggtaccgcggtgctgatcatgatcggtgtcggtttggatacggtcaagcagatcgagagtcagctcatgcagcgcaactacgaagggttcctcaagtga

SEQ ID NO: 28262 - DNA, 546 bp, Mycobacterium tuberculosis
gtgagagttttgttgctgggaccgcccggggcgggcaaggggacgcaggcggtgaagctggccgagaagctcgggatcccgcagatctccaccggcgaactcttccggcgcaacatcgaagagggcaccaagctcggcgtggaagccaaacgctacttggatgccggtgacttggtgccgtccgacttgaccaatgaactcgtcgacgaccggctgaacaatccggacgcggccaacggattcatcttggatggctatccacgctcggtcgagcaggccaaggcgcttcacgagatgctcgaacgccgggggaccgacatcgacgcggtgctggagtttcgtgtgtccgaggaggtgttgttggagcgactcaaggggcgtggccgcgccgacgacaccgacgacgtcatcctcaaccggatgaaggtctaccgcgacgagaccgcgccgctgctggagtactaccgcgaccaattgaagaccgtcgacgccgtcggcaccatggacgaggtgttcgcccgtgcgttgcgggctctgggaaagtag

SEQ ID NO: 28263 - DNA, 498 bp, Mycobacterium tuberculosis
gtggcctcagataatcgcgaccccatcgccgcagcacgggccaactgggagcgttccgggtggggtgatgtgtcgctaggcatggtggcggtgacgtcggtgatgcgtgcgcatcagattctgctggcccgcgtcgagacggcgctgcgcccctatgacctgagtttctcccgcttcgagctgctgcggctgctggcgttcagccgtatcggagcgctaccgatcaccaaagcgtcggaccgattgcaggttcacgtgaccagcgtcacccacgcgatccgccggctggaggccgatggattggtgcggcgggttccgcaccccaccgacgggcggaccacactggtgcagatcaccgagctgggtcgctccacggtcgaggacgccaccgtcaccctcaacgagcaggtgttcgccaacgttgggatgggcgccgaggaatcgcaggcgctggtgtcggccgtcgaaacgttgcggcgcaacgccggcgacttttga

SEQ ID NO: 28264 - DNA, 939 bp, Mycobacterium tuberculosis
ttgccaattcggccaaacgtccatggcatgatggcccgcatgccagagttgagccgccgcgccgtgctcggtctcggcgccggcacggtccttggcgctacctcagcatatgcgatcgacatgctgttgcagccccgaacttcacatgccgcaccggcggcggcgattggcacaaacgttccattggcgccgacaccagcactcgatccggcccccccggctcaggcggcgccgacgatgtccaccggctcgttcgtgtcggcagcgcgcgccgggaagatgaccaactgggccatcgcccgcccacccggccagacccaggcgttgcggcccgtgatcgcactgcacggcttgggcggtagcgcatcggccgtgatggacggcggcgtcgagcagggcctggcccaggccgtcaacgccgggttgccaccgttcgcggtggtctccgtggacggaggcagcagctactggcaccagcgggcttctggcgaggacgcgggggcaatggtgctcaacgagctcattccgctattggacacccagcggctggacacctcccgggtagcgtttctgggctggtcgatgggcggctacggcgctttgctgctcggcagccgccttggaccggcacgcaccgcagcgatctgcgcggtcagcccggcactgtggctatccgccggttccgtcgcacccggctccttcgacggacccgacgactggtcggcgaactcggttttcggactccccgcattggggtccatcccgatccgggtcgattgcggcaacagcgatccgttttatgccgcaaccaagcagttcgtggcgcagctgccccacccgccggcgggcggcttctcccctggcgggcacaacggtgggttctggagcgcacagctacccgccgagctgacctggttcgcgccgctgctcacaggttaa

SEQ ID NO: 28265 - DNA, 1419 bp, Mycobacterium tuberculosis
gtgagcattcccaacgtgctggccacccgatacgccagcgccgagatggtcgcgatctggtcgccggaggccaaggtggtctcggagcggcggttatggctggccgtattgcgggcacaggcagagctgggggtagcggttgccgattcggtgctcgccgactacgaacgtgtggtcgacgatgtggacttggcctcgatctcagcccgggagcgggtgctgcgccacgatgtcaaggcccgcatcgaggaattcaacgcattggccggtcatgagcacgtgcacaaggggatgaccagccgcgacctgaccgagaacgtggagcaactgcagattcggcggtcgctggaagtgattttcgcccatggggtggcggcggtggcgcggctggccgagcgggcggtgagctaccgtgacctgatcatggccgggcgcagccacaacgtggccgctcaggccaccaccttgggcaagcggttcgcctcggcggcccaagagatgatgatcgcgttgaggcggttgagggagttgatcgaccgctaccccctgcgtggcatcaagggcccgatgggcaccggtcaggacatgctcgatctgctgggcggtgaccgtgcggcgctggccgatctcgagcggcgcgtcgccgacttcttgggctttgcaactgttttcaacagcgtggggcaggtgtatccgcgttcattggaccacgacgtggtttcggctctggtgcagctcggcgcggggccgtcatcactggcacacacgattcgattgatggccggccacgagctcgccaccgagggtttcgcgccgggtcaggtcggttcgtcggcgatgccgcacaagatgaacacccgcagctgcgaacgggtcaacgggctgcaggttgtgctacgcggctatgcatccatggtggccgagttagccggtgcacagtggaacgagggtgatgtgttttgctccgtggtgcgccgggttgcgttgccggacagcttctttgccgtcgacgggcagatcgagacgtttttgacggtgctggacgagttcggcgcctacccggcggtgatcggccgcgagttggatcgttatctgccgttcctggccaccactaaggtgctaatggcggccgtgcgcgcggggatgggtcgcgagtccgcgcaccggttgatctccgagcacgcggtggcgacggcgctggccatgcgagaacacggcgcggagcccgacctgctggaccggttggccgccgatccgcggctgacgctgggacgagacgctttggaggccgcgctggccgacaagaaggcatttgccggtgccgcgggtgaccaggtcgatgatgtggtcgcgatggtggacgcgctggtgagccgttacccggacgcggctaaatacacgccgggtgcaattctttag

SEQ ID NO: 28266 - DNA, 939 bp, Mycobacterium tuberculosis
ctaattacccggttcatcgccgatcatcagggccaccgcgagggccccgatggtttgcggtggggtgtcgagtcgatctgcacacagctgaccgagctgggtgtgccgatcgccccatcgacctactacgaccacatcaaccgggagcccagccgccgcgagctgcgcgatggcgaactcaaggagcacatcagccgcgtccacgccgccaactacggtgtttacggtgcccgcaaagtgtggctaaccctgaaccgtgagggcatcgaggtggccagatgcaccgtcgaacggctgatgaccaaactcggcctgtccgggaccacccgcggcaaagcccgcaggaccacgatcgctgatccggccacagcccgtcccgccgatctcgtccagcgccgcttcggaccaccagcacctaaccggctgtgggtagcagacctcacctatgtgtcgacctgggcagggttcgcctacgtggcctttgtcaccgacgcctacgctcgcaggatcctgggctggcgggtcgcttccacgatggccacctccatggtcctcgacgcgatcgagcaagccatctggacccgccaacaagaaggcgtactcgacctgaaagacgttatccaccatacggataggggatctcagtacacatcgatccggttcagcgagcggctcgccgaggcaggcatccaaccgtcggtcggagcggtcggaagctcctatgacaatgcactagccgagacgatcaacggcctatacaagaccgagctgatcaaacccggcaagccctggcggtccatcgaggatgtcgagttggccaccgcgcgctgggtcgactggttcaaccatcgccgcctctaccagtactgcggcgacgtcccgccggtcgaactcgaggctgcctactacgctcaacgccagagaccagccgccggctga

SEQ ID NO: 28267 - DNA, 1008 bp, Mycobacterium tuberculosis
gtggctgtgcctgctgtctctccgcagccgattctggcgccgttgactccggccgcgatcttcctggtcgccaccatcggcgccgacggcgaggcgacggtgcacgacgcactgtcgaagatctccggcctggtgcgtgcgatcggcttccgtgacccgaccaaacacttgtccgtggtcgtctcgatcgggtccgacgcctgggaccgcttgttcgccggacctcgacccaccgagctgcatccgttcgtcgagctgaccggaccacggcataccgccccggcaactcccggcgatctgttgttccacatccgggccgagaccatggacgtgtgcttcgagttggctggccgcattctcaagtcgatgggcgatgcggtgaccgttgtcgacgaagtgcacggcttccggtttttcgacaaccgtgatctgctgggctttgtcgatggcaccgaaaacccaagtggcccaatcgccatcaaggccaccacgatcggtgacgaggatcgaaatttcgccggctcgtgttatgtgcacgtgcagaagtatgtgcacgatatggcctcgtgggaatccctctcggtcaccgagcaggagcgtgtgatcggccggaccaagctcgacgacatcgaactcgacgacaacgcgaagccagccaattcacacgtagcgctcaacgtcatcaccgacgacgacggcaccgagcgcaagatcgtgcgacacaacatgccgttcggcgaagtcggcaagggcgagtacggcacttacttcatcggatattcgcgcacgccaacggtgaccgagcagatgctgcgcaacatgtttctcggcgatccggcaggcaacaccgatcgagtgcttgacttttccaccgcggtgaccggcggactgttcttctcacccaccatcgactttctcgaccatccaccgcccctaccgcaggcggcgacgccaactctggcagccgggtcgctatcgatcggcagcttgaaaggaagcccccgatga

SEQ ID NO: 28268 - DNA, 2265 bp, Mycobacterium tuberculosis
gtgctggacaccgtcgaacacgccgcgaccacacccgaccaaccacaaccgtatggtgagctgggcctcaaagacgacgagtaccggcggattcgccagatcctgggccgccggcccaccgacaccgagctggccatgtactcggtgatgtggagcgaacactgttcgtacaagtcctccaaggtgcacctgcgctacttcggtgagaccacctccgacgagatgcgcgcggccatgctggccggcatcggcgagaacgccggcgtcgtcgacatcggcgacggctgggcggtcaccttcaaggtggagtcacacaaccacccgtcctacgtcgagccctaccagggcgcggccaccggggtgggcggcatcgtccgcgacatcatggccatgggcgcccgaccggtcgccgtgatggaccagcttcggttcggcgccgccgacgcccccgatacccgccgcgtgctcgacggcgtggtccgcggcatcggcggatacggcaactccctgggcctgcccaacattggcggagagaccgtcttcgacccgtgctacgccggcaaccccttagtgaacgcgttgtgtgtcggcgtattacggcaggaggacctgcatttggcgttcgcctccggcgccggcaacaagatcatcctgtttggcgcgcgcaccgggctcgacggtatcggcggggtgtcggtgctggcgtcggacaccttcgatgccgagggatcccgcaagaagctgccctcggtgcaggtcggcgacccgttcatggagaaggtgctcatcgaatgctgtctcgagctctacgcgggcggcctggtgatcggcatccaagacctgggcggagccggattatcttgtgccacatcggagttagcatccgccggtgatggcggaatgacgatccagctggacagcgtcccgctgcgggccaaggagatgacgcccgccgaggtgctctgcagcgaatcgcaggagcggatgtgcgcggtggtctccccgaagaacgtcgacgcattcctggcggtgtgccgcaagtgggaggtgctggcgacggtgatcggcgaggtcaccgacggcgaccggctgcagatcacctggcacggcgagacggtggtcgacgtgccgccgcgcaccgtagctcacgaaggtccggtatatcagcgcccggtcgcccgccccgatacgcaggacgcgctgaacgccgaccgctcggccaagctgtcacggccggtcaccggcgacgagctgcgcgcgactttgcttgcgttacttggcagcccgcacctgtgcagccgcgcgttcatcaccgagcagtacgaccgctatgtgcgcggcaacacggtgctcgccgagcacgccgacggcggcatgctgcgcatcgacgagtcgaccggccggggcatcgcggtatcgaccgacgcgtcgggacgctacacgctgctggatccctacgctggcgcgcaactcgcgttggccgaggcgtaccgcaacgtcgccgtcaccggcgccaccccggtcgcggtgaccaactgcctgaacttcggttcccccgaggaccccggcgtgatgtggcagttcacgcaggcggtccgcggtctggccgatggctgtgcggacctcgggattccggtgaccggtggcaacgtgagtttctacaaccaaaccggttcggcggcaatcctgcccacgccggtggtcggggtgctcggcgtcatcgacgatgtgcgtcggcgcatccctaccggcctgggcgccgagcccggggaaacgttgatgctgttgggcgacacccgcgacgagttcgacggttccgtgtgggcgcaggtgaccgcagaccacctgggtggattgccgccggtagtcgatctggcgcgggagaagctgctggccgcggtgctgagctcggcgtcgcgggacgggctagtgtccgcggcgcacgatctgtccgagggtgggctggcccaagccatcgtggaatcggcgttagcgggtgaaaccggttgccgcatagtgcttcccgaaggggctgacccgtttgtgctgctgttctccgagtcggcgggtcgggtgctggtcgcggtgccacgcaccgaggagagccggtttcgcgggatgtgtgaggcgcggggacttcccgcggtccgcatcggcgtcgtcgatcaaggttcggacgcggttgaggtgcagggcttgttcgcggtgtcgttggccgaactgcgtgcgacatccgaggcggtgttgccgcgatacttcggatga

SEQ ID NO: 28269 - DNA, 957 bp, Mycobacterium tuberculosis
gtgcatagacttagggccgcggagcatccgcggccggattacgttctcttacatatcagcgacactcatctcatcgggggggatcgtcggctctacggggcggtggacgccgacgaccggctgggcgaactgctcgaacagttgaaccaatccggccttcgtcccgatgcgatcgtcttcaccggcgatttggccgataagggcgaaccggcggcataccgcaagctccgaggcctggtcgagccgttcgcggcgcagttgggcgccgagctcgtctgggtgatgggtaaccacgacgaccgggccgaactacgcaaattcttgctggacgaagcgccatcgatggcgccgctagaccgggtgtgcatgatcgacggtctgcgcatcatcgtgttggatacctcggtacccggacatcatcacggcgaaatccgcgcgtcccaattgggttggcttgctgaagagttggccacgccagcgccggacggcaccattttggcgttgcatcatccgccgattccgagtgttttggatatggccgtcacggtggagctgcgcgaccaggctgcgcttgggcgagtgctgcggggcactgacgttcgcgccattttggccgggcacctgcactactcgacgaatgccaccttcgtcgggatcccagtgtcggttgcctcggcgacttgctacacccaggacctgaccgtcgctgctggaggaacgcgtggcagagacggcgcccaaggttgcaacctggtgcacgtctatccggacaccgtcgtgcattcggtgattccgctgggcggcggagaaacggtcggcacctttgtctcacccgggcaggcgcgacgcaaaatcgccgagagcggcattttcatcgaaccgtcgcgtcgcgattcgctattcaagcaccctccgatggtgctgacgtcctcggcaccgcgaagtcccgtcgactga

SEQ ID NO: 28270 - DNA, 870 bp, Mycobacterium tuberculosis
gtggtggtcacgcttgacggtgagatcctgcagccgggtatgccgctgctgcacgccgatgatcttgccgctgtgcggggggatggcgttttcgagacactgctggtgcgcgacggccgagcctgtctggttgaagcgcacctgcagcggctgacccaatcagccaggttgatggaccttcccgaaccggatctccccaggtggcgccgcgcggtcgaggtggcaacgcagcggtgggtggctagcaccgctgacgagggcgcgctgcgcttgatctacagtcgcggtcgggagggcggctcggcgccgacggcctatgtcatggtcagtccggtcccggcgcgagttatcggggcccgccgcgatggtgtgtcggcgatcacgctggaccgcggtttgccggctgacggtggcgacgccatgccgtggctgatagccagcgccaaaacactgtcctatgcggtgaacatggccgtcctgcgtcatgccgcccggcagggcgccggcgacgtcatcttcgtcagcacggacggctacgtcctggaaggccctcgctcgacggtggtgatcgccaccgacggtgaccaagggggcgggaacccctgcttgctgacgccgcctccgtggtatccaatcctgcggggaaccacgcaacaagcgctcttcgaagtggcccgcgcgaaaggctacgactgcgactaccgtgccctacgcgtcgccgatctcttcgattcccaaggtatttggttggtatcgagcatgactctggccgcccgcgtacacaccctggacgggcggcgattaccccgcaccccgatcgctgaggtgtttgccgaattggtggacgccgctattgtcagcgaccggtga

SEQ ID NO: 28271 - DNA, 777 bp, Mycobacterium tuberculosis
gtggccaagcggttggacctcacggacgtcaacatctactacgggtcatttcatgcggtcgctgatgtgtcgctggcgattctgccccgcagcgtcacggcgttcatcggtccctcgggctgcggcaagacgacggtgctgcgcaccttgaaccggatgcatgaggtcatccccggagctcgagtcgagggtgccgtactgctcgatgatcaagatatctacgcccccggtatcgacccggtcggtgtccgccgggcaatcgggatggtgtttcagcggccgaatccattccccgccatgtcgattcgcaacaatgtggttgccggcctgaagctgcagggtgtgcgcaatcgcaaggtgctcgacgatacggccgaatcctcgctgcgcggcgcaaacctgtgggacgaggtcaaggatcgactggataaacccggcggcggattgtctggggggcagcagcagcggttgtgcatcgcacgggcaatcgccgtgcaacccgacgtgttgctgatggacgagccctgctcctcgctggacccaatctccaccatggccatcgaagacctgatcagcgagctcaagcagcagtacaccatcgtcatcgtcacccataacatgcagcaggctgcccgggtgagtgatcagacggcattcttcaacctggaagcggtgggaaagccggggcggctggtagagatcgccagcaccgagaaaatcttctccaacccgaaccagaaggccaccgaggactacatctccgggcgcttcggctag

SEQ ID NO: 28272 - DNA, 2055 bp, Mycobacterium tuberculosis
atgagtgacggcgagagcgccgcgccgtgggcacggctctccgagtcagcattccccgatggtgttgaccgatggatcacggtaccgcccgccacatgggtggcagcccagggtccgcgggacacccagaatgtcggctgtcatgccaccggcgccgttagtgtggccgatctgatcgccaggctcggccccgcttttcctgacctccccacgcaccgccatgtcgcccccgaacccgagccatccggccgcggcccgaaggtccacgacgacgccgacgaccagcaggacaccgaggctatcgccatcccggcccactcgctcgagttcctctcggagcttcccgacctccgggcagccaactatccgcgcgccgaccacgcccgccgtgaacccgagctacccggcaagcagctaaccggatcggctcgagtgcggccattgcggatccgccgaacgtcgcccgcgcccgccaagccagcgccgaactccggccggcgcccgatggtgctggccgcgcgctcgctggcggctctgtttgccgctctggcgttggcgctgaccggcggggcatggcagtggagcgcgtcgaagaacagccggctgaacatggtaagcgcgctcgacccgcattcgggcgacatcgtcaaccccagcgggcagcatggcgacgagaacttcttgctcgtcggtatggactctcgtgccggggcgaacgccaatatcggcgccggcgacgccgaggacgccggcggcgcacgttcggacaccgtcatgctggtcaacattccggccagccgcgagcgggtcgtcgcggtgtcgttcccccgcgacctggcgatcactccaatccaatgcgaggcgtggaaccccgagaccggtaagtacggacccatctacgacgagaagacgggaacgatgggtcccagactggtgtacacggagaccaagctgaactcggcattctccttcggcgggcctaagtgtctagtgaaggtcattcagaaactgtcgggcttgagcatcaaccggttcatcgcgattgacttcgtcggtttcgcgcggatggtcgaggccctcggcggcgtcgaggtatgcagcaccaccccgttgcgggactacgaactgggcacggtgctggagcacgccggacgccaggtcattgacgggccgaccgcgctgaactatgtgcgcgctcgccaggtcaccaccgagagcaatggcgactacgggcgcatcaaacgccagcagttgtttttgtcgtcgctgctgcgttcgatgatctcgacggacaccttgttcaacctcagcaggctcaacaacgtcgtcaacatgttcatcggtaacagctacgtggacaacgtcaagaccaaagacctggtcgaactcggtcgatcgttgcagcatatggcggccgggcacgtcacgttcgtgaccgttccgaccggtataaccgaccagaacggcgacgagcccccgcgtacctccgacatgaaggcgcttttcaccgccatcatcgacgacgatccgctgcccctggaaaacgatcacaacgcccagcgtctgggcaacacgccgtcgaccccgccgaccaccaccaagaaggcgccgcaggcgggtctgaccaacgagattcagcaccagcaggttacgacgacctcgccaaaagaggtcacagtgcaggtctctaactcgaccggccaggccggtttggccaccaccgccaccgatcagctcaagcggaacggcttcaacgtgatggctccggacgactacccgagttcgctgctggccaccacagtgtttttttcgcccggcaacgaacaggctgccgccaccgtggccgccgtgttcggccagtcaaagatcgagcgggtgaccgggatcggccaactggtccaggtggtgctgggccaagacttcagcgcggtgcgcgctcccctgccgagtggctccaccgtcagcgtgcagataagccgcaactcctccagcccaccgaccaagctgcccgaggacctgacggtcaccaacgccgccgacaccacctgcgagtag

SEQ ID NO: 28273 - DNA, 1170 bp, Mycobacterium tuberculosis
atgagcaggaggcgggcaatccaacccagcccggcgttgcgcatcggcccgatcgagctcgccagcccggttgtgctggctccgatggccggtgtgacgaacgtcgcattccgggcgctgtgtcgtcagctggaacagtcgaaggtcggcacggtcagcggactgtatgtctgcgagatggtgaccgcacgtgcgctcatcgagcggcacccggtcaccatgcacatgacaacgttctccgcggacgaatcaccacgctcgctgcagctgtacaccgtcgatccggacaccacgtatgcggccgctcggatgatcgctggcgaagggttagccgatcacatcgacatgaatttcggctgcccagtgcccaaagtcaccaagcgcggcggcggggcggcgctaccgttcaaacggcggctattcggtcagatcgtggccgcggctgtgcgcgccaccgaaggcaccgatataccggtgacggtcaagtttcgcattggcatcgatgacgcccaccacacacatctggatgccggccgcatcgctgaggccgaaggagccgctgcggtcgcgctgcacgcccgtaccgcggcacaacgctattccggcaccgccgactgggaacagatcgcccggctcaagcagcatgtccggacgattccggtgctcggcaacggcgacatctacgatgccggcgacgcactggccatgatgtccaccaccggctgtgacggcgtggtcatcggccgtggctgcctgggccgtccctggctatttgccgagttgtccgcggctttcaccggcagcccggcccccaccccacccacgctcggcgaagtcgccgacatcatccgccgtcacggcaccttgctggccgcacacttcggcgaggacaagggcatgcgcgatatccgcaagcacatcgcctggtatctccatggcttcccggcgggctccgcgctccggcgggcgttagcaatggtcaagacgttcgacgagctcgactgcctgctggaccggttggacggcacggtaccgttcccggactccgcgactggcgcccggggccggcagggttcccccgcccgggtggcccttcccgacggctggctaaccgaccccgacgactgccgagtgccggaaggggcggacgccatggggtcgggtggctga

SEQ ID NO: 28274 - DNA, 1029 bp, Mycobacterium tuberculosis
atggatcagatcggggctgacctcgctgaggccgtcgagcgtcacctcaccgaatacggagtgcgggtgctcggtggcctatcagcattgaactccgcgcatcccgaatcactagaccttgagatcgacgctcaccccctcacgatcactgccctctaccttcctcacctgtcggcaacggcagcactgcaggcctgggataccgccggcgctggttcgccgctgcttgtggtgggcccgcgtctgcatccgtcgagcgctgaaacgctgcgggctcgcggactctggtacatcgacggagctgggaacgcttatttgcggcaccagggtggcctgctcatcgacgtgcgcggccgacggtcagctgtgtccgcacaaccgggcaccctcggtgacggactgcacagcgatggaccgcgtaacccgtttacccccaagcgcgcgcaggttgtctgcgtactgcttgacgcaccgcaactggtcgacgcgccgctgcgtgcgatcgccgcgagcgccggcgtctcggtcggtatggccaaggagacgatggatacgttgcgcactaccggcttcttcgaacacctcggctcccgccgcaggctggtgcgcaccgatgagctgctggacctgtgggcggctgcctatccggggggtctgggccgggccaacaaactcctggtcgccagtggtgatatccacacgtggtccgcacccgacggactcgcagtggcggtcagcggggaacaggccctgcccgacgaaatccgcaatcccgaatcactgatgctctacgtcgacaccccagcgcccgggctacccgccgacctgcttatacacaaccgctggcaccgcgacccacacggcagcatcgtgatccgaaagctattctggcgcaacctacctgacgagcaaccggggttggctcccacggccttgatctatgccgacctccttgcctcgcgcgagccgcgccaggtcgaagtcgcccacctcatgagaaggcaggatgagcgactcgcccgattatga

SEQ ID NO: 28275 - DNA, 771 bp, Mycobacterium tuberculosis
gtgcgtctgatcgggcggctccgtctgctcatggtggggctggtcgtcatctgcggggcttgcgcatgtgaccgcgtgtcggccggccgttggtccgagtcgccgagtgcgacctcgtggcccgtccggccggtaaacaccacaacgccatccggtcctgtgccgccagtcagcgaggcggcgcgggcagccgggttggtcgatgttcgcggtgttgttcccgatgccgccatcgacctgcgctacgcgacggcgaacaatttcaccggcacacagctgtacccgcccggggcaagatgcctggtgcacgagtccatggccgagggtctcgcggccgccgcggcggtgctgcgcccacacgggcaggtgctggtcttctgggactgctatcggccccacgacgttcaggtcaggatgttcgatgtggtccccaacccggcctgggtggcgcggccgggcaagtacgcgcatagccatgaggcggggcgttcggtcgatgtgacgtttgccagcgctcagcggcagtgcccatcagtgcggcgatccggcgaattgtgcctggccgacatgggcaccgacttcgacgacttttcttcgcgggcgacagcgtttgcaacgcagggcgtcagtgctgaggcccaggccaaccgtgcccacctgcgagccgccatgcaggccggggggttgacggtgtactccggtgagtggtggcatttcgacggccccggcgccggcgtcgatcgcccgattctcgaagtgccagttgactga

SEQ ID NO: 28276 - DNA, 1278 bp, Mycobacterium tuberculosis
gtgcccagctacggcaacctcggacgtttgggcggtcgccatgagtacggtgtcctagtggcaatgaccagctcggcggaactggaccgggttcgttgggcgcaccagttgcgctcctaccgaattgcttcggtattgcggatcggtgtcgtggggctcatggtcgccgcgatggtcgttggaaccagccggtccgaatggccacagcaaatcgtgttgatcggcgtctacgcggtcgctgcattgtgggctctgctgttagcgtattcggcgtcccggcgattcttcgctttgcgacgctttcgcagtatgggccggttggagccatttgctttcaccgccgtcgacgttttgatattgacgggctttcagctgctgtccaccgacgggatctatccgctgctgatcatgatcctgctgccggtcctggtgggccttgacgtgtcgacgcgacgggcggcggtggtgctggcctgtacgctagtcggattcgcagtcgcggtgctgggagaccccgtgatgctgcgcgcgattggatggcccgagacaatatttcggttcgcgctctatgcgttcctgtgcgccacggccttgatggtggttcgcatcgaggagcggcatacccgttcggttgccggcctgagtgcgttgcgggcggaactgcttgcccagacgatgacggcctcggaggtgctgcagcggcggattgcggaagccattcacgatggaccgctgcaagacgtgctggccgcgcgtcaggagctcatcgagttggatgccgtaacccccggcgacgagcgcgtcggacgcgcgttggccggactgcagagcgcgtcggagcggctgcggcaggccaccttcgagctgcatccggcagtgcttgagcaagttgggttggggccggcggtaaaacagttggcggcctctaccgctcagcgttcgggtatcaagatctccaccgatattgattacccaatacgtagtgggatcgaccccatcgttttcggtgtggttcgcgaactgctgtccaacgtcgtgcggcattccggagctaccaccgcctcggtcaggctcggaatcaccgacgaaaaatgcgttttggatgtggccgacgatggcgtgggggtcaccggtgacactatggcgcgccgcctgggtgagggacacatcggtctggcttcgcatcgggctcgggtggatgccgccggcggagttttggttttcctggccacccccagggggacccatgtctgcgtggaactaccactgaaacggtga

SEQ ID NO: 28277 - DNA, 1119 bp, Mycobacterium tuberculosis
gtgaggtcgcggcagacccgcgaccggtaccgcctcctcccggagggatatcaagtcactcctggccggaatcgccacccgggcaccatggttggcaataccccggtgctttggatacctgagctgtcggggacctcagaccctgaccgtggattttgggccaagctagaaggattcaatcccgggggtatgaaagaccgccccgcgctgtacatggtcgaatgcgcgcgcgcccggggcgatatcgcgcccggtgccgcgatagtcgaatcaaccggtggcactctgggattgggcctagccctcgctggtaaggtgtaccggcacccggtcaccctggtcaccgacccggggctggaacccatcatcgcgcgcatgctgaccgcctacggcgccggcgtcgatatggtgacgcagccgcacccggtcggcggatggcaacaggcgcgcaaggaccgggttgcgcagctgatggccgaataccccggcgcgtggaatccgaaccagtacggcaaccccgacaacgtcggcgcctaccggtcgttggcgctggagctggtcgctcagcttggccggatcgatgtcctggtgtgctcggtggggacgggtggacattcagcaggtgtcgcccgagtgctacgggagttcaacccggacatgcggttgatcggcgtggacaccatcgggtccacgatctttgggcagcccgcgtcgaacaggctgatgcgcgggctgggctcgagtatttatccgcgcaatgtcgattaccgtgcattcgacgaagtgcactgggttgctccccccgaagccgtctgggcgtgccgctccctggccgcaacccactacgccagcggcggctggagcgtcggggcggtcgccctggtagccggctgggcagcacgcaacttgccggcggacaccacgattgccgcggtctttcccgacggcccacaacgctacttcgacaccatctacaacgacgcgtactgcaacgaacacgaactgctaggcggacaacctcccaccgagcccgacgagattgcctcgccgctagacgccgtcgtcacccgatggacacgcagcaccacggtgatcgatccaacccaggtggtgtcgtaa

SEQ ID NO: 28278 - DNA, 2163 bp, Mycobacterium tuberculosis
atgccagacaacacaatccagtgggacaaggatgccgacggcatcgtcacgctgaccatggacgatccctccgggtcaaccaacgtgatgaacgaggcctacatcgagtcgatgggcaaggccgtcgatcgccttgtcgccgaaaaggattcgatcaccggagtggtagtcgccagcgcgaagaaaaccttcttcgccggcggcgacgtcaagacgatgatccaggccaggcccgaggacgccggcgatgtattcaacaccgtcgagaccatcaagcggcagctgcgcaccttggagacattgggtaagccggtcgtcgcggccatcaacggggcggcgttgggcggcggcctggagatcgcgctggcgtgtcatcaccggatcgccgccgacgtcaagggcagccagctcggtctgccggaggtgacgctgggtctgctgccgggtggcggtggggtgacccgcacggtacggatgttcggcatccagaacgcgttcgtgagcgtgctggcgcaaggtacccggttcaagccggccaaggccaaggagatcggtctggtcgacgagctggtggcaacggtcgaggagctggtgcccgccgccaaggcttggataaaggaggagctcaaggccaaccccgacggtgccggggtgcagccgtgggacaagaagggctacaagatgcccggcggcaccccgtcgtcgccgggtctggcggcgattttgccgtcgttcccgtcgaacctgcgcaagcagctcaagggtgccccgatgccggcgccgcgggccatcctggccgccgcggtcgagggggcacaggtcgatttcgacaccgccagccgcatcgagagccgctacttcgcgtcgttggtcaccggccaggtcgccaagaacatgatgcaggcgttcttcttcgacctgcaggccatcaatgccggcgggtctcggcccgaaggcatcggcaagaccccgatcaagaggatcggtgtgctgggtgcgggcatgatgggcgccggcatcgcctacgtctctgccaaggccggctatgaggtggtactcaaagatgtcagccttgaggccgccgctaaaggcaagggctactccgaaaagctggaggccaaggcgctggagcggggccgcaccacacaggagcgcagcgacgccctgctggcgcgcatcaccccgaccgccgacgccgccgatttcaagggcgttgatttcgtgatcgaggcggtttttgaaaaccaggagctcaagcacaaggtgttcggcgagatcgaagacatcgtcgagcccaacgcgatcctgggatccaacacctcgacgctgccgatcaccggtctggcgaccggcgtcaagcggcaggaagactttatcgggatccacttcttctcgccggtcgacaagatgccgctggtggagatcatcaagggcgagaagacttctgacgaggccctggcccgggtgttcgactacaccttggccatcggcaagaccccgatcgtggtcaacgacagccgcggctttttcacctcgcgggtcatcggcacgttcgtcaacgaggcgctggcgatgctcggtgagggtgtcgagccggcttctatcgagcaggcggggtcgcaggccgggtatccggcgccgccgctgcagctgtccgacgagctcaacttggagctgatgcacaagatcgccgtcgccacccgtaagggtgttgaggacgccggcggcacgtaccagccgcatccggcggaggccgtggtggagaagatgatcgagctcggccggtccggccggctgaagggcgcgggcttctacgagtacgccgacggcaagcgatccgggttgtggcccggcttgcgcgagacgttcaagtcgggctcgtcgcagccgccgctgcaggacatgatcgaccgcatgctgttcgccgaggcgctggaaacccagaagtgcctcgacgagggggtgctgacgtcgacggccgacgccaacatcggctcgatcatgggcatcggcttcccgccgtggacaggtggcagtgcccagttcatcgtcggctactccggcccggccggtaccggtaaggcggctttcgtggcccgggcccgcgagctggcggccgcctacggcgaccgcttcctgccgccggagtcgctgctaagctga

SEQ ID NO: 28279 - DNA, 483 bp, Mycobacterium tuberculosis
atgagcacccggtccgctcgaattgtcgttgtgtcgagccgcgcggcggccggtgtgtataccgatgattgcgggccgattatcgctggatggcttgaacagcatgggttttcgtccgtccagccgcaggtggttgccgacgggaacccagtcggcgaggcgctacacgacgcggtcaacgccggagtcgacgtgatcatcacttccggcggcaccggtatctcgcccaccgataccacgcccgaacacacggtcgccgtgctggactacgtcattcccgggctggccgacgcgatccgccgctccggcctgcccaaggtgccgacatcggtgctgtcgcgcggggtgtgcggcgtggctgggcggaccctgatcatcaatctgccgggatcgcctggaggtgtacgtgacggcctcggggtgctcgccgatgtgctggaccatgctctcgagcagatcgccggtggagatcacccgcgatga

SEQ ID NO: 28280 - DNA, 1821 bp, Mycobacterium tuberculosis
atgtcgtatgtattggcgacgccggagatggtggcagcggcagcaaacaatttggcgcagatcggctcgacgttgagcgcggccaatgccgcggcgctggccccgaccaccggagtgctggccgcgggcgccgacgaggtgtcggcagcggtggcgtcgctgttttccgggcacgcccaggcctatcagacactcggcacgcaggcggccgcgtttcatgaacggtttatccaggccttgagcacggctgcgggcgcatatggtagcgccgaggccgcaaatgcctccccgctgcagcaagcgttgaatgtgatcaacgcgcccacgcagacgctgctcgggcgccccctgatcggcaacggcaccaatggtgcgccgggtaccgggcaggccggcgggccgggtggcttgttgtatggcaacggcggcaatggcgggtccggcggggtcggccaagccggcggagccggcggcagcgccgggttgatcggcatcggcgggaccgggggggccggaggggccggcgcggtcggcggcgtcggcggcaacggggggtggttatacggcaatggcggggccggcgggctcggggggaccggggtggccggcgtcaatggcggtatgggcgcagcaggaggtgccggcggcaacgcctacctgttcggttctggcggcgcgggcgggcagggcggtatgggggcagccggggcagacggcgtcaaccccacacccaccggcaccgctgatgccggcagtaccggcaccgaccagacgctgggcggcaacgccataggcggtaacggtggccccggcgatgccggcgacgcgatgacgtccggcggcgctggcgggtctggcgggaacgccgtctcaaccgtcaacggcgacgccgtgggcggtgagggaggcaaagggggtgagggcgcctatggcggcgctggcggcgccggcggcagcgccgcttccatcggcaatgcagccataggaggtaacggcggtgccggcgggaacgcccaggcccccggcggtgtggggggcgccggcggcgaaggcggggatgcccaggtgggcaccaattctcccagcaacgcggaagccggtaacggcggcagcggcggcaacggcttcgacagcttcgcttccggcggtaccggcggagcgggcggaaccgggggcgccggtggccgcggcgggctgctgatcggcgacggcggcgccggcggcgcgggcggagtcggtggtaccggtggtagcggtgcccccggcggcggcggcggcgccgggggcgacggcggtgccgccaacaccgacagcgccggcagttcacgcaaggcgttcgggggcgatggcggtgtgggcggtgacggcgcgagcgccctcggcaccggtggcgaaggcggtatcggcggccagggcggtaacgggggtgctggcgggctgctcatcggcaacggcggcgccggtggtgtcggcggcacggccggtgccggtggtactggtggttccggtggtgctggaggtgccggaggcgccggtggtggcggcaccaacagtggtccgggcgcagcgtttggcggtaacggcaacaccggcggcaacggcggcaacggcggcgcccccggcgccctcggcggcaagggcgggtccggcgggctgattggccgcgcgggcagcgacggtggcgttggtgccggaggagcgggcggcgcgggtggcgccggcggcacaggcggtgagggcggcacgggcggcgacgggaaaaccaccgacggcaatcccggcatgggcggcagcccgggcagcgccggccaacccggctaa

SEQ ID NO: 28281 - DNA, 1296 bp, Mycobacterium tuberculosis
gtggccgacaccgacgacaccgcaaccctccgttacccgggaggcgagatcgacctgcagatcgtgcacgccaccgaaggcgccgacggcattgcgctcgggccgctgctggcaaaaaccgggcacaccacgttcgacgtcggcttcgccaacacggccgccgctaaaagctccatcacctacatcgacggagatgccggcattctgcgttatcgcggctacccgatcgaccaactggcggagaagtcaaccttcatcgaggtctgctacctgttgatttacggcgagctgcccgataccgaccagcttgcccagttcaccggccggatccagcgccacaccatgctgcacgaggatctcaagcggttcttcgacggctttccgcgcaatgcccacccgatgccggtgttgtccagcgtggtcaatgcgctgtcggcgtactaccaggatgctctggaccccatggacaacggtcaagtcgagctgtcgaccattcggctgctggccaagctgcccaccatcgccgcgtacgcctacaagaaatcggtcggccagcccttcctctacccagataactcactgacgctggtggagaacttcctacggttgacgttcggatttcccgccgagccctaccaggccgaccccgaggtggtgcgggcgctggacatgttgttcatcttgcacgccgaccacgagcagaactgctcgacgtcgacggttcggctggttggctcgtcgcgagccaacctgttcacctcgatctcgggtggcatcaacgcactatggggtccgcttcatggcggcgccaatcaggctgtcctggagatgctcgagggcattcgcgacagcggcgacgacgtcagcgagtttgtacgcaaggtcaagaaccgcgaggccggggtcaaattgatgggtttcggtcatcgtgtctacaagaactacgatccgcgggcccgcatcgtcaaggaacaggccgacaagatcctggccaagctcggcggcgatgactccttgctgggcatcgccaaggagctcgaagaggcggcgctgaccgacgactacttcatcgaacgcaagctttaccccaacgtcgacttctacaccggcctgatctaccgggccctcggcttcccgaccaggatgttcaccgtgttgtttgccctgggcaggcttcccggctggatcgcgcactggcgtgagatgcacgacgagggcgacagcaagatcggccggccccgccagatctacaccggctacacggagcgcgactacgtcaccatagacgcgcggtag

SEQ ID NO: 28282 - DNA, 1488 bp, Mycobacterium tuberculosis
gtgagtcgtatcacgaccgaccaactgcggcacgcggtgctagaccggggatctttcgtcagctgggatagcgagccgctggcggtgccggtagccgactcctatgcgcgggagctggccgccgctcgggcggccaccggcgcggacgaatcggtgcagaccggtgagggacgcgtattcgggcggcgggtggccgtggtggcctgtgagttcgacttcctgggcggctcgattggggtggcagcggccgaacggatcaccgccgccgtcgagcgggcgaccgccgagcggctgccgctactggcgtcaccaagctcgggaggcacccgcatgcaagaaggcacggtcgcgtttctgcagatggtgaagatcgctgcggccatccagctgcacaaccaggcgcgcctgccctacctggtctatttgcgccatccgaccacgggtggagttttcgcgtcgtggggctcgctggggcatctcaccgtcgccgagccgggcgccctgatcggctttctgggaccacgggtctatgagttgctctatggcgaccccttcccatccggcgtccaaaccgccgagaatctacggcggcatgggatcatcgacggcgtcgttgcactggaccggctacgaccgatgctggatcgtgcgttgacggtgctcatcgacgctcccgaaccgcttccggcaccgcagacgcccgcgcccgtacccgatgtgcccacgtgggactcggtggtggcatcgcgccggccggaccggccgggcgtcaggcagctactgcgacacggcgccaccgaccgggtgttgttgtcaggaaccgatcaaggcgaagcggcgaccacgctgctggcgctggcccgctttggcggccaacccacggtggtcctcggccagcaaagggcagtaggcggcgggggaagcactgtcgggcccgctgcgttacgcgaagcccgacgcgggatggcgctcgccgccgagctgtgcctgccgctggtgctggtcattgacgcggccggacccgcgttgtcggccgcagccgaacagggcgggctggccggccagatcgcgcattgcctggccgagctcgtcacgctggataccccgaccgtgtcgatcctgctgggccagggcagcggcgggccggcgctggcgatgttgcccgccgaccgggtgctggccgcactccacggctggctggcgcccttgcctcccgaaggagccagcgcgatcgtgttccgagacactgctcatgccgccgaactcgctgccgcccaaggcatccggtcggccgacctactgaagtcggggattgtcgacaccatcgtgccggagtaccccgacgccgcagacgagccgatcgagttcgccctacgactgtcgaacgccatcgccgccgaagtgcacgcgttacggaagataccggccccggaacgcctcgcgactcggttgcaacgctaccgccggatcgggttgccccgcgactaa

SEQ ID NO: 28283 - DNA, 1287 bp, Mycobacterium tuberculosis
gtggcgggcgaatttcggttactctcgcatctttgttcgcgtggatcgaaagtcggtgagttggcccaggacacccggacttccctgaagacgagctggtatctgctcgggccagcctttgtcgcggccatcgcctacgtcgaccccgggaacgtggcagccaacgtcagctccggcgcccagttcggctacctgttgttatgggtgatcgtcgccgccaacgtgatggccgccctggtgcagtacctgtcggcaaagctcgggctggtgaccggacgctcactgccggaagcgatcggcaagcgaatgggacgcccggcccggctggcctactgggcacaggccgagatcgtcgcgatggcaaccgatgtggccgaagtgatcggcggagctatcgcattgcggatcatgttcaacctgccgctgccgatcggcgggatcatcaccggggtggtctcgctgctgctgctgacgatccaggatcggcgcggtcaacgtttgttcgagcgcgtcatcaccgccttgctgctggtgattgccatcggcttcaccgccagtttcttcgtcgtgacaccaccccccaatgcggtcctcggcggtttggcaccgcgctttcagggaaccgagagcgttcttttggccgcggcgatcatgggggcgaccgtcatgccgcacgccgtctacctgcattcaggtctcgcgcgcgaccggcacgggcatcccgatccgggccctcagcggcgccggctgctgcgcgtcacccgctgggatgtcggcctggcgatgctgatagccggcggggtaaacgccgcgatgctgctggttgccgcgctgaacatgcggggccgtggggacaccgcctcgatcgaaggcgcctaccacgccgtccacgacaccttgggggcgacgatcgcggtgctcttcgcggtcgggttgctggcgtccggcttggcgtcgtcgtcggtgggtgcttacgccggcgcgatgatcatgcaggggctgctgcactggagcgttcccatgctggtgcgccgcctaatcacgctgggccccgcgttggcgatacttacgctgggcttcgaccccacccgcacattggtgctctcacaggtggtgctgtcgttcggtattccgtttgcggtacttccactggtcaaactcaccggcagccccgcggtgatgggcggcgacaccaaccatcgcgccacgacttgggttggctgggtggtcgcggtgatggttagtctgctcaacgtgatgctgatctatctcacggtgaccggctga

SEQ ID NO: 28284 - DNA, 1017 bp, Mycobacterium tuberculosis
atgctggcccgtgccggtgaagtcggccgcgctggcccggccatccggtggttgggtgggataggtgcggtgatcccgctgcttgcgctggtcttggtgctggtggtgctggtcatcgaggcgatgggtgcgatcaggctcaacgggttgcatttcttcaccgccaccgaatggaatccaggcaacacctacggcgaaaccgttgtcaccgacggcgtcgcccatccggtcggcgcctactacggggcgttgccgctgatcgtcgggacgctggcgacctcggcaatcgccctgatcatcgcggtgccggtctctgtaggagcggcgctggtgatcgtggaacggctgccgaaacggttggccgaggctgtgggaatagtcctggaattgctcgccggaatccccagcgtggtcgtcggtttgtggggggcaatgacgttcgggccgttcatcgctcatcacatcgctccggtgatcgctcacaacgctcccgatgtgccggtgctgaactacttgcgcggcgacccgggcaacggggagggcatgttggtgtccggtctggtgttggcggtgatggtcgttcccattatcgccaccaccactcatgacctgttccggcaggtgccggtgttgccccgggagggcgcgatcgcgctggggatgtcgaattgggagtgtgtccgcagggtcaccctgccgtgggtgtccagcggcatcgtcggtgcggtggtgctagggcttggccgtgcgctgggggagacgatggcggtagccatggtgtccggcgcggtgctgggggccatgcccgccaacatctacgcgaccatgaccaccatcgccgccaccatcgtgtcgcagctggattcggcgatgaccgattccaccaacttcgcggtgaagacgctcgccgaggtgggtttggtgctgatggtgatcacgttgctgactaatgtggccgcgcgcgggatggttcgtcgggtgtcacgcaccgcgcttccggtgggacgcggcatctga

SEQ ID NO: 28285 - DNA, 1662 bp, Mycobacterium tuberculosis
atgacctccgcgccaatccccgacatcaccgctaccccggcatgggacgccctgcgcagacatcacgatcagatcggaaacacccatcttcgccagttcttcgccgacgatccgggtcgcggccgggagctcaccgtcagcgtcggcgatctctacatcgactacagcaaacaccgcgtcacccgcgagacgctggcgctgctgatcgatctggcccggacggcccacctcgaagagcgtcgcgaccagatgttcgccggtgtgcatatcaacacctctgaggatcgagcggtgttgcacaccgcgctgcggctgccccgagacgccgaactcgtcgtcgacggccaagacgtcgtcaccgacgtacatgccgtgctcgacgcgatgggcgccttcaccgaccgcctgcgcagcggcgagtggaccggagcaactggaaagcggatcagcaccgtcgtcaacatcggcatcggtggttcggatttgggtccggtgatggtgtaccaagcgttgcgccactatgccgacgcgggcatttccgcgcgcttcgtgtccaacgtcgatcccgccgacctgatcgccacgctcgccgatctagaccccgccacaacgcttttcatcgtcgcgtcgaagacgttctcgacgctggagacattgaccaatgcgaccgcggcgcgtcgctggctgaccgatgcgctgggcgacgccgcggtgtcgcggcattttgtcgcggtgtccaccaacaagcgcctggtcgacgacttcggcatcaacaccgacaacatgttcggtttttgggattgggtcggcgggcgttattcggtggattcggcgatcgggctgtcgttgatgacggtgatcggccgcgacgccttcgccgatttcttggccggattccacatcatcgaccgccatttcgcgaccgctccgctggaatccaacgcgccggtgctgcttggcctgatcggactgtggtactccaatttcttcggtgcgcaatcacgcaccgtgctgccgtattccaatgacttgtcgcgttttccggcctaccttcagcagttgaccatggaatccaacggcaagtccacgcgcgccgacggcagcccggtcagcgccgacaccggtgaaatcttttggggtgaaccgggaaccaacggccagcacgccttctaccagttgctgcaccagggcacccggctggtgccagccgatttcatcggctttgctcaacccctcgacgacctgccgaccgccgagggcaccggcagcatgcatgatctgctgatgagcaacttcttcgcccaaacccaggtgctggcgttcggcaagaccgccgaggagatcgccgccgacggcacccccgcccacgtggtagcgcataaggtgatgcccggcaaccggccgtccacctcaattctggccagtcggctcacgccgtcggtgctggggcagttgatcgcgctctacgagcatcaggtgttcaccgagggtgtggtgtggggtatcgactcgttcgaccagtggggggtggagctgggcaagacgcaggccaaggcgctgcttccggtaatcaccggcgccggttcaccgccaccgcagtcggacagctcgaccgacgggctggtgcgccgctaccgcaccgaacgtggccgcgcgggctag

SEQ ID NO: 28286 - DNA, 2316 bp, Mycobacterium tuberculosis
atgagtgtgcacgcgaccgacgccaagcctcccggtccatccccagcggaccaactgctcgacggcctcaacccgcaacagcgccaggcggtcgtgcatgagggttcgccgctgctgatcgtcgcgggcgcgggttcgggtaagaccgcggtgttgacccgccgcattgcctatctgatggcggcccgcggcgtcggggtgggccagattctggccatcaccttcaccaacaaagccgccgccgagatgcgcgaacgggtggtgggcctggttggggagaaggcccggtacatgtgggtgtcgacgtttcactccacctgcgtgcgtatcctgcgcaaccaggcggcgctgatcgagggcctcaactccaacttttcgatctatgacgccgacgattcgcggcggttgctgcagatggtgggccgcgacctgggcctagacatcaagcggtactcgccgcgactgctggctaacgccatctccaacctgaagaacgagttgatcgacccgcatcaggcgctggccggcttaacggaggactccgatgacctagcgcgcgccgtggcgtcggtttatgacgaataccagcggcggctgcgggcggccaacgcgctggacttcgacgacctgatcggcgagaccgtcgcggtgctgcaggccttcccgcagatcgcccagtactaccgtcggaggttccggcatgtcctggttgacgaataccaggacaccaaccacgcccagtacgtattggtgcgcgagctggtcggccgcgacagcaatgacggtattccccccggcgagttgtgcgtcgtcggggatgccgatcagtcgatctatgcgttccgcggcgccaccatccgcaacatcgaagacttcgaacgtgactaccccgacaccagaaccattctgctggaacagaattaccgctcgacgcagaacatcctgtcggcggccaactcggtgattgcccgtaacgcggggcgccgggagaagcggttgtggaccgacgccggcgccggggagttgatcgttggctatgtcgccgacaacgagcacgacgaggcccggttcgtggccgaggagatcgatgcgctcgccgagggtagcgagatcacctacaacgatgtcgccgtcttctaccgcaccaacaactcgtcgcggtcactggaagaggtgctgatccgcgccggtattccgtacaaggtcgttgggggagtgcgcttttacgagcgcaaggagattcgcgacatcgttgcctacctgcgcgtgctggacaacccgggcgacgcggtcagcctacggcgcatccttaacaccccgcgccgcggtatcggggatcgtgccgaggcgtgtgtggcggtgtacgccgagaacaccggcgtcggcttcggtgacgcgctcgtcgccgcggcccaaggcaaagtaccgatgctgaatacccgggcggagaaggcgatcgcgggtttcgtcgagatgttcgacgagctgcggggccgcctcgatgacgacctgggggagctggtcgaggcggtgctggaacgcaccggataccgccgcgagctggaagcgtccaccgatccacaggaattggcccgcctggacaacctcaacgaattagtcagcgtcgcacacgaattcagtaccgaccgggagaatgccgccgcacttggcccagacgacgaagacgtccccgacaccggtgtgctggcggattttctggaacgggtgtcgctggtcgccgacgccgatgagatcccggagcatggcgcgggtgtggttaccttgatgaccttgcacaccgccaagggtttggagttcccggtggtgtttgtgaccggctgggaggacgggatgttcccgcacatgcgggcgttggacaacccgaccgagttgtccgaggagcggcggctggcctatgtcggcatcacccgcgcccggcagcggttgtacgtgagccgggcgatcgtgcgttcgtcttggggccagccgatgctcaacccggagtcgcggtttctgcgggaaatcccgcaggagctcatcgactggcggcgcaccgccccgaagccgtcgttcagtgccccggtgagtggcgccggtcggttcggtagcgcgcgtccatcaccgacccgctcgggggcgagcaggcgcccgctgctggtgcttcaggtcggcgaccgcgtgacccatgacaaatacggcctgggccgtgtcgaggaggtctccggtgtcggcgaatcggcgatgtcgctgatcgacttcggtagctcggggcgggtgaagctgatgcacaaccacgcccctgtcaccaagctctga

SEQ ID NO: 28287 - DNA, 999 bp, Mycobacterium tuberculosis
atggcagcgattcgcacacctcgcgatcgttggccgcatcatcaccgtaacgaagtcaccgaaatcatcccgctggacggattcctcgacggcttagcactctacgatgagctggatttcgcagagctcgatgacctggacctaggggacgactgcgtcttcgactacgaagcgcagttgctagcggctccagaactcgacgacctggacgacgccgacgatctggcccccgaatggctggtagcccccacggtcgtgctgaccccggaggtcaccccggtgtcccggcgcgtcgggcagcaccgcaagcaaccgatcggtgcggcccgggggcgcctgctgatctcggcgatggccgcgggcgcggcggccgcagcagcgcatacggcgatccaacagtcggaaaccccacgcaccgagaccgtgctgaccgctcatgcatcggcgctcaacgaagggtcgggaagcaacccaccgcggggcgtccaggtcatcgccgcccagccggcggcgagtgctgcggtgcacaacgcggagttcgccaggggggttgccttcgccgaggagcgcgccgagcgcgaggcgcgactacagcgcccgctgtatgtcatgccgacgaagggcatcttcacgtcgagtttcggttatcgatggggtgtactgcacgccggtatcgacctggctaacgcgatcggaaccccgatttatgcggtgtccgacggcgtcgtcatcgacgccggccccaccgccggctacggaatgtgggtcaagctgctgcacgccgacggcacggtcacgctatacggccacgtcaataccacgttggtcagcgtcggtgagcgcgtgatggcaggcgaccagatcgccaccatgggcagccgtggcttttccaccggcccgcacctgcacttcgaggtgctcctgggcggcaccgagcgcgtggacccagtgccgtggctcgccaagcggggacttagcgtcggcaattacaccggttga

SEQ ID NO: 28288 - DNA, 912 bp, Mycobacterium tuberculosis
atgactcacatgtccatatttctgagcagggacaacaaggtcattgtgcagggcatcaccggcagtgaggccaccgtccataccgcgcgaatgctgcgggcgggcacgcaaatcgtcggcggtgtgaacgcacgcaaagcgggcaccaccgtcacgcatgaggataagggcggccggctgatcaagctgccggtgttcggcagtgtcgcggaggcgatggaaaagaccggcgccgatgtgtcgatcatcttcgtgccgccgacgttcgccaaggacgccatcatcgaggccatcgacgccgaaattccgctgttggttgtgatcaccgagggaattccggtgcaggacaccgcctatgcctgggcctacaacctcgaggctggccacaagacccgcatcattggccccaactgtcctggcattatcagtcccggtcagtcgctggccggtatcacgccggccaacatcaccggacccggtccaattggtctggtgtccaagtcggggacgttgacctaccagatgatgttcgaactgcgcgaccttggattctccacggcgatcggcatcggtggtgatccggtgattggcactacccacatcgacgccatcgaggccttcgagagggatccggacaccaagctcatcgtgatgatcggcgagatcggtggtgacgccgaggagcgggccgcagacttcatcaagaccaacgtgtccaagccggtcgtcggctatgtcgccggatttaccgcacccgaaggcaagacgatgggccacgccggcgccatcgtctccggctcgtctggcacagcggcggccaagcaagaggccctggaggccgccggtgtgaaggtcggcaagaccccatcggcgaccgcggcgctggcccgggagatcttgctcagtctctag

SEQ ID NO: 28289 - DNA, 2313 bp, Mycobacterium tuberculosis
atgcgcgtgtgcgtcaccgggttcaatgtcgatgcggttcgggccgtcgcgattgaggagacggtctcccaagtgaccggggtgcacgccgtgcacgcctatccgcgaacagcgtcggtggtgatctggtactcgccagagctcggtgacaccgccgccgtgctgtcggcgatcaccaaagcgcagcacgtcccggcagaattggtgcccgcccgtgccccgcactcagcgggtgtgcgcggcgtgggcgtggtgcggaaaatcaccggcgggatccgccgcatgctaagtcgcccgccgggcgtcgacaagcccctgaaggcgtcgcgttgcggcggccgcccgcgcgggccggtccgcgggagcgcctcgtggccgggcgagcagaaccggcgcgagcggcggacgtggttgccgcgggtgtggttggccttgccgttggggctactggcgctgggttcgtcaatgttcttcggtgcttacccgtgggcggggtggctggccttcgccgcgacgctgccggtgcaattcgtggccgggtggccgattctgcggggggcggtgcaacaggcgcgggcgttgacctcgaacatggacacgctgatcgcgctgggtacgctgaccgcgtttgtctactccacgtatcagttgtttgccggtggacctctgttcttcgacacctcggcgctgatcatcgcgttcgtggtgttgggccgccatctcgaggccagagcaaccggaaaagcgtccgaggcgatcagcaagctgctggagctgggcgccaaggaagccacgctgcttgtcgacggccaagagctcctggtgccggtcgatcaggtccaagtcggagacctggtgcgggtgcggcccggagagaagatcccggtcgacggtgaggtcaccgatgggcgcgccgccgtcgacgagtcgatgctcaccggcgaatccgtcccggtcgagaagacggcgggtgaccgcgttgccggcgcaacggtcaacctcgacgggctgttgaccgtgcgcgccaccgccgtcggggcagacaccgcgctggcgcagattgtgcgactggtcgagcaggcacagggcgacaaggcgccggtgcagcggctggccgaccgggtttcggcggtgtttgtcccggccgtcatcggcgttgccgtcgcgacctttgcgggatggaccctgatcgccgccaacccggtggctggtatgaccgccgcggtcgcggtgctgatcatcgcgtgcccgtgtgcgttgggcctggctacccccacggccatcatggtcggcaccggccggggcgccgaactggggatcctggtcaagggaggcgaggtgctggaagcgtcgaagaagatcgacaccgtggtgttcgacaagaccggcaccctcacccgcgcccggatgcgggtgaccgatgtgattgccggccagcggcgccagcctgatcaggtgctgcggctcgccgccgcggtcgaatcgggctccgaacaccccatcggtgcggcgatcgttgccgctgcacacgagcgcgggttggcgataccggccgccaatgcgttcaccgccgtcgccgggcacggggtgcgggcgcaggtcaacggcgggccggtggtggtcggacggcgcaagctcgtcgacgaacaacatttggttctgcccgaccacctcgctgcggcggccgtggagcaggaagagcgcggccgcaccgcggtgttcgtcggccaagacggccaggttgtgggtgtgctcgcggtagcggacacggtcaaagacgacgccgcggacgtggtcggtcggctgcacgccatggggctacaggtagccatgatcaccggcgacaacgcccgcacggctgccgcgatcgccaagcaggtcggcatcgagaaggtgctggccgaggtgttgccgcaggacaaggtagctgaggttcggcggctgcaggaccagggccgggtggtcgcgatggtgggtgacggcgtcaacgacgcgcccgccttggtacaagccgatctgggcattgcgatcggcaccggtaccgacgtggccatcgaggcctccgacatcacgctaatgtccggccggctcgatggtgtcgtgcgcgcgatcgaactctccaggcagaccctgcgcaccatctaccagaatctcggctgggccttcggctacaacaccgccgcgatcccactggccgcgctgggcgcgctgaacccggtcgtggcgggcgcggcgatggggttctcctcggtcagcgtggtgaccaactcactgcggttacgccgcttcggccgcgacggccgaaccgcatga

SEQ ID NO: 28290 - DNA, 2772 bp, Mycobacterium tuberculosis
atgtccttcgtggtcacagcaccgccggtgctcgcgtcggcggcgtcggatctgggcggtatcgcgtccatgatcagcgaggccaacgcgatggcagcggtccgaacgacggcgttggcgcccgccgccgccgacgaggtttcggcggcgatcgcggcgctgttttccagctacgcgcgggactatcaaacgctgagcgtccaggtgacggccttccacgtgcagttcgcgcagacattgaccaatgcggggcagctgtatgcggtcgtcgacgtcggcaatggcgtgctgttgaagaccgagcagcaggtgctgggtgtgatcaatgcgcccacccagacgttggtgggtcgtccgctgatcggcgatggcacccacggggcgccggggaccgggcagaacggtggggcgggcggaatcttgtggggcaacggcggtaacggcgggtccggggctcccggacagccgggcggccggggcggtgatgccggcctgttcggccacggcggtcatggcggtgtcggggggccgggcatcgccggtgccgctggcaccgcgggcctgcccgggggcaacggcgccaacggcggaagcggcggcatcggcggcgccggcggcgccggcggcaacggcgggctgctattcggcaacggtggtgccggcggccagggtggctccggcggacttgggggctccggcgggacgggcggcgcgggcatggctgccggtcccgccggcggcaccggcggcatcgggggcatcggcggcatcggcggcgcgggcggggtcggcggccacggctcggcgttgttcggccacgggggaatcaacggcgatggcggtaccggcggcatgggtggccagggcggtgctggcggcaacggctgggccgctgagggcatcacggtcggcattggtgagcaaggcggccagggcggcgacgggggagccggcggcgccggcgggatcggtggttcggcgggtgggatcggcggcagccagggtgcgggtgggcacggcggcgacggcggccagggcggcgccggcggtagtggcggcgttggcggcggcggcgcaggcgccggcggcgacggcggcgcgggcggcatcggcggcactggcggtaacggcagcatcggcggggccgccggcaatggcggtaacggcggccgcggcggcgccggtggcatggccaccgcgggaagtgatggcggcaatggcggcggcggcggcaacggcggcgtcggtgttggcagcgccggaggggccggcggcaccggcggtgacggcggggcggccggggcgggcggcgcgccgggccacggctacttccaacagcccgcgccccaagggctgcccatcggaaccggcgggaccggcggcgaaggcggtgccggcggcgccggtggagacggcgggcagggcgacatcggcttcgatggcggccggggtggcgacggcggcccgggcggtggcggcggcgccggcggtgacggcagcggcaccttcaatgcccaagccaacaacggcggcgacggtggtgccggcggtgttgggggagccggcggcaccggcggcacgggtggggtcggggccgacgggggtcgcgggggggactcgggccgcggcggcgacggcggcaacgccggccacggcggcgccgcccaattctccggtcgcggcgcctacggcggtgaaggtggcagcggcggcgccggcggcaacgccggtggcgccggcaccggtggcaccgcgggctccggcggtgccggaggtttcggcggcaacggtgccgatggcggcaatggcggcaacggtggcaacggcggcttcggcggaattaacggcacgttcggcaccaacggtgccggcggcaccggcgggctcggcaccctgctcggcggccacaacggcaacatcggcctcaacggggccaccggcggcatcggcagcaccacgttgaccaacgcgaccgtaccgctgcagctggtgaataccaccgagccggtggtattcatctccttaaacggcggccaaatggtgcccgtgctgctcgacaccggatccaccggtctggtcatggacagccaattcctgacgcagaacttcggccccgtcatcgggacgggcaccgccggttacgccggcgggctgacctacaactacaacacctactcaacgacggtggatttcggcaatggccttctcaccctgccgaccagcgttaacgtcgtcacctcgtcatcaccgggaaccctgggcaacttcttgtcgagatccggtgcggtgggcgtcttgggaatcgggcccaacaacgggttcccgggcaccagctccatcgttaccgcgatgcccggcctgctcaacaacggtgtgctcatcgacgaatcggcgggcatcctgcagttcggtcccaacacattaaccggcggtatcacgatttctggagcaccgatttccaccgtggctgttcagatcgacaacgggccgctgcaacaagctccggtgatgttcgactccggcggcatcaacggaaccatcccgtcagccctcgccagcctgccgtccgggggattcgtgccggcgggaacgaccatttcggtctacaccagcgacggccagacgctgttgtactcctacaccaccaccgcgacaaacaccccatttgtcacctccggcggcgtgatgaacaccgggcacgtccccttcgcgcagcaaccgatatacgtctcctacagccccaccgccatcgggacgaccacctttaactga

SEQ ID NO: 28291 - DNA, 1395 bp, Mycobacterium tuberculosis
atggccaagttggcccgagtagtgggcctagtacaggaagagcaacctagcgacatgacgaatcacccacggtattcgccaccgccgcagcagccgggaaccccaggttatgctcaggggcagcagcaaacgtacagccagcagttcgactggcgttacccaccgtccccgcccccgcagccaacccagtaccgtcaaccctacgaggcgttgggtggtacccggccgggtctgatacctggcgtgattccgaccatgacgccccctcctgggatggttcgccaacgccctcgtgcaggcatgttggccatcggcgcggtgacgatagcggtggtgtccgccggcatcggcggcgcggccgcatccctggtcgggttcaaccgggcacccgccggccccagcggcggcccagtggctgccagcgcggcgccaagcatccccgcagcaaacatgccgccggggtcggtcgaacaggtggcggccaaggtggtgcccagtgtcgtcatgttggaaaccgatctgggccgccagtcggaggagggctccggcatcattctgtctgccgaggggctgatcttgaccaacaaccacgtgatcgcggcggccgccaagcctcccctgggcagtccgccgccgaaaacgacggtaaccttctctgacgggcggaccgcacccttcacggtggtgggggctgaccccaccagtgatatcgccgtcgtccgtgttcagggcgtctccgggctcaccccgatctccctgggttcctcctcggacctgagggtcggtcagccggtgctggcgatcgggtcgccgctcggtttggagggcaccgtgaccacggggatcgtcagcgctctcaaccgtccagtgtcgacgaccggcgaggccggcaaccagaacaccgtgctggacgccattcagaccgacgccgcgatcaaccccggtaactccgggggcgcgctggtgaacatgaacgctcaactcgtcggagtcaactcggccattgccacgctgggcgcggactcagccgatgcgcagagcggctcgatcggtctcggttttgcgattccagtcgaccaggccaagcgcatcgccgacgagttgatcagcaccggcaaggcgtcacatgcctccctgggtgtgcaggtgaccaatgacaaagacaccctgggcgccaagatcgtcgaagtagtggccggtggtgctgccgcgaacgctggagtgccgaagggcgtcgttgtcaccaaggtcgacgaccgcccgatcaacagcgcggacgcgttggttgccgccgtgcggtccaaagcgccgggcgccacggtggcgctaacctttcaggatccctcgggcggtagccgcacagtgcaagtcaccctcggcaaggcggagcagtga

SEQ ID NO: 28292 - DNA, 546 bp, Mycobacterium tuberculosis
atgaaggtcgccgcgcagtgttcaaagctcggatatacggtggcacccatggaacagcgtgcggagttggtggttggccgggcacttgtcgtcgtcgttgacgatcgcacggcgcacggcgatgaagaccacagcgggccgcttgtcaccgagctgctcaccgaggccgggtttgttgtcgacggcgtggtggcggtgtcggccgacgaggtcgagatccgaaatgcgctgaacacagcggtgatcggcggggtggacctggtggtgtcggtcggcgggaccggggtgacgcctcgcgatgtcaccccggaagccacccgcgacattctggaccgcgagatcctcggtatcgccgaggccatccgcgcgtccgggctgtccgcgggaatcgtcgacgccgggttgtcgcgcggcctggcgggtgtctccggcagcacgctggtggtcaacctcgcgggttcgcgttatgcggtgcgcgatggaatggcgacgctgaatccgctagcggcacagatcatcgggcagttgtcgagcttggagatctga

SEQ ID NO: 28293 - DNA, 747 bp, Mycobacterium tuberculosis
atgaaccggcaacctatcgttcagctgagtaacttgagctggacattccgagaaggcgaaacccgacgacaagtcctagaccacatcaccttcgatttcgagcccggtgagtttgtcgcgctgctggggcaaagtggaagtggtaaaagcactttgctgaacctcatcagtggcatagaaaagcccaccacaggtgacgtcacaattaatgggttcgctatcactcagaaaaccgagcgagaccggacgttgttccggcgcgatcagattggcatcgtctttcaatttttcaacctgattcccactcttaccgtgttggaaaatattacgctgcctcaggaactggccggagtttctcagaggaaagcggccgtggtcgctcgtgaccttctcgaaaaagtgggcatggccgaccgtgaacgcacctttcccgataaactctccggcggagaacaacaacgggtcgctatttccagagcgttggcgcataatcccatgctggtgttagccgatgagccgaccggcaacctggactccgataccggggataaagtcttggatgttctgcttgatctcacccgccaagcaggtaaaaccttaatcatggctacgcatagcccgtcgatgacgcagcatgccgaccgggtagtcaacttacagggcggcaggttgatacctgccgtgaaccgagaaaatcaaaccgaccagccggccagcacgatcctattgcccacgtcatatgaatga

SEQ ID NO: 28294 - DNA, 2568 bp, Mycobacterium tuberculosis
atgaatgaccaagctcccgttgcttatgcaccactatggcgcacggcgtggcgtcggctgcgtcagcggccgtttcaatatattctgctggtcctgggaattgcgctaggcgttgccatgatcgtggctatcgatgtatccagtaattcggcgcaacgtgccttcgatctctctgccgcggccatcaccggaaaatctactcaccggctggtcagtggccccgccggggtggaccaacagctttatgtcgatctgcgccgacacgggtacgatttttccgctccggtaatcgaaggctatgtgttggcccgcggactgggaaaccgagctatgcagttcatgggcaccgacccatttgcggagtcagcttttcgctcgcctttatggtccaaccaaaatatcgccgagttgggtggctttttgactcgacccaacggtgtcgtgttaagccgacaagtggcacagaagtatggcttggctgtgggcgatcgcattgctctgcaagtgaaaggtgcgcctaccacagtaaccctggtgggattgctgacacctgcagatgaagttagcaatcaaaaattgtccgaccttatcattgctgatatttccacggcccaagagttgttccatatgcccggaagactgagccacatcgatttgatcatcaaagatgaggccactgcaacacgcatccaacaaagactgccggccggtgtgcgtatggaaacgtcggatacccaacgggacaccgtcaaacagatgacggacgcttttacggtcaatttaaccgctctcagtttgattgccttgttggtgggtatctttttaatctacaataccgtgacatttaatgtcgtgcaacggcgaccgtttttcgccatattgcgctgtttgggtgtaacccgagagcagttattttggctgataatgacggaatccctcgttgccgggctgattggtacgggcttgggcctcttgattggaatttggctcggcgaaggcttgatcggcctggtgactcaaaccatcaatgatttctattttgtcatcaatgttcgcaatgtgtccgtctccgccgaaagcttgttgaaggggctgatcatcggcatctttgccgccatgttagccacactgccaccggctatagaagcgatgcgcaccgtccctgccagcacattgcggcgctcctccctggaaagcaagataaccaagctcatgccgtggttgtgggtggcgtggtttggtttgggtagctttggtgtattgatgctgtggttgccgggcaacaacctggttgtggcctttgtcggtctctttagtgtgctgattgccctggcgcttattgccccgccgctgacccggtttgtaatgttgcgcttagctcctggcttaggacggctgctcggtccaataggtcgaatggcgccacgcaatattgtgcgctcgttgagtcgcacctctatcgccatcgccgccctgatgatggccgtgtccttgatggtaggcgtctccatatcggtggggtcgtttcgacagacgctggccaattggctagaggtgactttgaagtcggatgtctatgtgtctccgccgaccttaacatccggtcgccccagcggtaatctgcctgtggatgccgtccggaatataagcaaatggccaggagtgcgtgacgcagttatggctcggtatagttccgtttttgccccggactgggggcgtgaggtggaactaatggcggtgtcgggtgatatttccgacggcaagcgaccatataggtggatcgacggcaataaagacacgctctggccacgtttcttggcggggaaaggggtgatgctatcggagccaatggtatcgcgacaacacttgcagatgccgccaaggccgatcacgctaatgacggattcggggccacaaacgttccccgttctggcggttttctctgactacacctcagatcaaggtgtgattttgatggatcgcgccagttatcgggcccattggcaggatgatgacgtgacgaccatgtttctttttttggcatcgggtgcgaatagcggtgccttgatagatcaactacaagccgcgttcgcgggtcgggaagacattgttattcaatcgactcatagtgtccgcgaagcatcaatgttcatatttgatcgtagttttaccattaccatcgcgttgcaactggtggccacggtggtggcttttattggcgtactgagcgcgctgatgagtttggaattggaccgggctcatgagttgggtgtttttcgcgccattggcatgactacccgccaattatggaagctgatgttcattgagaccggcctaatgggcgggatggccggcttgatggccttgccaactggttgtattctagcgtggattcttgtccgcattatcaatgtccgctcattcggctggaccttgcagatgcactttgagtcggcgcattttcttcgagccctgttggtagcggtggtggccgccctggcggcgggtatgtaccccgcttggcgtttgggacggatgacgattcgcacggcgattcgtgaggaatga

SEQ ID NO: 28295 - DNA, 594 bp, Mycobacterium tuberculosis
atggcgatggcgagcaagtcggcgttgcgcgaccagctcctggcggcccgacgccgcgttgccgacgacgtgcgcgccgccgaggcccggatgttgcgtggacacctggagcgcatggtcaccagcgacagcaccgtctgcgcgtatgtgccggtaggcggcgagccggggtcaatcgagatgttggatgtgttgctgcgccgcgcggggcgagtgctgttgccggtggcgcgcaccgccggcggtgacctcccgttgccgttgcggtggggcgagtaccgtgccggcggactcgcgcgcgcacgctggggactgctcgaaccacccgaaccttggctgccggaagccgcgctggcgcaggccagcttggtgctggtgccggcgctggctgtcgaccgccagggcgtgcgactgggccgaggtcgcggcttctacgatcgctcgctgcggtgccgcgacccgcacgctcgtctagtcgcggtggtgcgcactgtcgaactggtcgacgtgttgccgtcggagccgcacgacgtacccatgactcatgcgctcacaccggagcgcgggctgatcgcgctgccgtgcggggaatga

SEQ ID NO: 28296 - DNA, 921 bp, Mycobacterium tuberculosis
atgtcacgcccagaagtactaacgccgttcacggcaatcgtcccggcagccggcctgggtacgcgctttctgccggccaccaagacggtgcccaaggagctgctgcccgtcgtcgacactcccggtatcgagctggtggccgccgaggcggccgcggccggtgccgaacggctggtgatcgtcacctccgagggtaaggacggggtggtcgcgcatttcgtggaagacctggtgctggagggcacgctcgaggcccgaggcaagatcgccatgctggccaaggtgcgtcgcgccccggcactgatcaaggtcgaatccgtggtgcaggccgagccgctgggactgggacacgccatcggctgtgtggagccgacgctgtcgcccgacgaagacgctgtcgcggtgctgctgcctgacgacctggtgctgccgaccggcgtcctggagacgatgtcgaaggtgcgagccagcaggggcggcaccgtgctgtgtgctatcgaggtggcgcgcgaggagatcagtgcctacggggttttcgatgtcgagccggtccccgatggtgactacaccgacgatcccaacgtgctgaaggtcaggggcatggtcgaaaagcccaaggccgaaacggcgccgtcgaggtatgcggcggccggccgctacgttctagaccgtgccatcttcgatgcgttacgccgcatcgaccagggtgcaggcggtgaagtgcagctcaccgatgcgatcgcgctgctgattgccgagggccatcccgtccatgtcgtcgtccaccaagggtcccgacacgacctgggaaatccgggcgggtacctcaaggctgcggttgactttgcattggatcgtgacgactacggcccggacttgcggcgatggttggtggcgcgactgggtctgacagagcagtag

SEQ ID NO: 28297 - DNA, 858 bp, Mycobacterium tuberculosis
atgtcctctggtcgcctgttgctcggcgccaccccgctgggccagccgtcggatgcgtcaccacgcctggcggccgcgttggccaccgccgatgtggtggcggccgaggacacccggcgggtgcggaaattggccaaggctcttgacatccggattggtggacgggtggtcagcctgttcgaccgggtggaggcgttgcgcgtgacggcccttctcgacgcgatcaataacggtgcgacggtgctggtggtcagtgacgccgggaccccggtgatcagcgatcccggctatcggctggtcgcggcgtgcatcgacgcgggggtttcggtgacgtgtttacccgggccgtccgcggtgaccaccgcgctggtgatgtccggtctgccggcggagaagttctgcttcgagggtttcgccccgcgcaagggtgcggcgcgccgggcctggctggccgaactggccgaggagcggcgcacctgtgttttcttcgaatccccgcgccggttggctgcgtgccttaacgatgccgtcgagcagctcggtggtgcccgtccggcggcgatctgccgggagctgaccaaggtgcatgaggaagtggtgcgcggatcgcttgacgagttggcgatctgggcggccggtggtgtgctcggcgagatcaccgtggtggtggcgggcgccgccccccacgccgaactgtcgtcgctgatagcccaagtggaggagttcgtcgcggcgggtattcgtgtcaaggacgcctgcagcgaggtagcggcggcacatccgggggtgcgcacccgccagctttacgacgcggtgctgcaatcacggcgggaaaccggcgggccagcgcagccgtag

SEQ ID NO: 28298 - DNA, 1560 bp, Mycobacterium tuberculosis
atgaagccctattacgtcaccaccgcgatcgcatatcccaacgctgcaccccacgtaggtcacgcctacgaatacatcgccaccgacgcgatcgcccggttcaaacggctggatcgctatgacgtgcgcttcctgaccgggaccgacgagcatggcctgaaggtcgcacaagccgccgcggcagcgggcgtgcccaccgcggcgcttgcccggcgcaattccgacgtgtttcagcgcatgcaggaggcgctgaacatctccttcgaccgattcatccgcactaccgatgccgaccaccacgaggcgtccaaggaactctggcgacggatgtcggcggccggcgacatctatctggacaactattccgggtggtactcggtgcgcgacgagcggttcttcgtcgaatcggagacccaacttgtcgacggcacgcgcctgacggtagagaccggcacgccggtgacctggaccgaggagcagacctacttcttccggctgtcggcctataccgacaagctgctggcccactatcacgccaaccccgacttcatcgcgccggagacgcggcgcaacgaagtgatcagcttcgtctccggcggcctggacgacctgtcgatctcgcgcacctcgtttgactggggtgtgcaggtgcccgagcaccccgaccacgtcatgtacgtctgggtcgacgcgctgaccaattacctgaccggggcgggcttcccggataccgactcggagttgttccgccgctactggcccgccgatttgcacatgatcggcaaggacatcatcaggtttcatgccgtctattggccggcgtttttgatgtcagccggaatcgagttgccgcgaaggatcttcgcgcacgggttcttgcacaaccgcggcgagaagatgagtaaatcggtgggcaacatcgtcgacccggttgccctggcggaagcgctcggggtggaccaggtccgctacttcctgttgcgggaggtcccgttcggccaggacggcagttacagcgacgaggccatcgtcactcggatcaacaccgatctggccaacgagctcggcaacttggcccaacgctcgttgtcgatggtggccaaaaaccttgacggcagggtgcccaacccgggtgagttcgccgacgccgacgccgcgctgcttgcgaccgccgatggcttgttggagcgagtgcgcggtcacttcgacgcacaggcgatgcacctggcgctggaggcgatctggctgatgctcggcgacgcgaacaagtacttttcggtgcagcagccgtgggtactgcgcaagagcgagtccgaagccgatcaggcccggttccgcaccacgctctacgtcacctgcgaggtagtccgcatcgcggcactgctgatccagccggtgatgccggagtcggccggcaaaattttggacctgctcggccaggccccaaaccagcggtcgttcgccgccgtaggtgttcggctgacccccggcacagcgctgccgccgcccaccggggtatttccccgctaccagccgccgcaaccacccgaaggcaagtga

SEQ ID NO: 28299 - DNA, 795 bp, Mycobacterium tuberculosis
ttggtcgacgcccacacccatctcgacgcgtgcggtgcacgagacgccgatacggtgcggtcgctcgtcgagcgagccgccgcggccggcgtgaccgcggtggtcaccgtcgccgacgacctggagtccgcgcgctgggtcacccgcgcggccgaatgggatcggcgagtctatgccgcggtggcgttgcacccgacccgcgccgatgcgctcaccgacgctgcccgtgccgagctcgagcgattggttgcccaccccagggtggtggccgtcggtgagaccggaatcgacatgtactggccgggtcgcctggacgggtgtgcggagccgcacgtccagcgggaggcctttgcctggcatatcgatctggccaagcggaccggtaaaccgctgatgatccacaatcgtcaggccgaccgcgacgtgctggacgtgctgcgggccgagggcgcgccggacaccgtgatcttgcactgcttctcgtcggacgcggcgatggcccgcacgtgtgtggacgccgggtggctgctcagcctgtccgggacggtgagcttccgtaccgcccgtgaactacgggaagccgtcccgctgatgccggtggagcagcttttggtggaaaccgatgcaccgtatttgaccccgcatccccaccggggcttggcgaacgaaccgtactgcctgccctataccgtgcgggcgctggctgaactggtcaatcggcgccccgaagaggtggcgctcatcaccacaagcaacgctcgccgagcttatgggctagggtggatgcgccaatga

SEQ ID NO: 28300 - DNA, 954 bp, Mycobacterium tuberculosis
atgtgctgcacgagcgggtgcgcgctgaccatccggctgctcgggcgcactgagatcaggcggctggccaaagagctcgactttcggccgcgcaaatctctcggacagaacttcgtgcacgacgccaacacggtgcgacgggtggttgccgcctccggggtcagccgttccgacctggttttggaggtcgggccgggcctgggatcgctgaccctggcactgctcgaccgcggcgcgaccgtcaccgcggtcgagatcgatccactactggcttctcggctgcaacagaccgtggcggagcactcgcacagcgaggttcaccgactaacggtggtcaatcgcgacgtcctggccctgcgccgggaggatctagccgcggcgccgaccgcggtggttgccaatctgccgtacaacgtagcggtaccggcgttgttgcatctgcttgtcgagttcccgtcgatccgtgtcgtgacggtgatggtgcaggccgaggtcgccgaacggctcgccgccgagccgggcagcaaagagtacggcgtgcccagcgttaagctgcgcttcttcgggcgggttcgccgctgcggcatggtgtcgccgaccgttttctggcccattccgcgtgtctattccgggctggtacgcatcgatcgatatgagacctcgccctggcccaccgacgacgcttttcgacggcgggtattcgaactcgtggacatcgcattcgcgcagcggcgcaagacttctcgcaacgcgtttgtgcagtgggcgggctcgggaagcgagtcggcgaatcgattgttggcggccagcatcgaccccgcccgtcgcggtgagacgctgtccatcgacgacttcgtgcggctgctgcgacggtccggcggctccgacgaggccaccagcaccggccgggacgccagggcgccggacatttcggggcacgcgtcggcgagctga

SEQ ID NO: 28301 - DNA, 648 bp, Mycobacterium tuberculosis
atggccaaatccgcaagcaaccagctgcgcgtcacggtgcgtaccgagaccggcaagggcgcgtcccggcgggcccggcgcgccggcaagatacccgctgtgctgtatggccacggcgccgagccacagcacctggagctgcccggacacgactatgcggccgtactgcggcattccggcaccaacgcggtgttgaccctcgacatcgccggtaaggaacagctggcactgaccaaggcacttcatatccatccgatccgccgcaccatccagcatgccgacctactggtcgtgcgccgtggcgagaaggtcgtcgtcgaagtcagcgtggtcgtcgagggccaggccggacccgacaccctggtcacccaagagaccaacagcatcgagatcgaggccgaggcgctgtcgattcccgagcagttgaccgtgtccatcgaaggtgccgaaccaggcacccagctcaccgccgggcagatcgcgctgccggccggtgtcagcctgatttctgaccctgatctgttggtggtcaacgtggtgaaggcgccaaccgccgaggagctggagggcgaagtcgcaggagccgaggaagccgaggaagccgcggtagaagccggcgaagccgaggccgctggcgagtccgagtag

SEQ ID NO: 28302 - DNA, 981 bp, Mycobacterium tuberculosis
ttgagccacgactggaccgataatcgcaaaaacctgatgctctttgccggccgcgcccatccggagctggccgagcaggtagccaaagagctcgacgtccacgtcacctctcaggacgcgcgggagttcgccaacggcgagatcttcgtgcgcttccacgaatcggtacgcggttgcgacgccttcgtcctgcaatcctgcccggcaccggtgaacaggtggctgatggaacagctgatcatgatcgacgcgctcaaacggggcagcgccaaacggatcaccgccgtcatgccgttctatccgtatgcccggcaagacaagaaacaccgtggccgcgaaccgatctccgcgcgactgatcgccgacctgctcaagaccgcgggcgccgaccggatcgtgacggtcgacctgcacaccgaccagatccagggtttcttcgacgggccggtcgatcatatgcgcggtcagaacctgctgaccggttacatcagagacaactacccggacggcaacatggtggtcgtctcccctgactccggccgggtacgcatcgccgagaagtgggccgacgcattaggtggtgttcccctcgccttcatccacaagacccgtgatccgcgggtacccaaccaagtggtgtccaaccgcgtcgtcggcgacgtggccgggcgcacctgtgtcctgattgacgacatgatcgacaccggcggcaccatcgccggcgcggtggcattgctgcacaacgacggcgccggtgacgtgatcatcgcggcaacccacggcgtgctctccgaccccgctgcgcagcggctggcctcctgcggcgcccgcgaagtgatcgtcacgaacacgctcccgatcggcgaagacaagcgcttcccccagctcaccgttttgtccatcgcgccgctgctggccagcacaatccgggcggtcttcgaaaacggctcagtaacaggacttttcgacggggacgcatag

SEQ ID NO: 28303 - DNA, 1488 bp, Mycobacterium tuberculosis
atgacgtttcctggtgacaccgcggtcctggtcctagcggccgggcccgggacccggatgcgttcggacacccccaaggtgctgcacacactcgccggtcgcagcatgctgtcgcatgtactgcatgcgatcgccaagctggcgccgcagcgtctaatcgtggtgctgggacacgatcaccagcgcatcgcgccgctagtcggtgaactcgccgacaccctaggccgaacgatcgacgtcgccctgcaggatcgaccgctagggaccgggcatgcggtactctgcgggctgtccgcgctgcccgatgactacgccggcaacgtcgtggtcacctcgggagataccccgctgctggacgccgacacgctggccgacttgatcgccacccaccgcgcggtgtcggctgcggtgacggtgctgaccacgacgctggatgatcccttcggctacggccgcatcctgcgcacccaggatcacgaagtcatggcgatcgtggagcaaaccgacgcgacaccatcgcagcgggaaatccgcgaagtcaacgccggcgtctacgccttcgacatcgccgcgctgcggtccgcactgagccggctgagctccaacaacgcccaacaggagctctacctcaccgacgtcatcgccatcttgcgctccgacggccagaccgtacatgccagccacgtcgacgacagcgcgttggtggccggcgtcaacaatcgcgtccagctggccgagctggcctccgaactcaaccggcgggtggtggccgctcaccagctggccggcgtcaccgtcgtcgacccggctaccacctggatcgacgtcgacgtcaccatcggccgcgacaccgtcattcacccgggtacccagttgctgggccgcacccagatcggcggtcgctgtgtcgtcggtcccgacaccaccctgaccgacgtcgccgtcggcgacggtgcctcggtggtgcgcacccacggttcgtcgtcgtcgattggggatggcgccgcggtcgggcccttcacctacctgcggcccggaaccgcgttgggcgccgacggcaagctgggcgcgttcgtcgaggtcaagaactccaccatcggcaccggcaccaaggtgccgcacctgacctacgtcggcgacgccgacatcggcgagtacagcaacatcggcgcctccagcgtgttcgtcaactacgacggtacgtccaaacggcgcaccaccgtcggttcgcacgtacggaccgggtccgacaccatgttcgtggccccagtaaccatcggcgacggcgcgtataccggggccggcacagtggtgcgggaggatgtcccgccgggggcgctggcagtgtcggcgggtccgcaacgcaacatcgagaactgggtgcagcgcaaacgccccggcagcccagcggctcaggcctcaaaaagagcctcagaaatggcctgccaacagcccacacaaccacccgacgctgatcagacaccgtga

SEQ ID NO: 28304 - DNA, 3705 bp, Mycobacterium tuberculosis
atgaccgcaccggggcctgcctgctcagataccccgatcgcggggctcgtcgaattggcgctgagcgcgccgacattccaacagctcatgcagcgcgccgggggtcgacccgacgaattgacgctcatcgcgccggccagcgcgcggctgttggtcgccagtgcgctggctcggcaggggccattgctggtggtcaccgccaccgggcgggaagccgacgacctggccgccgaactgcgtggtgtgttcggggatgcggtggcgttgttgccgtcctgggagacactgccgcacgaacggctctcacccggtgttgacaccgtcggcactcgcctgatggcgctgcgccggctggcccaccccgacgatgcccagctgggcccaccgctgggggtagtggtgacctcggtgcgctcgctgctgcagcccatgacgccgcagctgggcatgatggagcccctcacgctgaccgttggcgacgaatcccccttcgacggcgtggtggcgcggctggtcgagctggcatatacccgggtggatatggtcggccggcgcggcgagttcgctgtgcgcggcgggattctggacatctttgccccgacggccgaacatccggtgcgggtcgagttctggggcgacgagatcaccgagatgcggatgttctcggtagccgaccagcgctcgattccggagatcgacattcacacactggttgccttcgcctgccgtgaactgctgctgagcgaggacgtgcgggcgcgggccgcccaactggccgcacggcatcccgcggccgagagcaccgtcaccggcagtgcttccgacatgctggcgaagctcgccgagggcatcgcggtcgacggcatggaggcggtgttgccggtgctctggtccgacgggcacgcgttgctgaccgatcagctgcccgacggcacgccggtgttggtgtgcgacccggaaaaggtgcgcacccgcgccgcggatctgatcaggactggccgtgaattcctggaagcctcgtggtcggtcgcggcgctgggaactgcagaaaatcaagcccccgtcgacgtcgaacaactgggtgggtcggggttcgtcgaactggaccaggtgcgggccgcggcggcccgaacgggtcatccgtggtggacgttgagccaattgtccgacgagtcggcgatcgagttggacgttcgggccgcgccgtcggcgcgcgggcaccagcgtgacatcgacgaaatcttcgcgatgctacgtgcccacatcgcgaccggcgggtacgccgcgctggtcgcgccgggcaccggaaccgcacaccgcgtggtggaacggctgtccgagtccgacacccccgcggggatgctcgatcccggccaggcgcccaagccgggagtcgtcggggtgctccagggcccgctgcgtgacggcgtcatcattcccggcgccaacctggtcgtcatcaccgagaccgatttgaccggcagccgggtcagcgccgccgagggcaagcggctggcggccaagcggcgcaacatcgtcgacccgctggcgctgacggccggtgacctggtggtgcacgatcagcacggcatcggccggttcgtggagatggtcgagcgcacggtcgggggcgcccgccgggagtatctggtgctggagtatgcctcggccaagaggggtggcggggcgaaaaatactgacaagctctatgtcccgatggattcgctggaccagctgtcgcggtatgtcggcgggcaggcgccggcgctgagccggctgggcggcagcgactgggccaacaccaagaccaaggcgcgccgcgcggtgcgcgagatcgcgggcgagctggtctcgctgtacgccaaacggcaggccagccccgggcatgcgttctcgccggacacgccgtggcaggccgagctggaggacgcgttcggcttcaccgagaccgtggaccagctcaccgccatcgaagaggtcaaggcggacatggaaaagccgatcccgatggaccgggtgatctgcggcgatgtcggctacggcaagaccgagatcgcggtgcgggcggcgttcaaggcggtccaagacggtaaacaggtcgcggtgctggtgcccaccacgctgctggccgaccagcatctgcagacgttcggcgagcgaatgtccggattcccggtgaccatcaagggtctgtcgcggttcaccgacgccgccgagtcccgcgccgtgatcgacggcctggccgacgggtcggtggacatcgtgatcggcacccatcggctgctgcagaccggggtgcgctggaaggatctgggcctggtggtggtcgacgaggagcagcggttcggcgtcgagcacaaggagcacatcaagtcactgcgcacccatgtcgacgtgctgaccatgagcgccaccccgatcccgcgcacgttggagatgagcctggccgggattcgcgagatgtcgaccatcctgacgccgcccgaggagcgctacccggtgctgacctacgtcggaccgcacgacgacaagcagatcgccgcggcgctgcgccgggagctgctgcgcgacgggcaggcgttctacgtgcacaaccgggtcagctcgatcgacgcggccgccgcccgggtgcgtgagctggtgcccgaggcgcgggtggtggtcgcgcacgggcagatgcccgaggacctgttggagaccaccgtgcaacggttctggaaccgcgagcatgacatcctggtttgcaccaccatcgtggagaccggcctggacatctccaacgccaacactttgatcgtcgagcgcgccgataccttcgggctgtcccagctgcaccagctgcgtggccgggtgggccgcagccgggagcgcggctacgcctatttcctctatccaccgcaggtgccgctgaccgagaccgcttacgaccggttggcgacgatcgcgcagaacaatgagctgggcgcgggcatggccgtggcgttgaaggacctagagatccgcggtgccggcaacgtgctcggcatcgagcagtccggacacgtcgccggcgtcggattcgacctgtacgtgcggttggtcggcgaggccctggagacgtaccgggacgcgtaccgggcggccgccgacggccaaaccgtgaggaccgccgaagaacccaaggatgtgcgaatcgacctgcccgttgacgcgcacctgccaccggactacatcgccagtgatcggctgcggctggagggctaccggcggctggcggccgcctcctctgatcgcgaagtggcggccgttgtggacgagctaaccgatcggtatggggccctgccggagccggcccggcggctggcggcggtggcacggctgcggctgctgtgccgtggctccggcatcaccgacgtgacggcggcgtcggcagcgaccgtgcggctgtccccgttgacgctgccggactccgcccaggtgcggctgaagcgaatgtatcccggagcgcactaccgtgccacgacggccaccgtgcaggttcccattccgcgagccggtggcctcggcgcgccgcgaatccgcgacgtcgagctggttcagatggtggccgatttgataaccgcgctcgctgggaaaccgcgccagcatattggtataacgaaccctagcccgccaggcgaagacggccgtggtcgcaacacgacgattaaggagcgacaaccgtga

SEQ ID NO: 28305 - DNA, 978 bp, Mycobacterium tuberculosis
atgattgtcgtcctggtcgacccccggcgtccgacactggtgcctgttgaagcgatcgagttcctgcgcggcgaggtgcaatacaccgaggaaatgccggtcgcggtgccctggtcgctaccagcggctcgttcggcgcacgccggaaacgacgcgccggtgttgctgtcgtctgaccccaaccatcctgctgtcattactcgactggccgccggtgcccggctgatctcggcaccggattctcagcgtggcgaacgactcgtcgacgccgtcgcgatgatggacaagctgcgcaccgccggaccgtgggaaagtgagcagactcacgactcgctgcgcagatacctgctggaggagacctacgagctgttggacgcggtccgcagcggcagtgttgaccagctgcgcgaagagcttggtgatctcttgctgcaggtcctctttcacgcccggatcgctgaggatgcgtcgcaatcgccgttcaccatcgacgacgtcgccgacacactgatgcgaaagctcggcaatcgggcgccaggagtacttgcgggcgaatcgatttcgctcgaagatcaactggcgcaatgggaggcagccaaggcctcggaaaaggcgcgaaagtcggtagccgacgatgtccatacgggccagccggcattagcgctggcgcagaaggttattcagcgtgcccaaaaggctgggctgcccgctcacctgatccccgatgagatcacttctgtttcggtttcagctgacgtagatgcggaaaacacgctgcgcactgccgttttggactttattgacaggctgcgctgtgccgagcgggcaattgccgtcgcacgccggggcagcaacgttgccgagcagctcgatgtgacgccgctgggtgtgatcaccgagcaggagtggctcgcgcattggccaactgctgtcaacgattcccgcggcgggtccaagaaacgtaaaggcatgcgataa

SEQ ID NO: 28306 - DNA, 1290 bp, Mycobacterium tuberculosis
gtgccgattatcgagcaggttagggcccgagagatcctcgattcccgcggcaacccgacggtggaggtcgaggtggcgcttatcgacgggacattcgcccgggccgcggtgccgtcgggcgcctcgaccggggagcacgaggccgtcgagttgcgcgacggcggcgatcgctacggcggcaaaggcgtgcaaaaagccgtgcaggctgttcttgatgagatcggcccggccgtcatcggactcaacgccgacgaccagcgattggtcgaccaggcgctggtggacctagacggcacccccgacaagtcccggctgggcggcaacgcgatcttgggtgtctcgctcgctgttgccaaggcggcggcggattcggcggagctgccgttgttccgttatgtcggggggccaaacgcgcacattctgccggtaccgatgatgaacatcctcaacggcggcgcacacgccgataccgctgtcgacattcaagagttcatggtggcgccaattggcgcgcccagcttcgtcgaggcgttgcgctggggcgctgaggtgtaccacgcgctcaagtcggtcctgaaaaaggaggggctgtccaccggcctgggcgacgaaggcggcttcgccccggatgtggccggcaccaccgcggcgttggacctgatcagccgggccatcgagtcggcgggcttgcgacccggcgccgacgtggcgctggccctggacgcggcggccaccgagttcttcaccgacggcaccggctacgtcttcgagggcaccacccgtaccgcagaccagatgaccgagttctacgcgggcctgctcggcgcctacccgctggtgtcgatcgaagacccactgtccgaagacgattgggacggctgggccgcgctgacggcctcgatcggtgaccgggtgcaaatcgtcggcgacgacatctttgtcaccaatcccgagcggctcgaggagggcatcgaacggggcgtggcaaatgcgttgctggtcaaggtgaaccagatcgggacgttgaccgagacactcgacgcggtcacgctggctcaccacggcggataccgcacgatgatcagtcaccgcagtggcgagacggaggacaccatgatcgccgacctcgcggtggccatcggcagcgggcagatcaagacgggcgcgcctgctcgcagtgagcgcgtcgcaaaatacaaccagctgctgcggatcgaagaggcgcttggcgacgcggcccgctacgcgggcgacctggcatttcctcggttcgcgtgcgagacgaaatag

SEQ ID NO: 28307 - DNA, 2583 bp, Mycobacterium tuberculosis
gtgacgttgctcttcgccgatctttgcgcgatctttacgccctaccggtggatgattgagcatgtgaccaccaagcgcgggcagctgcggatctatctgggcgcggcccccggcgtgggcaaaacctacgccatgctcggcgaggcgcaccgcaggctggagcgcggcaccgacgtggtcgccgcggtcgtcgagacacacggacgcaacaagaccgcgaaactgctcgagggcatcgagatgatcccgccgcgctacgtcgaatatcggggtgccaggtttcccgaactcgatgtggaggcagtactgcgacgtcatcctcaggtggtgctggtggacgaactcgcccacaccaacacacctggcagcaagaaccccaagcgctggcaggacgttcaggaaatcctcgacgccggcatcacggtgatctcgacggtcaacatccagcacttggagggcctaaacgatgtcgtggagcaaatcaccggcatcgagcagaaggagaagatccccgacgagatcgtccgcgcggccgatcaggtcgagctggtcgacatcacaccggaagcgttgcggcgcaggcttgctcacggcaacgtctatgcagccgaacgggtcgatgccgcgctgtcgaactacttccgcacgggcaatctgaccgcgctgcgcgagatcgcgttgctgtggctggccgaccaagttgatgcggccctggagaagtaccgcgcagacaaaaagatcaccgccacgtgggaggcgcgggaacgcgtcgtcgtcgccgtgaccggcggcccggagtcggagacgttggtgcgacgggcatcgcggatcgcgtcgaagtccagcgccgagctgatggtggttcacgttatccgtggcgacggcctggcgggggtgtccgcgccgcagctgggcagggtccgcgagctggcgacaagcctcggtgcgaccatgcacaccgtggtcggcgacgacgtgcccaccgcgctgctggacttcgcccgcgagatgaacgccacgcagctcgtcgtcggcacatcgcggcgatcgcgatgggcacgcctgtttgacgaggggatcggcgcccgcaccgtccaggagcccggcggcatcgacgttcacatggtcacccatcccgcggccagccgggcctccgggtggtcgcgggtctccccgcgcgagcggcatatcgcgtcgtggctggccgcgctggtggtgccctcggtgatctgcgccatcacggtggcctggctcgaccgattcatgggcatcggcggcgagagcgcgttgttcttcatcggcgtgctgatcgtggcgttgctgggcggcgtcgcccccgccgcattgtcggccttgctgtcgggcatgctgctgaactactttctgaccgagccccgctacacctggaccatcgccgaaccggacgccgcagtaaccgaattcgtgttgttggcgatggccgttgcggtggcggtgttggtggacggcgcggctagccgaacccgtgaggctcggcgcgcatcccaggaggctgagttgctggccctgtttgccggttcggtgttgcgcggcgcagaccttgccacgctgctgcagcgggtccgcgaaacgtattcccaacgggccgtgaccatgctgcgtgtccggcagggcgcatcgacaggcgaaaccgtcgcgtgcgtcgggacaaacccgtgtcgggacgtcgactccgccgacaccgcaatcgaagtcggcgacgacgagttttggatgctgatggcaggccgcaagttggccgcccgcgaccgccgagtgctgaccgcggtcgcgacacaggccgcgggtctggtgaagcagcgcgagctggcggaagaggccggccaggccgaggccatcgctagggccgatgagctgcgccggtcgctgctgtcggcggtcagccacgacctgcgcaccccgctggcggcggccaaggttgcggtgtccagcttgcgcaccgaagacgtcgctttctcccccgaggataccgccgagctgttggccaccatcgaggagtccatcgaccaactcaccgccctggtcgcaaacctgctcgattcgtcgcggttggctgccggcgtgattcgcccccagctgcgccgggcatacctggaggaagcggtgcaacgggccttggtcagcatcggcaagggcgccaccggtttttaccgatccggcatcgaccgggtcaaggtcgacgtgggagacgccgtggcgatggccgacgccgggttgctggagcgggtgctagccaacctgatcgacaacgcgctgcgatatgcgcccgactgcgtggtccgggtcaacgcgggacgggtgcgtgagcgggtcctgattaatgtcatcgacgagggcccaggggtcccgcgcgggaccgaggagcaactctttgccccgttccagcggccgggggatcacgacaacaccaccggtgtcggtctggggatgtcggtggcacgcggcttcgtcgaggctatgggcggcacgatttcggctaccgataccccgggcggcgggctcacagtggtgatcgatctggcggctcccgaggaccgcccatga

SEQ ID NO: 28308 - DNA, 2130 bp, Mycobacterium tuberculosis
gtgatgatcgcacgcatggagacctccgcaaccgccgcggcagcgacgtcggcaccccggctccggctggccaagcgctcgctgttcgatccgatgattgtgcgctcggcgctgccccagagcctgcgcaagctggctccgcgggtacaggcccgtaacccggtcatgttggtcgtgctggtcggtgccgtgatcaccacactggcgttcctgcgcgacctcgcatcctcgacagcccaagagaacgtcttcaacggtctggtcgccgcgttcctctggttcaccgtcctgtttgccaactttgccgaggccatggccgaaggacgcggcaaggctcaggcggcggcgctgcgcaaagtccggtccgaaacgatggccaaccggcgcacggctgcgggcaacatcgaatcggtcccttcgtcgcggctggacctcgacgacgtggtggaggtttcggctggcgaaacgatcccgtcggacggcgagatcatcgaaggcattgcctccgtcgacgagtctgcgatcaccggcgaatcggcaccggtgatccgcgagtcgggcggcgaccgttccgcggtgacgggtggcaccgtggtgctgtcggatcggatcgtcgtgcggatcaccgccaagcagggacaaacattcatcgaccggatgatcgcgctggtggagggcgccgcacggcagcagacaccgaacgagatcgcgctgaacatcctgctggctgggctgacgatcatctttttgctcgcggtggtgacgctgcagccgttcgccatctattccggcgggggacagcgggtggtcgtgctggtggcgttgctggtgtgtctcattccgaccacgatcggtgcgctgctgtccgcgatcggcatcgcggggatggaccggctggtgcaacacaacgtgctcgccacatctgggcgggcggtggaggcggccggcgacgtgaacacgctgctgctggacaagaccggcaccatcaccctcggtaaccggcaggccaccgagttcgtgccgatcaacggtgtgagtgccgaggcggtcgccgacgccgcccagctgtcgagcttggccgacgaaactccggagggccgctcgatcgtcgtgctggcgaaggacgagttcgggctgcgcgcccgcgacgagggcgtgatgtcacacgccaggttcgtgccgttcaccgccgaaacccggatgtccggggtcgatctcgccgaggttagcggcatccgtcggatccgcaagggtgccgcggctgcggtgatgaagtgggttcgcgatcacggtggccaccccaccgaggaggtgggtgccattgtcgacggcatcagctccggcggggggacacccctagtcgttgcggaatggaccgataacagcagcgcgcgggccatcggcgtcgtccatctgaaggacatcgtcaaggtgggcatacgggaacgcttcgacgaaatgcgccgaatgagcatccgcaccgtgatgatcaccggtgacaacccggcgaccgccaaggcgattgcacaggaggccggcgtcgacgatttcttggccgaggccacgcccgaggacaagcttgcgctcatcaagcgcgaacagcagggcggtcggctggtcgccatgacgggtgacgggaccaatgacgcacccgcgctcgcgcaagccgatgtcggggtggcgatgaataccggcacccaggcggcccgggaagccggcaacatggtcgatctcgactccgaccccaccaagctcatcgaggtcgtggagatcggcaagcagctgctgatcacgcggggcgcgctgacgacgttttcgatcgccaacgacgtcgcgaagtacttcgccatcatccctgccatgttcgtcggcctgtatccggtgctcgacaagctgaacgtcatggcgctgcactcaccaaggtcggcgattctgtcggcggtcatcttcaatgcgctggtgatcgtcgccttgatcccattggcgttgcggggcgtgcggtttagggcggaaagcgcgtcggcgatgctgcggcgcaacctgctgatctatgggctgggcggtctcgtcgtcccgtttatcggcattaaactggtcgatctcgtcatcgtcgccctcggggtgtcctga

SEQ ID NO: 28309 - DNA, 1026 bp, Mycobacterium tuberculosis
atgtgcgcccatcaattcttcgggctggtccacaacccggtggttgcggcggcgatcggcaaacccgaaccaccaccggttgactcggatatcggtctgccgacgacggtgcccttcgaaccgtggtcggtcgcagatttctcccgatacctgagcaccctcggcctgcccgccgcgggcgacgcggtgaccctccaccgcatcctcagctcgatggaacgcgcgggacttctgctgccgctcggttgggacccgcgattgccagtcatggggcagaagtacatctcgcagggggcgatatcgaagggacagcgtggcggcaacctctggttgtccgaggtgttcggtgccgagctcatcatcccgagctacaacgcggtgaccgttcaactcgccggtcacgacgacgctggcaatccggtggatagttggggaaccggcctcgtcgtcgaccacaatcacgtcatcaccaacaaacatgtcgtgaccgggctcgcgggcacgagcgcaggtctgtccgtctatccgtcaagcaaccacgccgaagccgagttggtgaacttctcgggcaccgctcacccgcaccccacgctcgacgtcgcagtaatcaaattcgagatgcccgaaggcaagtacatcccgcggcttggcggcatggcgttccgtgatcccgactgggcggatgaggtctacgtgttcggttacccgcgggtgccgatgactgcggagatggcgatcacggtgcagcgtggcgaggtggtcaacccggccgcgacgactatccccggccggcagaagattttcctctactcggcaatcgcgcggccgggcaacagcggcggtccgatcgttgcgcaagacggccgtgtgatcggcctcgtggtcgaggactctgcggaagcaccgtcgacgggcaccggaccgaacgcggcacccttctatcgcggcatcccgtcgagcgaagtgatccgagcactcgacgaactcgacttcggcggcatcgtggagatggacaccctcccatag

SEQ ID NO: 28310 - DNA, 2004 bp, Mycobacterium tuberculosis
gtgtcgtttgtgttggtgtctccgtcgcagctgatggccgcggcggccgatgtggccggtatcggttcggcaatcagcgcggccaacgcggccgccctggccccgacgtcggtgctggccgcggccggtgccgatgaggtgtccgcggcggtcgcggcactgttttccgcccacgccggccagtatcaacagctgggcgcgcgtgcagcgctgtttcacgagcagttcgtgcaggcattgaccggggcggcgagcgcgtatgccagcgccgaggcgaccaatgtcgagcagcaggtgctgggtttgatcaacgcgcccacccaggcgctgttggggcgtccgctgatcggcaacggcgccgatgggaccgcggccaatcccaacggtggcgccggtgggttgttgtacggcaacggcggcaacgggttttcccaaaccaccgccgggctcaccgggggtaccggcgggtcggccgggttgatcggcaacggcggcaacggaggggccggcggagccggcgccaacggcggcgcgggcggcaacggcggctggctctacggcagcggcggcaatggcggcgccggcggcgccggccccgccggagccatcggcgcgccgggcgtcgcgggtggtgccggcggggccgggggaacggccggattgttcggcaacggcggtgtcggcggcgtcggcggtgacggcggacaaggcggcaacggtgccggcgccggggccagcggcaccaagggcggtgacgccggcgccggcggggcgggcggtgccggcggctggatccacggccacggcggcgccggcggtgacggcggcgccggcggggccggcggacaagccagtcccggcgcccccggcccacccagccaaccgggcggcgccggtggtgcgggcggcgccggtggccgcggtggcgacggcgggtcggccggctggctgtccggcaacggcggtgacgccggcaacggcggcggcggcggcaccgccggcggtgccggcaacggcggccaattcggtggagacggcggcaccggcggcaccggcggcaccgccggcgccggcggcaacggcggacgaggcgccgtgctgttcggtcacggaggtaacgccgggcacggcggcgccggcggcaacggcgcggccgccggcgccggcggcgaacatgtcgtggccaccgccggtaagggtggtacgggtggtgtcggcggcgacggcggcggcggcggcgccggtggtggcggtgggctgctgtatggcaacggcggggccggcggcgccggcaactccgggggcgacggcggcaccgggctcaacgccgcactaggtggtaacggtggcggtggcggtgtcggcggcaacgccggggccggcggcaccggcgggtcggccggctggctgtcgggcaacggcggcgccggcggtagcggcggcagcgccggagccggcggcgccggcggaaagggcggcgacacccccaacggtctggccatcaatcccggtatcggcggcaacggcggggacaccggcaacgccggcaacggcggcaacggcggatcggccgccaggctgttcggtggcggcggcgccggcggcgccggcggaacgggcagcaccgccggcagcggcggcagcggcggcaccaacccgccgaccgggcttcaagccgccggcggtaacggcggcagcggtcacgcgggcggtcacggcggcaacggcggcggcgccggcctgctcggcggcggcggcaccggcggcaacggcgggggcggcggccaaggcggtctgggcgccgccgccggcggtgtcgacggcaacggcggcaacggcggcaacggcggcaagggcggcgacgcccagttggtcggtgacggcggcaacggcggcaacggcggcaagggtggcgccggcctgatcgccggactcgacggcgccggcggcgccggcggaactcgaggactcatcttcggcaacgccggcacgccggggcagtaa

SEQ ID NO: 28311 - DNA, 729 bp, Mycobacterium tuberculosis
atgagcggccaggccgacaccgccaccaccgcggaagcaaggacgccggcccacgctgcccaccacctcgtcgaaggtgtcgcccgtgtcctgaccaaaccgcgcttccgcggctggatccacgtgtattccgccggcaccgcggtgttggccggtgcgtcgctggtcgcggtgtcgtgggcggtgggttccgccaaggcgggcctgacgacgctggcctacaccgcggccacgatcaccatgttcaccgtcagcgccacttatcaccgggtcaattggaaatccgcgacggcccgcaactggatgaagcgggccgaccactcgatgatcttcgtgttcatcgccggcagctacacgccgttcgcgctgctggccttgccggcccacgacgggcgcgtggtgttgtcgattgtttggggcggtgcgatcgccggaatcttgctgaagatgtgttggccggcggcgccgcgctcggtcggggttccgctgtacctgttgctgggttgggtggcggtctggtacaccgcgacgatcctgcacaacgccggggtgaccgcgttggtgttgctgtttgttggcggcgcgttgtacagcatcggcggcattctctacgcggtacgctggcccgacccgtggccgacgacgttcggctaccacgagttcttccacgcctgcaccgcggtggcggcgatctgccactacatcgcgatgtggttcgtggtgttctga

SEQ ID NO: 28312 - DNA, 987 bp, Mycobacterium tuberculosis
atggagctggtccgggtgaccgaggccggagccatggccgcgggccgctgggtaggccgcggcgacaaggagggcggcgacggcgcggcggtcgacgcgatgcgcgaactggtcaactcggtttccatgcgcggggtggtggtcatcggcgaaggcgaaaaggaccacgcaccaatgctctacaacggcgaagaagtgggcaacggcgacggaccggaatgcgactttgccgtcgaccccattgacggcaccacgctgatgagcaagggcatgaccaacgccatctcggtgctggcggtagccgatcgcggcaccatgttcgacccgtcggcggtgttctacatgaacaaaatcgccgtcggccccgatgccgcacacgtgctggatatcaccgcgccgatctcggaaaacatccgagcggtcgccaaggtcaaggacctgtcggtgcgagacatgacggtgtgcatcctggacaggccgcggcacgcgcaactcatccacgacgtccgcgccaccggggcccggatccggctgatcaccgatggcgacgtcgccggcgcgatctcggcgtgccgaccgcactccggcaccgacctgctagctgggatcggcggcaccccggagggaatcatcgccgccgcggcgatccgctgcatgggcggggcgatccaggcgcagctcgccccgcgcgacgacgcggaacgccgcaaggccctagaagccggttacgacctgaaccaggtcttgaccaccgaagatctggtgtccggggaaaacgtcttcttctgcgccactggggtcaccgacggcgacctgctcaagggagtgcgttactaccccggcggctgcaccacccattcgatcgtgatgcgctcgaagtccggcaccgtccggatgatcgaggcctaccaccggctttcaaagctcaacgaatactccgcgatcgacttcaccggcgacagcagcgccgtgtacccattgccctaa

SEQ ID NO: 28313 - DNA, 1113 bp, Mycobacterium tuberculosis
atgcttcgccgcatgggtgatgcatcgctgacaaccgagctcggccgcgttctggtcaccggcggcgcgggcttcgtgggcgccaacctggtgaccaccttgctggaccgcgggcactgggtgcgttccttcgaccgcgcgccgtcgctgttgcctgcgcatccgcaactggaggtgctgcaaggggacatcaccgacgcggacgtctgcgccgcggccgtggacggcatcgacacgatcttccacaccgcagcgatcatcgagctgatgggcggcgcgtcggtcaccgacgagtaccgccaacgtagctttgcggtcaacgtcggcggcaccgagaacctgctgcacgccggccagcgggccggggtgcagcggttcgtctacacgtcatccaacagtgtggtgatgggcggccagaacatcgccggcggtgacgagacgctgccctataccgaccggttcaacgacctctacaccgagaccaaggtggttgccgagcgattcgtgttggcccagaacggtgtcgacggcatgctgacgtgcgcgatccggcccagcggcatctggggaaacggcgatcagacgatgttccgcaagctgttcgaaagtgtgctcaagggccacgtcaaggtgctggtcgggcgcaagtcggcccggctggataactcttacgtgcacaacctgattcacggtttcatcttggccgctgcccatctggtgccggacggcacagcgcccgggcaggcttacttcatcaacgacgcagagccgatcaatatgttcgagttcgctcggccggtgctcgaggcgtgcgggcagcgctggccgaagatgcggatttccggccccgcggtccgctgggtaatgacggggtggcagcggctgcacttccggttcggattccccgcgccgctgctcgagccgctggccgtcgaacgactgtacctggacaactacttttcgatcgctaaggcacgccgcgacctgggctatgagccgctgttcaccacccagcaggcgctgaccgaatgcctgccgtactacgtgagtctgtttgagcagatgaagaacgaggcccgggcggaaaaaacggccgccacagtcaagccgtag

SEQ ID NO: 28314 - DNA, 1248 bp, Mycobacterium tuberculosis
gtgacccagaattcagcggagaatccgttcccggttcgcgcggtggcaatccgggtcgcgggctggatcgacaagctgggcgcggtctgggtggaggggcaattggcccagatcacaatgcgcccagacgccaagacggtgttcatggtattgcgcgatcctgcggccgacatgtcgctgaccgtgacgtgttcccgcgacctggtgctgtccgcgccggtgaagctggccgaaggcgttcaggtagtggtctgcggcaagccctcgttctacaccggacgtggcacattctccttgcggctcagcgagattcgcgctgtcggcatcggcgagctgctggcacgcatcgaccggctgcgccggctgctggacgccgaggggctcttcgacccccgcctcaagcggccgatcccgtacctgcccaacatgatcggtctgatcaccggccgtgcgagtgccgccgaacgtgacgttacgacggtggcctcggcgcgctggccagcggcacgtttcgccgtccgcaacgtcgccgtgcagggccccaacgccgtcggccagatcgtcgaggcgctgcgcgagctcgatcgagacccggacgtcgacgtgatcgtgctggcccggggcggcggctccgtcgaggacctgctgccgttttctgacgagacgttgtgccgcgcgatcgcggcctgccgtacgcccgtggtcagcgccgtcggtcacgaacccgacaatccgctgtgcgatctggtcgtcgacctgcgcgccgccacccccaccgacgccgccaagaaagtggttcccgacaccgcagccgagcagcggctgatcgacgatctgcgccggcgcagcgcccaggcgttgcgcaactgggtttcccgcgagcaacgggcagtcgcgcagttgcgtagccgcccggtgctggccgatccgatgacgatggtcagcgtgcgcgccgaggaggtccaccgagcccgctcgacgcttcgtcgcaacctcaccctgatggtcgccgccgagaccgaacgcatcggtcatctggccgcacgcctggccacgctgggtccggccgccacgctcgcccgcggctatgccatagtgcagaccgttgctcagacgggacccgagggcggatccgaaccacaggtgctgcggtcggtccacgacgcaccggaaggcaccaagctgcgcgtgcgggttgccgacggagccctagcggcggtcagtgaaggacaaaccaatggtctgtga

SEQ ID NO: 28315 - DNA, 1074 bp, Mycobacterium tuberculosis
gtgagcttgagcctggggatcgtgggcctgcccaacgtcggcaagtcgacacttttcaacgcgctgacccgaaacaacgtggtcgcggccaactacccgttcgcgacgatcgaaccgaacgaaggtgtcgtctccctgcccgatccccgcctggacaagcttgctgagcttttcggatcgcagcgagtcgtacccgcgccggtcaccttcgtggatatcgccggcctggtcaagggggcgtccgagggagccgggctgggtaacaagttcctggctcatatccgcgaatgcgacgccatttgtcaggtggtgcgggtgttcgtcgacgacgacgtgactcatgtcaccggacgggtcgatccccagtccgacattgaggtcgtcgagaccgagctgatcctggcagatctgcaaaccctggagcgggccacgggccggctggagaaggaagcgcgcaccaacaaggcgcgcaagccggtctacgacgcggcactgcgtgcccagcaggtgctcgacgccggcaagacgctgttcgccgcgggggtggatgccgccgcgttgcgcgagctgaacctgctgaccaccaagcccttcctgtatgtgttcaacgccgacgaggcggtgctcaccgacccggcgcgagtcggtgagctgcgcgcgttggtggcgcccgccgatgcggtgttcctggacgccgccatcgagtcggagttgaccgaactggacgacgagtcggccgcggagctgctggagtccatcgggcagagcgagcgcgggctggacgcgctggcccgggcgggttttcacaccctgaagttgcagacctttttgaccgcgggccccaaggaagcgcgggcgtggaccatccatcaaggcgacaccgcgccgaaggcggccggggtgatccacagcgacttcgagaagggtttcatcaaggccgagatcgtgtcctacgacgacctggtggccgcgggttcgatggcggcggccaaggcggccggcaaggtccggatcgaaggcaaggactacgtgatggccgacggtgacgtagtggagttccgattcaacgtgtag

SEQ ID NO: 28316 - DNA, 1473 bp, Mycobacterium tuberculosis
atgactcgtatcacccgagccaatggttgccccgacggaactctcgaaaacgccgttgtggcgctggacggcggcgcgaactacccacgcgagatcctgggcaacaaaggccacggcatcgacatgatgcgccggcaccatctgccggtgccgcctgcattctgcattaccaccgaggtgggcgtgcgctatctcgccgcgcccggatccacgatcgccgcgatctgggatgacgtgctggatcggatgagctggctggaaacagaaacctcgtgcacgttcggccgtggcccgaatccgctgctggtcagcgtgcgctcgggagccacccagtcgatgcccggcatgatggacacgattctggacgtgggcatgaccgacgcggtcgaacgagtacttgccaggccgggtgccgccgacttcgcccacgacaccagacggcgattcaccagcatgtatcggcgcatcgtcggcagcgccggtcccattaccgacgacccgtatgcccagttgcgcgcgagcatcgaggcggtattcgcctcctggaactcacctcgcgccgttgcctatcgcgaccatcacggcctcgacgaccaaggcggtacggcggtggtggtgcaggcgatggtattcggcaacctcaccgcgaactcgggcgccggggtgctgtcctcacgcaacccgatcaccggagccaacgaaccgttcggcgaatggctacccggcggccaaggcgacgacgtggtgtccggattggtcgccgtcgcaccgatcaccgccctgcgcgaccagcagccggccgtctacgaccaactgatggcggccgcccgcagtttggagcgcatggcaggcgacgtccaggagatcgaattcaccgtggaggacagccagctgtggctgctgcagacccgcggggcggaacgctcggcgcaggccgccgtgcgactggcgctgcaactgcatcacgagggactcatcgacgacaccgagacactgcgccgggtgactccgacgcacatcgagactttgctacggccgtcgctgcagacggaaacacggttggctgcaccgcttttggccaagggcctgcccgcttgcccgggcgtggtatccgggaccgcctacaccgaggtggacgaggcgctggacgctgcggaccggggcgagccggtcatcttggtgcgagatcacaccagaccggaggacgtcatgggcatgcttgccgcgcaaggcattgtcaccgaggtggggggtgccgccagtcatgcggcggtggttagccgcgagctcggtcgagtggccgtggtgggttgcggtcccggggtcgcggcggcactggccggcaaggagatcaccgtcgacggctatgaaggcgaagtgcgccaaggcgttctggcattgtctgcctggtcggaaagtgacacgccggagttgcgcgagctggccgacatcgcgcaacggatcagttcatga

SEQ ID NO: 28317 - DNA, 1182 bp, Mycobacterium tuberculosis
atgaccgggccgctcgcggcggccaggtccgtcgctgccacgaaatcgatgaccgcgcccaccgttgatgagcggcccgacatcaaaaagggcctcgccggcgtggtggtggacaccaccgccatctccaaggtggtgccgcagaccaattcgttgacctaccggggatatccggtccaggatctggcagcccgctgcagtttcgagcaggtcgccttcctgctgtggcgtggtgagttgcccaccgatgccgagctggcgttgttcagccagcgcgaacgagccagccgtcgggtggaccgctcgatgctgtcattgctggccaagctgccggacaactgccacccgatggacgtggtgcgcaccgcgatcagctatctcggtgccgaggacccggacgaggacgacgccgcggccaaccgggccaaggcgatgcgcatgatggcggtgttgccgacgatcgtggcgatcgacatgcggcgccgacgcgggttgcccccgatcgcaccgcacagcgggctcggttatgcgcagaacttcctgcacatgtgcttcggggaggtacccgaaaccgccgtcgtgtcggcgttcgagcagtcgatgatcctctacgccgagcacggattcaacgcgtcgacgttcgccgcccgggtggtgacctcgacccaatccgacatctacagcgcggtgaccggcgcgatcggcgccctcaaggggcggctacacggcggcgccaacgaagccgtcatgcacgacatgatcgagatcggcgatccggccaacgcgcgggagtggttgcgcgccaagctcgcccgcaaggaaaagatcatgggcttcgggcatcgggtgtaccggcacggcgactcccgggtgccgaccatgaaacgggcgctggagcgcgtggggaccgttcgcgacggccagcgatggctggacatctaccaggtgttagcggccgagatggcgtcggccaccgggatcttgcccaacctcgattttccgaccgggcccgcgtactacctgatgggattcgacatcgccagcttcaccccgatcttcgtgatgagtaggatcaccggctggaccgcacacatcatggaacaggccacggccaacgcgctgatccggccgctgagcgcatattgcgggcacgagcagcgggtgttaccgggcaccttctag

SEQ ID NO: 28318 - DNA, 807 bp, Mycobacterium tuberculosis
atgtcgaactaccggatcgacactcggacaattgtcccgggtctcgccgtcaccctggccgacggggtgctgtcggtgaccatcgatcgcccggagagtctcaactcgctgaccaagccggtgctggcagggatggccgacgcgatcgagggcgcggccaccgacccacgggtgaaggtggtgcgcctcgggggcgccggtcgcggcttcagctccggaggggcaatcagcgttgacgatgtgtgggccagtggcccgcctaccgacaccgtcgcggaggccaaccgcacggtgcgtgccattgtggcactaccacaaccggtcgttgccgtcgtgcagggaccaaccgtcggctgtggcgtctccctggcgctcgcttgtgacctcgtattggcctccgacaatgcgtttttcatgctcgctcacaccaacgtggggttgatgcccgacggcggcgcgtcggcgttggttcaggccgcgatcggccgcatccgcgccatgcatatggcgctgctgccggaccgggtgccggccgccgaggccttgtcctggggcctggtcagcgccgtctatccggccgccgacttcgatgccgaggtggacaagttgatctcacggctgttggccggcccagcgctggctatcgccaagacgaagaacgcgatcaatgcggccacgctcaccgagttggcacccactctcctgcgcgaattggatggccaggccctcctcctgcgtactgacgacttcgccgagggcgcaacggcattccagcagcgccggacccccatgttcaccggccgttga

SEQ ID NO: 28319 - DNA, 366 bp, Mycobacterium tuberculosis
gtggagctgcgggattggttacgggtcgacgtgaaggcgggaaagccgttgttcgaccagctcagaacccaggtgatcgacggagtccgcgccggcgcattgccgcccggcacccggctcccgacggtgcgtgacttggccgggcagctgggcgtggcggccaataccgtggcccgcgcctaccgcgagttggaatcggcggcgatcgtcgaaacgcggggacgcttcggcactttcatttcccgcttcgatccgaccgacgccgcgatggctgccgcggccaaggaatatgtcggcgtggcgcgagcgctggggctgacgaagtccgatgcgatgcgctatctcacccacgtgccggacgactga

SEQ ID NO: 28320 - DNA, 3699 bp, Mycobacterium tuberculosis
gtgaccgttacacctcacgtcggtggaccgctcgaagagctgctggagcgcagcgggcgcttcttcaccccaggtgagttctcggccgacctgcgcaccgtaacccggcgcggcggccgcgaaggtgacgtgttctaccgcgatcggtggagtcacgacaaagtggtccgatccacgcacggagtcaactgcaccggatcctgctcatggaagatctacgtcaaagacgggatcatcacctgggaaacccagcagaccgactacccgtcggtgggcccggaccggcccgaatacgagccacgaggttgtccccgtggcgcgtcgttctcctggtacagctattcgccgacgcgggtgcgctatccgtatgcccggggcgtgctggttgagatgtaccgggaagccaagacccgcctgggcgacccggtgctggcgtgggccgacattcaggcggatcccgagcgcagacgccgctatcaacaggcccgcggcaagggtgggctggtccgggtgagctgggccgaggccagcgagatggtggccgccgcccacgtgcacaccatcaagacatacggcccggaccgggtcgccggcttctcgccgattccggcgatgtcaatggtcagccatgccgcggggtcccggttcgtggagctgatcggcggcgtgatgacgtcgttctacgactggtacgccgacttgccggtggcctcgccgcaggtgttcggcgaccagaccgacgtgcccgaatccggcgactggtgggatgcgtcgtatttggtcatgtggggctccaacgtcccgatcacccggacgcccgacgcacattggatggcggaggcccgttaccgcggcgctaaagtcgttgtcgtcagcccggactacgccgacaacaccaagttcgccgacgagtgggtgcggtgcgccgccggtaccgataccgcgctggcgatggcgatgggccacgtgatcctgtcggaatgttacgtccgtaaccaggttccgttctttgtcgactatgtgcgccgctacaccgacctgccgtttttgatcaagttggaaaagcggggcgacctgctggttcccggaaagttcttgaccgcggccgacattggtgaagaaagtgagaacgcggcgttcaaacccgccctgctggatgagcttacgaataccgttgtcgtgccgcagggctcactgggattccgtttcggtgaggacggtgttgggaagtggaacctggacctgggttcggtggtgccggcgctaagtgtggagatggacaaggctgtcaacggcgatcgcagtgctgaactggttacgctgcccagctttgacaccatcgacgggcacggtgagacggtgtcgcgtggggtgccggtgcgccgggcgggcaagcatctggtgtgcacggtgttcgatctgatgttggcccactacggggtggcgcgtgcggggctgcccggcgaatggccgaccggctaccacgaccgaacccagcagaacaccccggcctggcaggagtcgatcaccggtgtgccggccgcgcaggcaatccggtttgccaaggaattcgcccgcaacgcgaccgaatccggaggacggtcgatgatcatcatgggcggcggaatctgtcactggttccacagcgatgtcatgtaccgctcggtgttggcgctgctcatgttgaccggatcgatgggacgcaacggcggcgggtgggcgcactacgtcggccaggagaaggtgcgtccgttgaccgggtggcagacgatggcgatggccaccgactggtcgcggccgccgcgtcaggtgcccggcgcgtcgtactggtatgcgcacaccgaccaatggcgctacgacggctacggcgcggacaagcttgccagcccggtgggtcgcggcaggttcgccggcaagcacaccatggacctgctgacctcggccacggcgatgggctggagcccgttctatccacaattcgatcggtccagtctcgatgtcgccgacgaggcccgcgccgcgggccgcgacgtgggtgattacgtcgccgaacaacttgcccagcacaagctgaagctctcgattaccgatccggataacccggtcaactggccgcgggtgctcaccgtctggcgggcgaacctgatcggctcgtcgggcaagggcggcgagtatttcttgcggcatctgctgggcaccgactccaacgtacagtccgaccctcccaccgacggtgtgcatccccgggatgtggtgtgggacagcgacattccagagggcaagctcgacctgataatgtcgatcgacttccggatgacgtcgacgacgctggtgtcggatgtcgtgttgcccgccgcgacctggtacgagaaatccgacctgtccagtaccgatatgcacccgtacgtgcactcgttcagtccggcgatcgatccgccgtgggaaacccgttcggactttgacgcattcgccgccatcgcgcgtgctttcagtgcgctggcgaaacgtcatctgggcactcgcaccgatgtggtgctgaccgcgctgcagcacgacaccccggatgagatggcatatcccgatggcaccgaacgtgattggctggcgaccggagaagtcccggtgccaggcaggacgatgagcaagctcactgtggtggagcgggactacaccgcgatctacgacaagtggctgaccctgggaccgctcatcgaccagttcgggatgaccaccaagggatataccgtccatcccttccgggaggtcagcgagctggcagccaacttcggggtgatgaattccggtgtggcggtgggtcgtccggcgatcaccacggctaagcggatggctgacgtgatcctggcgctgtccggcacatgcaacgggcgactcgcggtcgagggattcctcgagctggagaagcgtaccgggcagcggctggctcatctggccgagggcagcgaggaacgccgcatcacctacgccgatacccaggcgcgtcccgtgccggtgatcaccagcccggaatggtcgggcagcgagagcggtggccgccgctacgcgccgttcacgatcaacatcgagcatcttaagccgtttcacacgctcaccgggcgtatgcacttctacctggcgcatgactgggtcgaagaactcggcgagcagttgcccgtctatcggccgccgctggacatggcgcggctgttcaaccagcccgagctcggaccgaccgacgatggactcgggctcaccgtgcgctatctgacgccgcactccaagtggtcgtttcactcgacctaccaggacaacctatacatgttgtcgttgtcccgtggcggtccgacgatgtggatgagcccgggtgacgcggcgaaaatcaatgtgcgcgacaatgattgggtagaggcggtcaatgccaacggcatctacgtgtgccgggcaatcgtcagccaccggatgcccgagggtgtggtgttcgtctaccacgtgcaggagcgcaccgtggacacgccgcgcaccgagaccaacggcaaacgcggcggcaaccataacgcgctgacccgcgtacgaatcaaacccagccacctggccggtggctacggccagcacgcgttcgcgttcaactacctgggtccgaccggtaaccagcgtgacgaggtgaccgtggtgcgccgccgcagccaggaagtgcggtactga

SEQ ID NO: 28321 - DNA, 1677 bp, Mycobacterium tuberculosis
atgaaggtcatggcgcagatggcgatggtgatgaacctcgacaaatgcattggttgccatacctgctcggtgacctgcaagcaggcctggaccaatcgctcgggaaccgagtacgtgtggttcaacaatgtcgaaacccgtccgggtgtgggctacccgcgcacctacgaggatcaggagcggtggcgcggggggtgggtgcgcgacaagaagggccggctgcggctgcgcgacggcggccggatccataagctgttgcgcatctttgccaaccccaagctgcccactatcggcgactactacgagccgtggacctatgactacgaaaacctgacatcggcgccggcgggtgacacctttccgaccgcggcgccgcgaagcctgatcagcggcaatccgatgaaggtgtcgtggggatccaactgggacgacaacctggccgggtcgccagagatcgtgccgaacgacccggtgctaaagaaggtcaaccaagtcaaccaagaggtcaagctgaagcttgaagagaccttcatgttttacctgccgcggatctgcgagcactgcctgaacccgtcgtgtgtggcgtcgtgtccgtcgggggcgatgtacaagcgcaccgaggacggcatcgtgctcgtcgaccaggaccgctgccgcggctggcggatgtgtgtgtccgggtgcccatacaagaaggtgtatttcaaccacaagaccggcaaggccgaaaagtgcaccctgtgctatccgcgcatcgaggtggggttgccgacggtgtgctcggaaacgtgtgtggggcggctgcgctatctgggtctggtgctctatgacgtcgatcaggtgctgcaggccgcgtcggtggaaagcgacaccgacctctacgaggcgcagcgccggatcctgctggacccgcacgatccgcgggtgatcgccggggcgcgcgcggaaggcatcgccgacgagtggatcgaggccgcccagcggtccccggtgtacgcgttgatcaacacctaccgggtggcgctgccgctacatccagagtaccggaccatgccgatggtctggtacatcccgccgctgtcgccggtggtcgacgcggtcagccgcgacgggcacgacggggaggacctgggcaatttgttcggcgcgctggacgcactgcggattccgattgcctatctggccgagctgttcaccgcgggcgacaccgaggtggtcgcgggcgtgttgcggcggctggcggcgatgcgctgctacatgcgcgacatcaacctgggccgggagacccagccccacatcccggaatcggtcgggatgaccgaggagcagatctaccagatgtaccgactgttggctgtggcgaaatatgaagagcgctatgtcattccgacgtcgtacgcgggggagctgccggccgcggcgatgaccgacgatatggggtgctcgttgtcggtcgacggcggaccgggaatgtacgagtccggtccgttcgggcagggcagccctactccggtgccaatcgccgtggagagcttccacgctctgcagcatgccggtagcgcggccaccggcggcgctggccgatcccgggtcaacctgctcaactgggaccccaacggcgcagcggcggggctcttcccggagcctcagcccagcaaggatgtggtccagcgatga

SEQ ID NO: 28322 - DNA, 1887 bp, Mycobacterium tuberculosis
gtgccattccgcaacgttgccatcgtcgcgcacgtcgaccacggcaagaccaccctggttgacgccatgttgcggcagtccggggcgctgcgtgaacgcggtgagctgcaggaacgggtgatggacacgggcgatctggagcgggagaagggcatcaccatcctggccaagaacaccgccgtgcaccgccatcacccggatggaaccgtcaccgtaatcaatgtcatagacaccccggggcacgcggacttcggtggcgaggtggagcgcgggctgtccatggtggacggggtgctgctgctggtcgacgcctccgagggtccattgccgcagacgcggtttgttctgcgtaaagcgctggccgcccatttgccggtgattctggtggtcaacaagacagaccggcccgacgcccgcatcgccgaggtcgtggacgccagccacgacctgttgctagatgtcgcgtccgaccttgacgacgaagcggccgcagcggccgaacacgcgctgggcctgccgacgctgtacgcatccgggcgcgccggggtggcgagcaccacggcgccgcccgacggccaggttcccgacggcaccaacctggatccgttgttcgaggtgctcgaaaagcatgtgccgccgccgaaaggagagccggacgcaccgctgcaggcgctggtcaccaacctggacgcgtcgacctttctgggtcggttggcgctgatccgcatctacaacggccgcatccgcaaaggccagcaggttgcgtggatccgtcaggtggatggtcagcagaccgtcaccactgccaagatcaccgaattgttggccaccgaaggcgtggaacgcaaaccaaccgacgctgccgtcgccggcgatatcgtcgccgtcgccggcctgcccgagatcatgatcggcgacacgctggccgcttccgcgaatcccgttgccctgcccaggattaccgtggacgagccggcgatctcggtcaccatcggcaccaacacctcgccgctggcgggcaaggtgggtggtcacaagctcaccgcgcgcatggtccgaagcaggctggatgccgagctggtgggcaacgtgtcgattcgtgtcgtcgacatcggcgccccggacgcctgggaggtacagggtcgcggcgagctggcgctggcggtgctggtcgagcagatgcgccgagagggtttcgaattgaccgtgggtaagccacaggtggtgaccaagaccatcgatggcacgctgcacgagccattcgagtcgatgaccgtcgactgccccgaggagtacatcggcgcggtcacgcaattgatggccgcgcgcaagggccgcatggtggagatggccaaccacaccaccggctgggtccgcatggacttcgtggttcccagtcgcggcctgattgggtggcgcaccgacttcctcaccgagacccgtggctccggtgtcgggcatgcggtgttcgacggataccggccatgggcgggggagatccgggcccgccacaccggttctctggtatcggaccgggccggcgccatcacaccgttcgcgttgctgcaactcgccgatcgggggcagttcttcgtcgagcccggccaacagacctacgagggcatggtcgtcgggatcaacccccgtccggaggacctcgacatcaatgtcacccgggagaagaagctgaccaacatgcgctcatcgaccgcggatgtcatcgagacgctggccaagccgctgcagctggatctcgagcgcgccatggagttatgtgcgcccgacgaatgcgtcgaggtgaccccggagatcgtgcggatccgcaaagtcgagctggccgccgccgcccgggctcgcagccgggcgcgcaccaaggcgcgtggctag

SEQ ID NO: 28323 - DNA, 1089 bp, Mycobacterium tuberculosis
gtgtcggcgtctctgcccgtcttcccctgggacaccttggccgacgcgaaagcgctggccggggcccatccggatggcatcgtcgacctctccgtcggcactccggtcgacccggtcgcaccgctgatccaggaggcgctggcggcggccagtgccgcccctggctatccggcgaccgccggcaccgcacggttacgtgagtctgtggtggcagcgctggctcgccgctacggcatcaccaggctgaccgaggcggccgtgttgccggttatcggcaccaaggaactcatcgcctggttgccgacgttgttgggcctgggcggtgcggatctggtcgtcgtgcccgaattggcatatccgacttatgacgtcggcgcccgcctggccggaacgcgggtgctgcgtgcggatgcgctgacccagctgggtccgcaatccccggcactgctctacctgaactcgccgagcaacccgaccggacgggtgctgggtgtcgaccatttgcgcaaggtggtcgagtgggcccggggcagaggcgttctcgtggtttccgacgagtgctacctgggattgggctgggacgccgaaccggtttcggtgctacatccctcggtgtgcgacggcgaccacaccgggttgctggctgtgcactcactatcgaagagctcatcgctcgccggctaccgagcgggtttcgtcgtcggtgacctcgagatcgttgccgagctactagcggtgcgcaaacacgccgggatgatggtgccggcgccggtacaggcggctatggtggccgcgctggacgacgacgcgcacgaaaggcaacagcgggagcgctacgcacaacggcgtgccgcgctgttgccggcgctgggctccgcgggttttgcggtcgactattcggacgccggattgtatctatgggccactcgcggcgagccgtgccgcgacagtgccgcgtggctggcgcagcggggcatcctggtggcaccgggtgatttctacggcccgggtggggctcagcacgtgcgggtggcgctgacggccaccgacgagcgggttgcggcggcggtcggacggctcacctgttag

SEQ ID NO: 28324 - DNA, 1617 bp, Mycobacterium tuberculosis
atgcggatcgccggcgtggggctcggccagttgctcctggcgctggatgcgaccgtggtcagcctggtggacgccccgcgcggcctggacctgccggtggcgtcgacggcgctgatcgattccgacgacgtgcggctgggcctggcggccgcggcgggctcggccgatgtgttcttcctgatcggggtcaccgacgacgaggcggtgcgctgggtcgacgatcaggcacgccaacgggcgccggtggcgatcttcgtcaagcacccgtcggactcggtggtggccggggccgtccgcgccggctcggcggtggtagccgtggagccgcgggcccgctgggaacggctgtaccacttggtgaatcatgtcttggagcatcatggtgaccgggccgaccccaccgacgattccggaaccgacctgttcgggttggcacagtccctggccgaccgcatccacggcatgatcagcatcgaggacgcccagtcgcacgtgctcgcctactcggcctccaacgacgaggccgacgagctgcgtcggctgtccatcctgggccgcgccggcccgcccgagcatctgcagtggataggtcaatggggcatcttcgatgccctgcggcccggccgtgaggtggtgcgggtggccgagcgccccgagctggggttgcgtcctcggctagccatcgggattcatcagccgggggtcggtgcgctgcggccaccggtgttcgccggcacgatctgggtccagcaaggctcgcagccgttggccgacgatgccgaggagatgttgcggggtgctgcggtgctggccgcccggatcatgtcgcgactggcgacccagcccaatacgcacgcgctgcgggtacagcaactactgggcctggccgagctgaacgcaaccacagcacccgtcgacgtatcgaccatcgcccgtgaactcggcgtcgccgccgagggcaacgcaacgctgatcggtttcgacaccgcggaaaaccgcgataccgcagtccgccatgttcggcttgttgacgtcatggcattgagcgccagcgcttttcgccacgacgctcaggttgccgccaacggctcacggatctatgtgctgctgccccaaaccacgaccggccgagctgtcacctcgtgggtccgcggcacaatcagcgcactgcgcgccgagctgggagtagcactacgggcagccatcgcggggccggtcgcgggacttgccgaagtcaacccggcacgcgtcgaggtggatcgggtactcgagagtgccgagcgccacccgatcttggggcaggtgacatcgctggccgaggcacgcaccaccgttctgctcgacgaaatcgtcaccctggtcggcaccgaccagcggctcgtcgatcctcggatacgtgacctgggcgcccaggacccggtgctggctcagaccctgcgtgcctacctggatgccttcggcgacatcggcgccgccgcacggtcactgcaagtgcatcccaacaccgttcgctaccggataaggcggatcgagcagctgttgtcgacctcgctgggcgatccggatgtgcggctgctcttttcgctggggctgcgggccatggaacgcacggcttag

SEQ ID NO: 28325 - DNA, 564 bp, Mycobacterium tuberculosis
atgtcggcgaaaatcgacattaccggtgattggactgtggccgtgtattgcgcggcctcgccaacgcacgcggagttgctagagctggccgccgaagtcggcgcggcaatcgccggacgtggctggacgctggtgtggggaggtggccatgtttcggcgatgggggctgtcgcctcggcggcgcgagcctgcggcggctggaccgtcggcgtgattcccaagatgctggtgtaccgcgaactggctgatcacgacgccgacgagctaatcgtcaccgacaccatgtgggagcgcaagcagattatggaagatcgctcagatgcgttcatcgtgttgccgggcggtgtcggcaccctagacgagctgtttgacgcatggaccgacgggtatctcggtacccatgacaaacccattgtgatggtagatccctgggggcatttcgatggactgcgggcatggctgaacggattgctcgacaccggttacgtctcacccacggcgatggaacggctggtggtagtcgataacgtcaaggacgctctgcgggcctgcgcaccttcctga

SEQ ID NO: 28326 - DNA, 936 bp, Mycobacterium tuberculosis
atgtcggctgacaaccaccaggtgcccatcgagattcgcggactgaccaagcacttcgggtcggtgcgggcgctcgacgggctcgacctcacggtgcgcgagggcgaagtgcacggcttcctcggccccaacggcgcgggcaagtccacgaccctgcgcatcctgctaggcctggtgaaggccgacggcggaagcgtgcggttgctgggcggtgacccctggaccgacgccgtcgacctgcaccgccacatcgcctatgttccaggcgatgtcacattgtggccgtcgctgaccggtggtgagaccatcgacctgctggcccgcatgcgaggcggcatcgacaacgctcgtcgcgcggaactgatcgagcgcttcggcctggacccaaccaagaaggcgcgcacctactccaagggcaaccgccaaaaggtctccctgatctcggcattgtcgtcgcacgccactctgctgctcttggatgagccgagcagcggcctggacccgttgatggaaaacgtgtttcagcagtgcatcggcgaagcacgccaacgcggtgtgacggtgctgttgtccagccatattctggccgagaccgaagcgctgtgcgaaaaggtgaccatcatccgagccggcaagaccgtcgaaagcggttcactagacgccttgcggcacctcagccgcacctcgatcaaggccgaaatgatcggtgatccaggagacctcagccaaatcaagggagtcgaggacatcagcatcgagggcaccacagtgcgcgcccaggtcgacagcgaaagcctgagagaactcatccaagtgctcggccacgccggtgtgcgcagcctggtcagtcagccgcccaccctggaggagctgttcctgcgccactacagcctgggccccgaggtcgcagccgagcaacaggtggcaacgccgtga

SEQ ID NO: 28327 - DNA, 1650 bp, Mycobacterium tuberculosis
gtgagccacttgtcgcagcgcatggcggggttgctgcgagttcatggcgagtggtcgcgatccgtggatactagggtggacacggacaacgcgatgcctgcacgttttagcgcccagattcagaatgaggatgaggtgacctccgaccaaggcaacaacggcggcccgaacggcggaggccgcctggcgccgcgcccggtttttcggccaccggtcgacccggcgtcgcgtcaagcgttcgggcgtccgtccggggtccaagggtcctttgtggccgagcgtgtgcgcccgcagaagtaccaggaccagtctgacttcacaccgaacgatcagcttgctgacccggtgcttcaggaggcgttcggtcgtccgttcgcgggcgccgaatcgctgcagcgccatcccatcgatgccggagcgctggcagctgagaaagacggtgccggccccgacgagcccgacgatccgtggcgcgaccccgcggccgcggccgcgctggggacgccagcgctagccgcgccggcaccgcacggtgcgctggccggcagcggcaagctgggtgtgcgcgacgtgctgtttggcggcaaggtgtcctacttggcgctgggcatcttggtcgctatcgcactggtgatcggcggcatcggcggtgtcatcggccgcaagaccgcggaagtagtcgatgcgttcaccacgtcgaaggtgaccctgtcgaccactggcaatgcccaggaaccggccggccggttcaccaaggtggcggccgccgtggccgattcggtggtgaccattgagtcggtcagcgaccaggagggcatgcaaggttccggcgtcatcgtcgatggccgcggctacatcgtcaccaacaatcacgtgatctctgaggcggccaacaatcccagccagttcaagacgaccgtggtgttcaacgacggcaaggaggtgcccgccaatctggtgggtcgtgaccccaagaccgacttggccgtcctcaaggtcgacaacgtcgacaatctgaccgtggcccggctcggtgattccagcaaggtacgggtcggtgacgaagtcctcgcggtcggcgcgcccctggggctgcgcagtacggtgacccagggcattgtcagcgcgctacaccgccccgttccgttgtcgggcgagggctctgacaccgacaccgtcattgacgcaattcagaccgacgcctcgatcaaccacggtaactccggcggtccgctaatcgacatggatgcccaggtgattggcatcaacaccgccggtaagtcactgtcggatagcgccagcgggctgggctttgcgatcccggtcaacgagatgaaattggtggcaaattctctgatcaaagacggaaagatcgtgcatccgacgttgggcatcagcacccggtcagtaagcaacgcgatcgcgtcgggcgcgcaggtggccaatgtaaaggcgggaagtcccgcgcagaagggcgggatcttggagaacgatgtgatcgtcaaggtcggtaaccgcgcggtcgccgactccgacgagttcgtcgtcgccgtgcgccagttggctatcggccaggacgctccgatagaggtggtccgcgagggtcggcatgtgacgctgacggtgaaaccggaccccgatagcacctag

SEQ ID NO: 28328 - DNA, 1236 bp, Mycobacterium tuberculosis
gtgcacattgggggacgctggggtgcacgcccggccgtcgctgcagtgcggcggggagcttgtcgcctaacgcgggcgccggcattcggcgtggcagcgattgccccgttggtattcgccagtgcggtcggcagcgcggctccggtattccccgggagaaccgcgccggtgcacgccgttatcaccccggtggccgcggtcgccgcgtccggcatagacctgtccggtccggtcgtcatcgccatgaagcgcccgccgaccagcttccgcgtggcggtagctaccatatcggctccaccaccaccgatgatcgtgaattcgcctggtgcgcttggcattccggccatggcactgtccgcctaccgcaacgccgagctgaagatggccgctgccgcccctggctgtggcgtcagttggaacttgctggccgggattgggcgcatcgagtcgatgcacgcaaacggcggcgccaccgacgcgcgcggcaccgcgatccagccgatctacggcccaacgctggacggcaccctgccaggcaacgagatcatcatccaaagcagcgtcggcaatcgcgtcacgtacgcccgcgcgatggggccaatgcagttcttgcccggcacttgggctcggtacgccaccgacggcgatgacgacggtgtggctgacccgcagaacctgttcgactccacgttggccgcagcccgctacctgtgtagcggtgggctcaacctgcgcgacccggcgcaggtcatggccgcgctcctgcgctacaacaactcgatgccttacgcccagaacgtactgggctgggccgccggctacgccaccggtgtgttcccggttgacttgcccccgatcaccggtccgccaccaccactcggcgacgcgcacctcgagaatccggagggtctcgggcccggcttgccgatcaatgtcaacggcctgaccgccgatggccccatggcgcacctgccgctgatcgacttgaccccgcgccaggcggcgctcaatccaccgccgatgttcccgtggatggcacctgacccatcggcgccgatgcccggctgcacgctgatctgcattggctcacatggcccgccagtgggcgcgccgccgttcccgcctaccgctcccccacctccattcctacctgccgctcccccacctccggatccattggccggcccgcctggcgacgcgggcctggcgccgccggcgccggctcctgccggctga

SEQ ID NO: 28329 - DNA, 1407 bp, Mycobacterium tuberculosis
gtggtcatgagtcgcgggcggataccgaggctgggcgctgccgtactggtggcgttgacgaccgcggcggcggcgtgcggggccgatagccaggggctggtggtcagcttctacacaccggccaccgacggcgcgacgttcaccgcaattgcccaacgctgcaaccaacagttcggcggccggttcaccattgcgcaggtcagcttgcccaggtcccccaatgagcaacggttacagctggcccgacggttgaccggtaacgaccgcaccctggacgtcatggcgctggatgtggtgtggacggcggagttcgccgaagcggggtgggcgctgccgctgtcggacgacccagcggggctggccgagaacgacgccgtcgccgataccctgccaggcccgcttgcgacggccggctggaaccacaagctgtacgcggcacccgtcaccactaatactcaattgctttggtaccgaccagatttggtaaatagcccgccaacggattggaatgccatgatcgctgaggcggcccggctgcacgcggcgggcgagcctagctggatcgcggtacaggccaatcagggcgagggcttagtggtgtggttcaacacgctgctggtgagcgctggtggatcggtgctctccgaggacggccggcacgtcaccttgaccgatactcccgcacaccgagcggctacggtcagcgcgctacagatcctcaaatcggtggctaccacgcccggcgccgacccctcgatcacccgcaccgaagagggcagcgcgcggttggccttcgaacagggcaaggccgcgctcgaggtcaattggccgttcgtgtttgcgtccatgctcgagaacgcggtgaagggtggtgtgcccttcttaccgcttaaccggattccgcagttggccggcagcatcaacgacatcgggacgttcacgcccagcgacgagcagttccgcatcgcgtatgacgccagccagcaggtgttcggtttcgcgccctatccggctgtagcgcccggccagccagccaaggtgacgatcggcgggttgaacctggcggtggccaagacgacccgccatcgagcggaggcattcgaagcggtgcgttgtctgcgtgaccagcacaatcagaggtacgtctcgctcgaggggggtctgcccgcggtgcgggcgtcgctgtactccgatccgcaattccaggcgaagtatccgatgcacgccattattcggcagcaactcaccgatgccgcggtgcggccggcgacgccggtgtaccaggcgttgtccatccggctcgcggcggtgctgagcccgatcaccgagatcgacccggagtccacggccgacgaacttgccgcgcaggcgcagaaagccatcgacggcatgggcctgctcccgtga

SEQ ID NO: 28330 - DNA, 1689 bp, Mycobacterium tuberculosis
atggagtatctgattgcagcgcaggacgtgttggtggccgcggccgctgatttggagggcatcggctcggcgctggccgcagctaacagggcggccgaggccccgaccacggggctgctggccgcgggtgccgacgaggtatcagcggccatcgcgtcgctgttttccgggaacgcccaggcctatcaagcgctgagcgcacaggcggcggcatttcatcagcagtttgtgcgggcactgagttcggcggccggctcgtatgcggcggccgaggccgccaatgcctccccgatgcaagcggtgctggatgtggtcaatgggcccacccagctgttgctggggcgcccgctgatcggcgatggcgccaacggcgggccgggacaaaacgggggcgacggtggcttgttgtacggcaacggcggcaacggcggctcgagtagcaccccaggccagcccggcggtcgcggcggcgcggccgggttgatcggcaacggtggcgccgggggagccggcgggcccggcgcgaacggcggtgccggcggcaacggcgggtggctatacggcaacggtgggctcggcggcaacggtggggcggccacccagatcgggggcaatggcggcaacggaggccacggcggcaacgccgggctatggggcaacgggggggcgggtggagccggagcggcaggagcggccggcgccaacgggcaaaacccggtgtcccatcaggtcacgcacgcgaccgatggcgccgacggcactaccggacccgatggcaacgggaccgacgccggctcgggcagcaacgcagtcaaccccggcgtgggcggtggtgcaggcggcataggcggggatggaaccaaccttgggcagaccgacgtgtccgggggtgccggcggcgacggcggcgacggcgccaacttcgcctccggaggtgccggcggtaacggtggcgccgctcaaagcggctttggtgacgctgtcggcggcaatggcggcgccggcggaaacggcggagccggcggcggcggggggctgggcggagcgggtggcagcgccaatgttgcaaatgctggcaacagcatagggggcaacggtggcgccggcgggaacggcggtatcggcgctcccggtggtgccggcggcgccggaggaaatgccaatcaagataatcctcctgggggcaactccaccgggggcaatggtggtgccggcggcgacggcggcgtcggtgcctcggctgacgttggtggcgccggcggctttgggggcagcgggggtcgcggcgggctactgctcggcacgggcggcgccggcggcgacggcggcgtcgggggcgacgggggcatcggcgctcaaggcggcagcggcggcaacggcggcaacggcgggatcggcgccgacggcatggccaaccaggacggcgacggcggtgacggcggcaacggcggcgacggcggggccggcggggccggtggcgtcggcggaaacggcgggaccggcggtgcgggcggactgttcggacagtcgggcagccccggctccggcgcggccgggggcctcggcggcgcgggcggcaacggcggcgcgggcggcggcggcgggaccgggttcaaccccggcgcccccggcgatcccggtactcaaggcgctaccggcgccaacggtcagcacggcctgaacggctga

SEQ ID NO: 28331 - DNA, 3645 bp, Mycobacterium tuberculosis
atgtaccgcaagttccgcgacgacccctcctcggtcgatcccagctggcacgagttcctggttgactacagccccgaacccacctcccaaccagctgccgaaccaacccgggttacctcgccactcgttgccgagcgggccgctgcggccgccccgcaggcaccccccaagccggccgacaccgcggccgcgggcaacggcgtggtcgccgcactggccgccaaaactgccgttcccccgccagccgaaggtgacgaggtagcggtgctgcgcggcgccgccgcggccgtcgtcaagaacatgtccgcgtcgttggaggtgccgacggcgaccagcgtccgggcggtcccggccaagctactgatcgacaaccggatcgtcatcaacaaccagttgaagcggacccgcggcggcaagatctcgttcacgcatttgctgggctacgccctggtgcaggcggtgaagaaattcccgaacatgaaccggcactacaccgaagtcgacggcaagcccaccgcggtcacgccggcgcacaccaatctcggcctggcgatcgacctgcaaggcaaggacgggaagcgttccctggtggtggccggcatcaagcggtgcgagaccatgcgattcgcgcagttcgtcacggcctacgaagacatcgtacgccgggcccgcgacggcaagctgaccactgaagactttgccggcgtgacgatttcgctgaccaatcccggaaccatcggcaccgtgcattcggtgccgcggctgatgcccggccagggcgccatcatcggcgtgggcgccatggaataccccgccgagtttcaaggcgccagcgaggaacgcatcgccgagctgggcatcggcaaattgatcactttgacctccacctacgaccaccgcatcatccagggcgcggaatcgggcgacttcctgcgcaccatccacgagttgctgctctcggatggcttctgggacgaggtcttccgcgaactgagcatcccatatctgccggtgcgctggagcaccgacaaccccgactcgatcgtcgacaagaacgctcgcgtcatgaacttgatcgcggcctaccgcaaccgcggccatctgatggccgataccgacccgctgcggttggacaaagctcggttccgcagtcaccccgacctcgaagtgctgacccacggcctgacgctgtgggatctcgatcgggtgttcaaggtcgacggctttgccggtgcgcagtacaagaaactgcgcgacgtgctgggcttgctgcgcgatgcctactgccgccacatcggcgtggagtacgcccatatcctcgaccccgaacaaaaggagtggctcgaacaacgggtcgagaccaagcacgtcaaacccactgtggcccaacagaaatacatcctcagcaagctcaacgccgccgaggcctttgaaacgttcctacagaccaagtacgtcggccagaagcggttctcgctggaaggcgccgaaagcgtgatcccgatgatggacgcggcgatcgaccagtgcgctgagcacggcctcgacgaggtggtcatcgggatgccgcaccggggccggctcaacgtgctggccaacatcgtcggcaagccgtactcgcagatcttcaccgagttcgagggcaacctgaatccgtcgcaggcgcacggctccggtgacgtcaagtaccacctgggcgccaccgggctgtacctgcagatgttcggcgacaacgacattcaggtgtcgctgaccgccaacccgtcgcatctggaggccgtcgacccggtgctggagggattggtgcgggccaagcaggatctgctcgaccacggaagcatcgacagcgacggccaacgggcgttctcggtggtgccgctgatgttgcatggcgatgccgcgttcgccggtcagggtgtggtcgccgagacgctgaacctggcgaatctgccgggctaccgcgtcggcggcaccatccacatcatcgtcaacaaccagatcggcttcaccaccgcgcccgagtattccaggtccagcgagtactgcaccgacgtcgcaaagatgatcggggcaccgatctttcacgtcaacggcgacgacccggaggcgtgtgtctgggtggcgcggttggcggtggacttccgacaacggttcaagaaggacgtcgtcatcgacatgctgtgctaccgccgccgcgggcacaacgagggtgacgacccgtcgatgaccaacccctacgtgtacgacgtcgtcgacaccaagcgcggggcccgcaaaagctacaccgaagccctgatcggacgtggcgacatctcgatgaaggaggccgaggacgcgctgcgcgactaccagggccagctggaacgggtgttcaacgaagtgcgcgagctggagaagcacggtgtgcagccgagcgagtcggtcgagtccgaccagatgattcccgcggggctggccactgcggtggacaagtcgctgctggcccggatcggcgatgcgttcctcgccttgccgaacggcttcaccgcgcacccgcgagtccaaccggtgctggagaagcgccgggagatggcctatgaaggcaagatcgactgggcctttggcgagctgctggcgctgggctcgctggtggccgaaggcaagctggtgcgcttgtcggggcaggacagccgccgcggcaccttctcccagcggcattcggttctcatcgaccgccacactggcgaggagttcacaccactgcagctgctggcgaccaactccgacggcagcccgaccggcggaaagttcctggtctacgactcgccactgtcggagtacgccgccgtcggcttcgagtacggctacactgtgggcaatccggacgccgtggtgctctgggaggcgcagttcggcgacttcgtcaacggcgcgcagtcgatcatcgacgagttcatcagctccggtgaggccaagtggggccaattgtccaacgtcgtgctgctgttaccgcacgggcacgaggggcagggacccgaccacacttctgcccggatcgaacgcttcttgcagttgtgggcggaaggttcgatgaccatcgcgatgccgtcgactccgtcgaactacttccacctgctacgccggcatgccctggacggcatccaacgcccgctgatcgtgttcacgcccaagtcgatgttgcgtcacaaggccgccgtcagcgaaatcaaggacttcaccgagatcaagttccgctcagtgctggaggaacccacctatgaggacggcatcggagaccgcaacaaggtcagccggatcctgctgaccagtggcaagctgtattacgagctggccgcccgcaaggccaaggacaaccgcaatgacctcgcgatcgtgcggcttgaacagctcgccccgctgcccaggcgtcgactgcgtgaaacgctggaccgctacgagaacgtcaaggagttcttctgggtccaagaggaaccggccaaccagggtgcgtggccgcgattcgggctcgaactacccgagctgctgcctgacaagttggccgggatcaagcgaatctcgcgccgggcgatgtcagccccgtcgtcaggctcgtcgaaggtgcacgccgtcgaacagcaggagatcctcgacgaggcgttcggctga

SEQ ID NO: 28332 - DNA, 1692 bp, Mycobacterium tuberculosis
atggccttcccggaatattcgcctgcggcgtccgctgcgacgtttgctgacctgcagattcatccccgcgtcttgcgggcgatcggcgacgtcggttacgagtcaccgacggctatccaggcggctacgatcccggcgttgatggcaggctccgacgtggtggggctggcgcagaccggcaccggcaagacggcggcatttgcgattccgatgctgtccaagatcgacatcaccagcaaggtgccccaggcgctggtgctggtgcccacccgggagctggctctgcaggtggccgaggcgttcggccgctacggtgcctatctgtcgcaactcaacgtgctgccgatctacggcggatcgtcgtatgccgtgcaactggccggattgagacgcggcgcgcaggtggtggttggcacccccggtcgtatgatagaccatctcgaacgggcgaccttggacctgtcgcgggtggactttctagtgctcgatgaggccgatgagatgctgaccatgggtttcgccgacgacgttgagcgcattctgtccgagacccccgaatacaagcaggtcgccctgttttccgcgaccatgccgccggcgatccgcaaactcagcgccaagtatctgcacgatccgttcgaagtcacttgtaaggcgaaaaccgctgtggccgagaatatttcgcagagctacattcaggtagcacggaagatggacgcgctcaccagagtgctcgaagtcgagccgttcgaggcgatgatcgtctttgtccgcaccaagcaggcgaccgaggagattgccgaaaagctgcgtgcccgagggttttccgcggctgccatcagcggtgacgtcccgcaggcgcagcgggagcggaccatcacggcgctgcgggacggcgacatcgatatcctggtcgccaccgatgtggcggcgcgcggactcgacgtggagcggatatcacacgtgcttaactacgacatcccgcacgacaccgagtcctacgtacaccggatcgggcgcaccggcagggccgggcgttcgggagccgcgctgatattcgtctcgccacgggagcttcacctgctcaaggcgatcgaaaaggctacgcggcaaacgcttaccgaggcgcaattgcccaccgtcgaggatgtcaacacccagcgggtggccaagttcgccgattccatcaccaatgcgctgggcggtccgggaatcgagctgttccgccgactggtcgaggagtatgaacgcgagcatgatgtcccgatggctgacatcgccgcggcactggccgtgcagtgccgcggcggtgaggcattcctgatggcacccgacccgccgctttcgcggcgcaaccgcgaccagcgtcgggaccgtccgcaaaggcccaagcgtagaccggacttgaccacctaccgcgtcgccgtcggcaagcggcacaagatcggtccaggcgccatcgtcggcgccatcgccaatgagggtgggctgcaccgcagcgacttcggtcagatccgtatcgggccagacttctcgctagtagaattgccggcgaagctgccccgcgcgacgctcaaaaagcttgcacagacccgtatctcgggtgtgctgatcgaccttcggccataccggccgcccgacgcggcgcgccggcataatggcggcaaaccacggcggaaacacgtcggatga

SEQ ID NO: 28333 - DNA, 1896 bp, Mycobacterium tuberculosis
gtgaccgcgccaccgggcgcacgcccccgtgccgcaagcccgcccccgaacatgcggtcccgcgacttctggggatcggcagcccgactggtgaaacggctggcgccacaacgccggctgagcatcgcggtgatcacactgggaatcgccggcacgacgatcggcgtcatcgttccacggatcctcggccatgccaccgatttgctgttcaacggcgtgatcgggcgagggctaccggggggaatcaccaaggcacaggccgtcgcttcggctcgggcccgtggtgacaacaccttcgccgacctgctgtccgggatgaacgtggtgccgggccaaggtgtggacttcgccgcggtggagcgaacactggcgctggcgttggcgctgtatctggctgcagcgctgatgatttgggcacaagcccggctgctcaacctcaccgtgcagaaaacgatggtcaggttgcggaccgatgtcgaagacaaggtgcaccggctgccgctgtcctacttcgacggacaacagcgcggtgagctgctgagccgggtcaccaatgacatcgacaacctccagtcgtcgctgtcaatgacgatcagccagctggtgacgtcgattctgaccatggtggcggtgctggccatgatggtgtcgatctcgggcctgctggcgctgatcacactgctgacggtgccgctgtcgctgctggtgacacgcgcgatcacccggcggtcacagcccctattcgtagctcactggaccagcaccgggcgcctcaacgcccatctcgaagagacctacagcgggttcacggtagtcaagacgttcggccaccaagcggccgcacgagaacggttccacgagttgaatgacgacgtctaccaggccggtttcggcgcccagttcctctctggtctcgtgcagccggcgacggcgttcatcggcaacctcggctacgtcgcggtcgcggtggccggtggcctgcaggtagccaccgggcagatcacgctcggcagcatccaggcgttcatccagtacatccgccagttcaacatgccgctgagccagctggccgggatgtacaacgccctgcagtccggggtggccagcgcggagcgggtgttcgacgtgctcgacgagcccgaggagtcgccggagcctgagccggagctgccgaacctaaccggacgggtcgagtttgagcacgtgaactttgcttacctcccgggcacgccggtgatccgcgacctgtcgctggtggccgaaccgggtagcacggtggcgatcgtcggaccgacgggagccggcaagaccacgctggtgaacctgctaatgcggttctacgagatcggttccggacgaatcctgatcgacggggtggatatcgcctcggtaagccggcagtcgctgcgatcgcgaatcggcatggtgttgcaagacacctggctctacgacgggaccatcgcggagaacatcgcctacggacggccggaggccaccacagacgagatagtagaagccgccagggcggcccatgtcgaccggtttgtgaacacactgcctgctggctaccagacacgggtcagcggcgacggcggcagcatcagcgtcggcgagaagcaactcattaccatcgcccgcgcctttcttgcccgcccgcagctgttgatcctggacgaggcgaccagctcggtcgatacccgcaccgagctgctcatccagcgagcgatgcgcgagcttcgccgggatcgtacgagtttcattatcgcccaccgactttcgacgattcgcgatgccgaccacatcctggtggtccagaccggccagatcgtcgaacgcggcaaccacgccgagctgttggcccggcgcggggtctattaccagatgacgcgggcctag

SEQ ID NO: 28334 - DNA, 1254 bp, Mycobacterium tuberculosis
gtgagtccgcgcccgggacctgccgggcgaggtcccgcgccttgtcggtgtgcagacctacactcgctttgcgttgacagccacgcactcaggagggatgggatgcgattcctgcacactgccgactggcagctcggcatgacgcgtcactttctcgccggtgacgcccagccgcgatattctgctgcccgccgtgacgcagtcgctggactaaaagcgctggccgccgatgtgggcgccgaattcgtcgtagtcgccggtgacgtcttcgaacacaatcagctcgcgccacagatagtcggtcaatccttggaagccatgcgcgtgatcggccttccggtctatctgctgccgggtaaccatgacccgctggacgcttcgtcggtgtacaccagcacgctgtttcgagccgaacggccggacaacgttgtggtgctcgaccgagctggcgtccacgaggtccggccgggagtccagatcgtcgcggcgccgtggcggtccaaggcgcccaccaccgacccggttgccgaggtgctggccggcctgcccacagacgccgctattcggctgctcgtcgcccatgggggtgtcgacgcgctggaccccgaccacgacaaaccgtcgctgatcaggctcgccgcactcgacgacgcgctgactcgacaggcgattcattatgtggccctaggtgacaaacattcgcttacccaggtcggcagcagcgggcgggtctggtactccggtgcaccggaagtcaccaacttcgacgacgtcgaaccggaccccggtcacgtcctagtggtcgacatcgacgaaagcgacccgcgacatcccgtcaccgtcgacgcccgtcgcatcggccgctggcggttcgttacgttgcaccaccaggtcgacaccagccgggacatcgccgacctggacctgaacctggatctgatgacggacaaggaccgcaccgtggtgcggctggccctgaccggttcgctgacggtcactgaccgcgccgcattggatacctgtctggacaagtacgcgcggttgttcgcctggctgggtctgtgggaacgtcacaccgacctagcggtgatacccgtcgacgccgagttcaccgacctcggcatcggggggttcgccgccgcggccgtcgacgagctagtcgcgaccgcgcgcgggggtgacgacgagtccgccgtcgatgcccaggcggcgctggcactgttgctgcggctcgctgaccggggagcggcgtga

SEQ ID NO: 28335 - DNA, 2628 bp, Mycobacterium tuberculosis
gtgaagctgcaccggctggccctgaccaattaccgcggcatcgcacaccgtgacgtcgaattccccgatcatggagtggtggtggtgtgcggcgccaacgagatcggcaagtcctccatggtcgaggcgctggacctgctgctcgagtacaaggaccgctcgacgaagaaggaagtcaagcaggtcaagccgaccaacgctgatgtcggctccgaggtcattgccgaaatcagcagcggcccttatcgtttcgtctaccgcaagcgtttccacaagcggtgcgagacggagttgaccgtgctggcaccgcgccgcgagcagctgaccggcgacgaagcgcacgagcgggtccggacgatgttggccgaaacggtcgacaccgaactgtggcatgcccagcgggtgctgcaggccgcctcgacggccgcggtggatctgtctggctgcgacgcgctctcgcgtgcgctcgatctcgccgccggtgatgacgccgcgctgtcgggcaccgagtcgctgctcatcgagcggatcgaggccgagtatgcgcgctacttcaccccgaccgggcgccccaccggagaatggtccgcggcggtctctaggctggcggccgccgaggccgcggtggccgactgcgcggcggcggtagccgaggtcgacgacggggttcgtcgccacaccgagctcaccgagcaggtggctgagctgtcgcagcaactacttgctcaccagctgcggctcgaagctgcgcgagtcgccgccgagaagatcgccgcaatcaccgacgacgcccgcgaagccaagctgatcgctactgccgcggccgcgaccagcggcgcttccaccgccgcacacgccggacggctgggcctgctcaccgaaatcgacacgcgcactgcggccgtcgttgctgcggaggcaaaagcgcggcaggccgcagacgagcaggcgacggcgcgcgcggaggccgaggcctgcgatgccgcgctcacggaggcaacccaggtattgacggccgtccgccttcgcgccgagtcggcccggcgcaccctcgaccagctcgccgactgcgaggaggccgaccggttggccgcccggctggccaggatcgacgacatcgagggtgatcgcgaccgggtctgcgcggagctgtccgcggtcacgctgaccgaggagctactgagtcggatcgaacgtgctgcggcagccgtcgatcgcggcggtgcacagctggcgtcgatctccgcggcggtggagttcaccgccgccgtcgacatcgagctcggcgtcggcgatcaacgggtgtcgctgtccgcgggccaaagctggtcggtcactgccaccggccccaccgaggtcaaggttcccggcgtcctgaccgcacggatcgtcccgggcgcgaccgcactcgactttcaagccaaatatgctgcagcacaacaggaattggctgatgcgctggcggctggagaggtcgctgacctagccgccgcacgctccgccgatctgtgccgacgcgaactgctgagccgccgcgatcagctgaccgccactctggccggcctgtgtggcgatgaacaggtcgaccaactgcgttcccgcctggaacagttgtgtgccggtcaaccggccgagctcgatctggtttcgacggataccgctacggcccgcgctgaattggatgcggtcgaggcggctcgaatcgccgcggagaaggactgcgagacccgccgtcagatcgctgctggcgccgctcgccggctcgcggagacatccacgcgggcaacggttctacagaacgcagcggccgccgaaagcgccgagctcggtgcggccatgactcggttggcctgtgagcgggcgtccgtgggcgacgatgagctcgccgccaaggccgaggccgacctgcgggtactgcagacggccgagcagcgagtgatcgacctggccgacgagctcgcagctacggcgccggacgcggtagccgccgagctggccgaggccgccgacgccgtcgagttgctgcgcgaacgtcacgacgaggccattcgcgcgttgcacgaggtcggcgtcgaactctcggtgttcggcacccagggccgcaagggcaagcttgatgccgccgaaaccgagcgtgagcacgccgccagccaccacgcgcgggtcgggcgccgggcccgggccgccaggctgctccgctcggtgatggcacgccaccgcgacaccacccggctgcgctacgtcgagccataccgggcggagctacatcggctcggccgcccagtgttcgggccctctttcgaggtcgaggtcgataccgatttgcgcatccgcagccgcaccctggacgacagaaccgtgccctacgagtgcttgtcgggcggggccaaagaacagcttggcatcctggcgcgattggccggcgcggcgctggtcgccaaggaggacgccgttccggtgctgatcgacgacgcgctggggttcaccgatccggagcgactagccaagatgggggaggtctttgacaccatcggcgccgacggacaggtgatcgtgctgacgtgcagtcccacccgatacggcggtgtcaaaggagcgcaccgcatcgatctggacgccatacagtga

SEQ ID NO: 28336 - DNA, 1587 bp, Mycobacterium tuberculosis
atggacactcagagcgactacgtcgtggtcggtaccggctcagccggggcggttgtggccagccggcttagcaccgatccggccacgacggtggtggccctggaggcggggccgcgtgacaagaacagattcatcggcgtcccagcggcgttttccaagctgttccgcagcgagatcgactgggattacctaaccgaaccgcagccggagctcgacggccgcgaaatctattggcctcgtggcaaggtgctcggtggctcgtcgtccatgaacgcaatgatgtgggtgcgtggattcgcatcagactacgatgagtgggccgcgcgagccggtccgcggtggtcgtacgccgacgtgctcggctactttcgccgcatcgagaacgtcaccgctgcctggcactttgtcagcggtgacgacagcggagtaaccggtccgttgcatatttcccggcaacgcagcccaagatcggtgaccgcagcgtggctggcagccgcacgtgagtgcggatttgccgctgcgcggccgaattcccctcgaccggaaggcttttgcgagaccgtcgtcacccagcgccgcggtgctcgattcagtactgccgacgcctatctgaagcccgcgatgcgccgtaaaaacctccgtgtgcttaccggcgccactgctacccgggtggtcatcgacggcgaccgggccgtcggcgtggaataccaaagcgacggtcaaacccgcatcgtctacgcccgccgcgaggtggtgctctgcgctggtgccgtcaacagccctcagctgctgatgctctccggcatcggcgaccgcgaccacctcgccgaacacgacatcgacaccgtttaccacgcgcccgaggtcgggtgcaacctgctcgatcatctcgtcacggtgctgggtttcgacgtcgaaaaggacagcttgtttgccgccgagaagcccggccagttgatcagctacttactgcgacgccgcggcatgctcacctccaacgtcggcgaggcgtacggatttgtccgcagccgacccgaactgaagctgcccgatttggagttgatttttgccccggcgccgttttacgacgaagcgctggttccaccggctggtcacggtgtggtattcggcccgattctggtcgcgccgcaaagccgtggccagatcacgctgcggtccgccgatccgcatgccaagcctgtcatcgaaccgcgttacctgtccgatctcggtggcgtagaccgggccgccatgatggcgggcctgcggatatgcgcgcggatcgcgcaggcccgcccgctcagagatctccttgggtccatcgcgcgaccgcgcaacagcaccgagctggacgaggccactctcgagttggcgctggccacttgttcgcacaccctgtaccacccgatgggcacctgccgcatgggcagcgacgaggccagcgtggtggatccgcagctgcgggtccgcggtgtcgacggactccgcgtcgccgacgcgtcggtgatgcccagcacggttcgtgggcatacgcatgcgccgtcggtgctgatcggggagaaggccgccgacttaatccgcagctga

SEQ ID NO: 28337 - DNA, 1839 bp, Mycobacterium tuberculosis
atgagccccctgctcgaggtgaccgatttggccgtcaccttcaggaccgatggcgatccggtgaccgcggtgcgcgggatcagctaccgcgtcgagcccggcgaggtggtcgcgatggtgggcgaatcgggttcaggtaagtccgcagcggcgatggcggtggtgggcctgctgcccgagtacgcgcaggtgcgtggttcggttcggctacagggtaccgaactgttggggcttgccgacaacgcgatgtcccggtttcgaggcaaggcgatcggcacggtgttccaggatccgatgtctgcgctcacccctgtctacaccgtcggcgaccaaatcgccgaggccatcgaggtgcaccagccccgtgttggcaagaaggccgctcgtcggcgtgcggtggaactgcttgacctggtcggtatttcgcagccgcagcggcgttcccgtgcgtttccgcatgagctttcaggtggcgaacgccaacgcgtggtgatcgccatcgcgatcgccaacgatcccgacctgttgatctgtgacgaaccgaccacggcgctcgacgtcacggtgcaggcgcagatcctcgacgtcctcaaggcggcgcgcgacgtcaccggcgccggggtgctgatcatcacccacgacctcggcgtcgtggccgagttcgccgaccgggcgctggtgatgtacgccggacgggtcgtcgagtcggccggggtgaatgatctgtaccgcgatcgccggatgccctacaccgtggggcttttaggctcggtcccccggctggatgccgcgcagggcacccggctggtgccgataccgggtgcgcccccgtcgctggcgggcttggcaccgggttgcccgttcgcgccgcgctgcccgctagtcatcgacgaatgccttaccgcggaacccgaattgcttgacgtcgctaccgatcaccgggcggcctgcatccgcaccgagctggtcaccgggcgcagcgccgccgacatctaccgggtcaaaaccgaggcccgcccggctgcactcggcgacgcctcggtggtcgtgcgggtacgtcatctagtcaaaacctaccggctggccaagggcgtggtgctgcgccgggcgatcggcgaggtccgcgcggtcgacggcatcagtctcgaactccggcagggccgcacgttgggtatcgtcggcgaatccggttcgggcaagtcgaccaccctgcacgagatcctggagctggctgcgccgcaatcgggatcgatcgaagtcctcggcactgacgtcgccacgctggggacagcggaacgccgatcgctgcgccgcgacatccaggtggtcttccaagacccggtggcgtccttagacccgcggctgccggtcttcgatctgattgccgaaccattgcaggccaatgggttcggcaagaacgagactcacgcgcgggtcgccgagctgctcgatatcgtcggactgcgccacggcgacgccagtcgttatcccgccgagttctccggcggtcagaagcagcgcatcggcatcgcgcgggcactggcgctccaacccaagatcctggcactcgacgaaccggtgtcggcactcgatgtctccattcaggccgggatcatcaacctgctgctcgacctccaagagcagttcgggttgtcatatttatttgtttcccacgatctttcggtggtcaaacacctcgcccaccaggtggcggtcatgcttgccggtaccgttgttgagcagggcgacagtgaggaggtcttcggcaatccgaaacacgagtacaccaggcgactgctgggcgcggtaccgcaaccggatccggcccgtcgtggctga

SEQ ID NO: 28338 - DNA, 486 bp, Mycobacterium tuberculosis
atgcggatgtcagctaaggcggagtacgcggtgcgggcgatggtccagctcgccacggccgccagtggcaccgtggtcaagaccgacgatctggctgcggcccaaggcataccaccgcagtttctcgtcgatatcctgaccaacctgcgcaccgaccgcctggtgcgaagccaccgcggtcgcgagggtggttatgaattggcgcgtccgggcaccgagatcagcatcgccgacgtattgcgctgcatcgacggaccgctggctagtgtccgcgatatcggacttggcgacctgccctactcgggccccactaccgcgctgaccgacgtttggcgcgcgctgcgcgccagtatgcggtcggtgctggaggagaccacgctggctgacgttgccggtggcgcgctgcccgagcacgtcgcccagctcgccgacgactatcgcgcgcaggagagcacgcggcacggcgcctcgcgccatggtgactag

SEQ ID NO: 28339 - DNA, 1653 bp, Mycobacterium tuberculosis
gtgacccccgctgacctggctgagctgctcaaagcgaccgcggccgcggtgctggccgagcgcggcctcgatgcctccgcgttgccgcagatggtcacggtggaacgcccgcgcattcccgagcacggcgactatgccagtaacctggcgatgcagctcgccaagaaagtcggcaccaacccgcgtgagctggccggatggcttgccgaggcactgacaaaggtcgacggtatcgcctcggcggaggtggccgggccgggctttatcaacatgcggctggaaaccgccgcccaggctaaagtcgttaccagcgttatcgacgccggccacagctacggtcactcgctgctgctggccgggcgcaaggtcaacctggaattcgtctccgccaaccccaccggaccgatccacatcggcggtacccgttgggccgcggtcggtgacgcgctgggccgtttgctcaccacccagggcgccgacgtggtccgcgaatactatttcaacgaccacggcgcccagatcgaccgattcgccaactccctgatcgccgcggccaagggcgaacccacgccccaagacggctacgcgggcagctacatcaccaacatcgccgagcaggtgctgcagaaggcgcctgacgcgctgagtctgccagacgcagagttgcgcgagaccttccgcgcaatcggcgtcgacttgatgttcgaccacatcaaacagtctctgcacgagttcggtaccgacttcgacgtctacacccacgaagactcgatgcacaccggcggccgggtcgagaacgccatcgcccgactccgcgaaaccggcaacatctacgagaaggacggcgcaacctggttgcgcaccagcgcatttggtgacgacaaggaccgcgtcgtgatcaagagcgacggcaaaccggcatatatcgccggtgatctcgcctactacttggacaaacgccaacgcggttttgacttgtgcatctacatgctcggcgccgaccatcacggctacatcgcccggctaaaggccgcggccgccgccttcggtgacgacccggccaccgtcgaggtgctcattgggcagatggtgaacctggtccgcgacggccaaccggtccggatgagcaaacgtgcaggcaccgtgctcaccctcgacgacctggtcgaggcgatcggcgtggacgccgcacgttacagcctgatccgctcctcggtggacaccgcgatcgacatcgacctggcgctatggtcctcggcgtcgaacgaaaacccggtctattacgtgcaatacgcgcatgcccggctctcagcgctggctcgcaacgccgccgaactcgccctgatcccggatacaaaccacctcgaactgcttaaccacgacaaggagggcacgctgctgcgcaccctcggcgaattcccgagggtgctcgagaccgcggcctccctgcgggaaccgcaccgggtctgccgctacctggaagacctggccggcgactatcaccggttctacgactcgtgccgagtgttgccgcaaggcgacgagcagcccaccgacctgcacaccgcgcgcctagcgttgtgccaggccacccgtcaggtcatcgccaacgggctggcgatcatcggcgtcaccgcaccggagcgaatgtga

SEQ ID NO: 28340 - DNA, 951 bp, Mycobacterium tuberculosis
atggtgactcaagcattgttgccttctgggctggtggccagtgcggtggtggcggcgtccagtgcaaacctgggcccgggcttcgacagtgtcggtttggcgctgagtctctacgacgagatcatcgtcgagacaacagattccggcttgacggtgactgtagacggcgagggcggcgaccaggtgccgctgggccccgagcacctcgtggtccgcgccgtgcagcacgggttacaggcagcgggggtcagcgccgccggcctggcggtgcgctgccgcaacgccatcccgcactcccgcggcctcggctcctccgcggcagcagttgtgggcggtcttgcggccgttaacggtcttgtcgtacaaacggattcgtcaccatcgagcgatgctgagctgattcagttggcttcggagttcgagggtcatcccgacaacgcggcggccgcggttttgggtggtgccgtggtttcgtggactgaccacagtggtgaccggcccaactattcggccgtatcactgcggcttcatcccgatatccgcctgttcactgcgattcccgagcagcgttcgtcgaccgcggaaacgcgggtgctattgcccgcgcaggttagtcacgacgacgcacggttcaatgtcagtcgcgcggcgctgctggtggttgcgctcaccgaacggcccgatctgctgatggcggccaccgaagatctgcttcatcagccgcaacgtgccgcggcaatgacagcctccgcggaatatcttcggctgttgcggcgtcataacgtggcagcagcactgtccggggcaggtccttcgttgatcgccctgagtacagattcagagttgccgaccgacgccgtggagttcggagccgcaaagggatttgccgttaccgagctgactgttggcgaggcggttcgctggagcccgacagtaagagttcccggttaa

SEQ ID NO: 28341 - DNA, 1809 bp, Mycobacterium tuberculosis
gtgaccgatacggacctcattacggctggcgaaagtaccgacggcaagccgtcggatgccgctgccacagatcccccagacctcaacgccgacgagccggccggctcgctggccaccatggtgctgcccgaactgcgtgcgctggctaatcgagccggcgtgaagggaacatcgggtatgcggaagaacgaactgatcgctgcgattgaggagatcaggcgacaggccaacggcgccccagccgttgaccggtcggctcaagagcacgacaagggcgaccggccgcccagttccgaggcaccggccacccagggggaacagaccccgaccgaacagatcgattcccaaagccaacaggtccgcccggagcggcgcagcgccacccgtgaagcgggaccctccggttccggtgagcgtgcgggcacagccgcagacgacaccgacaaccgccaaggcggtcaacaggacgccaagaccgaggagcgtggcaccgacgcgggtggcgaccaagggggtgaccagcaggcttcgggcggtcagcaggcgcgcggcgacgaggacggagaagcgcgtcagggccggcgcggacgccggttccgcgatcggcggcgccgcggtgaacgatccggcgacggcgccgaggctgaactgcgtgaggacgacgtcgtccagccggtagccggcatactcgacgtcctggacaactacgcgtttgtgcgcacctccggctacctacccggtccgcacgacgtgtatgtgtcgatgaacatggtgcgcaagaacggcatgcgccgtggtgatgcggtgaccggtgcggtgcgggtgcccaaggaaggggagcaacccaaccagcggcagaagttcaacccgctggtccgcctggacagcatcaacggcggatcggtcgaagacgccaagaagcggcccgagttcggcaaactgacgccgttgtaccccaaccagcggcttcgtctggaaaccagtaccgagcggctgaccacccgggtcatcgacctcatcatgccgatcggcaagggtcaacgcgcgttgattgtgtcgccgcccaaagcgggcaagacaacgatcctgcaggacatcgccaacgcgatcaccaggaacaacccggaatgccacctcatggtcgtgctcgtcgacgagcggcctgaggaggtcaccgatatgcagcgctcggtcaaaggcgaggtcatcgcttcaactttcgaccggccgccgtcggaccacacgtcggtcgccgagctggcgatcgaacgcgccaagcggctggtggagcaaggcaaggacgtcgtggtgctgctcgattcaatcacccggctaggccgcgcttacaacaacgcgtcgccggcgtcgggccggatcctgtccggtggtgtcgattccacggcgttgtacccgcccaagcgcttcctgggggccgcgcgcaacatcgaagagggcgggtcgctgaccatcatcgccactgcgatggtcgagaccgggtccactggtgacacggtcattttcgaggagttcaagggcaccggcaacgccgagctcaagctggaccgcaagatcgccgagcggcgggttttccctgcggtcgacgtgaacccttctggaacccgcaaggacgagctactgctgtcgcccgacgagttcgctattgtgcacaagctgcgccgcgtgctatcgggcctggattcccaccaggccatcgacctgctgatgtcgcagctgcgtaagacgaagaacaactacgaattccttgttcaggtgtccaagaccacgccagggtccatggacagcgactga

SEQ ID NO: 28342 - DNA, 243 bp, Mycobacterium tuberculosis
atgaaatctgacattcatccggcatatgaggagaccaccgtggtctgcggatgcggcaataccttccagacgcgtagcaccaagccgggaggtcgtattgtggttgaggtttgttcgcagtgtcatccgttctacaccggcaagcagaagatcctcgacagcggcggccgggtggctcgcttcgagaagcggtacggcaagcgcaaggtcggagctgacaaggcggtttcaaccggcaaatag

SEQ ID NO: 28343 - DNA, 1074 bp, Mycobacterium tuberculosis
atgacgcagccagtgcagacgattgacgtgttgctcgccgaacacgccgagctcgagcttgcgctggcagatcccgcgctgcacagcaatccggccgaggcgcgcagagtcgggcgccggtttgcccgattggccccgatcgtcgcaacccaccgcaagctgacgtccgcgcgcgacgacctcgagaccgcgcgcgagctggtggcttccgacgagtcgttcgccgccgaggttgccgcattggaggctcgggtgggcgaactggatgcccaactcactgacatgttggcaccgcgtgacccgcacgatgccgatgacattgtgctggaagtcaaatccggcgaggggggcgaagaatccgcgttgttcgccgccgatttggccaggatgtatatccgctacgccgagcggcacggctgggcggtgacggtgttggacgagaccacctcggatctgggtgggtacaaggacgcgacgttggcgattgccagcaaagccgacacccccgacggggtgtggtcgcgcatgaagttcgagggcggggtgcaccgcgtacaacgggtcccagtgacggaatcccaaggccgcgtgcatacttcggcggcgggtgtgctggtctatccggagcccgaggaagtcggccaagtgcagatcgacgagtcggatctgcgtatcgacgttttccggtcgtccggcaagggcgggcagggagtgaataccaccgactccgcggtgcgtatcacccatctgcccactggaatcgtcgtcacctgtcagaacgaacggtcgcagctgcagaacaagacgcgtgcgttgcaggtgctggccgctcggttgcaggcaatggccgaggagcaggcgctggccgacgcgtcggccgaccgggctagccaaatccgcactgtggaccgtagtgaacgcattcgcacctacaacttcccggagaaccggatcaccgaccaccggatcggttacaagtcacacaatctcgatcaggtgctggatggcgatcttgacgcgttgttcgacgctctgtccgccgcggacaagcaatcccggttgcgacaatcatga

SEQ ID NO: 28344 - DNA, 978 bp, Mycobacterium tuberculosis
atgacctccgcgccggcgacgatgcggtgggggaacctcccgcttgcgggggagagcggcacaatgaccctgcgtcaggcgatcgacttggctgctgcgctattggccgaagcgggggtcgactcggcgcgttgcgacgctgagcagttggccgctcacctagcgggcacagaccgcggtaggctacccctgttcgagccgcccggcgacgagttcttcgggcgctatcgcgacatcgtcaccgctcgtgcgcggcgggtgccgttgcagcatctcatcgggactgtgtcgtttgggcccgtggtgctgcatgtcggcccgggtgtgtttgtaccgcgtccggagaccgaagccattttggcctgggccaccgcgcagtcgctgccggcgcggccgctgattgtcgacgcatgcacgggatctggcgcgttggcggtcgcattggcccagcaccgggccaaccttggactaaaggcccgcatcatcggcattgacgactccgactgcgcccttgactatgcccgccgcaatgcggcgggtaccccggtagagttggtgcgtgccgacgtcaccacgccccgcctgctccccgaactcgacggacaagtcgacctgatggtttccaacccgccctacatccctgatgctgctgttttggaacctgaagtagcgcaacatgacccgcatcacgcgttgttcggcggtcccgacgggatgacggtgatatccgcggtcgtcgggcttgctgggcgctggctgcgtcccggtggcctgttcgccgtcgaacacgacgacaccacgtcgtcgtcaactgtcgatttggtcagcagcacaaaacttttcgtggacgtacaagcccggaaagatctggccggacggccgaggtttgtgacggcgatgaggtgggggcacctcccgcttgcaggggagaacggcgccattgacccgcgccagcgacgatgcagagcgaagcgatga

SEQ ID NO: 28345 - DNA, 1215 bp, Mycobacterium tuberculosis
gtgcagtacggtctcgaggtgtccagcgatgtggccggcgttgccggtggcttgctcgccctgtcctatcgcggcgccggtgtcccgctgcgtgagcttgcgctggtcgggctgaccgcggcgatcatcacctattttgcgaccggtccggtgcggatgctggccagtcgcctgggagccgtcgcctacccgcgggagcgagatgtgcacgtcacgcctacccctcggatgggtgggttggcgatgttcctgggcattgtcggcgccgtctttcttgcctcccagcttccggcactcacccgggggttcgtctattccaccggcatgcccgcggtgctggtggccggtgcggtgatcatgggcatcggcctgatcgatgatcgttggggtctggatgcactgacgaagttcgccggccagatcacggcggcgagcgttctggtcaccatgggtgtcgcctggagtgtcctgtacatcccggtgggtggtgtgggcaccatcgtcttggaccaggcttcctcgatcctgcttaccctggcgctgaccgtttcgatcgtcaacgcgatgaactttgtcgacggtctcgacgggctggccgccggcctgggcctgataacggcgctggcaatctgcatgttctcggtgggtttgcttcgtgaccacggtggtgacgttttgtactacccgccggcggtgatttcggtggtcctggccggggcctgcctgggctttctgccacacaacttccaccgggccaagatcttcatgggcgattccgggtcgatgctgatcggcctgatgctggccgccgcttccaccaccgcggccgggccgatctcgcagaacgcctacggcgctcgtgatgtatttgctttgctgtcgccgttcctgctggtggtggcggtcatgtttgtgccaatgctcgacctgctgctagcgatcgtccgtcgcacccgcgccggccgcagcgcgtttagcccggacaaaatgcacctgcatcaccggctgctgcagatcggtcattcccatcggcgcgtggtcctgatcatctacctgtgggtgggcatcgttgccttcggcgccgcgagctcgatcttctttaacccgcgcgacaccgcggcggtgatgctgggcgcgatcgtggtcgccggcgtcgcgacactgatccccctgttgcgccgcggcgacgactactacgacccggacctggactag

SEQ ID NO: 28346 - DNA, 753 bp, Mycobacterium tuberculosis
atgactgagaccatcctggccgcccaaatcgaggtcggcgagcaccacacggccacctggctcggtatgacggtcaacaccgacaccgtgttgtcgacggcgatcgccgggttgatcgtgatcgcgttggccttttacctgcgcgccaaagtgacttcgacggatgtgccaggcggggtgcagttgttttttgaggcgatcaccattcagatgcgcaatcaggtcgaaagcgccatcgggatgcggatcgcacccttcgtgctgccgctggcggtgaccatcttcgtgttcatcctgatctccaactggctggcagtcctcccggtgcagtacaccgataaacacgggcacaccaccgagttgctcaaatcggcagcagcggacatcaattacgtgctggcgctggcgcttttcgtgttcgtctgctaccacacggccggtatttggcggcgcggtattgtcggacacccgatcaagttgctgaaagggcacgtgacgctcctcgcgccgatcaaccttgtcgaagaagtcgccaagccaatctcgttgtcgctccgacttttcggcaacattttcgccggcggcattctggtcgcactgatcgcgctctttcccccctacatcatgtgggcgcccaatgcgatctggaaagcatttgacctgttcgtcggcgcaatccaggccttcatttttgcgctgctgacaattttgtacttcagccaagcgatggagctcgaagaggaacaccactag

SEQ ID NO: 28347 - DNA, 246 bp, Mycobacterium tuberculosis
atggaccccactatcgctgccggcgccctcatcggcggtggactgatcatggccggtggcgccatcggcgccggtatcggtgacggtgtcgccggtaacgcgcttatctccggtgtcgcccggcaacccgaggcgcaagggcggctgttcacaccgttcttcatcaccgtcggtttggttgaggcggcatacttcatcaacctggcgtttatggcgctgttcgtcttcgctacacccgtcaagtaa

SEQ ID NO: 28348 - DNA, 1341 bp, Mycobacterium tuberculosis
atgtcgacgtttatcggacagctgttcgggttcgcggtcatcgtttatctggtgtggcgatttatcgtgccgctcgtagggcgtttgatgtccgcacggcaggacacggtgcgccaacagctggcggatgcggcggcggccgccgaccggctggcggaggcgagtcaagctcacacgaaggcgctggaagacgccaagtcggaagcgcaccgtgttgtggaagaggccaggacagatgccgaacgcatcgcagaacaactagaggcccaggccgacgtcgaggcggagcgcatcaaaatgcagggtgcccgtcaggtcgacctcatccgggcacagctgacccgtcagcttcgcctcgagctcggtcacgaatcggtgcgccaggcaagggaattggtacgcaatcacgtggccgatcaggcacaacaatcggccaccgtcgaccgcttcctggatcagctcgatgcgatggcgccggctacggccgatgtcgattacccactgctggccaagatgcgctcagccagccggagggcattaaccagcctggtggattggttcggcaccatggcccaggacctcgaccatcaaggtctgaccaccctcgccggcgagctggtgtcggtagcaagactgctggaccgcgaggccgtcgtcacccgctatctcaccgtgccagccgaagatgcgacgcccaggatccggctgatcgaacggctggtgtccggcaaggtcggcgcgccaacgctcgaggtgttgcgcacagccgtatcgaagcgctggtcggccaattccgatttgatcgatgcgatcgaacacgtgtcgcggcaggcgctgttagaactcgccgaacgtgcgggtcaggtcgacgaggtggaagaccagttattccggttttcccgcattctcgacgtgcagccccggcttgccatcctgttgggtgactgtgccgttccggccgaaggccgagtccggttgctgcgcaaggtgcttgagcgtgccgacagtaccgtcaacccggtcgtggtcgcgctgttgtctcacaccgtcgagctgctgcggggtcaggcagttgaggaagcggtgctgttcctggccgaagttgcggtggctcgccgcggcgaaatcgtcgcgcaggtcggcgcggcggccgagctcagcgatgctcagcgcactcgcctcaccgaagtgctgagccgtatctacggtcaccccgtgaccgtgcagctgcatatcgacgccgcgctgctgggcggattgtccatcgcggtcggtgacgaagtgatcgacggtacgctctcgtctcgtctagctgcggccgaggcacgactgcccgactga

SEQ ID NO: 28349 - DNA, 1650 bp, Mycobacterium tuberculosis
atggctgagttgacaatccccgctgatgacatccagagcgcaatcgaagagtacgtaagctctttcaccgccgacaccagtagagaggaagtcggtaccgtcgtcgatgccggggacggcatcgcacacgtcgagggtttgccatcggtgatgacccaagagctgctcgaattcccgggcggaatcctcggcgtcgccctcaacctcgacgagcacagcgtcggcgcggtgatcctcggtgacttcgagaacatcgaagaaggtcagcaggtcaagcgcaccggcgaagtcttatcggttccggttggcgacgggtttttggggcgggtggttaacccgctcggccagccgatcgacgggcgcggagacgtcgactccgatactcggcgcgcgctggagctccaggcgccctcggtggtgcaccggcaaggcgtgaaggagccgttgcagaccgggatcaaggcgattgacgcgatgaccccgatcggccgcggccagcgccagctgatcatcggcgaccgcaagaccggcaaaaccgccgtctgcgtcgacaccatcctcaaccagcggcagaactgggagtccggtgatcccaagaagcaggtgcgctgtgtatacgtggccatcgggcagaagggaactaccatcgccgcggtacgccgcacactggaagagggcggtgcgatggactacaccaccatcgtcgcggccgcggcgtcggagtccgccggtttcaaatggcttgcgccgtacaccggttcggcgatcgcccagcactggatgtacgagggcaagcatgtgctgatcatcttcgacgacctgactaagcaggccgaggcataccgggcgatctcgctgctgctgcgccgtccgcccggccgtgaggcctaccccggcgatgtgttctatctgcattcgcggcttttggagcgctgcgccaaactgtccgacgatctcggtggcggctcgctaacgggtctgccgatcatcgagaccaaggccaacgacatctcggcctacatcccgaccaacgtcatctcgatcaccgacgggcaatgtttcctggaaaccgacctgttcaaccagggcgtccggccggccatcaacgtcggtgtgtcggtgtcccgagtcggcggcgcggcgcagatcaaggctatgaaagaggtcgccggaagcctccgcttggacctttcgcaataccgcgagctagaagctttcgccgctttcgcttctgatttggacgccgcatcgaaggcgcagttggagcgcggcgcccggctggtcgagctgctcaagcagccgcaatcccagcccatgcccgttgaggagcaagtggtttcgatcttcctgggcaccggcggtcacctggactcggtgcccgtcgaggacgtccggcggttcgaaaccgaattactggaccacatgcgggcctccgaagaagagattttgactgagatccgggacagccaaaagctcaccgaggaggccgccgacaagctcaccgaggtcatcaagaacttcaagaagggcttcgcggccaccggtggcggctctgtggtgcccgacgaacatgtcgaggccctcgacgaggataagctcgccaaggaagccgtgaaggtcaaaaagccggcgccgaagaagaagaaatag

SEQ ID NO: 28350 - DNA, 1257 bp, Mycobacterium tuberculosis
gtggccgagcgtttcgtcgtgactgggggcaaccggttatcaggcgaagtggccgtcggcggcgccaagaacagcgtgctcaagctcatggctgcgacgttgttggccgagggcaccagcacgatcaccaactgtcccgacatcctcgatgtgccgctgatggcggaggtactgcgtggtctgggcgccaccgtcgaactcgacggtgacgtggcccggatcaccgcacctgacgagccgaagtacgatgccgacttcgctgcggtgcggcaattccgcgcctcggtctgtgtgctgggaccgctggtcgggcggtgcaaacgggccagggtcgcgctgccgggcggtgacgcgatcgggtcgcgtccgttggatatgcaccaggcgggcctacggcaattgggtgcccactgcaacatcgagcacggctgcgtggtagcccgagcggaaacgttgcgcggtgcggagattcagttggagttcccctcggtgggagccaccgagaacatcttgatggccgccgtggtggccgagggagtcaccactattcacaatgcggctcgagaacccgacgtcgtcgacttgtgcacgatgttgaaccagatgggcgcacaggtcgaaggtgcgggttcgccgacaatgaccatcaccggtgtcccgcggctgcatccaaccgagcaccgggtgatcggagaccgtatcgttgccgccacatggggcatcgctgccgcaatgacccgtggtgatatatcagtggcgggcgtagacccggcgcatctgcagctggtgctgcacaaattgcacgacgcgggcgcaaccgtcacccagactgacgccagcttccgggtgacccagtacgagcgtccgaaggctgtcaacgttgcgaccttgccgttccccgggtttcccacggatctgcagccgatggctatcgctttggcgtcgatcgccgacggcacatcgatgatcacggagaacgtgttcgaggcgcggttccgcttcgttgaagagatgatccggctcggtgcagacgctcggaccgacgggcaccacgccgtggtgcggggcctcccgcagctgtcgagcgctccggtgtggtgttcggacatccgtgccggggccggcttggtgctggcggggctcgttgccgacggcgacaccgaggtccacgatgtattccacatcgatcgcggatatccgttgttcgtggagaacctggtgagtctcggtgccgagatcgaacgggtatgctgttag

SEQ ID NO: 28351 - DNA, 498 bp, Mycobacterium tuberculosis
atgattcactaccgcaccatcgatagccccatcgggccattaaccctggccgggcatggctcggtgttgacgaacctgcggatgctcgagcagacgtatgagccaagccgcacacactggacacccgaccccggcgcattttctggcgctgtcgaccaactcaacgcttatttcgccggcgagctcaccgaattcgatgtggaacttgacctccggggaaccgactttcagcaacgagtatggaaagcattgctgacaatcccgtacggggaaacccggtcctacggggaaatcgccgaccagatcggcgcccccggcgccgcacgcgccgtgggattggccaacggccacaatcccatcgccatcatcgtcccgtgccaccgcgtgatcggcgccagcggaaagctcaccgggtacggcggtggaatcaaccggaaacgagctctgctcgagttggagaaaagccgggcgcccgcagacttgacgctcttcgactga

SEQ ID NO: 28352 - DNA, 1170 bp, Mycobacterium tuberculosis
gtgattgttgctggcgcgcgtacacccatcggcaagttgatgggctccctgaaggatttcagcgccagcgagctgggtgccatcgccattaagggcgccctggagaaggccaacgtgccggcgtccttggtcgagtacgtgatcatgggccaggtgttgaccgcgggtgccgggcaaatgcccgcacggcaggcggcagtggcggccggcatcggttgggatgtccctgcgctgacgatcaacaagatgtgcctgtccggcatcgacgcaatcgcgctggctgatcaactcattcgggccagagagttcgacgtggtggtggccggcggtcaggagtcgatgacgaaggcgccccacctgttgatgaatagccggtcgggttacaagtacggcgacgttacggttttggaccacatggcctacgacggtctgcacgacgtgttcaccgatcagccgatgggcgcgctcaccgagcaacgcaacgacgtcgacatgttcacccgctccgaacaggacgagtacgcggctgcgtcccaccaaaaggcggccgcggcatggaaggacggcgtattcgccgacgaggtgatcccggtgaacatcccgcagcgcacgggcgatccactgcagttcaccgaggacgaggggatccgcgccaacaccaccgccgccgcgctggccggtctgaagccggcgttccgtggcgacggcaccatcaccgccgggtcggcgtcacagatctccgacggtgcggccgcggtggtggtcatgaaccaggaaaaggcccaggaactggggctgacctggctagccgagatcggcgcccacggtgtggtggccgggccggattccacactgcaatcgcagccggccaacgcgatcaacaaggcgctggatcgcgagggcatctcggtggaccagctcgacgtggtggagatcaacgaggcgttcgctgcggtggcattggcctcgatacgcgaactcgggctgaacccccagatcgtcaacgtcaacggtggtgcgattgccgtcgggcatcccctcggcatgtcagggacgcgaatcacgctacatgcggcgctgcagttggcacgccggggatcgggcgtcggggttgccgcattgtgcggggctggcgggcagggcgacgcactgatattgcgggccggatag

SEQ ID NO: 28353 - DNA, 1812 bp, Mycobacterium tuberculosis
atgtcgtttgtaatcgccgctcccgagacgctggtgagggccgcttcggatttggcgaacatcgggtcgacgctgggggccgccaacgccgcggcattgggcccgacgacggaacttctggcagccggtgctgatgaggtgtcggcggccatcgcgtcgctgttcgccgcgcatggccaggcctatcaggcggtgagcgctcagatgtcggcgtttcatgcccagttcgttcaaacctttactgcgggcgctggcgcgtacgcgagcgctgaggccgccgccgcggcgccgttggagggcctgctcaacattgtgaacacgcccacccagctgttgctggggcgtccgctgatcggcaacggcgccaacggcgcaccggggaccgggcaagccggcggggccggcgggctgctgtacggcaacggcggggccggcgggtccggggcgcccggccaggccggcggcccaggtggagccgcggggctattcggcaacggcggggcgggtggggccgggggtgacggcccgggcaacggcgcggctggcggggccggcggggccggcgggctgctgttcggctccggcggcgccggtgggcccggcggagtcgggaacaccggcacaggcgggctcggcggcgacggcggggcggccgggctgttcggagccggtggcatcggcggggccggcgggccaggcttcaacggtggcgccggcggggccggcggtcgcagcgggctgttcgaggtgttggccgccggcggtgccggcggcaccggcgggttgagcgtcaacgggggcaccggtggcaccggcggcaccggcgggggcggcgggctgttctccaatggcggtgccggcggcgccggcgggttcggagtctccggctcggccggagggaacggcggcaccggaggcgacggcggcatcttcaccggcaacggcgggaccggcggcaccggcggaactggcaccggtaaccaactcgtgggcggtgagggcggggccggcggggcgggcggcaacgccggcatcctcttcggcgctggcggcattggcggcaccggcggaaccggtctcggcgcgcccgaccccggcggcaccggcggcaaaggaggcgtcggcggcatcggcggtgccggcgcactgttcggtcccggcggcgccgggggcaccggagggttcggcgcctccagtgcggaccaaatggccggcggcatcggcgggtccggtggcagcggcggggccgccaagctgatcggcgacggcggcgccggcggtaccggcggcgacagcgtccggggcgcggccggtagcggcggcaccggcggcaccggcgggttgatcggtgacggcggcgctggtggcgccggcgggactggcatcgaattcgggtcggtcgggggggccggcggggccggcggcaacgccgccgggctctcgggtgcgggcggggccggcggagccggcgggttcggcgagaccgccggcgacggtggggccggcggcaacgccggcctgctcaacggcgatggcggcgccggcggcgccggcggactcggcatcgccggcgacggggggaacggcggcaagggtggcaaggccgggatggtcggcaacggcggcgacggcggcgccggcggcgcaagcgtggtggcaaacggcggtgtcggcggctccggcggcaacgccaccctgatcggcaatggaggcaacggcggaaacggcggagtcggcagtgcgccgggtaagggtggcgccggcggcaccgccgggctgctcggcctgaacggatcacccgggttgtcgtag

SEQ ID NO: 28354 - DNA, 816 bp, Mycobacterium tuberculosis
atgaattcgccgttggcgcccgtcggagtctttgattccggcgtcgggggactgacggtcgcgcgggccatcatcgaccaactgcccgacgaggacatcgtctacgtcggcgacaccggtaacggcccgtacggtccgctgaccatcccggagatccgggcgcacgcgctggccatcggcgacgatctggtcggccgaggcgtcaaggcgttggtgatcgcctgcaactcggcgtcgtcggcgtgcctgcgggatgctcgcgagcgctaccaggtgcccgtcgtcgaagtgatactgccggcggtgcggcgtgcggtggccgccacccgcaacggccgcatcggggtaatcggcacgcgggcgaccatcacttcacacgcctatcaggacgcgttcgctgcggcccgcgacaccgaaatcaccgcggtggcttgccctcgcttcgtggacttcgtcgagcgcggcgtcaccagcggtcgtcaggtgctcggtctggcgcagggctacctggaaccgctgcagcgcgccgaggtcgacacgctagtgctgggctgtacgcactatccactgctgtccggactgattcaactggcgatgggcgagaacgtcacgctggtctccagcgccgaggagaccgctaaggaagtggtccgggtgctcaccgagatcgacttattgcgtccgcatgacgcgccgccggcaactcggatatttgaagctacgggcgaccccgaagcgtttaccaaattggccgcacgattcctgggtccggtgctcggtggtgtgcaacccgttcacccatcgcgcattcattag

SEQ ID NO: 28355 - DNA, 615 bp, Mycobacterium tuberculosis
gtggcgcttgtgaccaagcttctggtcgccagccgcaaccgcaaaaagctggccgaactgcgccgggtgttggacggcgccggactatcgggtttgacgctgttgtcgctgggcgatgtgtcgccgctgcctgaaacaccagaaaccggtgtgacattcgaggacaacgcgctggccaaggcgcgcgacgcgttctccgcgaccggacttgccagcgttgccgacgactccggtttggaggtggccgcactgggcggcatgcctggcgtgctgtcggcccggtggtccggcaggtatggcgacgatgccgcgaacaccgcgctgttgctggcgcagttgtgcgatgtgcccgatgagcggcgcggagcagcgttcgtgtcggcctgcgcgttggtctcggggtccggcgaagttgtcgtgcgcggtgaatggcccggcacgatcgcccgtgagccgcgcggtgacggcgggttcggctacgacccggtcttcgtcccgtacggtgacgaccgcacagcggcccagctgagcccggcggaaaaggacgcggtatcccatcgcggtcgcgcgttggctctgctgctgccggcgctgcgctccctggcgacaggctaa

SEQ ID NO: 28356 - DNA, 381 bp, Mycobacterium tuberculosis
gtgtccactacccgccgtcgcagacccgcgctgatcgcgttggtgatcatcgcgacctgtggttgcctggccctgggttggtggcagtggaccaggtttcaatcgacctcgggcacctttcaaaatctgggttacgcgttgcagtggccattgtttgcttggttctgcgtctacgcgtaccgcaacttcgttcggtatgaagagacgcccccgcaaccgcccaccggcggcgccgccgccgagatacctgccggattgctgcccgagcggccgaagccggcgcagcagccacccgacgatcccgtactacgggaatacaacgcctacctagccgagctagccaaggacgatgccaggaagcagaacaggaccaccgcatga

SEQ ID NO: 28357 - DNA, 744 bp, Mycobacterium tuberculosis
atggcgtcattgctgaacgctcggactgccgtaattaccggcggtgcacaagggctggggttagctatcggccagcgattcgttgccgagggtgcacgggttgtgcttggtgatgtgaatctcgaagcgaccgaggtcgcagccaagcggctgggcggcgatgacgttgctctggcggtgcggtgcgatgtgactcaagccgacgacgtcgacatcctcatccggaccgctgtcgagcgtttcggcggtctggatgtcatggtcaacaacgccgggatcacccgcgacgcaacgatgcgcacgatgaccgaagagcagttcgatcaggtcatcgcggtgcatctgaagggaacatggaacggtacccggctggcggcggcaatcatgcgggaacgcaagcggggcgccattgtgaacatgtcttcggtgtcaggcaaggtcggtatggtcggccaaaccaactactcagcggccaaggccggcatcgtaggaatgaccaaggcggccgccaaagaacttgcacacctcggcattcgggtaaacgcaatagctccggggttgatccgttcagcgatgacagaagctatgccgcaacgcatttgggaccagaagcttgccgaagttccgatgggtcgcgccggcgagcccagcgaagtcgctagcgtggccgtgttcttggcttcggatctatcctcgtacatgaccggcaccgtgttggacgtgactggcggccggttcatatga

SEQ ID NO: 28358 - DNA, 1872 bp, Mycobacterium tuberculosis
atgtgcaacgacaccgcgacgccgcagcttgaggagctcgtcaccaccgtagccaaccagctcatgacagtcgacgctgccacgtcagccgaagtcagtcagcgcgttttggcctatctagtggaacagctgggcgtagatgtcagctttttgcgtcataacgatcgcgacaggcgcgcgacgaggctggtggccgaatggccacctcgcctcaacataccggaccccgatccgctcaggctgatctacttcgctgatgccgacccggtgtttgcgctatgcgaacacgccaaagagcctctcgtgttccggcccgagccggccaccgaggactatcaacgcctcatcgaagaagcccgcggggttccggtaacgtcggctgccgccgtgccgctggtatctggcgagatcaccactggactgctggggttcatcaagttcggtgatcggaaatggcacgaggccgagcttaacgccctcatgaccatcgctacactcttcgcccaggtgcaggctcgcgtcgccgccgaggcgcggcttcgctatctggccgaccatgacgatctgaccggactgcataaccgtcgcgcgttgctgcagcacctggaccaaagactggcccccggacaacctggcccggtcgcggcgctatttctcgacttggaccgcctcaaggccatcaacgactacctgggccacgccgccggtgaccagttcatccatgtgttcgcccaacggatcggtgacgcactcgttggcgagagcctgatcgcccgactcggcggcgacgaattcgtcctcatacccgcatctccaatgagtgccgatgccgctcaaccgctcgccgaacgtcttcgcgaccagctcaaggaccacgtcgctatcggcggtgaggtgctcacccgcaccgtcagtatcggtgtcgcctcagggactcccggacagcacacaccgtcggacctcctgcgccgagccgaccaagccgctctggcagccaaacacgccggcggagatagcgtcgcgattttcaccgcggacatgtcggtcagcggcgaactgcgcaacgatattgaactacaccttcgacgtggtatcgaatccgacgcccttcgcctggtctacctacccgaggtcgacctacggaccggcgacattgtcgggaccgaggcattggtccggtggcagcaccccacccgtgggctgctggcaccgggctgcttcatccctgtggccgaatccatcaaccttgcaggcgaattggatagatgggtgctgcggagggcctgcaatgaattctccgagtggcagtcagccggtttgggccacgacgcgctgctgcgtatcaacgtctcagctggacagctggtgacgggcgggtttgttgacttcgtcgcagacacgatcggccagcacggtctggacgcctcgtccgtgtgtttggaaatcaccgaaaacgttgtggtgcaagacctacataccgccagagccaccctggctcgactcaaagaagtcggcgttcacatcgctatcgacgatttcggcaccggctatagcgccatatcactgttgcagacgctaccgatcgacacgctcaagatcgacaaaacattcgtgcggcaactcggaaccaacactagcgatctggtcattgtgcgcggcatcatgacactcgccgaaggcttccaactcgatgtagtagccgaaggcgtcgagaccgaggctgccgccagaattctattggatcagcgctgttaccgtgcgcaaggcttcttgttctcccggcctgtccccggggaggccatgcggcacatgttgtccgcacgacgactaccgccgacctgcatacctgcaactgacccggcgttatcttga

SEQ ID NO: 28359 - DNA, 885 bp, Mycobacterium tuberculosis
ttgcggtggggtgtcgagtcgatctgcacacagctgaccgagctgggtgtgccgatcgccccatcgacctactacgaccacatcaaccgggagcccagccgccgcgagctgcgcgatggcgaactcaaggagcacatcagccgcgtccacgccgccaactacggtgtttacggtgcccgcaaagtgtggctaaccctgaaccgtgagggcatcgaggtggccagatgcaccgtcgaacggctgatgaccaaactcggcctgtccgggaccacccgcggcaaagcccgcaggaccacgatcgctgatccggccacagcccgtcccgccgatctcgtccagcgccgcttcggaccaccagcacctaaccggctgtgggtagcagacctcacctatgtgtcgacctgggcagggttcgcctacgtggcctttgtcaccgacgcctacgctcgcaggatcctgggctggcgggtcgcttccacgatggccacctccatggtcctcgacgcgatcgagcaagccatctggacccgccaacaagaaggcgtactcgacctgaaagacgttatccaccatacggataggggatctcagtacacatcgatccggttcagcgagcggctcgccgaggcaggcatccaaccgtcggtcggagcggtcggaagctcctatgacaatgcactagccgagacgatcaacggcctatacaagaccgagctgatcaaacccggcaagccctggcggtccatcgaggatgtcgagttggccaccgcgcgctgggtcgactggttcaaccatcgccgcctctaccagtactgcggcgacgtcccgccggtcgaactcgaggctgcctactacgctcaacgccagagaccagccgccggctga

SEQ ID NO: 28360 - DNA, 1293 bp, Mycobacterium tuberculosis
gtgagcgtgctgattcgtggtgtgcggccctacggcgagggggagcgggtcgacgtactcgtcgatgacggccagatcgcccagataggaccggatctggcgatccccgatacggccgatgtcattgacgccaccggacacgtgctgctgcccgggttcgtcgatctgcacacccatctgcgcgagccgggccgcgagtatgccgaggacatcgaaaccggttcggccgcggccgctttgggcggctacaccgcggtgttcgcgatggccaacaccaaccccgtggccgacagcccggtggtcaccgaccacgtctggcaccgcggccagcaggtcggcctggtcgacgtgcaccccgtcggcgcggtcaccgtcgggctggccggagccgagctgaccgagatgggcatgatgaacgccggcgccgcccaggtgcggatgttctccgacgacggggtctgcgtgcatgacccgctgatcatgcgccgcgccctggaatatgccaccggtttgggcgtgctgatcgcccagcacgccgaggagccccggctgacggtcggcgccgtcgcgcacgagggacccatggcggcgcggctgggcctggcgggatggccgcgggccgccgaggaatcgatcgtcgcccgcgacgccttgctggcccgtgacgccggcgcccgggtgcacatctgtcacgcgtcggccgcgggcaccgtcgaaatcctgaaatgggctaaggaccagggtatttcgatcaccgccgaggtcaccccccaccacctgttgctcgacgatgccagattggccagctatgacggcgtgaaccgggtcaacccgccgctgcgcgaagcttccgacgcggtcgccctgcgacaggcgctggccgacgggatcatcgactgtgtggccacagatcacgccccgcatgccgagcacgagaaatgcgtcgaattcgccgcggcccggcccggcatgctcgggttgcagacggcattgtcggtggtggtgcagacaatggtggcgcccggcttgttgagttggcgcgatatcgcgcgggtgatgagtgagaacccggcgtgcatcgcacgcttgcccgatcagggccggccactggaggtgggggagccggccaacctgacggtggtggaccccgacgccacctggacggtcaccggcgccgacctggccagccggtcggccaacacgccgtttgagtcgatgagcctgcccgccaccgtgaccgcgaccctgctgcgcgggaaggtgaccgcgcgcgacgggaagatccgggcatga

SEQ ID NO: 28361 - DNA, 1131 bp, Mycobacterium tuberculosis
ttgagcaaagccgtattggtcctcgaagacggccgggtgttcaccggcaggccgttcggcgcgaccggacaagcgctcggggaggccgtgttttccaccggcatgtccggttatcaggagacgctgaccgatcccagctatcaccgtcagatcgtggtggccaccgcgccgcagatcggcaacaccggctggaacggcgaggactccgaaagccgaggggagcggatctgggtcgccggttacgcggtgcgcgacccgtcgccgcgcgcgtccaactggcgcgccaccggcacgttggaagacgaactcatccgccagcgcatcgtcgggatcgccggcatcgacacccgggccgtggtgcgccatctgcgcagccgcgggtcgatgaaggcgggggtgttctccgacggggcgctggccgagcctgccgacttgatcgcgcgggtgcgagcacaacagtcgatgctgggcgccgatctggccggcgaggtcagcaccgcggagccgtatgtcgtcgaacccgacgggccaccgggtgtttcgaggttcaccgtggccgccctagatcttggtatcaagaccaacactccgcgtaacttcgcccggcgcgggattcgctgccatgtgctgccggcatcgaccaccttcgagcagatcgccgaactcaacccgcatggcgtgttcttgtccaacggccccggcgacccggccaccgccgatcacgtcgtcgcgcttacccgcgaggtgctgggcgccggaatcccgttgttcggcatctgtttcggcaaccagatcctgggccgcgcgctgggcctgtcgacctacaagatggtgtttgggcaccgcggcatcaacatcccggtcgtcgaccacgccaccggtcgggtggcggtgaccgcgcaaaaccatggcttcgcccttcagggggaggcgggccaatccttcgccaccccgttcggtcccgcggtggtcagccacacctgcgccaacgacggtgtggtcgaaggcgtcaagctcgttgacgggcgggcgttttcggtgcaataccacccggaagccgccgccggcccgcacgatgccgagtacctgttcgaccagttcgtggagctgatggcaggggagggccgctag

SEQ ID NO: 28362 - DNA, 1212 bp, Mycobacterium tuberculosis
gtgagcgaaaagggtcggctgtttaccagtgagtcggtgacagagggacatcccgacaagatctgtgacgccatcagcgactcggttctggacgcgcttctagcggcggacccgcgctcacgtgtcgcggtcgagacgctggtgaccaccgggcaggtgcacgtggtgggtgaggtgaccacctcggctaaggaggcgtttgccgacatcaccaacacggtccgcgcacggatcctcgagatcggctacgactcgtcggacaagggtttcgacggggcgacctgcggggtgaacatcggcatcggcgcacagtcacccgacatcgcccagggggtcgacaccgcccacgaggcccgggtcgagggcgcggccgatccgctggactcccagggcgccggtgaccagggcctgatgttcggctacgcgatcaatgccaccccggaactgatgccactgcccatcgcgctggcccaccgactgtcgcggcggctgaccgaggtccgcaagaacggggtgctgccctacctgcgtccggatggcaagacgcaggtcactatcgcctacgaggacaacgttccggtgcggctggataccgtggtcatctccacccagcacgcggccgatatcgacctggagaagacgcttgatcccgacatccgggaaaaggtgctcaacaccgtgctcgacgacctggcccacgaaaccctggacgcgtcgacggtgcgggtgctggtgaacccgaccggcaagttcgtgctcggcgggccgatgggcgatgccgggctcaccggccgcaagatcatcgtcgacacctacggcggctgggcccgccacggcggcggcgccttctccggcaaggatccgtccaaggtggaccggtcggcggcgtacgcgatgcgctgggtggccaagaatgtcgtcgccgccgggttggctgaacgggtcgaggtgcaggtggcctacgccatcggtaaagcggcacccgtcggcctgttcgtcgagacgttcggtaccgagacggaagacccggtcaagatcgagaaggccatcggcgaggtattcgacctgcgccccggtgccatcatccgcgacctgaacctgttgcgcccgatctatgcgccgaccgccgcctacgggcacttcggccgcaccgacgtcgaattaccgtgggagcagctcgacaaggtcgacgacctcaagcgcgccatctag

SEQ ID NO: 28363 - DNA, 1731 bp, Mycobacterium tuberculosis
atgtcgtttttgtttgcacagccggaaatgctgggcgcggcggcgacggatctggcaagcatcggctcggcgatcagcacggccaatgctgcggccgcggccgccacgacgcgtgtgctggccgccggtgccgatgaggtgtccgccgccgtggcggcgctgtttagcggccacgcgcagacctatcaggcgctgagaactcaggcggcggcgtttcaccagcagatcgtgcagaccctcacgagcacggcaggcgcgtatgccagcgccgaggccgccaacgtcgagcagcagctgctgggtgcgatcaacgcgccgaccatggcgctgctggggcgcccgctgatcggccacggcgccgacggggcgccggggaccgggcaggccggcggggccggcgggatcctgtacggcaacggcggcaacggcgggtccggcgccaccggtcaggccggcggtgcgggcggggcggccgggctgatcggccacggcggggccggcggcctgggtggcaccggcgcgtccggtggtgccggcggggccggcggatggctgtggggcaacggcggggccggcggcaatggcggggtcggggtggccggcgaccccggtggtgtcggcggtgccggcggtgccggcggcgccgccggattgtggggcagcggagggtccggcggcaccggcgggcaagggggggtcggtggcggcaagtccggcgacggcggcacggggggtatcggcggcgccggtggcggtggtggctggctgcacggcgacggcggcgccggcggacacggcgggcagggcggaaccggcgtcagctcaggaggcaacggcggggccggcggcaccggcggcgacggccgcggcctgtcgggcagcggcggggccggcgggcgcggcgggcaaactggggttggaggcaaagtcggggagaataacttcgggggcgcgggcggtgccggcggtaccggcgggctcatcggcaacggcggtgccggcggcaacggcgggcaaggcgcaattagcggcgccggcggggccggtggcaatgcctggctgatcggcgacggcggtgccggcggcaacggcggtgatatccgtggccagggcggcggcgccggtggagccggcggcgctggtgggcaactcattggcaacggcggcaccgggggggcaggcgggaccgtcaccagtccgaacggtcttggcggtgctggcggagccggcgggtccgccggtctgattggccacggcggcaccggcggggccggcgggcacagcgcccaggggcccgacggcaatggcggaattggtggtgccggcggggccggtggcaacggcggacaactctacggcaccggcggcaccggcggcaccggcggcaagggcggcgacggcttcggcgtgttcggcaagggcggcgccggcgggaccggcgggcgaggcggtgccgccggcctgatcggcgacgccgggaccggcgggaccggcggaaagggcggcaccgccggcgaggacggtaccggcggcaacggcgggaccggcggaaacggtggggccgccgtcctaatcggcaacggcgggggcggcggcgccggcggaaacggtggggccggcaacgatggcacccccggcaacggcgggggcggcggcgtcggcgggaccgggggaaccctgttcggccagcccggccaacccggtccgcccggccagcccggccccgcctaa

SEQ ID NO: 28364 - DNA, 1374 bp, Mycobacterium tuberculosis
atgacccctagatcgcgtgggccgcgccgccggccgctggacccggcgcgtcgtgcggccttcgagacgctgcgggcggttagtgcgcgcgacgcctacgcgaacctggtgttgcccgcgctgctggcccaacgcggtatcggcggtcgcgacgccgcgttcgccaccgagctgacatacggcacctgccgagcccgcggcctgctcgacgcggtcatcggtgcggccgccgagcgttcgccgcaggcgatcgatccggtgctgctagacctgttgcggctcggcacctaccaattgctgcgcacgcgggtcgacgcacacgccgcagtgtcgaccaccgtcgagcaggccggaatcgaattcgattcggcgcgagcaggtttcgtcaacggtgtactacgaacgatcgccggccgagacgagcggtcctgggttggcgaactcgctcctgatgcgcagaacgatccgatcgggcatgccgcgttcgtgcatgcgcatccccgatggatcgcccaggcctttgctgacgcgttgggcgcggcggtcggggagctcgaggcagttttggccagcgacgacgaacggccagcggtgcacctggcggcacgccccggggtgctgaccgccggcgaactggcccgcgcggtgcgcggaaccgtcggtcggtattcgccgtttgcggtgtatctgccgcgcggtgacccggggcgactggcgccggtgcgcgacggccaagcgctggtccaggacgagggcagccagttagtcgcccgagcattgaccctggcgccagtcgacggcgataccggacggtggctggacctgtgtgccggaccgggcggcaagaccgcgctgttggccgggctgggtttgcagtgcgcagcccgggtgaccgcggtggaaccctcgccacaccgcgcggacctggtagcacagaacacccgcgggctgccggttgagctcttgcgtgtcgacgggcggcacaccgacctcgacccgggtttcgaccgggtgctggtggatgcgccctgcaccgggctgggcgcgttacgccgtcggccggaggcccgttggcgtcgtcagccggcggacgtagcggcactggccaagctacaacgcgagttgttgagcgccgccatcgcgctgactcggcccggcggtgtcgtgctctatgccacatgctcgccgcacctggccgagactgtgggtgctgtcgccgacgcgctacgccgacatccggttcacgcgctcgatacccgcccactgttcgagccggtgatcgcggggctgggggaggggccccacgttcagctgtggccgcaccggcacggtaccgacgccatgttcgccgcggcgttgcgccgcctgacgtga

SEQ ID NO: 28365 - DNA, 1020 bp, Mycobacterium tuberculosis
atgaacgtggagcaggtcaagagcatcgacgaggctatgggtctcgccatcgagcactcctaccaggtcaaaggcacgacttatccaaaacccccagtgggggccgtcattgtggatcccaacggtcggatcgtcggcgccggcggcaccgagccggccggtggcgatcatgccgaggtggtggcgctgcgccgggccggcggattggctgccggcgccatcgtggtggtcaccatggaaccctgtaaccactacggcaagactccgccatgcgtgaacgctctgatcgaagccagggtggggacggtggtctacgccgtcgccgacccgaacgggatcgctgggggtggcgcgggccggctgtcagcagcgggcctacaggtgcggtccggggtgttggctgaacaggtggcggccggaccgctgcgggagtggctccacaagcaacgcaccggtctgccgcatgtcacctggaagtacgccaccagcatcgacggccgcagcgccgccgccgacggctccagccagtggatctccagcgaggccgcacgcctggatctgcatcgccgccgcgccatcgccgacgcgatcttggtcggcaccggcaccgtcctcgccgacgacccggccctgaccgcgcggctggccgacggctcgctggcgccgcagcagccgctgcgcgtggtggtgggcaagcgcgacataccgccggaagcacgggtcctcaacgacgaggcacgcaccatgatgatccgcacccacgaacctatggaggtgctcagggcgttgtcggatcgcaccgacgtgctgctggaaggaggtcccaccctcgccggcgccttcctacgagcgggtgcgatcaaccggatcctggcctacgtcgcaccgatcctgttgggcggtccggttaccgcggtcgatgacgtcggggtgtccaacatcaccaacgcgttgcgttggcagttcgacagcgtcgaaaaggtcggaccggatctgttgctgagcttggtggctcgttag

SEQ ID NO: 28366 - DNA, 606 bp, Mycobacterium tuberculosis
atgttcaccggaattgttgaggaacgcggagaagtgaccgggcgtgaggccctggtcgatgcggcgcggctgaccatccgcggtccgatggttaccgccgacgccggccacggcgactcgatcgctgtcaacggcgtgtgtctgacggtcgtcgatgtattgcccgacggccaattcaccgccgacgtgatggccgagacactgaaccggtccaacctgggtgagctacggcccggcagccgggtgaacctggaacgcgccgcggcgctgggcagccggctcggcgggcacatcgtgcagggacatgtggacgccaccggtgaaatcgtggcgcgttgtccctccgagcactgggaagtggtgcgcatcgagatgccggcttcggtggctcgctatgtcgtcgaaaagggctcgatcaccgtcgacgggatttctctgacggtctccgggctcggcgccgaacagcgggactggtttgaggtctcgctgatcccgacgacccgggagctgaccacgctggggtccgctgcggtgggaacccgggtgaacctcgaagtcgacgtagtcgcaaagtatgttgagcggttaatgcggagcgccggctga

SEQ ID NO: 28367 - DNA, 1278 bp, Mycobacterium tuberculosis
atgacgaggttggactccgtcgagcgggcggttgccgacattgcggcgggtaaggccgtcatcgtcatcgacgacgaagaccgggagaacgagggtgacctgatcttcgccgccgagaaggcaacgccggagatggtggccttcatggtccgctacacctccggatacctgtgcgttccgctggacggtgccatctgcgaccggctgggcctgttgcccatgtacgcggtgaaccaggacaagcacgggacggcatacaccgtcacagtcgatgcacggaatggcattggaactggcatttcggcgtccgatcgggctaccaccatgcggttgctggccgatccgaccagtgtggccgacgatttcacccgccccggtcacgtggtccccttgcgggccaaggatggtggggttctgcgccggcccggccacaccgaggccgccgtggacctggcccggatggccgggctgcaacccgcgggggcgatttgcgagatcgtcagccaaaaagatgagggctcgatggcgcacaccgatgaattgcgggtgttcgccgatgagcacggtctggcgctgatcaccattgctgacttgatcgaatggcggcgcaagcacgagaagcacattgagcgggtcgccgaggcgcggattccgactcgtcatggggagtttcgcgccatcggctacaccagcatctacgaggacgtggaacatgtcgcgctggtccgcggcgagatcgccgggcccaacgccgacggtgacgacgtgctggtccgggtgcattcggagtgcttgaccggcgatgtgtttgggtcacgccgctgcgattgcgggcctcagctggacgccgcgctggcgatggtcgcccgtgaggggcgcggcgtggtgctgtacatgcgtggccacgagggccgcggcatcggcctgatgcacaaactgcaggcctaccaactgcaggacgccggtgccgacaccgttgacgccaatctcaagcttggactacctgccgacgcaagggattacgggatcggcgcacagatcctggtcgatcttggggtacgttcgatgaggctgctgaccaacaacccggccaagcgggtgggactggatggatacggattgcacatcatcgagcgcgtgccgctgccggtgcgggccaacgcggagaacatccgttacctgatgaccaagcgtgacaaattggggcacgacttggctgggttggacgattttcacgaatccgtgcatctgcccggagaattcggcggtgccttgtga

SEQ ID NO: 28368 - DNA, 465 bp, Mycobacterium tuberculosis
gtgccggatctgccgtcgctggatgcgtctggtgtgcggctggcgattgtcgccagcagctggcacggaaagatctgcgacgcgctgttggacggcgcccgcaaggtggccgccgggtgtggcctcgatgacccgactgtggttcgggtgctcggcgcgatcgagattccggtggtggcgcaggaattggcccgcaatcatgatgccgtcgtcgcacttggcgtcgtgatccgcggtcagacaccacatttcgactacgtgtgcgatgcggtaacccagggactgacccgggtatcgctggattcctcgacgccgatcgccaacggcgtgctgaccaccaacaccgaggagcaggcgctggatcgggcggggctaccgacgtcggccgaggacaagggcgcccaggcgactgtggcagccctggccaccgcgttgaccctgcgcgagctgcgcgctcactcgtga

SEQ ID NO: 28369 - DNA, 906 bp, Mycobacterium tuberculosis
atgatgaaccatgctaggggcgtcgagaatcgttcggaaggcggcggtatcgacgtcgtcttggtaaccgggctgtccggggccgggcgcggcacggcggctaaagtgctggaagacctgggctggtatgtggccgacaatctgccgccccagctgattacccgcatggtggacttcgggctggccgccggatcacggatcacccagctggcggtggtaatggatgtgcgatcgcgcggattcaccggcgacctcgattcggtccgcaacgagctggccacgcgtgccatcaccccgcgtgtggtgttcatggaggcgtccgatgacacgttggtgcgccgctacgaacagaatcgccgcagtcatccgctgcagggtgagcagactctggccgagggcattgccgcagagcgcaggatgctagcaccggttcgcgccaccgccgacctgatcatcgacacgtcgacactgtcggtggggggcttaagggatagcatcgagcgtgccttcggcggtgatggcggcgcgaccaccagcgtcaccgttgaatccttcgggttcaagtacggcctgccgatggacgccgacatggtcatggacgtgcggttcctgccgaacccgcactgggtggacgagttgcggccactgaccggccaacatccggccgtgcgcgactatgtgctgcaccggccgggcgcggctgagttcctcgagtcctaccatcggttgctatccctggttgtcgacggctaccgccgagaggggaagcgctatatgacaatcgccatcggctgtaccggtggtaagcatcgcagcgtcgcgatcgctgaagcactgatgggacttctgcgctccgatcagcaactgtcggtgcgggcgctgcaccgggatctgggtcgcgaatga

SEQ ID NO: 28370 - DNA, 1029 bp, Mycobacterium tuberculosis
atgaccgatggcatcgtcgcgctgggcggcggacacggcttgtatgcgacgctgtctgcggcccgccggttgacaccctacgttaccgccgtggtgaccgtcgccgatgacggtggctcgtcgggccggctgcgcagcgagctcgatgtggtgccgccgggcgatctgcgaatggccttggcggcgttggcatccgatagcccgcacggacgcctgtgggcaactattctgcagcacagattcggcggcagtggtgcgctggccggacatccgatcggcaatctgatgctagcgggcctgtccgaggtgctggccgatccggtcgcggctcttgacgaactcgggcgcatcctcggggtgaaaggcagggtgctgccgatgtgcccggtcgcgcttcagatcgaggccgatgtctccggtctggaggccgacccgcgcatgttccgcctgatccgtggccaggtggcgatcgcgaccacgcccggaaaggtgcgccgggtgcggctgctgccgactgacccgccggcgacccggcaggctgtcgacgccatcatggctgccgatctggtggtcctggggcccgggtcgtggttcaccagcgtgataccccatgtgctggtgccgggtctggccgcagcgctgcgagcaacgtcggcccgccgtgccctggtgctcaacctggtggctgaaccgggagagacggccggtttctcggtggagcgtcatctgcacgtgctagcccaacacgcgcccgggttcaccgttcacgacatcatcatcgacgccgaacgagtgccgagcgaacgggagcgggagcaactgcgccgcacggcgacgatgctgcaggccgaggtccacttcgccgatgtcgccagacctggtacacctttacatgacccgggcaagctggcggcggtcctcgacggggtgtgtgcgcgcgacgtcggcgcgtcggagcctccggtggcggccacacaggagataccgatcgacggtggacgaccgaggggtgacgacgcgtggcgatga

SEQ ID NO: 28371 - DNA, 978 bp, Mycobacterium tuberculosis
atgacgaccgatgtcaaagacgagctgagccgactggtggtgaagtccgtcagcgcgcggcgcgcggaggtcacctctctgctgcgattcgccggcgggttgcacatcgtgggcggccgcgtggtggtcgaagccgagctggacctgggcagtatcgcacggcggctgcgtaaggagatcttcgagctctacggctacacggcggtggtgcatgtgttgtcggccagcgggattcgcaagagcacccgctacgtgctgcgggtcgccaacgacggcgaggcgttggcacgccaaaccggactgcttgacatgcgcggtcgtcccgtgcggggtctgccggcccaggtcgtcggcggcagcatcgatgacgctgaagctgcgtggcgaggagcatttttggcgcacgggtcgctgactgagccgggacgctcctcggcgttggaggtcagttgcccgggcccggaggccgcgctggcgctggtgggtgcggcacgccggcttggggtcggcgccaaggctcgtgaggtgcgcggtgccgatcgcgtggtggtgcgcgacggtgaggcgatcggcgcactgctgacccggatgggggcccaagacacccggctggtctgggaggagcggcggctgcgtcgtgaggtgcgtgcgacggccaaccggctcgccaatttcgacgacgccaatctgcgccgctcggcgcgggccgcggttgccgcggccgcccgggtggagcgtgccttggagatcctcggcgatacggtgcccgagcacttggcctcggccggcaaattgcgtgtcgagcaccggcaggcgtcgctggaggagctgggccggcttgccgatcctccgatgacgaaagacgctgtagccggacgtattcggcgattgttgtcgatggcggatcgtaaggcgaaggtggacggcatccccgatacggagtccgtagtgacgcccgatctgctggaagacgcctag

SEQ ID NO: 28372 - DNA, 1020 bp, Mycobacterium tuberculosis
gtgacggtccgagtaggcatcaacgggtttggtcgaatcggacgcaacttctaccgggccttactggcccaacaggagcagggcaccgccgacgtggaggtggtcgccgccaacgacatcaccgacaacagcacgctggcgcatctgctcaaattcgactcgattctgggccggctgccttgcgatgtcggcctcgaaggcgacgacaccatcgtcgtcggccgcgcgaaaatcaaggcgctcgcggtccgggaggggccggcggcattgccatggggagacctcggcgtcgacgtcgtcgtcgaatccaccggcctgttcaccaatgcggccaaagccaaaggccacctggacgccggcgccaagaaggtgatcatctctgcgcccgccaccgacgaggacatcaccatcgtcctgggagttaacgacgacaagtatgacggcagccagaacatcatctccaatgcgtcgtgcaccacgaactgccttgcgccgctggccaaagtgctcgacgatgagttcggcatcgtcaagggcctgatgaccaccatccacgcctacactcaggatcagaacctgcaggacgggccgcacaaggacctgcgtcgcgcccgcgccgccgcgctgaacatcgtgccgacctccaccggcgcggccaaggccatcggcctggtgatgccgcagctaaagggcaagctcgacggttatgcgctgcgggtgccgatccccaccggctcggtcaccgaccttacggtcgacttatccacacgggccagtgtcgatgagatcaacgcggcgttcaaagccgcggccgaaggcaggctcaagggcattctgaagtactacgacgcgccgatcgtctcgagcgacatcgtcaccgacccgcacagttcgattttcgactctgggttgaccaaagtcatcgacgaccaggccaaggtggtgtcgtggtacgacaacgagtggggctactccaaccgcctggttgatctggtcacgctggtcggcaagtcgctctag

SEQ ID NO: 28373 - DNA, 1239 bp, Mycobacterium tuberculosis
atgagcgttgcaaacctcaaggatctactcgccgaaggtgtttcggggcgtggagtgctggtgcgctccgatctcaacgttccgctcgacgaggacggcaccattaccgatgcgggccgcatcatcgcgtcggcgccgacgttgaaggcgttgctcgacgccgacgccaaggtggtggttgccgcgcacttgggacgtcccaaggacgggccggacccgacactgtcgctggcgccggtcgccgtggcgctgggtgagcaactcggccggcacgtccagctggctggagacgttgtcggcgccgatgcgctggcccgcgccgaggggctcaccggcggcgacatcctgctgctggagaacatccgcttcgacaaacgcgaaaccagcaagaacgatgacgaccggcgggcactggccaagcagctggtcgaactggtcggaacgggaggcgttttcgtctccgacggctttggggtggtgcaccgcaagcaagcctcggtctatgacatcgcaaccctgttgccgcactacgccggcacgctggtcgccgacgagatgcgggtactggagcagttgaccagctcgacccagcggccctatgcggtagtgctcggcggatcaaaggtgtccgacaagctgggtgtcatcgagtcgctggcgaccaaggcggacagcattgtgattggcggcggaatgtgcttcacattccttgctgcacagggattttcggttggcacatcgctgctggaagacgacatgatcgaagtctgtcgcgggctgctggaaacctatcacgacgtgttgcggctgcccgtggatctagtggtcacggagaagttcgccgccgactcgccgccccagacggtcgacgtcggcgctgtgcccaatggcttgatgggcctggatatcgggccgggatcgatcaaacggttcagcacgctgctgtccaacgccgggaccatcttctggaacgggccgatgggagtattcgagttcccggcttatgcggccggcaccagaggcgtcgccgaggcgatcgtcgccgccaccggcaaaggggcgtttagtgtggtcggcggcggtgactccgcggccgcagtgcgcgcgatgaacatccccgagggcgccttctcacacatatccaccggcggcggtgcctcgctggaataccttgagggcaagacgcttcccggcatcgaggtactgagccgtgagcagccaaccggaggagttttgtga

SEQ ID NO: 28374 - DNA, 1476 bp, Mycobacterium tuberculosis
atgtcgaacgtgatggtagtcccgggaatgttgtcagcggcggcagcggatgtggcgagcatcggtgcggcgcttagcgcggccaacggagccgcggcacccacgacggctggtgtcctggccgccggggccgatgaggtgtcggcggccatcgcgtcgttgttttctggctacgcccgcgactatcaggcgctcagtgcccaaatggccagatttcatcaacagttcgtgcaggccttaaccgcgagcgtgggctcgtatgccgccgccgaggccgccaacgcctcccccttgcaggccctcgaacaacaggtgctcgcggccatcaacgcgcccacccagacactgctggggcgtccgctgatcggcaacggcgccgacgggctgcccggtcaaaacggtggggccggcgggttgctgtggggcaacggcgggaacggcggagccggcgacgccgcccaccccaacggcggcaacggcggggatgccggaatgttcggtaacggcggggccggcggtgccggttacagcccggcggccggaaccggcgcggccggtggagccggcggcgccggtggagccggtggctggctaagcggcaacggcggcgccggcggcaacggcggtactggcgccagcggcgccgacggcggcggcggcctcccccccgtccccgccagccctggcggtaacggcggtggcggtgatgccggtggtgctgctgggatgttcggcaccggcggcgccggtgggaccggcggggacggcggcgccggcggtgccggcgacagtcctaacagcggtgccaacggcgcccgtggcggcgacggcggcaacggcgctgcgggtggggctggtggccggctgttcggcaatggcggcgccggcggcaacggcggcaccgctggccaaggtggcgacggcggcacggcgctaggcgctggcggcatcggcggcgacggcggcaccggcggcgccggtggtactggcggcacagctggcatcggcggcagcagcgccggcgccggcggcgccggcggcgacggcggcgccggcggcaccggcggcggcagctcaatgatcggcggcaaaggcggtaccggcggcaacggcggcgtcggtggcaccggcggcgccagcgcattgaccatcggcaatggcagcagcgccggcgccggcggcgctggcggcgcaggcggcaccggcggcaccggcggctatatcgaaagcctcgacggcaaaggccaagccggcaacggcggcaacggcggcaacggcgccgcgggtggggcaggcggaggcggcaccggcgccggcggtaacggcggcgccggcggcaacggcggtgacggcgggcccagccaaggtggcggcaatcccggctttggcggcgacggcggcaccggcggacctggcggcgtcggtgtgcccgacgggatcggcggcgccaatggcgcgcaaggaaagcacgggtga

SEQ ID NO: 28375 - DNA, 1545 bp, Mycobacterium tuberculosis
atgaaaccggcccacgccgcggcgtcgtggcgcaacccgctacgagacaagcgggacaagcgattacccagaatcgccggcccgtgcggcatggtgattttcggcgtcaccggcgacctggcccgcaagaaggtgatgccggccgtctacgatttggccaaccgcggcctgctgccgcccacattctcgctggtggggtttgcccgccgagactggagcacccaggatttcggtcaagtggtgtacaacgccgtccaagagcactgccgaacaccgtttcggcaacagaactgggaccggctggccgagggattccgttttgtgccaggcactttcgacgacgacgacgcgttcgcccaactcgccgagacgctggagaagctcgacgccgagcgcggcaccggcggcaaccacgccttctacctggcgatcccgcccaaatccttcccggtggtgtgtgagcagctgcacaagtccggcctggcccgcccgcaaggcgaccggtggagccgagtcgtgatagagaagccgttcggccacgacctggccagcgcacgcgagctgaacaaggcggtcaacgcggtcttcccggaggaagcggtcttccgcatcgaccactacctgggcaaagagacggtgcagaacatcctggcgctgcggttcgccaaccagctgttcgacccgatctggaatgcgcactacgtcgaccacgtacagatcaccatggccgaagacatcggcctgggcgggcgcgcgggctattacgacggcatcggcgcggcccgcgatgtcatccagaaccatctcatgcagctgctggcgctgaccgcgatggaggagccggtcagcttccacccggcagcgttgcaggccgagaagatcaaggtgctctcggccacccgccttgccgagccactcgaccagaccaccagccgcggccagtacgccgccggctggcaaggcggggagaaggtggttgggctgctcgacgaggaggggttcgccgaggactccaccaccgaaaccttcgccgctatcaccctggaagtcgatacgcgccggtgggccggcgtgccgttctatctgcgaacgggaaaacgattgggccgccgggtgaccgagatcgctctggtcttcaggcgggcgccgcatctgccgttcgacgccaccatgaccgacgagctgggcaccaacgcgatggtcatccgcgtgcagcccgacgaaggtgtcacattgcggttcggctccaaggtgccgggcaccgccatggaagtccgcgacgtcaacatggacttctcctacggctcggcattcgccgaagattcaccggaggcctacgagcggctcatcctcgacgtcctgctcggcgagccctcgctgtttccggtcaacgcggaggtcgaactggcgtgggagatcctcgatccagcgttggaacattgggcggcacacgggacgcccgacgcctacgaggcaggtacctggggtccggaatcatccttggagatgctgcgccgcaccggccgggaatggcggcggccatag

SEQ ID NO: 28376 - DNA, 1122 bp, Mycobacterium tuberculosis
atgaccgctcagaaccccaacctggccgcattgagcgccgcgggggtatcggtgtggctggatgacctgtcgcgggaccggctgcgctcgggcaatctgcaggagctgatcgacaccaagagcgtcgtcggggtgaccaccaacccgtcgatctttcagaaggcgctgtcggagggccacacctacgacgcccagatcgccgagctggccgcgcgcggcgccgacgtggatgccaccatccgcaccgtcaccactgacgacgtgcgcagcgcgtgcgacgtgctggtcccccagtgggaggactccgacggggtcgacggccgggtgtcgatcgaggtcgacccgcggctggcacacgaaaccgaaaaaacgatccaacaggcaatcgagctgtggaagatcgtcgaccggccgaaccttttcatcaagatcccggccactaaggccggtctgcccgccatcagtgccgttctggcggaagggatttcggtcaacgttacgctgatcttctccgtgcagcggtaccgcgaggtgatggacgcctacctgaccgggatggaaaaggcccggcaagccggacacagcctgtccaagatccattcggtggcatcgtttttcgtctcccgggtggacaccgaaatcgacaagcggctggacagaatcggctcgcggcaagcgctcgaactgcgcggccaggccggtgtcgccaatgcccgcctggcctatgccacctaccgggaggtcttcgaagacagcgatcgttatcggtccctcaaggtcgacggcgcccgggtccagcgcccgttgtgggcttccaccggcgtgaagaaccccgattactcggacaccctctacgtcaccgagttggtcgccccacacaccgtgaacactatgccggaaaagacaattgacgccgtcgctgatcatggcgtgatccaaggcgacacggtcaccggaactgcatccgatgcccaggcggtgttcgaccagctgggggcgatcggcatcgacctcaccgacgtgtttgccgtcctcgaggaggaaggcgtgcggaagttcgaggcctcctggaacgagctactccaggaaacccgggcgcatctcgacaccgctgcccaatga

SEQ ID NO: 28377 - DNA, 2103 bp, Mycobacterium tuberculosis
gtgaccacactcgaagagatctccgcgcttacccgaccgcgccatcccgactactggaccgagatcgattcggctgccgtcgacaccatccgggtattggccgccgatgccgtccaaaaggtcggcaacggtcatcctggaacggcgatgagcctggctccgttggcctacacgctgtttcagcggacaatgcgtcacgatcccagcgacacacactggctgggccgcgatcggttcgttttgtcggccgggcacagcagcctgaccctctacatccagctctacctcggcggcttcggcctggaactgtccgacattgagtcgttgcgcacctggggatccaagacccccggacacccggagttccgccacacccccggcgttgagatcaccaccggcccgctggggcagggactggcgtcggcggtcgggatggcgatggcctcgcgctacgagcgcggcctgttcgacccggacgccgaaccgggcgccagccccttcgaccactacatctatgtcatcgcctccgacggtgacatcgaagaaggggtgacctcggaggcgtcgtcgctggccgcggtccagcaactgggcaacctcatcgtgttctacgaccgcaaccagatctcgatcgaggacgacaccaacatcgcgctgtgtgaggacaccgcggcccgctaccgcgcgtacggctggcacgtgcaagaggttgagggcggtgagaacgtcgtcggcatcgaggaggccatcgccaatgcgcaggcggtcaccgaccggccctcgttcatcgcgctgcgcaccgtcatcggctatccggcgccgaacctgatggacaccggcaaggcgcacggcgcggcgctgggcgacgacgaggtggccgcagtcaagaagatcgtcggcttcgatccggacaagacgttccaggtccgcgaggacgtcctcacccacacccgagggctggtggcccgcggcaaacaggcccacgaacgctggcagctcgaattcgatgcctgggcgcggcgtgaacccgagcgcaaggcgctgctggaccggctgctcgcgcagaagttgcccgacggctgggacgccgacttgccccactgggaaccggggtccaaggcgctggccacccgtgcggcctcgggtgcggtgctgtccgcgctcgggccgaaactgcccgagttgtggggcggttcggccgacctggcgggcagcaacaacacaacgataaagggcgccgactcctttggcccgccctcgatttccaccaaggagtacaccgcgcactggtatggtcgcaccttgcacttcggtgttcgcgagcacgcgatgggtgccatcctgtccggcatcgtgctgcacggacccacccgggcttacggcggcaccttcctgcagttctccgactacatgcgcccggcggtgcggctggcggcgttgatggacatcgacaccatctacgtctggacgcacgactcgatcggcctcggcgaagacgggcccacccatcaaccgatcgagcacctctcggcgctgcgcgcgatcccccggctgtcggtggtgcgcccggcagatgccaacgagacagcctacgcctggcgcacgatcctggcccgccgcaacggcagcgggccggtcgggttgatcctgacccgccagggtgtgccggtgctggacggcaccgacgccgagggggttgcccgcggcggttacgtgctgagtgacgccggtggtctgcaaccgggcgaggaacccgacgtcattctcatcgccaccggctcggaggtgcagctggcggtcgcggcgcagacgttgctggcggacaacgacatcctcgctcgggtggtgtcgatgccgtgcctggagtggttcgaggcccaaccctacgagtaccgcgacgcggtgctgcccccgacggtgtcggcgcgggtggccgtcgaagccggcgtcgcgcaatgctggcaccagctggttggcgacacgggcgagatcgtctcgatcgagcactacggcgaatccgcggaccacaagaccttgttccgcgagtacggcttcactgccgaggccgtggccgccgccgccgaacgagcgctggataactga

SEQ ID NO: 28378 - DNA, 987 bp, Mycobacterium tuberculosis
atgcacgcaatcgaagtcaccgaaaccggcgggccaggcgtcttacgccacgtcgaccagccgcaacctcaacccggccacggcgagctcctgatcaaggccgaggccatcggtgtcaacttcatcgacacctacttccgctccgggcaatatccgcgcgaactcccgttcgtcatcggctccgaggtatgcggcacggtggaggccgtcggcccaggggttaccgcagccgacaccgccatcagcgtcggcgaccgcgtggtcagcgcctcagccaacggcgcctacgccgaattctgcacagcgccagcatctctgaccgccaaggtccccgacgacgtcacgtctgaggtagcggcttcggcgctgctgaagggcctgacggcgcattacctactgaagtcggtgtacccggtgaagcgtggtgacaccgtcttggtgcatgctggcgccggcggcgtcggcttgatcctgacacaatgggccactcacctgggggtgcgggtgatcaccaccgtttcgacggcggagaaggccaagctgtccaaggatgccggcgcggacgtggttctcgactacccggaggatgcctggcagttcgccgggcgggttcgcgaactgaccggcggcaccggtgtgcaagccgtttacgacggtgtcggcgccaccaccttcgacgccagcctagccagcctggctgtccgcgggacattagcactgttcggcgccgccagcggtccggttccaccggtcgatccgcagcgcctcaatgccgccggatcggtgtacctcacccgtccctcgctgttccacttcacccgcaccggcgaggagttcagctggcgggccgctgagctgttcgacgcgatcggcagcgaagcgatcaccgtggcggtcggcggacgttacccgctggccgacgccttgcgcgcccatcaggacctggaggctcgcaagacggtcggctcggtcgtgctgctgccgtag

SEQ ID NO: 28379 - DNA, 786 bp, Mycobacterium tuberculosis
gtgacccaaaccaatcgccccgcttttcccgcgggcaccttcagcccggacccccgccccaacgccgtccccctgatgcttgccgcacagttcagcctggaattgaagctgctgttacgcaacggcgagcaactgctgttgaccatgttcatcccgatcaccctgctggtcgggctgactttgctgccgatgggctcgttcggccacaaccgcgccgccacctttgttccggtcatcatggcgcttgcggtgatctccaccgcattcaccgggcaagccatcgcggtcgcgttcgatcgccgctacggcgccctcaaacgactcggtgctaccccgctgccggtttgggggatcatcgccggcaagtcgctggcagtggttgccgtggtgttcttgcaggccatcatcttgggcgccatcggctttgcgctcggctggcggccggcgctgacggccctgacattgggcgccgggatcatcgcgctgggtaccgcgggctttgcggcgctcggcctgctactcggcggcaccttgcgagccgagatcgttctcgccgtcgccaacctgatgtggttcgtattcgccggtttcggtgcgctgaccttggagtcgaacgtgatcccgacggcgttcaaatgggtggctcgggttaccccgtcgggcgcgctcaccgaggcgctgtcgcaggccatgaccgtgtcggtggactggttcgggatcgtcgtcctagcggtgtggggcgcgctggccgcactggccgcactgcgctggttccggttcacctga

SEQ ID NO: 28380 - DNA, 801 bp, Mycobacterium tuberculosis
atgaccattttggaaattaaggacctgcacgtcagcgtggagaaccccgcggaggcggaccacgagatcccgatcctgcgcggcgtcgacctcaccgtgaaatccggtgagacacatgccttgatgggacccaacggctcgggcaagtcgacgctgtcctacgccatcgcgggccatcccaaataccacgtgacgtcgggcaccattaccctcgacggcgcggacgtgctggcgatgagcatcgacgaacgtgcgcgggccggcctgtttctggccatgcaatatcccgtcgaggtgcccggtgtctcgatgtcgaacttcctgcgctcggcggcaaccgccattcgcggcgagccgccgaaactgcggcactgggtcaaagaggtcaaggccgcgatggccgcgctcgacatcgacccggccttcgccgagcgcagcgtcaacgagggtttctccggtggcgagaagaagcgccacgagatcctgcagctagaactgctcaagcccaagatcgccatcctggacgagaccgactccggcctggacgtcgacgcgctgcgcgtggtcagcgagggggtgaaccgctacgccgaatcccagcacggcggcatcctgctgatcacgcactacacccgcatcctgcgctacatccacccggaatacgtgcacgtgttcgtcggcggccgcatcgtcgagtccggtggttcggagctcgccgacgaactcgaccagaacggctacgtgcgtttctcccccgcaagcgggcggtacccccaccaacccgcgccaaccggagcctga

SEQ ID NO: 28381 - DNA, 489 bp, Mycobacterium tuberculosis
gtgacgttgcgtctggagcagatctatcaggacgtgatcctcgatcactacaagcatccgcagcatcgggggctgcgggagccgttcggcgcccaggtgtatcacgtgaacccgatctgcggcgacgaggtcacgctgcgggtcgcgttgtccgaggacggcaccagggtcaccgacgtttcctatgacggacaaggctgttcgatcagccaggccgcgacctcggtgctcaccgaacaggtaatcggacaacgcgtgccgcgggcgctgaacatcgtcgacgccttcaccgaaatggtgtcctcccgcgggaccgtgccaggcgacgaggacgtcttaggcgatggggtcgcgttcgccggggtggccaaatacccggcccgggtgaaatgcgcgctgctcggatggatggcgttcaaagatgcgctggcccaagccagcgaagccttcgaggaggttacagatgagcgaaaccagcgcaccggctga

SEQ ID NO: 28382 - DNA, 1113 bp, Mycobacterium tuberculosis
atgtcgttcgtggtcgcgaatacggagttcgtgtcgggagcggcggggaatctcgcgcgcctcggttcgatgattagcgcggccaactcggccgcggcggcccagacgaccgctgtcgcggccgcaggcgccgatgaggtgtcggcggcggtcgcggcgttgttcggcgcgcacggccagacctatcaggtgctcagcgcccaagccgcggcgtttcacagccagttcgtgcaagccctgtccggcggcgcgcaggcgtacgccgccgcggaggccaccaactttggccccttgcagccgctattcgacgtcatcaacgcgcccaccctggcgctgttgaaccgtccgctgatcggcaacggcgccgatgggaccgcggcgaaccccaacggccaggccggcggactcctgatcggcaatggcggcaacggcttctcgcccgctgccggccccggcggcaacggcggcgccgccggactgctgggccacggcggcaacggcggcgtgggcgccctgggcgccaacggcggcgccggcggcaccggcgggtggctgttcggcaacggcggggccggcggcaatagcggcggtggcggcggtgccggcggcatcggcggctccgccgtgctcttcggggccggcggcgcgggtggcatcagccccaacggcatgggagccggtggctctggaggcaacggcgggctgttttttggcaacggcggtgctggcgccagcagcttcctcggcggaggtggcgccggcggcagggccttcctgttcggcgacggtggtgccggcggggcagccctatccgcgggtagcgctgggcgtggcggcgatgccgggttcttctatggcaacggcggcgccggcggcagcggagccgggggggcatcgagcgcccacggcggggccggcggccaggccgggttgttcggcaacggcggggaaggcggcgatggcggcgcgttgggcggcaacggcggcaacggtggcaacgcccagctgatcggtaacggcggtgacggcggcgacggcggcggggccggcgcccccgggctcggcggcaggggcgggctgctgctcggcctgcccggcgcgaacggaacatag

SEQ ID NO: 28383 - DNA, 744 bp, Mycobacterium tuberculosis
gtgactgccacagccactgaaggggccaaacccccattcgtatcccgttcagtcctggttaccggaggaaaccgggggatcgggctggcgatcgcacagcggctggctgccgacggccacaaggtggccgtcacccaccgtggatccggagcgccaaaggggctgtttggcgtcgaatgtgacgtcaccgacagcgacgccgtcgatcgcgccttcacggcggtagaagagcaccagggtccggtcgaggtgctggtgtccaacgccggcctatccgcggacgcattcctcatgcggatgaccgaggaaaagttcgagaaggtcatcaacgccaacctcaccggggcgttccgggtggctcaacgggcatcgcgcagcatgcagcgcaacaaattcggtcgaatgatattcataggttcggtctccggcagctggggcatcggcaaccaggccaactacgcagcctccaaggccggagtgattggcatggcccgctcgatcgcccgcgagctgtcgaaggcaaacgtgaccgcgaatgtggtggccccgggctacatcgacaccgatatgacccgcgcgctggatgagcggattcagcagggggcgctgcaatttatcccagcgaagcgggtcggcacccccgccgaggtcgccggggtggtcagcttcctggcttccgaggatgcgagctatatctccggtgcggtcatcccggtcgacggcggcatgggtatgggccactga

SEQ ID NO: 28384 - DNA, 810 bp, Mycobacterium tuberculosis
atgacaggactgctggacggcaaacggattctggttagcggaatcatcaccgactcgtcgatcgcgtttcacatcgcacgggtagcccaggagcagggcgcccagctggtgctcaccgggttcgaccggctgcggctgattcagcgcatcaccgaccggctgccggcaaaggccccgctgctcgaactcgacgtgcaaaacgaggagcacctggccagcttggccggccgggtgaccgaggcgatcggggcgggcaacaagctcgacggggtggtgcattcgattgggttcatgccgcagaccgggatgggcatcaacccgttcttcgacgcgccctacgcggatgtgtccaagggcatccacatctcggcgtattcgtatgcttcgatggccaaggcgctgctgccgatcatgaaccccggaggttccatcgtcggcatggacttcgacccgagccgggcgatgccggcctacaactggatgacggtcgccaagagcgcgttggagtcggtcaacaggttcgtggcgcgcgaggccggcaagtacggtgtgcgttcgaatctcgttgccgcaggccctatccggacgctggcgatgagtgcgatcgtcggcggtgcgctcggcgaggaggccggcgcccagatccagctgctcgaggagggctgggatcagcgcgctccgatcggctggaacatgaaggatgcgacgccggtcgccaagacggtgtgcgcgctgctgtctgactggctgccggcgaccacgggtgacatcatctacgccgacggcggcgcgcacacccaattgctctag

SEQ ID NO: 28385 - DNA, 2253 bp, Mycobacterium tuberculosis
atgacaaccaagacacccgtgatcggcagcttcgccggcgttccgctgcatagcgagcgtgccgcgcaatcgcccacagaggccgcggtgcacacgcatgtcgccgccgccgcggcggcgcacgggtacacgcccgaacagttggtgtggcacacgccggaaggcattgacgtcacaccggtatacatcgccgccgaccgggccgccgccgaagccgagggctacccgctgcacagcttcccgggcgagcccccctttgtgcgcggcccctatccgacgatgtatgtgaaccagccgtggaccatccgccagtacgccgggttttccaccgccgcggattccaatgcgttttaccgacgcaacctggccgccggccagaaggggctgtcggtggccttcgatctggccacccaccgcggctacgactccgaccatccccgcgtgcagggcgatgtcggaatggccggtgtggcaatcgattccattctcgacatgcgacagctgttcgacggcatcgacctgtcgaccgtgagcgtgtcgatgacgatgaacggtgcggtgctgccgatcctggcgctgtatgtggttgccgccgaggagcagggcgtggcgccggagcagctggccggcaccatccagaacgacatcctcaaagagttcatggtccgcaacacctacatctatccgccgaagccgtcgatgcggatcatctccgacatcttcgcctacaccagcgccaagatgcccaagttcaactccatctccatttccggctatcacatccaagaagccggtgccacggcggatttggagctggcctacaccctggccgacggcgtcgactacatcagggcgggcctgaacgccggcctggacatcgacagcttcgcgccccggctatcgttcttctggggcatcgggatgaatttctttatggaggtcgccaaactgcgggccggccggttgctgtggagtgagctggtcgcacagttcgcgcccaagagcgccaaatccctttcgctgcgtacacattcgcaaacatcggggtggtcactgaccgcccaggatgtgttcaacaacgtggcgcgcacatgcatcgaggcgatggccgccacccaggggcacacccagtcgctgcacaccaacgccctggacgaggcgctggcgctgcccaccgatttttcggcccgcatcgcgcgcaacacccagctggtgttgcagcaggagtcgggcaccacgcggccgatcgacccgtgggggggctcctactatgtggagtggctgacccatcggctcgcgcggcgagcccgggcgcacatcgccgaggtcgctgaacatggcggcatggcgcaggccatcagcgacggcatccccaagctgcgcatcgaggaggcggccgcgcgcacccaggcccgcatcgactccggtcagcaaccggtggtcggggtgaacaaataccaggtgcccgaggaccacgagatcgaggtgctcaaggtcgaaaacagccgggtgcgcgccgagcagctggccaaactgcagcggctgcgggcaggccgggacgagccggcggtacgggccgcgctggccgagctgacccgcgccgccgccgagcaaggacgcgccggagcagacgggctgggcaataatctgctggccctggccatcgacgccgcccgggcccaggccaccgtgggcgagatctccgaagcgctggagaaggtgtacggacggcaccgggccgagatccgtaccatttccggggtctaccgcgacgaagttggaaaggcccccaacatcgcagccgcaaccgagctagtggagaagttcgccgaggccgacggccgccggcccaggattctgatcgccaagatgggccaggacggccacgaccgcgggcagaaggtgatcgcgaccgcgttcgccgacatcgggttcgacgtcgacgtggggtcgctgttttccacccccgaggaggtggcgcgtcaggccgccgacaacgacgtgcacgtgatcggggtgtcctcgctggccgccggccatctgacgctggtgccggcgctgcgcgacgcgttggcgcaggtgggcaggcccgacatcatgatcgtggtcggtggtgtcatcccgccgggcgacttcgacgagctgtacgccgccggggccaccgccattttcccgccggggacggtgattgccgacgcggcgattgacctgctgcacaggctggccgagcggctggggtacacgctggattag

SEQ ID NO: 28386 - DNA, 3441 bp, Mycobacterium tuberculosis
gtggcaaggcatgacgaggccaaagccgggggactgttcgaccgtatcggcaacttcgtggtgcgatggccgctgatcgtcattgggtgctggatcgcggtggcggccgcgctgacgctgttgctcccaacgctgcaggcgcaagccgcaaagcgcgagcaagctcccctgccgcccggggccccatcgatggtcctgcaaaaggagatgagcgcggctttccaggaaaaaattgagacctccgccctccttttggtcctcttgaccaacgagaacgggctgggacccgccgacgaggccgtctaccgaaaactgatcgaaaacctgcgggcggacacgcaggacaaaatatcggttcaggattttctcgccgtccccgaaatgaaggagctgttggccagcaaggacaacaaggcttggaacctgcccatcacgttcgcgggcgatgccgcgtcgcctgagacacaagcggcgttcaaacgcgtcgccgcgatcgtcaagcaaacagtcgcgggaaccagcctgaccgtccacctcagcggtccgatcgccacggtcgccgacctgacggagctcggcgagaaagatgtgcggatcatcgagatcggcaccgcggtcagcgtgctgatcatcctgatcctcgtctatcggaacctggtgaccatgctggtgccgctggccaccatcggagcgtcggtggtcactgcgcagggcacgttgtccgggctcgccgagttcggcctggccgtgaacatgcaggcgatcgtctttatgagcgcggtcatgatcggggcgggaaccgattacgccgtctttctgataagtcgctatcacgactatgtgcgccacggcgaaaaatcggacatggcggtcaagaaggcgttgatgtccatcggcaaggtgatcaccgcatcggcggccaccgtcgccgtcacatttctggcgatggtgttcaccaaactggaagtgttttcggcggtgggcccggcaattgcggttgccatcacggtgtcgctgctgggtgcggtcaccctgctgcccgccatcctgacactcaccggacggcggggctggatcaagccgcgacgcgacctgaccagtcgaatgtggcggcgttcgggtgttcgcatcgtgcgtcggtccaccatccacctggtcggcagtctcattgtgctggtcgccctggccggctgcacgctgctgatccgattcaactacgacgatctcaagacggtgccgcagcacgtcgaaagcgtcaaaggatacgaggcgatgaaccgccatttcccgatgaacgcgatgactccgatggtgctgttcatcaaatccccccgagacctgcggacacccggcgcgcttgccgacatcgagatgatgtcccgcgagatagcagaattgcccaacatcgtgatggtgcggggcttgacccgaccgaacggggaacctctgaaggagaccaaggtctcgtttcaggctggtgaagtgggcggcaagctcgacgaagcgaccaccctgctcgaagagcacggaggcgagctggaccagctgaccggcggtgcgcaccagttggccgacgccctcgcccaaatacgcaacgaaatcaatggggccgtggccagctcgagcgggatagtcaacaccctgcaggccatgatggacctgatgggcggcgacaagaccatccgacaactggaaaatgcgtcccaatatgtcgggcgcatgcgggctctgggggacaatctgagcgggaccgtcaccgatgccgaacaaatcgccacttgggccagccctatggtcaacgccctcaactccagcccggtgtgtaacagcgatcccgcctgtcggacgtcgcgcgcacagttggcggcgattgtccaggcgcaggacgacggcctgctcaggtccatcagagcgctagccgtcaccctgcaacagacgcaggaataccagacactcgcccggacggtgagcacactggacgggcaactgaagcaagtcgtcagcaccctcaaagcggtcgacggcctacccaccaaattggctcaaatgcagcaaggagccaacgctctcgccgacggcagcgcagcgctggcggcaggcgtgcaggaattggtcgatcaggtcaaaaagatgggctcagggctcaacgaggccgccgacttcctgttggggatcaagcgggatgcggacaagccgtcaatggcgggcttcaacattccaccgcagattttttcgagggacgagttcaagaagggcgcccagattttcctgtcggccgatggtcatgcggcgcggtacttcgtgcagagcgcgctgaatccggccaccaccgaggcgatggatcaggtcaacgatatcctccgtgttgcggattccgcgcgaccgaataccgaactcgaggatgccacgataggtctggcgggggttccgactgcgctgcgggatatccgcgactactacaacagcgatatgaaattcatcgtcattgcgacgatcgttatcgtattcttgattctcgtcattctgctgcgcgcacttgtggctccgatatatctgataggctcggtgctgatttcttacttgtcggccctaggcataggaactctcgttttccaattgatactgggccaggaaatgcattggagcctgccgggactgtccttcatattattggttgccatcggcgctgactacaacatgctgctcatttcacgcatccgcgacgaatcaccacacggtatacgcatcggcgtcatccgaaccgtgggctccaccggtggtgttatcacctcggcgggtctcatcttcgccgcgtcgatgttcggtctggtgggcgcgagcatcaacacgatggctcaggccggtttcaccatcggcatcgggatcgtgctggacaccttcctggtccgcacggtcacggtgccggccttgaccacgatgattggccgggcaaactggtggccgtccgagctgggacgcgacccatccacgccgccgaccaaagccgatcggtggctgcggcgggtgaaaggccaccgacgcaaggccccgatcccggcgcccaagccgccccacaccaaggtcgtccgcaacaccaacgggcacgcaagcaaggcggcaaccaagtcggttcccaacggcaagcccgctgacctagccgaaggcaacggggagtacctgatcgaccacctgcgcagacattcgcttccgctgttcggctatgccgccatgccggcctacgatgtcgtggatggcgtgtcgaaacccaacggcgacggcgcccacatcggtaaagaacccgtcgaccatctactcggccactcgctgccgctgttcggtcttgccggcctaccgagctacgaccgttgggatgacacgtctatcggcgaacccgcagtcggtcacgcggggtcaaagcccgacgcgaagctgagcacctga

SEQ ID NO: 28387 - DNA, 3126 bp, Mycobacterium tuberculosis
gtgaccgataacgcatatccaaagctggccggcggggcacccgacctcccggcactcgaactcgaggtcctcgactactggtcccgtgacgacaccttccgggccagcattgctcgccgcgatggcgcccccgagtatgtgttctatgacgggccgccgtttgccaacggtctgccgcattatgggcacctgctcaccggctacgtcaaagacatcgtgccgcgatatcgcactatgcgcggttacaaggtggagcgtcgcttcggctgggacactcacgggctgcccgccgaactcgaagtcgagcgccagcttggcatcactgacaaatcccagatcgaggccatgggtatcgccgccttcaacgatgcctgccgcgcatccgtgttgcgctacaccgacgagtggcaggcgtatgtaactcggcaagctcgctgggtcgacttcgacaacgattacaagacgctcgatctggcttacatggagtcggtgatttgggccttcaaacagttgtgggacaagggcctggcctacgagggctaccgggtgctgccgtactgctggcgcgacgaaactccgctgtcgaatcacgaactgcggatggacgacgacgtctaccaaagccgccaagatcccgcggtaacggtgggcttcaaggtggtgggtggccaaccagacaacgggctagacggtgcctacttgctggtgtggacgacgactccgtggaccctgccgtcgaacctcgcagttgcggtaagcccggacatcacctacgtacaggtccaggcgggcgatcgccgtttcgtactggccgaggcacggctggccgcttacgcccgcgaactcggtgaagagcccgtggtgctcggcacctatcgcggcgccgaactgctgggcacccgctacctgccgccgtttgcctatttcatggactggcccaacgcttttcaggtgctagcaggcgactttgtaacgaccgacgatggcaccggcatcgtgcatatggcaccggcctatggtgaggacgacatggtggtcgcggaggcggtcggtatcgcgccggtgactccggtcgactccaagggacgcttcgacgtcaccgttgccgattaccaagggcagcatgtctttgacgccaacgcgcagatcgtccgggacctgaagacccaaagcggcccggctgcggtgaatggcccagtgttgattcgtcacgaaacctacgagcacccttacccacactgctggcgatgccgtaacccgctgatctaccggtcggtgtcgtcgtggttcgtcagggtgacggacttccgagaccgcatggtggagctaaaccagcagatcacgtggtatcccgaacacgtcaaggacggccagttcggcaagtggctgcagggcgcccgcgattggtcgatctcccggaatcgctactggggtaccccgattccggtatggaagtccgacgacccggcctacccgcgcatcgatgtctacggcagcctcgacgagctggagcgcgacttcggcgtacgcccggccaatttgcaccggccctacatcgacgagctcacccgtcccaacccagacgatccgactggccgtagcacgatgcgacgcattcccgatgtgctcgacgtgtggttcgactcgggatccatgccgtatgcccaggtgcactacccgttcgagaacctggattggttccagggacactaccccggcgacttcatcgtcgagtacatcgggcagacccgtggctggttttacacactgcatgtgttggcgaccgcgctctttgaccggccggcattcaaaacctgtgtggcgcatgggattgtccttggtttcgatggccagaagatgagcaagtcgctgcgcaactatccagacgtaacagaggtgttcgatcgcgacggctccgacgccatgcggtggttcctgatggcatcgccgattctgcgcggcggcaacctgatcgtcactgagcaaggaattcgcgacggtgtgcgacaagtcctgctgcccctgtggaacacctacagcttcctggcgctgtatgcaccgaaagtcggtacctggcgcgtcgattcggtgcacgtgctggatcgctatatcctggccaagctggcggtgctgcgcgacgacctcagcgagtcgatggaagtttacgatattcccggtgcctgtgaacatttgcgtcagttcactgaggcgttgactaattggtatgtgcgacggtcgcgttcgcggttctgggcagaagacgccgatgccatcgacacgctacacaccgtgttggaggtgaccacgaggctggccgccccgctgcttccgctgatcaccgagataatctggcgtggtctgacacgcgagcgatcggtgcacctgacggactggccagcgcccgacctgctgccgtcggatgccgacctggtcgccgcgatggaccaggtccgcgacgtgtgctcggcggcatcctcgctgcgcaaggccaagaagctacgggtgcgcctgccgctaccgaaactcattgtggcagttgagaatccgcaacttctgaggccgttcgtcgacctcattggcgacgagcttaacgtgaagcaggtcgaactgaccgatgccatcgacacctatggccgattcgagctcacggtcaacgcccgggtagccggaccacggctgggcaaagatgtgcaggccgccatcaaggcggtcaaggccggcgacggcgtcataaacccggacggcaccttgttggcgggccccgcggtgctgacgcccgacgagtacaactcccggctggtggccgccgacccggagtccaccgcggcgttgcccgacggcgccgggctggtcgttctggatggcaccgtcactgccgaactcgaagccgagggctgggccaaagatcgcatccgcgaactgcaagagctgcgtaagtcgaccgggctggacgtttccgaccgcatccgggtggtgatgtcggtgcctgcggaacgcgaagactgggcgcgcacccatcgcgacctcattgccggagaaatcttggctaccgacttcgaattcgccgacctcgccgatggtgtggccatcggcgacggcgtgcgggtaagcatcgaaaagacctga

SEQ ID NO: 28388 - DNA, 3555 bp, Mycobacterium tuberculosis
atgagcggttcatctgcggggtcctccttcgtgcacctgcacaaccacaccgagtattcgatgctggacggtgccgcgaagatcacgcccatgctcgccgaggtggagcggctggggatgcccgcggtggggatgaccgaccacggaaacatgttcggtgccagcgagttctacaactccgcgaccaaggccgggatcaagccgatcatcggcgtggaggcatacatcgcgccgggctcgcggttcgacacccggcgcatcctgtggggtgaccccagccaaaaggccgacgacgtctccggcagcggctcctacacgcacctgacgatgatggccgagaacgccaccggtctgcgcaacctgttcaagctgtcctcgcatgcttccttcgagggccagctgagcaagtggtcgcgcatggacgccgagctcatcgccgaacacgccgagggcatcatcatcaccaccggatgcccgtcgggggaggtgcagacccgcctgcggctcggccaggatcgggaggcgctcgaagccgcggcgaagtggcgggagatcgtcggaccggacaactacttccttgagctgatggaccacgggctgaccatcgaacgccgggtccgtgacggtctgctcgagatcggacgcgcgctcaacattccgcctcttgccaccaatgactgccactacgtgacccgcgacgccgcccacaaccatgaggctttgttgtgtgtgcagaccggcaagaccctctcggatccgaatcgcttcaagttcgacggtgacggctactacctgaagtcggccgccgagatgcgccagatctgggacgacgaagtgccgggcgcgtgtgactccaccttgttgatcgccgaacgggtgcagtcctacgccgacgtgtggacaccgcgcgaccggatgcccgtgtttccggtgcccgatgggcatgaccaggcgtcctggctgcgtcacgaggtggacgccgggcttcgccggcgatttccggccggtccgccggacgggtaccgcgagcgcgccgcctacgagatcgacgtcatctgctccaaaggtttcccatcgtactttctgatcgtcgccgacctgatcagctacgcgcggtcggcgggcataagggtgggtcccggccgcggctcggccgccggctcgctggtcgcctacgcgctgggcatcaccgacatcgacccgattccacacggtctgctgttcgagcggttcctcaaccccgagcgcacctcgatgcccgacatcgatatcgacttcgacgaccggcgccgcggtgagatggtgcgctacgcagccgacaagtggggccacgaccgggtcgcgcaggtcatcaccttcggcaccatcaaaaccaaagcggcgctgaaggattcggcgcgaatccactacgggcagcccgggttcgccatcgccgaccggatcaccaaggcgttgccgccggcgatcatggccaaagacatcccgctgtctgggatcaccgatcccagccacgaacggtacaaggaggccgccgaggtccgcggcctgatcgaaaccgacccggacgtacgcaccatctaccagaccgcacgcgggttggaaggcctgatccgcaacgcgggtgtgcacgcctgcgcggtgatcatgagcagcgagccgctgactgaggccatcccgttgtggaagcggccgcaggacggggccatcatcaccggctgggattacccggcgtgcgaggccatcggtctgctgaaaatggacttcctgggcctgcggaacctgacgatcatcggcgacgcgatcgacaacgtcagggccaacaggggtatcgacctcgacctggaatccgtgccgctggacgacaaggccacctatgagctgctgggccgcggcgacaccctgggcgtgttccagctcgacggcgggcccatgcgcgacctgctgcgccgcatgcagccgaccgggttcgaagacgtcgtcgccgttatcgcgctgtaccggcccggcccgatgggcatgaacgcacacaacgactatgccgaccgcaagaacaaccggcaggccatcaaacctattcacccggaactcgaagaaccgctgcgcgagatcctcgccgagacctacggcctcatcgtctatcaagagcagatcatgcgcatcgcgcagaaggtggcgagctactcgttggcccgcgccgacattctacgcaaggccatgggcaagaagaaacgcgaggtgctggagaaggagttcgagggcttctccgatggcatgcaggccaacgggttctctccggcggccatcaaggcgctgtgggacaccatcctgccgttcgctgactacgcgttcaacaagtcacatgccgccggctacggcatggtgtcctactggacggcctacctcaaggccaactatcccgccgagtacatggccggtctgttgacgtcggtcggcgacgataaagacaaggccgcggtttatctggccgactgccgcaagctcggcatcaccgtgctcccgcccgacgtcaacgaatctggcttgaacttcgcatcggtcggccaagacatccgctacgggctgggcgcggtgcgcaacgttggcgctaatgtcgtgggctcgttgctccaaacccgcaacgacaagggcaagttcaccgacttttcggactacctgaacaagatcgacatctcggcgtgcaacaagaaggtgaccgaatcgctgatcaaggcgggtgcgttcgactcgctggggcatgcccgcaagggtcttttcctggtgcacagcgatgcggtggactcggtgctgggcaccaagaaggccgaggcactggggcagttcgatctcttcggcagcaatgatgatgggaccggcaccgcagatcccgtgttcaccatcaaggtgcccgatgatgagtgggaggacaaacacaaactcgccctagagcgcgagatgctgggactgtacgtctcggggcatcccctcaacggtgtggcacacttgctggctgcccaggtcgacaccgcgatcccagcgatcctcgacggcgatgtccccaacgatgcccaagtgcgggtgggcggcatcctggcgtcggtgaaccggagggtcaacaaaaacggaatgccatgggcttcagcgcaattggaggatctcacgggcggcatcgaggtgatgttcttcccgcacacctactccagctatggtgccgacatcgtcgacgatgccgtcgtgctggtcaacgccaaggtggcggtccgtgacgaccgcatcgcattgatcgccaatgacctcacagtgcccgacttttccaacgccgaggtggagcggccgctggcggtcagcttgcccacccggcagtgcacctttgacaaggtgagtgcgctcaaacaggtgttggcgcgccaccccggcacctcgcaggtgcatctgcggctcatcagcggagaccggatcaccacgctggcacttgatcagtcgttgcgggtgacgccgtcgccggcgttgatgggtgacctcaaggagctgctcggccctggatgtctggggagttag

SEQ ID NO: 28389 - DNA, 2037 bp, Mycobacterium tuberculosis
atgaatttttcggtgttgccgccggagatcaattcggcgctgatgttcgctggtgccgggccgggaccgatgttggcggcggcgtcggcctggaccgggctggccggcgatttgggttcggcggcggcctcattttcggcggtgacctcgcagttggccaccgggtcctggcaaggtccggcgtcagcggccatgacaggcgtggccgcgtcctatgctcgctggctgaccacggccgcagcgcaggctgagcaggcggcgggtcaagcccaggcggcggtatcggcgttcgaggcggcgctggcggcgacggtgcatccgggcgcggtgagcgccaatcgaggtcggttgcgctccttggtggcctcgaatctgttggggcaaaacgccccggccatcgcggccgtcgaggccgtctatgagcagatgtgggccgccgatgtcgccgcgatgctcggttatcacggcgaggcgtcggcggtcgccttgtcgctgacgccgttcacaccgtcgccgagcgcggcagccacgcccggcggtgcggtgatcatcgcggggtttccgtttctcgatctgggcaacgtcaccatcggtggcttcaatctggccagcggcaatctgggcctcggcaacctgggcagcttcaacccgggtagcgccaacacgggcagcgtcaacttgggcaacgccaatatcggtgatctcaacctgggcagcggcaatatcggcagctacaacctgggtggcggcaacaccggggatctcaacccggacagtggaaacacgggcacgctcaactggggtagcggaaacatcggcagctataacctgggcggcggcaacctcggcagctataacctgggtagtggaaataccggcgacaccaactttggcggcggtaacaccggaaatctcaacgtgggtggcggcaacaccgggaactcgaatttcgggttcggaaacaccggtaacgtcaactttggtaacggaaacaccggcgacaccaactttggcagcggcaaccttggcagtggaaatatcggtttcggcaacaagggctctcataacatcgggtttgggaacagcggcaacaacaacatcggcttcgggctcaccggtgataaccagataggtttcggcgccctcaattcaggtagcgggaacctcggcttcgggaactcgggcaacggtaatatcggctttttcaactcgggcaataacaacatcggcatgggaaactcgggcaatggagtcggggcgctgagcgtggagttcggcagttcggccgagcgcagctcgggcttcggcaactccggcgagctcagtaccggtatcggcaactccggccagctcagcacgggctggttcaactcggccaccaccagcaccggctggttcaactccggcaccaccaataccggctggttcaactcgggcaccacgaacaccggaatcggaaactcgggcggaaacctggtcaccggcagcatgggtctgtttaactccggccataccaacacgggtagcttcaatgccggcagcatgaacacgggcgatttcaactcgggcaacgtgaacaccggctacttcaactccggcaacatcaacaccggcttcttcaactcgggcgatctcaacaccggattgttcaactcggtcaaccagccggtacagaactccggctggctgcacacgggcaccaacaactcgggctacgctaacgccggcaccttcaactcgggcttcgataacaacgcccgtgacgaacacgccgaatttgtcaccggtaactcgggcctggccaacgtgggcaactacaacgccggcatcatcaacgtgggtgaccatctgtcgggcttcagaaactcggtacccacgatcaccggtacggccaacatttcgggtttcgtcaatgcgggaacctcgatctctggcttcttcaacttcggcagcctcatgtcgggcttcgccaacttcgacgacgaggtctcggggtatctcaacggggacagtcgggcgtcgggctggatccattag

SEQ ID NO: 28390 - DNA, 1314 bp, Mycobacterium tuberculosis
atggctgcggcgactggcgggttgacgcccgagcagatcatcgcggtcgatggcgcccatctgtggcacccttacagctccatcggcagggaagccgtgtcgccggtggtggccgtcgccgcccacggagcgtggttgacgctgattcgcgacggccagccgatcgaggtgctcgacgcgatgagctcctggtggaccgcgatccacgggcacggccaccccgctctggaccaggcgttaaccacccagttgcgggtgatgaaccacgtcatgttcggggggctgactcacgagccggcggcccggctggcgaagctgctggtcgacatcaccccggcgggtctcgacacggtgttcttcagcgactccggctcggtgtcggtggaagtcgcggccaagatggcgctgcagtactggcgcggccgcggcctgcccggcaagcgacggctcatgacctggcgcggcggctatcacggcgacaccttcctggctatgagcatctgcgacccgcacggcggcatgcactcgctgtggaccgacgtcctggccgcccaagtgttcgcgccacaagtgccacgggactacgatcccgcctacagcgcggcgttcgaggcgcagctggcgcagcacgccggcgagctggccgcggtggtcgtggagccggtcgtgcagggtgcgggcggtatgcgttttcacgacccgcgctatctgcacgacctgcgggacatctgccgccgttacgaggtgctgctgatcttcgatgagatcgccaccggcttcggccgcaccggcgcgttgttcgccgccgaccacgccggggtgagcccggacatcatgtgtgtcggcaaggcgctcaccggcggctacctcagcttggccgccaccttgtgcaccgccgacgtcgcgcacaccatcagcgccggtgcggccggggcgctgatgcacggccccaccttcatggccaatccgctggcctgtgcggtctcggtggccagtgtggagctgctgctcggccaggactggcgcacgcgcatcaccgaactggccgccgggctgaccgccggcctggataccgcccgggcgctgcccgccgtcaccgatgtgcgggtgtgcggcgcgatcggcgtcatcgaatgcgaccgaccggtcgacctggccgtcgcgactcccgcggcgctggatcgaggcgtgtggctgcgcccgtttcgcaacctggtctacgccatgccgccctatatctgcacaccggccgagatcacgcagatcacctcggcgatggtcgaggtcgcacggctcgtaggctcactgccatga

SEQ ID NO: 28391 - DNA, 1050 bp, Mycobacterium tuberculosis
gtgacgcaagcggcaacgcgaccgacgaacgacgccggccaggatggcgggaacaactcggacattctggtggttgcccgccaacaggtgctgcagcgcggtgagggcctgaaccaggaccaggtgctggcggtgctgcagctacccgacgaccggctcgaggagctgttggcgctggcccacgaggtgcggatgcgctggtgcggacccgaggtcgaggtcgaaggcatcatcagcctgaaaaccggtggctgcccggaggattgccatttctgctcgcaatcggggctgttcgcctccccggtgcgcagcgcctggctggacatacccagcctggtcgaggcggccaaacagaccgccaagtccggcgccaccgagttctgcatcgtggccgcggtgcgcggacccgacgagcgattgatggcccaggtcgcggccggcatcgaggcgattcgcaacgaagtcgagatcaacatcgcctgctccctagggatgctgaccgccgagcaagtggaccaactggcggcgaggggggtgcatcgctacaaccacaacctcgaaacggcgcgctcgttcttcgccaacgtcgtcaccacccacacctgggaagagcgctggcagacgctatcgatggtgcgtgacgcgggcatggaggtttgctgcggcggcatcctcggcatgggggagacgctgcagcagcgcgcggaattcgccgccgagcttgccgagctgggccccgacgaggtcccgctgaacttcctcaacccgcggcccggtaccccgttcgccgacctggaggtaatgccggtcggtgacgcgctcaaggcggtggccgccttccggttggcgttaccgcgcaccatgctgcggttcgccggtggccgcgagatcaccctgggtgacctcggcgccaagcgaggcatcctgggcggcatcaacgccgtgatcgtcggcaactacctgaccaccctcggccggcccgcggaagccgacctggaactgctcgacgagctacagatgccgctgaaggcactcaacgccagcctgtaa

SEQ ID NO: 28392 - DNA, 711 bp, Mycobacterium tuberculosis
atggcccatggtagcaccgcccacgaagtgctggccgtcgtctttcaagtgcgcggagttggcatgagccgcggtgcggcaaaaccccagctcaatgtgctgctgtggcaacgtgcgaaggagccgcagcgcggcgcgtggtcgctgccgggcggacggctacgcaacgacgaagacatgaccagctcggttcggcgccaactggccgagaaagtcgacctgcgagagttggcccatctagaacagctcgcggtgttttccgacccacaccggctgccaggcatccggatgatcgcgtcgacctacctgggggtggtgccctcccccgccacccccgagctgccagcagacacccgctggcacccggtgagttccttgccgccaatggcgttcgatcacggtccgatggtgacccatgcccgcacccggctgattgccaagatgtcctatacaaacatcggattcgctttggccccaaaagaattcgcgctctcaacgctgcgcgacatctacggcgccgcactgggctaccaggtcgacgcaaccaacctgcagcgggtactggcccgtcgcagagtcatcacccaaaccggaaccatcgcgcagtccggccgcagcggtggccgcccggcggcgttgtaccggtttaccgactcgcagctaagagtcactgacgagttcgccgcactgcggcctcccggccagctttga

SEQ ID NO: 28393 - DNA, 819 bp, Mycobacterium tuberculosis
atgagtccggcaaccgtgctcgactccatcctcgagggagtccgggccgacgttgccgcgcgtgaagcctcggtgagcctgtcggagatcaaggctgccgccgctgcggcgccgccgccgctcgacgtgatggccgccctacgcgagcccggcatcggcgtcatcgctgaggtcaagcgcgctagtccttcggcaggcgcattggcgaccatcgccgacccggcaaagctggcccaggcctaccaggatggcggtgcccggatcgtcagcgtggtgactgagcagcggcgttttcagggatcgctcgacgacctcgacgcggtgcgggcctcggtttcgattccggtgctgcgcaaggactttgtggtgcagccgtaccagattcatgaggcgcgtgcgcacggcgccgacatgttgttgctcatcgtcgccgcattggagcagtcggtgttggtgtcgatgttggaccgcaccgaatcgttgggtatgacagcactcgtcgaggtccataccgagcaggaagccgaccgagcgctgaaggccggggccaaggtgattggcgttaacgcccgcgacctcatgacgctggacgtggaccgggattgcttcgcgcgaatagctcctggtttgccgagcagtgtgatcaggattgctgaatccggcgtgcgtggcaccgctgacctgctggcgtacgccggcgcgggcgctgacgcggtgttggtaggcgaaggtctggtcaccagcggcgacccacgtgccgcggttgccgatctggttaccgcgggcacccatccgtcctgtccgaaaccggctcgctag

SEQ ID NO: 28394 - DNA, 1233 bp, Mycobacterium tuberculosis
atgagtgctgccatcgccgaaccgaccagtcacgatcctgattccggcggccatttcggcggccccagtggttggggtggccgctacgttcccgaggcgctgatggcggtgatcgaagaggtcaccgccgcctaccaaaaggagcgcgtcagccaggactttctggacgacctagacaggctgcaggcgaactatgcgggccggccttcgccgctttacgaggcgacccggttgagccagcacgctgggtcggcgcgaatctttctgaagcgagaagacctgaaccatactggttctcacaagatcaacaacgtgctcgggcaggcactgctggcgcgcaggatgggcaagacccgggtgatcgccgagaccggtgccggccagcacggggtcgccacggccaccgcatgcgcattgctcggcctggactgtgtcatctacatggggggcatcgacaccgcccgtcaggcgctaaacgtggcccggatgcgattgctgggtgccgaagtcgtcgcggttcagacgggctcgaaaacgctcaaagacgccatcaatgaggcgttccgggattgggttgccaacgccgacaacacctactactgctttggtactgcggccggaccgcatccgtttccaaccatggtgcgcgatttccagcgaatcatcggcatggaggcacgtgtgcagatccagggtcaggccggtcggctgcctgacgccgtcgtcgcgtgcgttggtggcgggtccaatgccattggtatttttcatgcgtttctcgatgacccaggcgtacggctggtcggattcgaggcagccggcgacggcgttgagaccggccggcatgccgcgacattcaccgctggttcgcccggggcatttcacggatcgttctcgtacttgctgcaagacgaggacggtcagaccattgaatcccattcaatttccgcgggtctggattatccgggggtgggcccggaacatgcgtggctcaaggaggccgggcgtgtcgattatcggccgatcaccgactccgaggcgatggacgcgtttggcctgctgtgtcgcatggaaggcatcatcccggctattgaatccgcgcacgcggtggccggcgccctcaagctaggtgttgagttgggaaggggcgcggtgattgtggtgaacctgtcgggacgtggcgacaaagatgtcgagacggccgcgaaatggtttggcttgctgggcaacgactga

SEQ ID NO: 28395 - DNA, 1419 bp, Mycobacterium tuberculosis
gtgacgagacgcgggaaaatcgtctgcactctcgggccggccacccagcgggacgacctggtcagagcgctggtcgaggccggaatggacgtcgcccgaatgaacttcagccacggcgactacgacgatcacaaggtcgcctatgagcgggtccgggtagcctccgacgccaccgggcgcgcggtcggcgtgctcgccgacctgcagggcccgaagatcaggttgggacgcttcgcctccggggccacccactgggccgaaggcgaaaccgtccggatcaccgtgggcgcctgcgagggcagccacgatcgggtgtccaccacctacaagcggctagcccaggacgcggtggccggtgaccgggtgctggtcgacgacggcaaagtcgcattggtggtcgacgccgtcgagggcgacgacgtggtctgcaccgtcgtcgaaggcggcccggtcagcgacaacaagggcatctcgttgcccggaatgaacgtgaccgcgccggccctgtcggagaaggacatcgaggatctcacgttcgcgctgaacctcggcgtcgacatggtggcgctttccttcgtccgctccccggccgatgtcgaactggtccacgaggtgatggatcggatcgggcgacgggtgccggtgatcgccaagctggagaagccggaagccatcgacaatctcgaagcgatcgtgctggcgttcgacgccgtcatggtcgctcggggcgacctaggtgttgagctgccgctcgaagaggtcccgctggtacagaagcgagccatccagatggcccgggagaacgccaagccggtcattgtggcgacccagatgctcgactcgatgatcgagaactcgcggccgacccgagctgaggcctccgacgtcgccaacgcggtgctcgatggcgccgacgcgctgatgctgtccggggaaacctcggtagggaagtacccccttgctgcggtccggacaatgtcgcgcatcatctgcgcggtcgaggagaactccacggccgcaccgccgttgacacacattccccggaccaagcgtggggtcatctcgtatgcggcccgtgacatcggcgaacgactcgacgccaaggccttggtggccttcactcagtccggtgataccgtgcggcgactggcccgcctgcataccccgctgccgctgctggccttcaccgcgtggcccgaggtgcgcagccaactggcgatgacctggggcaccgagacgttcatcgtgccgaagatgcagtccaccgatggcatgatccgccaggtcgacaaatcgctgctcgaactcgcccgctacaagcgtggtgacttggtggtcatcgtcgcgggtgcgccgccaggcacagtgggttcgaccaacctgatccacgtgcaccggatcggggaagatgacgtctag

SEQ ID NO: 28396 - DNA, 2715 bp, Mycobacterium tuberculosis
gtggtgactactgccagtgcccccagcgaggatcgagccaagccgacgctgatgttgctggatggcaattcgctggcgtttcgggcgttctacgcactgcccgcggagaacttcaagacccgcggcgggctgaccaccaacgccgtctacggcttcaccgccatgctgatcaacctgctgcgcgatgaagccccgacgcacatcgcggcggctttcgacgtgtcccggcagaccttccgcttgcaacgctacccggagtacaaggccaaccgatcgtcgacccccgacgagttcgctggccagatcgacatcaccaaagaagtgctgggcgcactcggcatcaccgtgctctccgagccggggttcgaggccgacgacctcatcgccacgctggccacccaggccgagaacgagggctaccgggtgctggtggtcaccggggatcgtgacgcactgcaactggtcagtgacgatgtgacggtgctctacccccgcaagggcgtcagcgaacttacgcgcttcacaccggaggccgtcgtcgaaaagtacgggctcacccctaggcagtacccggacttcgccgcgctgcgcggcgaccccagcgataacctgcccggcatacccggggtgggggagaagaccgccgccaaatggatcgccgagtacggctcgctgcggtcactggtggacaacgttgacgccgtgcgcggcaaggtgggcgatgcgctgcgggcgaacctggccagcgtggtgcgcaaccgtgagctcaccgacctggttcgcgacgtgccgctggcccagaccccggacacgctgcggctgcagccctgggatcgcgaccacattcaccggctcttcgacgacctggagtttcgggtgttgcgcgaccggttgttcgacacgttggccgcggccgggggacccgaggtcgacgaggggttcgacgtgcgcggcggcgcgttggcgcccggcacggttaggcaatggttggccgagcacgccggcgacgggcgccgagcgggcctgacggtggtgggtacccatctgccgcacggtggggacgctaccgctatggccgtcgccgccgccgacggcgaaggcgcttacctcgataccgcgacgctgacgcccgacgacgacgccgcgttggcggcctggctagcggatccagctaaacccaaagccttgcatgaggcaaaggcggccgttcatgacctggcgggtcgtggttggaccttggagggcgtcacctccgacaccgcactggcggcctacctggtgcggccggggcagcgcagcttcaccctcgacgacctctcgctgcgctatctgcgtcgcgagctgcgtgcggaaacaccgcagcagcaacaactttcactgctcgatgacgacgatacggacgccgagaccattcaaacgacgatcctgcgggcgcgggcagtcatcgacctggccgacgcgctggacgccgagttagcgcgtatcgactccaccgcgctgctgggggagatggagctgccggtccagcgggtgctggcgaagatggaaagtgccggtatcgccgtcgacctgcccatgttgaccgagctgcaaagccagtttggcgaccagatccgcgacgccgccgaggccgcctacggcgtgatcggcaagcaaatcaacctgggctcacccaagcagctgcaggtcgtgctgttcgacgaactgggcatgccgaagaccaaacgcaccaagaccggctacaccacggatgccgacgcgctgcagtcgttgttcgacaagaccgggcatccgtttctgcaacatctgctcgcccaccgcgacgtcacccggctcaaggtcaccgtcgacgggttgctccaagcggtggccgccgacggccgcatccacaccacgttcaaccagacgatcgccgcgaccggccggctctcctcgaccgaacccaacctgcagaacatcccgatccgcaccgacgcgggccggcggatccgggacgcgttcgtggtcggggacggctacgccgagttgatgacggccgactacagccagatcgagatgcggatcatggcgcacctgtccggggacgagggcctcatcgaggcgttcaacaccggggaggacctgcattcgttcgtcgcgtcccgggcgttcggcgtgcccatcgacgaggtcaccggcgagctgcggcgccgggtcaaggcgatgtcctacgggctggcttacgggttgagcgcctacggcctgtcgcagcagttgaaaatctccaccgaggaagccaacgagcagatggacgcgtatttcgcccgattcggcggggtgcgcgactacctgcgcgccgtagtcgagcgggcccgcaaggacggctacacctcgacggtgctgggccgtcgccgctacctgcccgagctggacagcagcaaccgtcaagtgcgggaggccgccgagcgggcggcgctgaacgcgccgatccagggcagcgcggccgacatcatcaaggtggccatgatccaggtcgacaaggcgctcaacgaggcacagctggcgtcgcgcatgctgctgcaggtccacgacgagctgctgttcgaaatcgcccccggtgaacgcgagcgggtcgaggccctggtgcgcgacaagatgggcggcgcttacccgctcgacgtcccgctggaggtgtcggtgggctacggccgcagctgggacgcggcggcgcactga

SEQ ID NO: 28397 - DNA, 1446 bp, Mycobacterium tuberculosis
atgccgagtcccaccgtcacctcgccgcaagtagccgtcaacgacataggctctagcgaggactttctcgccgcaatagacaaaacgatcaagtacttcaacgatggcgacatcgtcgaaggcaccatcgtcaaagtggaccgggacgaggtgctcctcgacatcggctacaagaccgaaggcgtgatccccgcccgcgaactgtccatcaagcacgacgtcgaccccaacgaggtcgtttccgtcggtgacgaggtcgaagccctggtgctcaccaaggaggacaaagagggccggctcatcctctccaagaaacgcgcgcagtacgagcgtgcctggggcaccatcgaggcgctcaaggagaaggacgaggccgtcaagggcacggtcatcgaggtcgtcaagggtggcctgatcctcgacatcgggctgcgcggtttcctgcccgcctcgctggtggagatgcgccgggtgcgcgacctgcagccctacatcggcaaggagatcgaggccaagatcatcgagctggacaagaaccgcaacaacgtggtgctgtcccgtcgcgcctggctggagcagacccagtccgaggtgcgcagcgagttcctgaataacttgcaaaaaggcaccatccgaaagggtgtcgtgtcctcgatcgtcaacttcggcgcgttcgtcgatctcggcggtgtggacggtctggtgcatgtctccgagctatcgtggaagcacatcgaccacccgtccgaggtggtccaggttggtgacgaggtcaccgtcgaggtgctcgacgtcgacatggaccgtgagcgggtttcgttgtcactcaaggcgactcaggaagacccgtggcggcacttcgcccgcactcacgcgatcgggcagatcgtgccgggcaaggtcaccaagttggttccgttcggtgcattcgtccgcgtcgaggagggtatcgagggcctggtgcacatctccgagctggccgagcgtcacgtcgaggtgcccgatcaggtggttgccgtcggcgacgacgcgatggtcaaggtcatcgacatcgacctggagcgccgtcggatctcgttgtcgctcaagcaagccaatgaggactacaccgaggagttcgacccggcgaagtacggcatggccgacagttacgacgagcagggcaactacatcttccccgagggcttcgatgccgaaaccaacgaatggcttgagggattcgaaaagcagcgcgccgaatgggaagctcggtacgccgaggccgagcgccggcacaagatgcacaccgcgcagatggagaagttcgccgccgccgaggcggctggacgcggcgcggacgatcagtcgtcggccagtagcgcaccgtcggaaaagaccgcgggtggatcactggccagcgacgcccagctggcggccctgcgggaaaaactcgccggcagcgcttga

SEQ ID NO: 28398 - DNA, 2919 bp, Mycobacterium tuberculosis
gtggctgaccgcctgatcgtcaagggtgcgcgcgaacacaatctgcgcagcgtcgacctcgacctgccccgcgacgcgctgatcgtcttcaccgggttatccggatcgggcaagtcctcgctcgcgttcgacaccatcttcgccgaggggcagcggcgttacgtggagtcgctgtcggcctacgcccgccaatttctcgggcagatggacaagccggacgtcgacttcatcgaggggctgtctccggcggtgtccatcgaccagaagtcgaccaaccgcaacccacgatcgacggtcgggaccatcaccgaggtgtacgactacctgcggctgttgtatgcgcgcgcgggcacgccgcactgcccgacctgcggggagcgagtcgcgcgccaaaccccgcaacaaatcgtcgatcaggtgctggccatgccggagggcactcggtttctggtgctggccccggtggtgcgtacccgcaagggcgagttcgccgatctgttcgataagctcaacgcccagggctacagccgggtgcgggtcgacggtgtggtgcatccgctgaccgatccgccgaagctgaaaaagcaggaaaagcacgacatcgaggtggtggtggaccgtctcaccgtcaaggccgccgccaagcggcggctcaccgattcggtggaaaccgcgctgaatttggccgacgggatcgtggtgctcgaattcgtcgatcatgaactgggtgcaccgcatcgcgagcagcggttctccgagaagctggcctgccccaacgggcacgcgctggccgtcgacgacctggagccgcggtcgttctcgttcaactcgccctacggcgcctgccccgaatgcagtggtctgggcatccgcaaggaggtcgacccggagctggtggtgcccgatccggatcgcaccctggcgcagggtgcggtggcgccgtggtcgaacggccacaccgcggagtacttcacccggatgatggccggccttggcgaggcgctcgggttcgacgtcgacacgccctggcgcaagctgccggccaaggcccgcaaggcgattctggaaggcgccgacgagcaggtgcacgtgcgctaccgcaaccgctacggacgcacccggtcgtattacgccgatttcgagggtgtgctggcgttcctgcaacgcaagatgtcccaaaccgagtccgagcagatgaaggagcgctacgagggtttcatgcgggacgtgccctgcccggtgtgtgcgggcacccggctcaagcccgagattctggcggtgacgctggctggggagtccaagggggagcacggcgccaagtccatcgccgaggtgtgtgagctgtcgatcgccgactgcgcggacttcctgaacgcgctcacgctgggtccgcgcgagcaagcgatcgccgggcaggtgctcaaggagatccggtcgcggctcgggtttctgctcgacgtcgggctggagtacctgtcgctgtcccgggcggcggccacgctgtccggcggtgaggcacaacgtatccggctggccacccagatcggctccggcctggtgggtgtgctctacgtgctcgacgagccgtccatcgggctgcaccagcgcgacaaccgtcgtcttatcgaaaccctcacccggttacgggatttggggaacactttgatcgtcgtcgagcacgacgaggacaccatcgagcatgcggactggatcgtcgacatcggcccgggggccggtgagcacggtggccgcatcgtgcacagcgggccctacgatgaactgctacgcaacaaggattcgatcaccggcgcctacctgtccggccgggaaagcattgagataccggcgattcggcgttccgtcgacccccgtcgtcaactcaccgtcgtcggcgcccgcgagcacaacttgcgcgggatcgatgtgtctttcccgctgggtgtgctgacctcggtgaccggtgtctcgggttcgggcaagtcgacgttggtcaacgacatcctggccgcggtgctggccaaccgcctcaacggcgcccggcaggtccccggccggcacacccgggtcaccgggctggactatctggacaagctggtgcgggtggaccaatcgccgatcgggcgcacaccgcgatccaacccggccacctacaccggtgtgttcgacaagatccgcaccctgttcgccgccaccaccgaggccaaggtccgcggctatcaacccggacgattctcgttcaacgtcaagggcggtcgctgcgaggcctgcaccggcgacggcaccatcaagatcgagatgaacttcctgcccgacgtgtacgtgccgtgcgaggtctgccagggggcccggtacaaccgcgaaaccctcgaggtgcactacaagggcaagaccgtctcggaagtgctggacatgtccatcgaggaagcggcggagttcttcgagccgatcgccggcgtccatcgctatctacgcaccctggtcgacgtgggcctgggctacgtgcggctcggccagcccgcgcccacgctgtccggcggtgaggcccagcgggtcaagctggcctcggagctgcagaagcgctccaccgggcgcaccgtctacatcctcgacgagccgacgacgggactgcacttcgacgacatacgcaagctgctcaacgtgatcaacggcctggtcgacaagggcaatacggtgatcgtcatcgaacataacctggacgtgatcaagacatcggattggatcatcgacctgggcccggagggcggtgccggcggcggaaccgttgtcgcccaaggcactccggaggacgttgccgcggtgccggcgagctacaccgggaagtttctcgctgaggtcgtcggcggcggtgcctcggccgccacatcgcggtcgaacagacggcgcaacgtcagcgcctga

SEQ ID NO: 28399 - DNA, 606 bp, Mycobacterium tuberculosis
atcagcactgaaacccgcgtcaacgagcgcatccgcgtacctgaagtccgattgatcggcccagggggggagcaggtaggcattgtgcgtatcgaagacgcacttcgcgtcgccgcggacgcagatctcgaccttgtcgaagttgctcccaatgccagaccgccggtctgcaagatcatggactacggcaagtacaagtacgaggccgcgcagaaggcgcgcgaatcccgcagaaaccaacagcagaccgtcgtcaaagaacaaaagctgcgaccaaagattgacgatcacgattacgagaccaaaaagggtcacgtcgtccgcttcttggaggcgggatcgaaggtcaaggtcaccattatgttccgtggacgtgagcagtcgcggccggagttgggctatcgattgctgcagcggctgggtgcggacgtcgccgattacggattcatcgagacgtccgccaagcaggacggacgcaacatgacgatggtgctggcaccgcaccgcggtgcgaagacccgcgctagggcccgccacccgggtgaaccggccggcgggccgccgcccaagcccacggccggtgacagcaaagccgcaccgaactag

SEQ ID NO: 28400 - DNA, 195 bp, Mycobacterium tuberculosis
atgcccaaggccaagacccacagcggggcctcgaagcggttccggcgcaccggtaccggcaagatcgtccggcagaaggccaaccgtcggcacctgctcgagcacaagccgagcacccgcaccaggcgcctggacggccgcaccgtggtggcagccaacgacaccaaacgggtcacgtcgttgctgaacggctga

SEQ ID NO: 28401 - DNA, 390 bp, Mycobacterium tuberculosis
atggcacgcgtaaagcgggcggtcaacgcccacaagaagcggcgcagcatcctgaaggcatcgcgaggctatcgcggccagcgatcgcggctttaccgcaaagccaaagagcagcagctgcattcactgaactacgcctaccgtgaccgccgggcgcgtaagggcgagttccgcaagttgtggatcgcacggatcaacgcggctgcgcgcctcaacgacatcacctacaaccggcttatccaggggctgaaggccgccggcgtcgaggtggaccggaaaaacctcgccgacattgcgatcagcgacccggcggcgttcaccgcgctggtcgacgtcgcccgggcggcactgcccgaagacgtcaacgccccctccggggaggccgcctga

SEQ ID NO: 28402 - DNA, 783 bp, Mycobacterium tuberculosis
gtgctcaccgaacgctcggccagggtggccacggcggtcaaactgcatcgtcacgtaggccggcgccgggcgggacgttttctcgccgaaggccccaacctggtagcggcggcgttggcgcgcgggctggtacgggaggtattcgtcaccgaagttgcggcgcggcggcacgagctcttgttggccgcgcacgaggcttcggttcatctggtgactgagcgggccgcgaaggcgctctctgatacggtcacgccggccgggttggtggcggtgtgcgatctgccggcgacccgacttgaggatgtattggccggctcacctcagctgatcgcggtgaccgtcgagatccgcgagccgggcaacgcgggcacggtaatccgcatcgccgacgccatgggtgccgcggcggtgatcctcgccgggcgcagcgtcgacccatacaacggcaagtgtctgcgcgcgtccaccggtagcatcttcgcgatcccggtcgtcgtcgcgcccgatgtcggtgccgccatcgccgacctgcgagcggccggactgcaggtgctggccaccgcagtggacggcgagatggctctcgacgatgccgatcggctgcttgccgagccgacggcatggctgttcgggcccgaagcacacgggttgtcggccgagatcgcggccttggcggaccaccgcgtacacatcctgatgtcgggaggggcggagagcctcaacgtcgcggccgcggccgcgatctgtctgtatgagagcgctcgggcgttgggccgccgctga

SEQ ID NO: 28403 - DNA, 1026 bp, Mycobacterium tuberculosis
atgttgtcgccggaggcattgaccacggcggtcgacgccgcccagcaggccatcgccctagcggacaccctggacgtcctggcgcgcgtcaagacggagcatctcggcgaccgctcgccgttggcgctggcgcggcaggcgctggccgtgctgcccaaagaacagcgagccgaggccggtaagcgcgtcaacgccgcccgcaatgccgctcagcgcagctacgacgaacggctggcgacgctgcgtgccgagcgcgacgcggccgtgctggtggccgaaggtatcgatgtcacattgccctcgactcgggtgccggccggcgcccggcacccgatcatcatgttggccgaacacgtcgccgacacgttcatcgcgatgggatgggaactggccgaggggcccgaggtggagaccgagcagttcaacttcgacgccctcaacttccctgccgaccaccctgcgcgcggcgaacaagataccttctacatcgcgccggaggattcgcggcagctgctgcgcacccatacctcaccggtgcagattcgcaccctgctagcgcgtgagctgccggtctacatcatctcgatcggtcgtacctttcgcaccgacgaactcgacgccacccacacgcccatcttccatcaggtggaaggcctagcggtggaccgcggtctgtcgatggctcacctacgtggaacgctggacgcttttgcgcgcgccgagttcgggccgtctgcgcggacccggatccggccacacttcttccccttcaccgaaccgtccgccgaggtcgatgtgtggtttgccaacaagattggcggcgccgcctgggtggagtggggcgggtgcggaatggtgcatccgaacgtgttgcgggccaccggcattgatcccgatctctactccggtttcgcgttcgggatggggttggaacgcaccctgcagtttcgcaacggcattcctgacatgcgcgacatggtcgaaggcgacgtccgattctcgttgccgttcggggtgggtgcctga

SEQ ID NO: 28404 - DNA, 2496 bp, Mycobacterium tuberculosis
atgcggctaccctacagctggctgcgcgaggtggttgcggtcggcgcttcgggctgggacgttaccccaggcgaactcgagcagacgctgttgcgcatcggccacgaggtcgaagaggtcatcccccttggtccggtggacggcccggtgaccgtggggcgggtggccgatatcgaggagctcaccggctacaagaagccgatccgggcctgcgcggtagatatcggcgatcggcagtatcgcgagattatttgtggtgcaaccaatttcgcggttggtgatctggtggtggtagcgctgcccggtgccacgctgcccggtggattcaccattagcgcccgcaaggcctacggtcgcaactccgacggaatgatctgctcggcagccgaactcaatttgggcgcagaccattccgggatcctggtgttgccccccggagccgccgagcccggagctgacggcgcgggcgtgctggggctcgacgacgtggtcttccatctggccatcaccccagaccgcggttactgcatgtcggtgcgcggcttggcccgcgagctcgcgtgcgcctacgacctggacttcgtcgaccccgccagcaactcgcgggtgccgccgctacccatcgaggggccagcctggccgctgacggttcagcccgagacgggggtgcgccggttcgcgctacgcccggtcatcgggatcgaccccgccgcggtatcgccctggtggttgcagcgccgactgctgctctgcggtatccgcgcgacctgtccggcggtcgacgtgaccaattacgtgatgctcgaacttggccaccccatgcacgcccacgaccgcaaccggatcagcggaaccctcggagtgcggttcgcccggtccggcgagaccgccgtgaccctcgacggtatcgagcgcaagctcgataccgccgatgtcctgatcgtcgacgatgctgcgacagcggcgatcggcggcgtgatgggggcggccagcaccgaagtgcgggccgactccaccgatgtcctgttggaggccgcgatatgggacccggctgcggtatcgcgtacccagcggcggctgcacctgcctagcgaggccgcccgtcgttacgagcggacggtggacccggccatctccgtggccgctttggaccggtgcgcaaggctgctcgccgacatcgccgggggggaggtttctcccacccttaccgactggcggggtgacccgccgtgtgatgactggtcaccgccgccgatccggatgggagtcgatgtgccggaccgcatcgccggggtggcctatccgcagggcactactgccaggcgcttggcccagatcggcgcggtggtgacccacgacggcgacaccttgaccgtgaccccgccgagttggcgacctgatctgcggcaacccgcagaccttgtcgaggaggtgctgcggcttgaggggctggaagttatcccgtcggtgctgccaccggcgcccgcgggtcgtggactcaccgctgggcagcagcgccgtcgcacgatcggcaggtcgctggcgctgtcgggctatgtcgagattctgccgactccatttctgccggccggtgtgttcgatttgtgggggctggaagccgatgactcacggcgcatgaccacgcgggtgctcaacccgctggaggccgatcgtccgcaactggcgaccacgctgctgccggccctgctggaagccttggtgcgcaacgtgtcccgagggctggtcgacgtcgcgctgttcgccatcgcccaggtggtccagccgaccgagcagacgcgcggtgtcgggttgatcccggttgaccggcggccgaccgatgatgagatcgccatgctggatgcctcgctgccccggcaaccccagcacgtcgcggcggtgctggccggactgcgcgagcctcgaggcccctggggcccgggccgcccggtagaggcggctgatgcgttcgaggcggtgcgaatcatcgcgcgcgccagccgcgtggacgtgaccctgcggccggcccaatatctgccgtggcatccgggccggtgcgcgcaggtgttcgtcggggaaagctcggttggtcacgccgggcagctgcatcccgccgtgatcgagcgctcgggtctgccgaaaggcacctgcgcggtggaactgaacctagatgcgattccgtgcagcgcgccgctgccggcacccagggtgtcgccgtatccggccgtgttccaagacgtcagcctggtggtggccgcggacatccccgctcaggcggtggccgacgccgtgcgcgcgggggcaggcgacctgctggaggatattgcgttgtttgacgtgttcaccggcccgcagattggtgagcaccgcaagtcgctgaccttcgcgctgcggtttcgtgcgccggatcgcaccttaaccgaagacgacgccagcgccgcccgcgatgccgctgtgcaaagcgcagccgaacgggtgggtgccgtgctgcgtggctga

SEQ ID NO: 28405 - DNA, 3036 bp, Mycobacterium tuberculosis
atgtcgttcttactcgtggagccggacttggtcacagcagcggccgccaatttagctggtattcgctcggcactgagcgaagccgctgccgccgcatcgacccccacgaccgcgctggcatcggccggcgccgatgaggtgtcggcggctgtctcgcgactattcggcgcctacggtcagcaatttcaagcgctcaacgcccgggcggcgacgtttcacgccgagttcgtgagcttgttgaacggcggcgcggcggcctataccggcgccgaggccgccagcgtgtcgtcgatgcaggccctgctcgacgcggtgaatgcgcccacgcagacgctgctggggcgcccactgatcggcaacggcgccgatggagtggcggggaccgggtcaaatgccggcggcaacggcgggcccggtggaattttgtacggcaacggcggcaacggcggggccggcggtaacggcggggccgccggattgatcggcaacggcggcgccggcggcgccggcggtgctggaggtgcaggcggcgctggcggggccggcggcaccggcggactgttgtatggcaacggcggtgccggcggcaacgggggcagtgccgctgcggccggtggggccggcggcaacgccctgctgttcggcaacggcgggaacggcggaagtggggcttccggcggagccgccggccacgccgggacgatatttggtaacggcggcaatgctggggccggatcggggctagccggcgcggacggcgggttgttcggcaatggcggggacggtggttccagcacctcgaaggctggcggtgcaggtggaaatgcactgttcggcaacggcggggacggcggatcgagcaccgtcgccgccgggggtgcgggcgggaataccctggtcggcaatggcggtgccggcggcgctggcggcaccagcggtctcaccggtagcggcgtggccggcggggccggcggcagcgtcggcctgtggggctccggcggtgccggcggcgacggcggcgccgccacgtcattgttgggcgtcggcatgaacgccggcgctggcggggccggcggcaacgccggcctgctgtacggcaacggcggtgccggtggggccggcggcaatggtggggatacgacggtgccattgttcgactccggcgtcggcggtgccgggggtgctggcggcaacgccagcttgttcggtaacggtgggaccggtggcgtcggcggcaagggggggacgagcagcgatctggccagcgctaccagcggagccggcggggccggcggggccggcggcgtcggcgggctgctctacggcaacggcgggaacgggggggccggtggcatcggcggggctgctatcaacatactcgccaacgccggtgccggcggcgccggtggtgccgcgggcagtagcttcatcggcaatggcggcaacggtggggccggtggcgccggtggggctgcagcgctatttagctccggtgtcggcggtgccggcggcagcggcggcaccgcgttgcttctcggcagcggtggggccggtgggaacggcggcactggtggggctaactctggctccctcttcgcaagtcccggcggtaccggcggtgccggcggtcacggcggtgccggcgggctgatatggggcaacggtggggccggtgggaacggcggcaacggtggcaccaccgccgatggcgcccttgagggtggcaccggcggtatcggcggcaccggaggcagcgccatcgcgttcggtaatggcgggcagggcggcgccggtggtaccggtggggatcacagtggcggcaacggtatcggcggtaagggcggtgccagcggaaacggcggcaacgccggccaagtgttcggcgacggcgggaccggcggaaccggcggcgcgggcggcgccggttccggtaccaaggccggcggcaccggtagcgacggcggtcacggcggcaacgccaccttgatcggcaacggtggtgacggtggcgccggtggcgccggcggcgccggcagcccggccggtgccccgggtaatggcggcaccggtggcaccggcggggtgttgttcggccaaagtggcagctccggtccaccgggcgcggcagcgctggccttccctagcctgagcagcagtgttcccatcctcgggccatacgaagacctcatcgccaacacggtcgccaacctggcgagcatcggcaatacctggcttgccgacccggcgccgttcctgcagcagtacctcgccaaccagttcggctacggccagctgaccctaaccgcgctgacagatgccaccagggacttcgctattgggctggctggcataccgccgagcctgcaatcggccttgcaagccctcgcggcaggcgacgtcagcggcgcggtgaccgacgtgttaggggcggtggtgaaggtcttcgtcagcggtgttgacgcgagtgacttgtcgaacatcctgctgctcgggccggtgggagacctgttccccatcctgagcatccccggcgccatgtcacaaaacttcaccaatgtggtgatgacggtcacggacacaaccatcgccttttcgatcgataccacgaacttgaccggggtgatgacgtttggattgccgctggcgatgacccttaatgcggtgggttcgccgatcacgacggcaatcgcattcgccgagagcacgacagcgttcgtcagcgccgtgcaggccggaaacctgcaggcggcagcggcggccctggtcggtgctcccgccaacgtcgccaacggcttcctcaatggcgaggccaggctgccgctggccctgccaacatcggcgacaggggggattccggtgacggtcgaggttcccgtcggcggcattcttgcgcctctgcagccgtttcaggccacggcggtaataccggtcatcgggccggttaccgttacgctcgaaggtacgcccgccggcggcatcgttcccgcgttggtgaactacgctcccacacagctagcgcaggcaattgccccttag

SEQ ID NO: 28406 - DNA, 1203 bp, Mycobacterium tuberculosis
atgaccggcgcttcgaccacgacggcgaccatgcggcagcggtggcaagccgtgatgatgaacaactacggcacccccccgatagcgctggccagcggtgacggcgccgtggtcaccgacgtggacggcagaacctatatcgacctgctcggcggcatcgcggtcaacgtgctgggccatcgccaccccgcggtcatcgaggccgtcacccggcagatgtcgacgctggggcacacctccaacctgtatgccaccgaaccgggcatcgcgctggccgaggagctggtcgcgctgctgggggccgaccagcggacgcgagtgttcttctgcaactccggcgccgaggccaacgaggcggcgttcaagctgtctcggctcaccggacgcacgaaactggtcgccgcccacgacgccttccacggccgcaccatgggctcgctggcgctcaccggacaaccggccaagcaaacgccgttcgcgccgctgcccggcgacgtcacgcacgtcggctacggcgacgtcgacgcgttggccgccgccgtcgatgaccacaccgccgcggtgttcctggaaccgatcatgggggagagcggggtcgtcgtcccgcccgcgggctaccttgccgccgcccgcgacatcacggcgcggcgcggcgcgctgctggtgctcgacgaggtgcaaaccgggatgggccgcaccggagcgttcttcgcccaccagcacgacggcatcaccccggacgtggtgaccctggccaagggtctgggcggcgggctgccgatcggtgcctgcctggccgtcgggccggccgccgaactactgaccccaggcctgcacggcagcaccttcggcggcaacccggtctgcgccgcggcggcgctggcggtgctacgggtgctggcgagcgacggcctggtccgccgcgccgaagtcttgggcaaatcgttgcggcacggcatcgaagcgctcggccacccgctcatcgaccacgtgcgcggacgcggactgctgttgggcatcgcgctgaccgccccgcacgccaaggacgccgaggccaccgcccgcgacgccggttacctggtcaacgcggccgcacccgacgtcatccggttggcgccgccgctgatcatcgccgaagcacagctcgacggctttgtcgccgccttgccggcaatcctggaccgcgccgtgggggccccgtga

SEQ ID NO: 28407 - DNA, 924 bp, Mycobacterium tuberculosis
gtgatcaggcatttcctgcgcgacgacgatctgtccccggccgaacaggccgaggtgctcgagctcgcggccgagctgaagaaagacccggttagccgtcgtcccctgcaagggccgcgcggggtggcggtcatcttcgacaagaactccacccgcacccggttctccttcgagctgggcatcgcgcagctgggcgggcatgccgtcgtcgtcgacagcggcagcacccagctgggccgcgacgaaaccctgcaggacaccgcaaaggtgttgtcccgctacgtcgatgccatcgtctggcgaaccttcggccaagagcggctggacgccatggcgtcggtcgcgacggtgcccgtgatcaacgcgctctccgatgagttccatccgtgtcaggtgttggccgacctgcagaccatcgccgaacgcaagggggcgctgcgcggcctgaggttgtcctacttcggcgacggcgccaacaacatggcccactcgctgctgctcggcggggtcaccgcgggtatccacgtcaccgtcgcggctcccgagggcttcctgcccgacccgtcggtgcgggccgcggccgagcgccgcgcccaggataccggcgcctcggtgactgtgaccgccgacgcccacgcggccgccgccggcgccgacgttctggtcaccgacacctggacgtcgatgggccaggaaaacgacgggttggaccgagtgaagccgtttcggccgtttcagctcaactcgcgacttctggcgctggccgactcggatgccatcgtgttgcattgcctgccggcccatcgcggcgacgagatcaccgacgcggtgatggacgggccggccagcgcggtgtgggacgaggccgaaaaccggctgcacgcgcagaaggcgctgctggtgtggctgctggagcgctcatga

SEQ ID NO: 28408 - DNA, 1413 bp, Mycobacterium tuberculosis
gtgagcaccaacgaggggtcgctgtggggcgggcggttcgccggcggcccgtccgacgcgctggccgcgctgagcaagtccacccacttcgactgggtgctggccccctacgacctcaccgcgtcgcgggcgcacaccatggtgctgtttcgggccgggctgctcaccgaggagcaacgcgacgggctgctcgccggcctggacagcctcgcccaagacgtcgccgacggcagcttcggcccgctggtcaccgacgaggacgtgcatgccgcgctggagcggggcctgatcgaccgggtcggaccggacctgggcggccgactgcgggccgggcgctcgcgcaacgaccaggtggccgcgctgtttcggatgtggctgcgcgacgcggtgcgccgggtcgccaccggtgtgctcgacgtggtcggtgcgctggcagagcaggccgccgcacacccgagcgccatcatgcccggcaaaacccacctgcagtccgcccagccgatcctgctggcacaccatctgctcgcgcacgcccaccccctgctgcgcgacctggaccgcatcgtcgacttcgacaaacgcgcggcggtgtccccgtacggctcgggcgccttggccggctcgtcgctgggcctggatcccgacgcgatcgccgcggacctcggtttctcggctgccgcggacaactccgtcgacgcgaccgccgcccgcgacttcgccgccgaggcggcgttcgtgttcgccatgatcgccgtcgacctgtcccggctggctgaggacatcatcgtctggagctcgacggaattcggctacgtcacgttgcatgactcgtggtccaccggtagctcgatcatgccgcagaagaagaatccggacatcgccgagctggcccgcggcaagtccgggcggctgatcggaaacctggccgggctgctggccaccctgaaagcccagcccctggcctacaaccgcgacctgcaggaagacaaggagccggtgttcgattcggtggcccagctggagctgctgctgccggcgatggccgggctggtggccagcctgaccttcaatgtccagcggatggcggagctggccccggccggctatacgttggccaccgatctcgccgaatggcttgtgcggcaaggtgttccgtttaggtccgcgcatgaggccgcgggtgcggcggtgcgtgcggccgaacagcgcggcgtggggctgcaggaactcaccgacgacgagctggccgccatcagccccgagctgaccccgcaagtccgcgaggtgctgaccatcgaaggctcggtgtcggcccgcgattgccggggtggcaccgcgccgggccgggttgccgagcaactgaacgccattggtgaagccgccgagcggctgcgccgccagctggtgcgctga

SEQ ID NO: 28409 - DNA, 657 bp, Mycobacterium tuberculosis
atgtccggtgcaaagaagctgatcttcgagcagttcgccctggtcgggcaagcgctgtccagcggccatcgattggagctgttggatctgctggtgcagggtgaacgcagtgtggacgcgctggctcgtgcgtcggggttgacgtttgccaatgcctcccagcacttgttgcaacttcggcgcgccggcctggtgaccagccgccgggacggcaaacgggtgatttacgcactgtcggatccgcaggtgtgggacgtagtgcgcgcggtgcgcgctgtggccgaacgcaatctggcctcggtcggctccctggtgcggcagtactacaccgacagagacagcctggaaccgatcagccgagacgagttgcaagctcgggtggccgccgggtcggtgctggtcctcgacgtgcggccggccatggaatacgccgccgggcatctgcccggggcagtgagcattcccctcgacgaactggccgagcggcttgatgaactcccgtccggcatcgacatcgtcgcctgctgccgaggaccttactgcgtgtatgcctatgacgcgctagaactgttgcgccccaacggattttctgcccgccgactcgacggcgggttctccgaatggctggcagccgatctgccggttgttcgaacataa

SEQ ID NO: 28410 - DNA, 918 bp, Mycobacterium tuberculosis
gtgttgcctcaacgcccaaactgcaccaaactgtttcgcccacggcggggcgtgtctgagaggtatcgcgtgaccaccgcccataacggatccgctccgcgttttcaacgtacccgctctggctacgacccggtcgcagtcaatcattacatcgccgaactcgtgctgcgtcagcaggcgcagcactgtgagattgaaacgctcaaggcagaaatagccagtctgaaggacgaaaacgctgccctgaaggacacctcgccgtcagcacaggcggtgaccgatcggatggcgaaaatgcttcgactcgctgtcgacgaggtcttccagatgcagtcggaggcacgggccgaggccgcaacattagtttctgcggctagggatgaggcggaagcggtccgaacgcagaagcgagaaatgctggcggatatgaacgcccggcaaagagcgctggagtccgagcatgccgacgtgatgcgccgcgctcgtgaagaggctgaacagcttgtggcgcaggcaaccgccgaggtggagcggatgcgtgtcatcgatgccagacgccgtgagaaagccgagcaggaacttgatgccgaaatcatcaggcttcgcaccgatgcccaatttcagatcgacgatcagctgcaggccacacagcaggagtgtgagaagcggcttggcgaagccaaaatcgaggccgatcgacggctgcatgttgccgacgagcagattgagcacggcctcagcgaggctcggcgaacgttggaagagatcagccagcggcgagtcggcatcctcgaacaactagcgcgtattcacgcacagctcgagaatattccagcgctcctggaatcggctcgacatagcgagacggagccactgcagtccataaacggcgcggtcgctgagctacgggccatttag

SEQ ID NO: 28411 - DNA, 624 bp, Mycobacterium tuberculosis
gtggcggcgccggacaacagccgcagacggcccgggcgacccgccggcagctctgacactagggagcgaatcctgtccagtgcccgagaactctttgcgcacaacggcattgacagaacatcgatccgagccgtggccgccaaggccggtgttgatgccgcactagtgcatcactacttcggcaccaaacagcagcttttcgccgccgcgatccacattccgatcgacccgatggtcatcatcggtccgattcgcgaggcgcctgtcgaggaactcggttacaagctgccgtccttgttgctgccgatttgggattccgaactgggtgccgggttgatcgcgacgctgagatccttgatctcaggctccgacgtgggcctggcgcgctccttccttgaggaagtggtcaccgtggagcttgggtcccgcgtcgacaacccgccgggaaccggcaagatccgtacccagttcgtcgcgtcgcaactgatgggtgtggtcatggcgcgctacatcgtcagaatcgaaccgtttgcttcgttgccggccgaacagatcgtgcaaaccatcgcgcccaacctgcagcgctacctcactggggagctgccggacgacctcgcgccatga

SEQ ID NO: 28412 - DNA, 1275 bp, Mycobacterium tuberculosis
atgtctggcatgatcctcgatgagctcagctggcgcgggttgatcgcgcagtcgaccgacctcgacacgttggccgccgaagcacagcgcgggccgatgacggtgtacgccggcttcgatcccaccgcgcctagcctgcatgccggacatttggtgccgctgctgacgttgcggcgctttcagcgcgccggtcatcgccccatcgtgctggccggcggggccaccggcatgatcggtgatccacgtgacgtcggcgagcgcagtctcaacgaggccgacaccgtcgccgaatggaccgaacggatccgtgggcagctggagcgcttcgtcgacttcgacgactcaccaatgggcgcgatcgtcgagaacaacctggaatggaccggctcactatcggctatcgagtttctacgtgatatcggcaagcacttctcggtcaacgtgatgctggcccgcgacaccatccggcggcgtctggcgggggaggggatctcttacaccgaattcagctacctgttgctgcaggccaacgactacgtcgaattgcaccggcgccacggctgcacgctgcagatcggtggtgcagatcagtggggcaacatcattgccggcgtccggttggtgcgccagaagctcggtgccaccgtgcatgcgcttaccgtccccttggtgaccgctgccgacggcaccaagttcggcaaatcaaccggcggcgggagcctgtggttggatccccaaatgaccagcccctatgcctggtaccagtacttcgtgaacaccgcggacgcggatgtgatccgctacctacggtggttcaccttcttgtcggccgacgagttggccgagctggaacaggcgacagcgcaacgcccgcaacaacgggccgcccagcgccggctcgccagcgagctcaccgtcttggtgcatggcgaggcggcgaccgcagccgtcgagcatgccagccgggcactcttcggtcggggcgagttggcccgtctggacgaggcgacactggctgctgcgttgcgggaaaccacggtcgccgaactcaaaccgggcagtcccgacggaatcgtcgacttattggtggccagcggcctgtcggccagcaagggcgcggcgcggcgcacgatccacgagggtggggtgtcggtcaacaacattcgggttgataacgaggaatgggtgccgcaaagttcggacttcttgcacggccgctggttagtgctacgtcgtggaaagcggagtatcgccggggtggaacggattggctga

SEQ ID NO: 28413 - DNA, 924 bp, Mycobacterium tuberculosis
gtgaccgctcatcgcagtgttctgctggtcgtccacaccgggcgcgacgaagccaccgagaccgcacggcgcgtagaaaaagtattgggcgacaataaaattgcgcttcgcgtgctctcggccgaagcagtcgaccgagggtcgttgcatctggctcccgacgacatgcgggccatgggcgtcgagatcgaggtggttgacgcggaccagcacgcagccgacggctgcgaactggtgctggttttgggcggcgatggcacctttttgcgggcagccgagctggcccgcaacgccagcattccggtgttgggcgtcaatctgggccgcatcggctttttggccgaggccgaggcggaggcaatcgacgcggtgctcgagcatgttgtcgcacaggattaccgggtggaagaccgcttgactctggatgtcgtggtgcgccagggcgggcgcatcgtcaaccggggttgggcgctcaacgaagtcagtctggaaaagggcccgaggctcggcgtgcttggggtggtcgtggaaattgacggtcggccggtgtcggcgtttggctgcgacggggtgttggtgtccacgccgaccggatcaaccgcctatgcattctcggcgggaggcccggtgctgtggcccgacctcgaagcgatcctggtggtccccaacaacgctcacgcgctgtttggccggccgatggtcaccagccccgaagccaccatcgccatcgaaatagaggccgacgggcatgacgccttggtgttctgcgacggtcgccgcgaaatgctgataccggccggcagcagactcgaggtcacccgctgtgtcacgtccgtcaaatgggcacggctggacagtgcgccattcaccgaccggctggtgcgcaagttccggttgccggtgaccggttggcgcggaaagtag

SEQ ID NO: 28414 - DNA, 1761 bp, Mycobacterium tuberculosis
gtgcgaaagcacccgcaaaccgctaccaagcacctcttcgtcagcggcggcgttgcttcctcgctcggcaagggactgaccgccagcagcctaggacaattgttgacggctcgtgggttacacgtcacgatgcaaaagctcgacccgtacctcaacgtcgacccgggtaccatgaacccgttccagcacggcgaggtcttcgtgaccgaggacggtgccgaaaccgatctcgacgtcggccactacgaacggttcctcgatcgcaatttgcccggctcagcgaatgtgactaccgggcaggtgtattcaacggtgatcgcgaaggagcgccgcggcgaatacctgggcgacaccgtgcaggtgatcccccatatcaccgacgagataaaacggcgcatcctggcgatggcccaaccggacgccgacggtaaccgcccggacgtggtcatcaccgaaatcgggggcactgtcggcgatatcgagtcacagcccttcctggaggcagcgcggcaagtccggcactatctcggccgggaggacgtgttttttctgcacgtgtcgctggtgccctacctggcgccgtcgggtgagctcaaaaccaagccaacacagcactcggtggccgcactgcgcagcattgggattaccccggacgcgttgatcctgcgctgcgaccgcgacgttcccgaagcgctgaaaaacaagattgcgttgatgtgtgacgtcgatatcgacggcgttatctccaccccggacgcgccctccatctacgacatacccaaggtattgcaccgcgaggagctcgatgcgttcgtggtgcgccgactcaatctgccgttccgcgacgtcgattggaccgaatgggacgacctgctgcgccgggttcacgaaccacatgagacagtgcgaattgctttggtgggcaagtacgtcgaattatccgacgcttacctctcggttgccgaggcattgcgtgccggcggattcaagcaccgggccaaggtcgagatctgttgggtggcatccgacggttgtgaaacgaccagtggtgccgcggcggcgctcggcgatgtgcatggggtgctcattccgggcggattcggcatcaggggcatcgagggcaagatcggtgccattgcatacgcgcgggcgcgcgggttgccggtgttggggctgtgcctcggtttgcagtgcattgtgatcgaggccgcgcgatcggtcggtctcaccaacgccaattcggccgaatttgatcccgacacaccagatcccgttatcgccacgatgcccgatcaagaagaaatcgtggccggcgaggcggatctgggcggtaccatgcgtctcgggtcctaccccgccgtgttggagccggattcggttgttgcccaggcataccaaactacccaggtgtccgagcggcatcgccaccggtacgaggtcaacaacgcgtaccgagacaagatcgccgaaagcggcctgaggttttccgggacgtcacctgacggacacttggtagagttcgtcgagtatccgccggatcggcatccgttcgttgtcggcacccaggcccaccccgagttgaagagccgacccacccggccgcacccactgtttgtcgcattcgtcggggcagccatcgattacaaggcgggtgagttgctgcctgtcgagatccccgagatccccgagcacacacccaacggtagctcccatcgggacggcgtgggccagccgctaccggaacctgcgtctcgtggctga

SEQ ID NO: 28415 - DNA, 936 bp, Mycobacterium tuberculosis
atgaagacgctggcactgcaattgcagggctacctcgaccatctgacgatcgaacgaggtgtcgcggcaaacacattgagctcctaccgacgtgatctgcgccgctactccaagcacctggaagaacgagggattaccgatctggccaaggtcggcgagcacgacgtcagcgagttcctggtggcattgcggcgcggggatcctgattccggcacggcggcgttgtccgcggtgtcggcggcacgggcgctgatcgcggtgcgcgggctgcatcgcttcgctgccgcagaagggctggccgaactggacgtggcgcgcgccgtccggccaccgacgccgagccggcgattgcctaagagcctgacaatcgacgaggtgctatcgctgctcgaaggtgcgggcggcgataaaccgtccgacggcccgctgacgctgcgaaaccgtgcggtgctggaactgctgtactcgaccggggcgcggatctccgaggccgtcggccttgacctcgacgacatcgacacccacgccagatcggtgttgttgcgcggcaagggtggtaagcagcggctggttccggtgggacgcccggcagtgcacgcgctggacgcctatctggtgcggggacggcccgacttagcgcggcggggccgcggaacggcggcgatctttctcaacgcgcgcggcggccggttgtcacggcaaagcgcgtggcaggttctgcaggacgcggccgagcgtgccggcatcaccgccggtgtttcgccgcatatgttgaggcattcgttcgccacgcatctgctggagggtggcgccgatgtccgggtggtgcaggaattgctggggcacgcctcggtgaccacgacgcagatctataccctggtcaccgtccatgcactgcgcgaggtgtgggcgggagctcacccgcgggcacgctaa

SEQ ID NO: 28416 - DNA, 1461 bp, Mycobacterium tuberculosis
gtgttacaacgaatcgctagagagctcttatcgggagtggccgtcgcgatcgttgcgctgccgctggcgatcgcgttcggcattaccgccaccggaacgtcccaaggtgcgctcatcgggctctacggcgccatcttcgccggattcttcgcggccgtgttcggtgggacacccggacaggtgacgggccccaccggccccatcaccgtcgtcgctaccgcaaccatcgccgaacacggactcgagggtgccttcttcgcgtttatcctcgccggcgtctttcagatcctgttcggggcgtgccggctcggttcactcatccgctacgtgccccaccccgtgatctctggattcatggggggaatcgcgatcctcatcatcatgacccagctggatcaggtgcgcagcagctccctgctcgtgttggtaacggtcgtcctgctgctggctagcggccggtttatcaaagcgattccaccgagcctgctcgtcctggttctggtcagctcggtgctgccgctcgcggcgccatggctgcgcgacctgcgcgctgggccggtctcgatcaacaggacggtcgactacatcggcgagatcccacaggccatgccgtctttcgacttcccgcaagtcgccaattcgacgatgctgcaggtgctgctgtcggcggtggccatcgcgctgttgggatccctcgattcactgctgacgtcgctggtcatggacaacatcaggggcacccggcaccggagcaacaaagaactgatcggccaggggattggaaatatcgccgccgggctcttcggcgggctgtccggtgccggcgcgaccgtccgatcggtggtgaacgtcagaaatggtggtcagaccgccctgtcggcggccactcacagtgtcgttttgttcgttttcgttgccgggcttggtgccgtggtgcagtacatcccgctcgccgtgctgtcggggatactgatattggttgccgtcggcatgttcgactggcacgccatgcgcaaagcgcatgtgtcacccaggggcgacgtcatcgtcatgttcacgacgatgatcatcaccgtcgtcgtcgacctcaccatcgcggtgatggtcggaatcgccctctcgctgctggtccataggctccgatcccggcaacgcaaagccaaggtcacccaggacgacaccggcacctatcgcatcgacggtccgttgtcgttcctgtccgtcgacggtgtatttggctccctgcgcgacggtcgtgaggacgtgtcgctggacctccagcacgtcacctacctcgacacctctggtgcccgggccctgctgtatttcatcgaccactccgagaaggacggcgtcgcggtaagcatcaagcggatccccccacgcctcgaaagccaactcaccgcactcgccgacaacgagcaacgtgacaagctgagaaccgtcctcgaatccgcctga

SEQ ID NO: 28417 - DNA, 765 bp, Mycobacterium tuberculosis
ttgatggccgagccggaagagtcccgggagccccggggcatccgcctgcagaaagtgttgtctcaggctggaatcgcgtcgaggcgagccgccgagaagatgatcgtcgacggccgcgtcgaagtggacgggcacgtggtgaccgagttgggtactcgggtcgaccctcaggtcgcggtggtccgtgtcgacggggccagggtggtgctcgacgactcgctggtgtacttggcgctgaataagccgcgcggcatgcactcgaccatgtccgacgatcgcggccgcccgtgcatcggcgacttgatcgaacgaaaggtccggggcaccaagaagctttttcatgtcggacgcctagacgcggacaccgagggactgatgctgctgaccaatgacggcgagttggcgcaccggttgatgcatccctcccatgaggtgcccaagacgtatctggcgacggtgacggggtcggtgccgcgtgggctgggccgaacgctgcgagcgggaatcgaattggacgacggaccggcgttcgtcgacgatttcgcggtagtggatgcgatccccggcaagacgttggtgcgggtaacgctgcatgagggacgcaatcgcattgtgcgccgactgctggcggccgccggcttcccggtggaggcattggtgcgtaccgatatcggcgcggtgtcactgggaaagcaacgcccgggcagcgttcgggccttgcggtcgaacgagatcgggcaactgtaccaagcggtgggcctgtga

SEQ ID NO: 28418 - DNA, 693 bp, Mycobacterium tuberculosis
gtgagtcgcctaagcgcagcggtagtcgcgatcgacgggccggccggcaccggaaaatcctcggtgtcaaggcgattagcgcgcgagctgggcgcacgctttctggacaccggggcaatgtatcggatcgtgacgttggcggtgctgcgtgccggtgctgatccgtccgatatcgctgccgtcgagacgattgcgtcgacggtgcagatgtcgttaggctacgatcccgacggagacagctgttaccttgccggagaagacgtttcggttgagatacgcggtgacgcggtcacccgtgcggtctccgcggtgtcgtcggtgccggccgtacgcacccggctggtcgagctgcagcgaacaatggctgagggcccgggcagcatcgtcgtggagggccgcgacatcggaaccgtggtgtttccggatgcgccggtgaaaatcttcttgaccgcctcggccgaaacgcgggcccggcggcgcaacgcccaaaacgtcgcggcgggtttggccgacgactatgacggggtattggccgatgtgcgccggcgcgaccacctcgattccacccgggcggtgtcaccgctgcaagccgccggtgatgccgtcatcgtggacaccagcgatatgaccgaggccgaggtggtcgcccatctgttggagctggtcacgcggcgaagtgaggcagtgcggtga

SEQ ID NO: 28419 - DNA, 1392 bp, Mycobacterium tuberculosis
gtgacccaggacggcacgtgggtggacgaaagcgattggcaactagacgattcggagatcgcggagtccggagcggcgcctgtggtggcggtagtcggccggcccaatgtcggcaagtccaccctggtcaaccggatcctgggccgccgcgaggcggtggtgcaggatattcccggcgtgacgcgtgaccgggtctgctacgacgcgctgtggaccggacgccggttcgtcgtacaggacaccggcggatgggagcccaatgccaagggcctgcagcggttggtggccgagcaggcctcggtggccatgcgcaccgcggatgcggtgatcctggtggtcgacgccggtgtcggtgccaccgccgccgacgaggccgcggcccgtatcctgttgcgatccggcaagccggtgttcttggccgccaacaaggtcgacagcgaaaaaggcgaatccgacgccgcggcgttgtggtcgctgggcctgggtgagccgcatgcgatcagcgcgatgcacggtcggggggtggccgacctgctcgacggggtgctcgccgcgctgcccgaggtgggggagtccgcgtcggcgagcggcggtcctcgccgggtggcgctggtcggtaagccgaacgtcggcaagagctccctgctgaacaaactcgcgggtgatcagcgatcggtggtccatgaggcggcgggcaccaccgtcgacccggtggattcgctgatcgagttgggcggtgacgtctggcggttcgtcgacaccgcgggattgcggcgcaaggtcggccaggccagtgggcatgagttctacgcctcggtgcgcacgcacgccgccatcgactccgccgaagtggccatcgtcctgatcgacgcgtcgcagccgctcaccgaacaggacttgcgagtgatatcgatggtcatcgaggccggacgggcgctagtcctggcctacaacaagtgggacctggtcgacgaggaccggcgcgagctgcttcagcgcgagatcgaccgagagctggtgcaggtgcgctgggcgcaacgggtcaacatctccgccaagacgggccgggcggtgcacaagctggtgccggccatggaggatgcgctggcgtcatgggacaccaggatcgcgaccggcccgctgaacacctggctcacagaggtgacggcggccacaccgccgccggtgcgcggcggcaagcagccacgcatcttgttcgcgacccaggccaccgcgcggccaccgacgttcgtgttgttcaccacgggttttttggaggccggctatcggcggttcttggagcggcggctgcgtgagacgttcgggtttgacggcagcccgatccgggtcaacgtgcgggtgcgagagaagcgggccggcaagcgccgctga

SEQ ID NO: 28420 - DNA, 1383 bp, Mycobacterium tuberculosis
atgatcgccacgatgccatcaatggccaggaggtcgcgacatgacaacaagatcaccacgccggcagtggattgcctcacgatcgaacgtctagattctcccgcgtccggcgcccctcaggtcaccccttatgctagggcgctaatgggcgagacaaccacgtgcgcgatcatcggcggcggcccggccgggatggttctgggcctgctgttggcgcgggcaggtgtgcaggtcaccctgttggagaagcacggagacttcctgcgcgactttcgtggcgacacggtgcatccgacgacgatgcggctactcgacgagcttgggctgtgggaacgctttgcggctttgccctacagcgaggtccgcacggccacattgcattcgaatggtcgcgcggtgacctacatcgacttcgagcgactgcatcagccctacccctatgtcgcaatggtgccgcaatgggacctgctgaacctgctggcggaggccgcccaagcggaaccgagctttacgctgcggatgaaaaccgaggtgaccgggttgctgcgggagggcggcaaagttacgggggtgcgctatcaaggagccgagggcccgggtgaattgcgggcggaattgaccgtggcgtgcgacggccgatggtcgatcgcccggcacgaggctggactgaaggcgcgtgaattcccggtgaactttgacgtgtggtggttcaagctgccacgtgaaggtgacgccgagttctcgttcctgccgcgattctccccgggcaaggggctcggcgtgatcccacgcgaaggttatttccagatcgcctacctcgggcccaagggaaccgacgctcagttgcgcgagcgaggtatcgaggaattccgtcgggacgtcagcgaactgctgcccgaagcgacggcatcggtggcggcgctagcgtccatggacgaggtcaagcacctcaacgtcaaggtgaatcggttgcgtcgttggcacattgatgggctgctgtgcatcggcgacgcggcgcacgcgatgtcaccggtggcgggagtcggcatcaacctagcggtccaagatgcggtcgcggcagcgaccatcttggccgaaccgctgcgtgagcatcgagtcagcagccgccacctggcagcggtacggcgtcgtcgcgcatttcccaccgcggtgacccaagcggtgcagcgggtgttgcaccgaaggctgctcggcccgctgctgcagggccgggaccccacgccgccggcggccctgcttggcctggtcgaacggctgccatggctctcggcggtgcccgcctactttgtgggagttggagtccggcctgagcatgctccggccttcgcacgtcgcgggcccggcaaccgcaaaggcccttga

SEQ ID NO: 28421 - DNA, 885 bp, Mycobacterium tuberculosis; identical to SEQ ID NO: 28359

SEQ ID NO: 28422 - DNA, 2745 bp, Mycobacterium tuberculosis
atgtcgtttgtgatcgcggtgccggagactatcgcggcggcggcgacggatctagccgatctcggctcgacgatcgctggggccaacgcggctgcggcggccaacacgacgagcctgctggccgccggtgccgatgagatctcggcggcaatcgctgcgttgttcggcgcgcacggccgggcctatcaggcggcgagcgccgaggcggcggcgtttcatggtcggttcgtgcaggcgctgaccaccggggggggcgcctatgcggccgccgaggccgccgccgtgacgccgctgctcaactcgatcaacgcgcccgtcctggccgctaccggccgtccgctgatcggtaacggggctaacggtgctcccggcaccggggccaacggaggggatgccggctggttgatcggcaacggtggcgccggcggatccggtgcaaagggcgccaacggcggggctggtggccctggtggggccgccgggctgttcggcaacggcggggccggcggtgccggcggaaccgccaccgccaacaacgggatcggcggggccggtggcgctggcgggtccgccatgctgtttggggccggcggcgccggcggcgccggcggggctgcgacgtctcttgtcggtggcatcggcggtaccggcggaaccggcggcaacgccggtatgctcgccggcgccgccggggccggcggtgccggcgggttcagcttcagcactgccggtggggctggcggcgccggcggggccggtgggctgttcaccaccggcggtgtcggcggcgccggtgggcagggtcacacgggcggggcgggcggcgccggcggggccggcgggttgtttggtgccggcggcatgggcggggcgggcggattcggggatcacggaacgctcggcaccggcggggccggcggggacggtgggggcggcggtttgttcggcgccggcggggacggcggggcaggcgggtcaggactgaccaccggcggcgctgccggtaacggtggtaacgccgggacgctttccctgggtgccgccggtggcgccggcggcaccggtggggctggcggcactgtcttcggtggtggtaagggcggcgccggcggagccggcggtaacgccggcatgctcttcggctccggcgggggtggcggcaccggcgggttcggcttcgccgccggcgggcagggtggggtcggcggcagcgccggcatgctcagcggctccggcggctccggcggtgctggcggctctgggggccccgcgggcaccgccgcaggtggggcgggtggggcgggtggggcgcccgggttgatcggcaacggcggcaacggcggcaacggcggcgagagtggcggcaccggtggtgtcggcggggccggtggaaatgccgtgctgatcggcaacggcggcgagggcggcatcggcgcgctcgccggcaagtccggcttcggcggcttcggcgggttgctgctgggcgccgacggatataacgctcccgagagcacctcgccatggcacaacctgcagcaggacattctcagtttcatcaacgaacccaccgaggcattgaccggacgcccgctgatcggtaacggcgacagtgggacgccgggaaccggggacgatggcggtgccggcggctggttgttcggcaacggcggcaacggcggggccggtgcggccggcaccaacggcagcgcgggcggcgccggtggggcaggcgggatcctgtttggcaccggtggcgccggcggggccggcggcgtcggaacggcgggtgccggcggggccggtggcgccggcggatccgccttcttgatcggttccggcggtaccggtggtgtcggcggggccgccaccaccaccggcggcgtcggcggggccggcgggaacgccggcttgctcatcggcgcggctgggctcggcgggtgtggcggcggcgctttcaccgcaggcgttaccactggcggcgccggcgggactggcggcgctgccgggttgttcgccaacgggggggccggcggcgccggcgggaccggcagcaccgccgggggcgccggcggggccggcggggccggcgggctgtacgcccacgggggaaccggcggaccaggtgggaacggcggctccacgggggccggagggacaggcggtgccggcgggcccggtgggctgtacggtgccggcggctctggcggggccggcggtcatgggggcatggccggcgggggtggcggtgtaggcggcaatgctggctcgctcaccctcaatgcgtcgggcggtgccggcggcagcggcggctccagcctgtcaggcaaggccggtgctggcggcgccggcggcagcgcgggattgttctacggctccggcggggccggcggcaacgggggctacagcctcaatggcactggcggtgatggcggcaccggtggggccggccaaatcaccggccttcgcagcggcttcggcggcgccggcggcgccggcggcgccagcgataccggcgccggcgggaacggcggcgccggcggcaaggccgggctgtacggcaacggcggtgacggtggcgccggcggggatggcgccaccagcggcaagggtggagccggcggcaacgccgtggtgatcggcaacggcggcaacggcggcaatgccggaaaagccgggggcacggcgggtgccggcggcgccggtgggctggtactcggccgggatgggcagcacggcttgacgtag

SEQ ID NO: 28423 - DNA, 885 bp, Mycobacterium tuberculosis; identical to SEQ ID NO: 28359

SEQ ID NO: 28424 - DNA, 1857 bp, Mycobacterium tuberculosis
atgtcctatctcgtcgtggtgccggagttggtcgcagcggcggcaacagatttggcgaacatcggttcgtcgattagtgcagccaacgcggccgcggcggcaccgaccacggcactggtcgcagccggcggcgacgaggtatcggcggccatagccgcgttgttcggagcgcatgctcgggcatatcaagcgttgagtgcccaggcggcgatgtttcatgaacagtttgtccgggccctcgccgccggcggtaactcctacgccgtcgctgaggcggcaaccgcgcaatcggttcagcaagatctgctcaacctgatcaatgcgcccacccaggcgctgttggggcgtccgctgatcggcaacggcgccaacgggctgccgggtacgggccagaacggcggcgacggcgggattctgtacggcaacggcggcaacggtgggtccggcggggtcaaccaggccggtggcaatggcgggaatgctgggctgtggggcaatggcggatccggcggagccggcgggaacgccaccactgccggccgcaacggcttcaacgggggcgccgggggaagcggcggtttgctgtggggcaatggcggtgccggcggggccggtgggaacggcggtccggctccgctcgtgggcggggtgggcaccaccggtggcgccggcgggaacggcggcggcgccgggttgttctacggtttcggcggcgccggtgggaacggcgggatgggcggggtggcaccgagcaccggcccctcgatgggcatcctcccggccggcggtgtcggcgggcctggtggctccggcggggcgagcgcgcttgccttcggctccggcggcgtcggcggtgccggtggcttgggcgggccgaccgatggcaccgtccagggggtgggcggcttcggcggtcagggcggcaacggcgggcagagcggcttgttgtttggcaacgcgggagccggcggggcaggcgctgccggcggagccggcaccggcgacaccgagagcttcggcggccacggcggggccggcggtgatggcggcgctgttggcttgatcggtaacggcggggccggcggcaccggatctcccggcgctgtggtgggtggtaacggcggcgtcggtggtctgggtggcgccggcagtcccgggggtctgttgtacggcaccgggggggccggcggcaatggcggaccgggtggtgacggtggtactggcgcgacggtgggctttgccggctccggcggtttcggcggtgcggggggcatcgcccagctgtttggcacgggtggcatgggtggtagcggcggtggtataggcgctggcaccacgaccgtggtgccgcccgacgtcgccccggtgggtggcacaggcggcaatggcggtcgcgccgggctgctgttgggtgtgggtggcatgggcggtaatggcggtgccaccagcgtcggcgggacgctctacgccgccggtggaaacggcggcgacggcgggttggtgtggggcaacggtggcaccggcgggagcggtggcgccggcggggcgggcagcgtcggcaacggcggtgcgggtggcaacgcggcactgctgttcggcaacggcggggcgggcggggccggcggcgccggcggcatcggtgccggcggagccggcggcttcggcgcggttctgtttggcaacggcggggctggcgggagcggtgcccccggtggcatcggcgccggtggcaatggcggaaacgcgctgctggtcggcaacggcggcaacggtggggcaggtaccggtggggctgctggcggtgccggtggctcgggcgggttgctattcggccaaaatgggatgcccgggccgtga

SEQ ID NO: 28425 - DNA, 1920 bp, Mycobacterium tuberculosis
gtgtggacgtcgcagatgatcgtggcgccggcgtttgtcgatgcagcggcaaaggacctagcaactattggttcggcgattagccgggccaacgccgaagcgttggtcccgataacggcgttactgcctgcgggcgctgacgacgtgtcggctgcgattgcggcgctgttcgcaacgcacgggcaggcataccaggagctcagtgcccacgcggtcgcattccatgagcagttcgtccagctcatgagcgcgggggcggcccagtacgccagcgccgaggcagccaactcgtcaccattgcaaatcgtgggccaaaccgccctcgatgccatcaattcacccgtgcagacgctgaccgggcgtccgcttatcggcaacggtgccaacggggtcgcaggaaccgggcaaaacggtggcgatggcggatggctatacggcaacggtggcaacggcgggtccggcgggacgggccaaaatggcggcaacggcgggtcggctgggctatggggtagcggcggcaatggcggccagggcggggcgggtgccaacggcgcagccggtcaacccgggaaagcgggcgggtccggcggcaacggcggcgccggtggatggatctatggtcacggtggacatggtggggccggcggaaacgggggcaacgccacagcgcccgggggtgcgtcggcaggcttcgatgggggcgccggcggaaacgggggttcgggtggtcgcggtggactgttgttcggcaacggcggcaacggctcggtcggtggcatgggaggacaaggcactaatgacacagccggagattcggccggcagcggcggattaggaggcaacgggggcaacggcgcccagggcgggtggctgatcggcaacggggggcaaggtggggacagcggcgccggcggcggcaccgactccactcaaacgggcgtcatgaacggcgcttccggcggttcggccgggatagccggtaacggcggtgacgcgggcctagtcggcaacggcggggccggtggcaacggcgggaatggagcggccgggtctgcgctgggtactaccatcttcggcgggagcggcggggtcggtggctcaggcggcgacggcggcaacggcgggtggttgttcggcagcggcgcgtccggcggcaacgggggtcagggcggtgacgcaggcaccaacggatttgcgggctttggcggctctgctggcggtggcggctgggtaggtgccgttaacttcggaccgattagtgtccagggttttgggttgtttggtcacggcggtgacggtggcaacggtggtgacgttggggccggcagcctcagcattcaatttggtgcatcagggggtgacggcggccaaggtggggtgctatacggcaatggcggcaacggtggtaacgccggcagcggcggaggtaccggcttcgaaggcagcgccggccagggtggcgccgccattctgatcggcaacggcggggccggagggaatggggcgaccggtgggaccggagtaggcaacattattcaggaagccggaggtgacggcagcgacggtggcgcgggcggcagcggaggcctactgttcggtagcggcggggccggcggcatcggcggggccggcggcgtcggcgggtcgggcaacgacggcggcaacggcggcgatggtggccaaggcggggcaagcggcctggggatcggcaacggcggacccgggggaagtggcggtaccggtggggccggcggaaccggcggcagtgcgggcactggcggtgccggcggtgacggtggtaacgccgccctgctgatcggtaccggtggcgacggcggagatggtgtcccacccgcacccgggggccaaggcggcaagggcggattgatcggtttgcctgggcagaacgggcagccgtag

SEQ ID NO: 28426 - DNA, 1497 bp, Mycobacterium tuberculosis
atgtcatttgtggtcacgatcccggaggcgctagcggcggtggcgaccgatttggcgggtatcgggtcgacgatcggcaccgccaacgcggccgccgcggtcccgaccacgacggtgttggccgccgccgccgatgaggtgtcggcggcgatggcggcattgttctccggacacgcccaggcctatcaggcgctgagcgcccaggcggcgctgtttcacgagcagttcgtgcgggcgctcaccgccggggcgggctcgtatgcggccgccgaggccgccagcgcggccccgctagagggtgtgctcgacgtgatcaacgcccccgccctggcgctgttggggcgcccactgatcggtaacggagccaacggggccccggggaccggggcaaacggcggcgacggcggaatcttgatcggcaacggcggggccggcggctccggcgcggccggcatgcccgggggcaacggcggagccgctggcctgttcggcaacggcggggccggcggcgccggggggaacgtagcgtccggcaccgcagggttcggcggggccggcggggccggcgggctgctctacggcgccggcggggccggcggcgccggcggacgcgccggtggtggggtgggcggtattggtggggccggcggggccggcggcaatggcgggctgctgttcggcgccggcggggccggcggcgtcggcggactcgcggctgacgccggtgacggcggggccggcggagacggcgggttgttcttcggcgtgggcggtgccggcggggccggcggcaccggcactaatgtcaccggcggtgccggcggggccggcggcaatggcgggctcctgttcggcgccggcggggtgggcggtgttggcggtgacggtgtggcattcctgggcaccgcccccggcgggcccggtggtgccggcggggccggtgggctgttcggcgtcggtggggccggcggcgccggcggaatcggattggtcgggaacggcggtgccggggggtccggcgggtccgccctgctctggggcgacggcggtgccggcggcgcgggtggggtcgggtccactaccggcggtgccggcggggcgggcggcaacgccggcctgctggtaggcgccggcggggccggcggcgccggcgcactcggcggtggcgctaccggggtgggcggcgccggcggaaacggcggcactgcgggcctgctgtttggtgccggcggcgccggcggattcggcttcggcggtgccgggggcgccggtgggctcggcggcaaagccgggctgatcggcgacggcggtgacggcggcgccggaggaaacggcaccggtgccaagggcggtgacggcggcgctggcggcggtgccatcctggtcggcaacggcggcaacggcggcaacgccgggagtggcacacctaacggcagcgcgggcaccggcggtgccggcgggctgttgggtaagaacgggatgaacgggttaccgtag

SEQ ID NO: 28427 - DNA, 1920 bp, Mycobacterium tuberculosis
ttgggcccgaaattgtttaagccgtccatcgattggtctagagcattcccggattccgtgtattgggtcggcaaagcctggacgatcagtgccatctgtgtgctcgcgatattggttctgctcaggtatttgacgccctggggccggcagttctggcggatcacccgcgcatacttcgttggccccaacagcgttcgcgtgtggctgatgctcggcgtgttgttgctttcggtagtgctggcagtgcgcctgaatgtgctattcagctaccaaggcaacgacatgtacacggccttgcagaaggccttcgagggcatcgcctctggcgatggcacggtcaaacgctcaggcgtgcgaggattttggatgtcgatcggggttttcagcgtgatggccgtgctgcacgtgacccgggtcatggccgacatctacttgacgcagcgcttcatcatcgcctggagggtctggctaacccaccacctcacacaagactggctcgacggcagggcctactaccgagacctgttcatcgacgaaacgatcgacaaccccgaccagcgcattcagcaagacgtcgatatcttcaccgccggggcaggcggcactccgaatgctccctccaacgggacggccagcacgctgcttttcggggccgtgcagtcgatcatttcggtgatttctttcacagcgatcctgtggaatctctcgggcaccctgaatatcttcggcgtgtccatcccgcgcgcaatgttctggaccgtgctggtctatgtgttcgtggccacggtcatctcgttcatcatcgggcggcccctgatctggctcagcttccgcaatgaaaagctcaatgccgctttccgttacgcgctggttcggctacgcgacgccgccgaggcggtgggtttctaccgcggcgagcgggtggaaggtacccagctacagcggcggttcacgccggtgatcgacaattaccgtcgctacgttcggcgcagcatcgcattcaatggatggaatctgtcggtgagccagacaattgttccgttgccgtgggtcatccaggcgcctcgattattcgccgggcagatcgacttcggcgatgtcgggcagacggcgacttccttcggcaacattcacgactcgttgtcgttcttccgcaacaactacgacgcgtttgcgtccttccgcgcagcaatcatccgattgcatgggctggtcgacgccaacgagaaaggccgcgccctgcccgcggtcctgacccgaccgagcgacgacgagtccgtcgagctcaacgacatcgaggtgcgtacgcctgccggcgatcggttgatcgacccgctcgatgtgcggctggaccgcggaggctcgctggtgatcaccgggcgttctggggccggcaagaccacgctgctgcgcagtctggcggaactgtggccctacgcatcggggaccctgcaccggccgggcggcgagaacgagacgatgttcttgtcgcagttgccgtatgtgccgctggggacgctgcgtgacgtggtgtgctaccccaactctgcggccgccatccccgacgccaccctgcgggacacgctgaccaaggtggcgctggccccactgtgtgaccggctggacgaggaacgcgactgggccaaggtgctctcccccggtgagcagcaacgtgttgcctttgctcgcatcctgctcaccaaacccaaggcggtcttcctcgacgaaagtacctcggcgctggacaccgggctggagtttgcgctctaccaattgctgcgcagcgagctgccggactgcatcgtgatcagcgtcagccatcgccccgccctcgagcggctgcacgaaaaccagctcgaactactcggtggcggccaatggcggctggccccagtcgaggcggcgcccgccgaagtgtaa

SEQ ID NO: 28428 - DNA, 2826 bp, Mycobacterium tuberculosis
gtgtccgaccattcgacgttcgcagaccggcacatcggtctggacagccaggccgtcgcgaccatgctcgccgtgatcggggtggattcgctcgatgacctggcagtcaaggcggtcccggcgggcatcctagacacactcaccgacaccggagccgcaccgggtttggacagtctgccaccggctgccagcgaagccgaggcgctggccgagctgcgagcgctggccgacgctaacaccgtcgccgtgtcgatgatcgggcaaggctactacgacacacacacccccccggtgctgttgcgcaacatcatcgagaacccggcctggtataccgcctacacgccgtaccagcccgagattagtcagggtcggctggaagccttgctgaacttccagaccctggtcaccgatctgaccggcctcgagatcgcgaacgcgtcgatgctcgacgagggcaccgcggcggccgaggccatgactttgatgcaccgcgcggcccgcgggccggtgaagagggtggtcgtggacgccgacgtgttcacccagaccgcggcggtgctggccacccgcgccaagccgctgggtatcgagatcgtcacggccgacctgcgcgccggtctgcccgacggcgaatttttcggcgtcatcgcccagctgcccggggccagcggccggatcaccgactggtctgccctggtgcaacaggcccacgaccgtggcgcactggtggccgtcggcgccgacttgttggcgctgacgctgatcgcgccgcccggagagatcggcgctgacgtcgcctttggcaccacacaacggttcggagtgccgatggggtttggcggcccgcatgccgggtaccttgcggtgcacgccaagcatgcgcgtcagctgcccggccggctggtcggtgtgtccgtcgacagtgacggcacgccggcctatcggttggcgctgcagactcgcgagcaacacatccgccgcgacaaggccaccagcaacatctgcaccgcacaagtgctgttggcggtgcttgccgcgatgtacgcgagctaccacggcgcgggcgggctgaccgccatcgcacgccgggtgcatgcccacgccgaggctatcgccggtgcactgggcgatgcgttggtgcacgacaagtacttcgacacggtgttggcccgggtgcccggtcgtgccgacgaggtgctggccagggccaaggccaacggcatcaacctgtggcgtgtcgacgccgaccatgtgtcggtagcctgcgacgaagccaccactgacacccacgtggcggtcgttctggacgcgttcggtgtagcggccgccgcacccgcccatacggacatcgcaacgcgcacatcggagttcctgacgcatccagcgttcacgcaataccgcaccgagacgtcgatgatgcggtacttgcgtgcgctggcggataaggatattgccctcgaccgcagcatgattccgctcggctcgtgcacgatgaaactcaacgccgccgccgagatggagtcgattacctggcctgaattcgggcgtcagcatccatttgccccggcatctgataccgctgggctgcgtcaacttgttgccgacctacagagttggctggtgctgatcaccggttatgacgcggtgtcgctgcaacctaacgcgggctcgcaaggcgagtatgcgggcctattggcgatccacgagtaccacgccagccggggtgaaccgcatcgcgacatctgcctgatcccgtccagcgcgcacggcaccaatgccgcgtcagccgccttggccggcatgcgcgtggtggtggtggactgccacgacaacggcgacgtcgacctcgatgacctgcgcgctaaggtcggggagcatgccgagcggttgtcggcgctaatgatcacctacccgtccactcacggcgtgtacgaacacgacatcgccgagatctgcgctgccgtgcacgacgcgggcggccaggtatacgtcgacggagccaacctcaacgccctggtcggcctggcccggccgggcaagttcggcggtgacgtcagtcacctcaacctacacaagacattctgcattccgcacggcggcggtggcccaggcgtcggcccggtggcggtgcgggcgcacctggcaccgtttctgccaggtcaccccttcgcccccgagctgcccaagggctatccggtgtcgtcggcaccatatgggtcggcttcgattcttccgatcacctgggcatacatccggatgatgggggctgagggactgcgggcggcatcgctgacagcgatcacgtcggctaactacattgcgcgccgccttgacgagtattacccggtgctgtacaccggcgagaacggcatggtcgcccacgagtgcatcctggacttgcgcggtatcactaagttgaccggtatcaccgtcgacgatgtcgcaaaacggctggcagactatggttttcacgcaccaacgatgagttttccggtggccggtacgctcatggtggagcccaccgagagcgagagcctggccgaagtggacgccttctgcgaggccatgatcggcatccgcgccgagatcgacaaagtcggggccggggagtggcctgtcgacgacaatccgctgcgcggcgcaccgcacaccgcgcagtgcctgctggcgtctgattgggaccacccgtatacgcgggaacaggccgcctacccgctcggcaccgcattccgacccaaggtttggcccgcggtacgtcgcatcgacggcgcctacggggatcgcaacctggtctgctcatgcccgccggtagaggcttttgcctaa

SEQ ID NO: 28429 - DNA, 1548 bp, Mycobacterium tuberculosis
atgtcgtttgtggtggcggccccagaagtggtggtggcggcggcgtcggatttggccggcatcgggtcggcgatcggcgcggcgaatgcggctgcggccgtgcccacgatgggggtgctggccgcgggcgccgatgaggtgtcggcggctgttgcggatttgttcggcgcgcacgcccaggcctatcaggcattgagtgcgcaggcggcgctgtttcacgagcagtttgtgcatgccatgaccgccggcgcgggggcctatgccggtgccgaggcggcggacgccgccgcgctggacgtgctcaacgggccgtttcaggcgttgttcggccgcccgttgatcggtgatggcgccaatggcgcgccgggacagcccggcgggcccggcgggttgctgtacggcaacggcggcaacggcggcaacggcgggatcggccagcccggcggcgccggtggggatgcagggttgatcggcaacggcggcaacggtggcatcggcgggcccggggcgaccggccttgccggtggtgccggcggggtcggcggactgctcttcggcgacggcggcaacggcggtgccggcggactcggtaccggacccgtcggcgctaccggtgggatcggcgggcccggtggagccgccgtcgggctgttcggccatggcggggccggcggggccggcgggctcggcaaggccggcttcgcgggcggggccggcggcaccggcggcaccggcggactgctgtacggcaacggcggcaacggcggcaatgtcccatcgggagccgccgacggcggagcgggcggtgacgcccggctgatcggcaacgggggcgacggcggctccgtcggtgccgcccccaccggcatcggcaacggcggcaacggcggcaacggcgggtggctgtacggcgacggcggttccggaggcagcaccctgcaaggtttcagcgacggtggtaccggcggtaacgccgggatgttcggcgacggcggtaacggcgggttcagcttcttcgatggcaacggcggcgacggcggcaccggcgggacgctgatcggcaacggcggcgacggcggcaacagcgtgcaaaccgacggctttctccgaggccacggcggcgacggcggcaacgccgtcgggctgatcggcaacggtggcgccggaggcgccgggtccgccggtaccggcgtcttcgcccccggcggtggcagtggcgggaacggaggcaacggcgcgctgctggtcggcaacggtggcgccggcggctccggtgggccaacccagattccctcagtcgcggtacccgtcaccggcgccggcggcaccgggggtaacggcggcacggccgggttgatcggcaacggtggcaatggcggcgccgccggcgtcagcggggacggcacccccggcaccggcggtaacggcggctacgcccagttgatcggcgacggcggcgacggtgggcccggcgactctggcgggccgggcggcagcggcggtacgggcggaacgctggccggccagaacgggtcccccgggggatag

SEQ ID NO: 28430 - DNA, 1038 bp, Mycobacterium tuberculosis
atggatgtgctgtccgcggtgttgctggcgcttttgctgatcggcgccaacgcgttcttcgtgggcgcggaattcgcgttgatctcggcgcgtcgtgaccgcctcgaagcgctggccgagcagggcaaggccactgccgtcaccgtgatccgggcgggcgaacagctcccggcgatgctgaccggcgcacagctgggggttacggtgtcctcgatcctgcttggccgggtcggcgaaccggcagtcgtcaagctgctacagctgtcgttcgggctgagcggtgtaccgccggcgctgctgcacaccttgtcgttggcgatcgtggtggcgctgcatgtcctgctcggtgagatggtgccgaagaacatcgctttggctggtccggagcgaacagcgatgttgctggtcccgccgtacctggtctacgtgcgcctcgcccggccgttcatcgcgttctacaacaactgcgccaacgcgatactgcggctggttggggtgcagccgaaggatgaactcgacatcgccgtctccactgcggaactgtccgagatgatcgccgaatcgctatccgaaggcctgctggatcacgaggagcacacgcggctaacccgagcccttcggattcgaactcgcctggttgccgatgtcgcggtgccgctggtcaacattcgggcagtgcaggtgtcggcggtagggtccgggcccaccatcggcggggtcgaacaggccttggcgcaaaccggctactcccgctttccggtggtggatcgcggtggaaggttcatcggatatctgcacatcaaggacgtgctgaccctcggtgacaatccgcaaaccgtgatcgatctggccgttgtgcgcccgctgccgcgggttccccaatcgttgccgctggccgacgccctgtcgcggatgcggcgcatcaacagccatctggccttggtaaccgccgacaacggttctgtcgtggggatggtggcgctggaggacgtggtggaggacctggttggcaccatgcgcgacgggacgcatcgttga

SEQ ID NO: 28431 - DNA, 1458 bp, Mycobacterium tuberculosis
atgagttcgtcggaatcgccagccggcatcgcgcagatcggcgtcactggcctggccgtgatgggttccaacatcgcccgaaacttcgcccggcacggctacaccgtggcagtgcacaatcggtcggtcgccaagaccgacgcgctgcttaaggagcacagctcagacggcaagttcgtgcgcagtgaaacgatccccgaatttcttgccgcactggaaaaaccgcgtcgggtgctgatcatggtcaaggccggagaggccactgacgctgacgctgtcatcaacgaacttgctgacgccatggaacccggcgacatcatcatcgacggcggcaatgcgttgtacaccgacaccatgcgccgcgagaaagcgatgcgtgagcggggcttgcacttcgtcggggccgggatctccggcggcgaagagggcgcgttgaacgggccgtcgatcatgcccggcggacccgccgagtcataccaatcgctgggtccgctgctcgaggagatctccgcgcatgtcgacggcgtgccgtgctgcacccacattggcccggacggctccgggcacttcgtcaagatggtccacaacggcatcgagtactccgacatgcagctcatcggtgaggcctaccagctgatgcgcgacgggctaggtctgaccgcgccggcgatcgccgatgtgttcaccgagtggaacaatggcgatctggacagctacctggtcgagatcaccgccgaggtgctgcggcagaccgatgccaagaccggcaaaccgctcgtcgacgtcatcgtggaccgggccgagcagaaaggcaccggccgttggaccgtcaagtccgcgctggacctgggtgtgccggtgaccggcatcgccgaagcggtgtttgcccgcgctctctcgggatccgtggggcaacgctcggccgccagcggtctggcttcgggcaagctcggcgagcagcccgccgaccccgccacgttcaccgaagacgtccgccaggcgttgtacgcctccaagatcgtggcctacgctcagggcttcaaccagatccaggccggcagcgccgaattcggctgggacatcacgccgggcgacctggccaccatctggcgtggcggctgcatcatccgggcgaagttcctcaaccacatcaaggaagcctttgacgccagcccgaacctggccagtctgattgtggccccgtatttccgcggcgccgtcgaatcggcgatcgacagttggcggcgtgtggtgtcgacggcggcccaactgggtatcccgaccccgggattctcgtcggccctgtcgtattacgacgcgctgcgcaccgcgcggctgcccgctgcactcacccaggcccagcgcgacttcttcggcgcacacacctacggccggatcgacgaaccaggcaagttccacacactatggagttcagaccgcaccgaagtaccggtgtag

SEQ ID NO: 28432 - DNA, 303 bp, Mycobacterium tuberculosis
atgcgcctgacgccgcacgaacaggagcgtttgctgttgtcctacgccgccgagttggcccgccggcgtcgggcccgcggcctgcgcctcaatcatccggaagccatcgcggtgatcgccgaccacatcctggaaggcgcgcgtgacggccgcaccgtcgcagagttgatggcatccgggcgtgaggtgctcggccgtgacgatgtgatggagggagtgccggagatgctcgccgaggtacaggtggaggcgacgtttccggacggcaccaagttggtcaccgtgcatcagccgatcgcatga

SEQ ID NO: 28433 - DNA, 1734 bp, Mycobacterium tuberculosis
atggcgcgactgtcaagggagcgctacgcacagctgtacggacctaccaccggcgaccggatacggctggccgacaccaacctgctggttgaggtcaccgaagaccggtgtgggggaccgggactggccggtgacgaggcggtgttcggcggcggcaaggtgctgcgcgagtccatgggccagggccgtgcgagccgggccgacggtgcccccgacaccgtgatcaccggtgcggtgatcatcgactactggggaatcatcaaggccgacatcgggattcgcgatggccgcatcgtcgggatcggaaaggccggcaatcccgacatcatgacaggtgtgcatcgggatctcgtcgtcgggccgtccaccgaaatcatcagcggcaaccgtcgaatcgtcaccgcaggcaccgtcgactgtcacgtgcacttgatctgtccgcagatcatcgtcgaagccttggccgcgggcaccaccacgatcatcggcggtggcaccggacccgccgagggcaccaaggccaccacagtcactcccggcgagtggcacctggcccggatgctggagtcactggacggttggccggtgaacttcgcgctgctcggcaagggaaacaccgtgaatcccgacgcactgtgggaacagttgcgcggtggcgcatcgggtttcaaactccacgaagactggggatcgaccccggcggccatcgacacctgcttggcggtcgccgacgtggccggggtgcaggttgcgctgcactccgacactctcaatgagaccggattcgtcgaggacaccatcggcgcgatcgccggacgttcgattcacgcctaccacaccgagggcgccggcggcgggcacgcaccggacatcattaccgtcgcggcgcaaccgaatgtactgcccagctcgaccaatccgacccgcccgcatacggtgaacacccttgacgagcatctcgacatgctgatggtgtgccaccacctcaacccccggatcccggaggacctcgcgtttgccgaaagccggatccgaccgtccaccattgcggcagaagatgtgttgcacgatatgggggcaatctcgatgattggcagcgattcccaggcgatgggccgtgtcggcgaggtggtgctgcgcacctggcagaccgcgcacgtgatgaaagcccgccgcggggcactggaaggtgacccgtctggtagccaagccgccgacaacaaccgggtccgccgctacatcgccaaatacaccatctgcccggccatcgcacacggcatggatcacctgatcggttcggtggaggtgggaaagttggccgacctggtgttgtgggagccggcgtttttcggggttcgcccgcacgtcgtgctcaaaggtggggcgatcgcctgggcagcgatgggcgatgcgaacgcgtcaatcccgaccccgcaaccggtgctcccgcgaccgatgttcggcgcggccgcggcaaccgcggcggcgacctcggtgcacttcgtcgcgccgcaatccatcgacgcgcgcctggcggaccggctcgcggtcaatcggggactagcgccggtggccgacgtgcgcgcagtgggcaagaccgacctgccgctcaatgatgccctaccgagcatcgaggtcgatcccgacaccttcaccgtgcgaatcgacggccaggtgtggcaaccgcagccggccgccgaactacctatgacacaacggtatttcctgttctaa

SEQ ID NO: 28434 - DNA, 636 bp, Mycobacterium tuberculosis
atgacctcgctggccgtgctgctcaccctcgccgactcgcggctgcccacgggtgcgcacgtgcactcgggcggcatcgaagaagccatcgccgccggcatggtgaccggcctggccaccctggaagcgttcctgaaacggcgggtccgcacccacggcctgctgacggcgtccatcgcggccgcggtgcaccggggcgagctggccgtcgacgacgccgaccgggaaaccgacgcgcgcacaccggctcccgcggccagacacgcctcacgcagccagggccgcgggctgatcaggctggcacggcgggtgtggcccgattccggctgggaggaactgggcccgaggccgcatctggcggttgtggccggacgggtcggcgcgctgagcgggctggcgcccgagcacaacgccttgcacctcgtctacatcacaatgaccggctcggccatcgccgcccagcgactgctggcgctagatcccgccgaagtgaccgtggtgaccttccagctgtccgaactgtgcgagcagatcgcgcaggaggccacagccggactggcagacttgtctgatccgctgctggacacgctcgcccagcggcatgacgagcgcgtgcgtcccctgttcgtttcctga

SEQ ID NO: 28435 - DNA, 675 bp, Mycobacterium tuberculosis
atggcaacgcattcccatccccactcgcacaccgtgcccgctcggccaaggcgggtccgcaaaccgggcgagccactgcgcatcggcgtcggcggcccggtcggctccggcaagaccgcactggtggcggcgctgtgccggcaattgcggggagagctgtcgctggcggtgctgaccaacgacatctacaccaccgaagacgccgacttcttgcgcacacatgcggtgctgccagacgaccggatcgcggccgtgcagaccggcggctgcccgcacaccgcgatccgcgacgacatcaccgccaacctggatgcgatcgacgagttgatggccgcccacgacgcgttggacctgatcctggtcgaatccggcggcgataacctcacggccaccttctcttcggggctggtggatgcgcagatcttcgtcattgacgttgccggcggcgacaaggtgccgcgcaagggcgggccgggggtgacctattcggatttgttggtagtcaacaagactgacctggctgcattggtgggcgccgacctggcggtgatggcccgcgatgcggacgcggtgcgcgacggccgcccgacggtgctgcaatcgttgaccgaggacccagctgccagcgatgtcgtggcctgggttcgtagtcaactggccgccgatggagtctag

SEQ ID NO: 28436 - DNA, 306 bp, Mycobacterium tuberculosis
atggacatcacggcaacaaccgaattttccgccatgaacctcgacggcaagacgggtataggttggctcggctacatcgtcatcggcggtatcgccggctggctcgccagcaagatcgttaaggggggcggctcgggcatcctgatgaacgttgtgatcggcgtcgtcggggcattcggcgccggcttggtccttaacgcgctgggcgtcgacgtcaaccatggcgggtactggttcaccttcttcgtcgccctgggcggggctgtcgtcctgctgtggatcgtcggcatggtgcgcaagacctag

SEQ ID NO: 28437 - DNA, 1245 bp, Mycobacterium tuberculosis
atggcggtcaaccggcgagtgcccagagtgcgcgatctggcacccctgctccagttcaacaggccgcagttcgacacctccaagcgccgcctgggcgccgcgctgaccatccaggacctgcgacgcattgccaaacggcgtacccctagggcggcgttcgactacgccgacgggggtgccgaggacgaactgtccatcgcgcgtgctcgacaagggttccgcgacatcgagtttcacccgacaatcctgcgtgacgtcaccaccgtgtgcgccggctggaacgtcctcggtcagcccaccgtcttgccattcgggatcgcgccaaccgggttcacccgcttgatgcacaccgagggcgagatcgccggcgcgcgggcggcggccgcggctgggatcccgttttcgctatccaccctggccacctgtgccatcgaagacctcgtcatcgctgtgccgcagggccgcaaatggttccagctgtatatgtggcgtgatcgagaccgctcgatggcattggtgcggcgcgtcgccgccgcgggatttgacaccatgctggtcacggtcgacgtcccggtcgccggtgcccggctacgcgatgtccgcaacgggatgtccatcccgccggcgctgacgctgcgaaccgttctcgacgcgatgggacacccgcggtggtggttcgacttgttgaccaccgaaccgctggccttcgcttcactggatcgctggcctggcaccgtcggcgagtacttgaacaccgtgttcgaccccagcctcaccttcgacgatttggcctggatcaagtcgcagtggccgggcaagctcgttgtcaaagggatccaaacactcgacgacgcccgcgccgtggtggaccgcggcgtcgacggcatcgtgttgtccaatcacggcggccgccagcttgaccgagccccggtacccttccacctgttgccccacgtggcacgcgaactgggcaaacacaccgaaatcctggtggacaccggcatcatgtcgggcgccgatatcgtcgcggcgatcgcgttgggggcacggtgcacgctgatcgggcgggcctacctttacgggctgatggccggtggtgaggcgggcgtcaaccgcgcgatcgagatccttcagacaggtgtgatccggaccatgcggctactgggcgtgacctgccttgaggagctgtcacctcggcacgtgacacaactgcggcggctcggccctatcggggcaccaacgtga

SEQ ID NO: 28438 - DNA, 1155 bp, Mycobacterium tuberculosis
atgcgtgcggtagtcatcgacggggccggcagcgtcagagtcaacacccagcccgacccggcactgcccgggcctgacggagtggttgtcgccgtgaccgccgccggcatctgcggatccgatctgcatttctacgaaggcgaatatccgttcaccgagccggtggccctcggtcacgaggcggtaggcaccatcgtcgaggccgggccacaggtgcgcaccgtcggagttggcgacctggtcatggtgtcttcagtggccggctgcggcgtctgcccgggatgcgaaacccatgatccagtcatgtgcttctccggcccgatgatcttcggcgccggcgtgcttggcggcgcacaggccgatctgctggcggtgccggccgccgatttccaggtgctcaagatccccgaaggtatcaccaccgagcaggcactgctgctcacggacaacctcgccaccggttgggcggcagcccaacgagccgatatttcattcggctccgccgtggcggtcatcggcctgggagccgtcggcctctgcgcgctgcgcagcgccttcatacacggtgccgcaacggttttcgctgtcgaccgagtaaagggacgcttgcaacgcgcggccacctggggtgctacgccgataccgtcaccggcggccgagacgattctggccgcgacgcggggtcgcggcgcagactcggtgattgacgccgtcggcaccgacgcctcgatgagcgacgcgctcaatgcggtgcgccctggcggcaccgtctcggttgtcggcgtgcacgatcttcagccgtttcccgtgcccgcactgacgtgcctgttgcgaagcatcacgctgcgaatgaccatggcaccggtacaacgaacctggccggaactgatcccgttgctgcagtcgggccgactcgatgtcgatggcatcttcactaccaccctgccgttggacgaagcggccaagggctatgcaaccgcgagggcgcgctcgggtgaggagctaaggttctgcttacgccctgacagccgtgatgtactgggagcgcatgaaactgtcgatctttacgtccacgtccggcggtgtcagtccgtagccgacctgcagctcgagggtgctgcggacggggtcgacggcccatccatgctcaactag

SEQ ID NO: 28439 - DNA, 1032 bp, Mycobacterium tuberculosis
atgtcccgggctgccgggttgccccggttgtcctggtttgccgggctgacctggttcgccgggggttccaccggggccgggtgcgccgcccaccccgccctggccgggttgaccgccggggcccgctgccccgcctatgccgccatctccgcctctaccgcccgccccgccgcgaccgccggcaccaccccggccaccggcgcctccggctccgcccggcccaccgacgccgcgggcatggctgacctcgcccggcccggcgtcgtcgccactcatgctgttcgcaccctcggtacaactggatcacgagccatcggtctgtgtccttgccagccgcttgattgtcctcgttcacctcaagctaccctgaatctgggctcgatgggccggagtctcgatgggccgcagtggcgccgggcgagggttcgattgtgtgggcgatggtggcgacggtccaacacaacaaggggtgcatcaccgcggccgccgagtacttgcaggggggacaatgtgtcgatgatcgagttggaggtacatcaggccgacgtgaccaagctcgagctcgacgccatcaccaatgcggcgaacacccgactgcggcatgccggtggtgtcgctgcggccatcgcccgcgccggcggccccgagctgcagcgcgagtccaccgagaaggcgccgattgggcttggggaagcggtcgagaccacggccggtgacatgccggcgcgctacgtgatccacgcggcgacgatggagctaggaggtccgacctcgggcgagatcatcaccgcagccaccgctgctaccctgcggaaagccgacgagctcggttgccgctcgctggcgctggtggctttcggcacgggcgtgggcggctttccgctcgacgacgctgcgcggctgatggtcggcgccgtccgtcggcaccggccggggtcgctgcaaagggtggtatttgcggtccatggggatgcggccgagcgggcgtttagcgctgctattcaggccggagaagataccgctcgacggtag

SEQ ID NO: 28440 - DNA, 2223 bp, Mycobacterium tuberculosis
gtgcccgagcaacacccacccattacagaaaccaccaccggagccgctagcaacggctgtcccgtcgtgggtcatatgaaataccccgtcgagggcggcggaaaccaggactggtggcccaaccggctcaatctgaaggtactgcaccaaaacccggccgtcgctgacccgatgggtgcggcgttcgactatgccgcggaggtcgcgaccatcgacgttgacgccctgacgcgggacatcgaggaagtgatgaccacctcgcagccgtggtggcccgccgactacggccactacgggccgctgtttatccggatggcgtggcacgctgccggcacctaccgcatccacgacggccgcggcggcgccgggggcggcatgcagcggttcgcgccgcttaacagctggcccgacaacgccagcttggacaaggcgcgccggctgctgtggccggtcaagaagaagtacggcaagaagctctcatgggcggacctgattgttttcgccggcaactgcgcgctggaatcgatgggcttcaagacgttcgggttcggcttcggccgggtcgaccagtgggagcccgatgaggtctattggggcaaggaagccacctggctcggcgatgagcgttacagcggtaagcgggatctggagaacccgctggccgcggtgcagatggggctgatctacgtgaacccggaggggccgaacggcaacccggaccccatggccgcggcggtcgacattcgcgagacgtttcggcgcatggccatgaacgacgtcgaaacagcggcgctgatcgtcggcggtcacactttcggtaagacccatggcgccggcccggccgatctggtcggccccgaacccgaggctgctccgctggagcagatgggcttgggctggaagagctcgtatggcaccggaaccggtaaggacgcgatcaccagcggcatcgaggtcgtatggacgaacaccccgacgaaatgggacaacagtttcctcgagatcctgtacggctacgagtgggagctgacgaagagccctgctggcgcttggcaatacaccgccaaggacggcgccggtgccggcaccatcccggacccgttcggcgggccagggcgctccccgacgatgctggccactgacctctcgctgcgggtggatccgatctatgagcggatcacgcgtcgctggctggaacaccccgaggaattggccgacgagttcgccaaggcctggtacaagctgatccaccgagacatgggtcccgttgcgagataccttgggccgctggtccccaagcagaccctgctgtggcaggatccggtccctgcggtcagccacgacctcgtcggcgaagccgagattgccagccttaagagccagatccgggcatcgggattgactgtctcacagctagtttcgaccgcatgggcggcggcgtcgtcgttccgtggtagcgacaagcgcggcggcgccaacggtggtcgcatccgcctgcagccacaagtcgggtgggaggtcaacgaccccgacggggatctgcgcaaggtcattcgcaccctggaagagatccaggagtcattcaactccgcggcgccggggaacatcaaagtgtccttcgccgacctcgtcgtgctcggtggctgtgccgccatagagaaagcagcaaaggcggctggccacaacatcacggtgcccttcaccccgggccgcacggatgcgtcgcaggaacaaaccgacgtggaatcctttgccgtgctggagcccaaggcagatggcttccgaaactacctcggaaagggcaacccgttgccggccgagtacatgctgctcgacaaggcgaacctgcttacgctcagtgcccctgagatgacggtgctggtaggtggcctgcgcgtcctcggcgcaaactacaagcgcttaccgctgggcgtgttcaccgaggcctccgagtcactgaccaacgacttcttcgtgaacctgctcgacatgggtatcacctgggagccctcgccagcagatgacgggacctaccagggcaaggatggcagtggcaaggtgaagtggaccggcagccgcgtggacctggtcttcgggtccaactcggagttgcgggcgcttgtcgaggtctatggcgccgatgacgcgcagccgaagttcgtgcaggacttcgtcgctgcctgggacaaggtgatgaacctcgacaggttcgacgtgcgctga

SEQ ID NO: 28441 - DNA, 2520 bp, Mycobacterium tuberculosis
atggcggttcgtcaggtcaccgtcggctattcggacggcacgcacaagacgatgccggtgcggtgcgaccagacggtcctggatgccgccgaggaacacggcgtggccatcgtcaacgaatgccaaagcgggatatgtggcacctgcgtggccacctgcaccgccggccgctaccagatgggacgcaccgagggactgtccgatgtcgagcgggcggcgcgaaagatcctcacctgccagacgtttgttacctccgattgccggatcgagctgcagtatccggtcgacgacaacgccgccctgctggtcaccggtgacggtgtggtgaccgcggtcgagttggtgtcgcccagcaccgccatcctgcgggtggacacctctggcatggccggcgcgctgagataccgggccggccagttcgcccaattgcaggttcccggtaccaacgtatggcgcaactactcctacgcccatccggccgacggccgcggtgagtgcgagttcatcatcaggttgctgccggacggcgtgatgtcgaattatcttcgcgaccgcgcccagcccggtgaccatatcgcgctgcgctgcagcaagggcagcttttatctgcgcccgatcgtgcgaccggtgatcctggtcgccggaggaaccggcctgtcagcgatcctggcgatggcccagagcctggatgccgatgtcgctcacccggtctacctgctctacggggtcgagcgcaccgaagacctgtgcaagctcgacgaactcaccgagctgcgccgccgcgttggccgcctggaggtgcacgtcgtcgtcgctcgcccggaccccgactgggatgggcgcaccgggctggtcaccgacctgctcgacgagcggatgctggcgagcggtgacgccgacgtgtatctgtgcggtccggtcgccatggtcgacgcagcccgaacctggctggaccacaatggctttcaccgtgtcgggttgtactacgagaagttcgtggccagcggggcggcgcgccgccgcaccccggctcggctggattacgcgggcgtggacattgccgaggtgtgccgccgcggccgcggcaccgcggtggtcatcggcggcagcatcgcgggcatcgcggcggcgaaaatgctcagcgagaccttcgatcgcgtcatcgtgctggagaaggacggcccgcaccgtcgccgcgagggcaggccgggcgcggcacagggttggcacctgcaccacctgctgaccgccgggcagatcgagctggagcgcatcttccctggcatcgtcgacgacatggtgcgcgagggagcgttcaaggtcgacatggccgcgcagtaccgtatccggctgggcggcacctggaagaagcccggcactagtgacatcgagatcgtctgcgcgggaaggccgctgctcgaatggtgtgtgcgccgccggctcgacgacgaaccgcgcatcgacttccgctacgaatcggaggtggccgatctcgccttcgaccgcgccaacaatgccatcgtcggcgtcgccgtggacaatggcgacgccgacggaggcgacggtttgcaggtggtgcccgccgagttcgtcgtggacgcgtcgggcaagaacacccgcgtgccggagttcttggagcgtctcggtgttggcgctcccgaggccgagcaggacatcatcaactgcttctactccacgatgcagcaccgggttccgccggagcggcggtggcaggacaaggtgatggtgatctgctatgcgtaccgccctttcgaggatacctacgccgcgcagtactacaccgacagctcccgcaccatcctgtccacctcactggtggcctacaactgctattcgccgccgcgtaccgcccgagaattccgcgcgttcgccgacctgatgccgtccccggtcatcggggagaacatcgacgggctggagccggcatcgcccatctacaatttccgctatcccaacatgctgcggctgcgctacgagaagaagcgcaacctgccgcgggctttgctggcggtgggcgatgcctacaccagcgccgacccggtgtcgggtctgggtatgagcctggcgctcaaggaagttcgggagatgcaggcgctgctggctaaatacggcgccggtcaccgggatctgccgcgccggtactaccgggcgatcgccaagatggccgacacggcctggttcgtgatccgcgagcagaacctgcgcttcgactggatgaaggacgtcgacaagaagcgcccgttctatttcggtgtgctgacctggtacatggaccgcgtgctggagctggtgcatgacgatctcgacgcgtaccgggaattcttggccgtcgtccatctggtcaagccgccgtcggcgctgatgcgacccaggatcgccagccgcgtcctcggcaaatgggcacgaacccgattgtcgggccagaagacgttgattgcccgcaactacgaaaatcatccgataccagccgaacccgcggaccaacttgtaaacgcttag

SEQ ID NO: 28442 - DNA, 771 bp, Mycobacterium tuberculosis
ttgaaccatccagacctggccggcaaggtcgcgatcgttactggggcgggcgccggaatcggtctggcggttgcccggcgactcgccgacgagggctgccatgtgctgtgcgcggacatcgatggtgatgccgcggatgccgcggccaccaaaatcggttgtggcgcagcggcctgccgggttgacgtcagcgacgaacaacagatcatcgccatggtcgacgcctgtgttgccgcgttcggcggggtggacaagttggtcgccaacgccggtgtcgttcatctggcttcgctcatcgacaccaccgtcgaggacttcgatcgggtcatcgcgatcaatctccgcggcgcctggctgtgcaccaagcatgcggcaccgcggatgatcgagcgcggcgggggagccattgtcaacctgtcgtcgttagcgggccaggtagcggtgggcggcaccggcgcatacggcatgtcgaaggccggcatcatccagctcagccgcatcaccgccgccgaactgcgctcgtcgggcatccgctccaacacgctgctgcccgcattcgtcgacaccccgatgcagcagaccgccatggcaatgttcgacggggccctgggcgcggggggtgcgcgctcgatgattgcccggctgcagggccgcatggccgcaccggaggagatggccggcatcgtggtgttcctgctgtccgacgatgcgtcgatgatcaccggcaccacccagatcgccgacggcgggacgattgccgcgctgtggtga

SEQ ID NO: 28443 - DNA, 969 bp, Mycobacterium tuberculosis
atgaccggcaagctcgttgagcgggtgcacgcaatcaattggaaccggttgctcgatgctaaagatttgcaggtctgggaacgtttgaccggtaacttttggttgccggaaaagattccgctctccaacgacctggcatcttggcaaacgttgagttccaccgagcagcagacgacgatccgggtgttcaccggcttgaccctgctcgacaccgcgcaggcgacggtgggagcagtggccatgatcgacgacgcggtcaccccccacgaagaggcggtcctgaccaacatggcgttcatggagtcagtgcacgccaagagctacagctcgatcttctcgaccctgtgctcgaccaagcagatcgacgatgccttcgactggtcggaacagaacccttacctgcagcgaaaagcgcagatcatcgtcgactactaccgcggtgacgacgcgctcaagcgcaaagcatcgtcggtaatgctggagtccttcctgttctactccggcttctacctgcccatgtactggtcgtcgcggggtaagctcaccaacaccgccgatctgatccggctgatcatccgagatgaagccgtccacggctactacatcggctacaaatgtcaacgaggtttggccgacctgaccgacgccgagcgggccgaccaccgcgaatacacctgcgagctgctgcacacgctctacgcgaacgagatcgactatgcgcacgacttgtacgacgagttgggctggaccgacgacgttttgccctacatgcgttacaacgccaacaaggcgctagccaacctgggataccagcctgcattcgatcgtgacacctgccaggtgaacccggccgtgcgcgcagctctcgaccccggtgcaggggagaaccacgactttttctccggctccggaagctcatacgtaatgggcacccaccaacccaccaccgacaccgactgggacttctaa

SEQ ID NO: 28444 - DNA, 912 bp, Mycobacterium tuberculosis
atggtggatccgcagcttgacggtccacagctggccgcattggctgccgtggtcgaactgggcagcttcgatgcggccgcggagcgcctacatgtcaccccgtcggctgtcagtcagcgcatcaagtcgttggagcagcaggtcggccaggtgctggtggtcagggaaaagccatgtcgggcgacgaccgcaggtatcccgctgttgcggttggccgcgcaaacagcgttgctcgagtccgaggcgctcgctgaaatgggtggcaacgcgtcgctgaaacgcacgcggatcaccattgcggtaaacgccgattccatggcgacatggttttcggccgtgttcgacggtctcggcgacgtcctgctcgacgttcggatcgaggaccaggaccattccgcgcggctgctacgggagggtgtggcgatgggcgcggtgaccaccgagcggaacccggtgccgggctgccgggtgcacccgctgggtgaaatgcgctacctaccagtggccagcaggccattcgtccagcgccatctatccgacgggttcactgccgccgcggcggctaaagctccgtcactggcgtggaatcgtgacgatgggctgcaggacatgttggtgcgtaaggcctttcgtcgcgccatcaccagaccgacgcactttgtcccgaccacagagggcttcaccgccgcagcgcgcgccgggctgggatggggcatgttccccgagaagctggcagcatctccgcttgccgatggatcgttcgtacgggtctgcgacatacacctcgacgtccctctctattggcaatgctggaaactggacagtccgatcatcgcgcgaattaccgacacggtgagggcggcggcaagcggtctgtaccggggccagcaacgccgccgccgaccgggttga

SEQ ID NO: 28445 - DNA, 2718 bp, Mycobacterium tuberculosis
ttgtcggcgtcagtgtctgccacgacggctcatcatggcttgccagcacatgaagtggtgctgctgctggagagcgatccatatcacgggctgtccgacggcgaggccgcccaacgactagaacgcttcgggcccaacaccttggcggtggtaacgcgcgctagcttgctggcccgcatcctgcggcagtttcatcacccgctgatctacgttctgctcgttgccgggacgatcaccgccggtcttaaggaattcgttgacgccgcagtgatcttcggtgtggtggtgatcaatgcgatcgtgggtttcattcaagaatccaaggcagaggccgcactgcagggcctgcgctccatggtgcacacccacgccaaggtggtgcgcgagggtcacgagcacacaatgccatccgaagagctggttcccggtgaccttgtgctgttagcggccggtgacaaggttcccgccgatttgcggctggtgcgacagaccggattgagcgtgaacgagtcagcacttaccggcgagtcgacgccggttcacaaggacgaggtggcgttgccggagggcacaccggtcgctgatcgtcgcaatatcgcgtattccggcacattggtaaccgcgggccatggcgccgggatcgtcgtcgcgaccggcgccgaaaccgaactcggtgagattcatcggctcgttggggccgccgaggttgtcgccacaccgctgaccgcgaagctggcgtggttcagcaagtttctgaccatcgccatcctgggtctggcagcgctcacgttcggcgtgggtttgctgcgccggcaagatgccgtcgaaacgttcaccgctgcgatcgcgctggcggtcggggcaattcccgaaggtctgcccaccgccgtgaccatcaccttggccatcggcatggcccggatggccaagcgccgcgcggtcattcgacgtctacccgcggtggaaacgctgggcagcaccacggtcatctgcgccgacaagaccggaacgctgaccgagaatcagatgacggtccagtcgatctggacaccccacggtgagatccgggcgaccggaacgggctatgcacccgacgtcctcctgtgcgacaccgacgacgcgccggttccggtgaatgccaatgcggcccttcgctggtcgctgctggccggtgcctgcagcaacgacgccgcactggttcgcgacggcacacgctggcagatcgtcggcgatcccaccgagggcgcgatgctcgtcgtggccgccaaggccggcttcaacccggagcggctggcgacaactctgccgcaagtggcagccataccgttcagttccgagcggcaatacatggccaccctgcatcgcgacgggacggatcatgtggtgctggccaagggtgctgtggagcgcatgctcgacctgtgcggcaccgagatgggcgccgacggcgcattgcggccgctggaccgcgccaccgtgttgcgtgccaccgaaatgttgacttcccgggggttgcgggtgctggcaaccgggatgggtgccggcgccggcactcccgacgacttcgacgaaaacgtgataccaggttcgctggcgctgaccggcctgcaagcgatgagcgatccaccacgagcggccgcggcatcggcggtggcggcctgccacagtgccggcattgcggtaaaaatgattaccggtgaccacgcgggcaccgccacggcgatcgcaaccgaggtggggttgctcgacaacactgaaccggcggcaggctcggtcctgacgggtgccgagctggccgcgctgagcgcagaccagtacccggaggccgtggatacagccagcgtgtttgccagggtctctcccgagcagaagctgcggttggtgcaagcattgcaggccagggggcacgtcgtcgcgatgaccggcgacggcgtcaacgacgccccggccttgcgtcaggccaacattggcgtcgcgatgggccgcggtggcaccgaggtcgccaaggatgccgccgacatggtgttgaccgacgacgacttcgccaccatcgaagccgcggtcgaggaaggccgcggcgtattcgacaatctgaccaagttcatcacctggacgctgcccaccaacctcggtgagggcctagtgatcttggccgccatcgctgttggcgtcgccttgccgattctgcccacccaaattctgtggatcaacatgaccacagcgatcgcgctcggactcatgctcgcgttcgagcccaaggaggccggaatcatgacccggccaccgcgcgaccccgaccaaccgctgctgaccggctggcttgtcaggcggactcttctggtttccaccttgctcgtcgccagcgcgtggtggctgtttgcatgggagctcgacaatggcgcgggcctgcatgaggcgcgcacggcggcgctgaacctgttcgtcgtcgtcgaggcgttctatctgttcagctgccggtcgctgacccgatcggcctggcggctcggcatgttcgccaaccgctggatcatcctcggcgtcagtgcgcaggccatcgcgcaattcgcgatcacatatctacccgcgatgaatatggtgttcgacaccgcgccaatcgatatcggggtgtgggtgcgcatattcgctgtcgcgaccgcaatcacgattgtggtggccaccgacacgctgctgccgagaatacgggcgcaaccgccatga

SEQ ID NO: 28446 - DNA, 1323 bp, Mycobacterium tuberculosis
atgagacgcccgctagacccacgcgatattccagatgagctgcggcgacggctggggctcttggatgcggtggtgatcgggcttgggtccatgatcggtgccggaatctttgccgccctggccccggccgcgtacgcggccggttctgggttgttgctcgggttggcagtggccgcggtggtggcctactgcaatgcgatctcgtcggcgcggctggccgcgcgctacccggcctcggggggcacctatgtgtatggccggatgcggctgggcgacttctggggatacctggcgggctggggctttgtggtcggcaagacggcatcgtgtgcggcgatggcgttgacggtcggcttctatgtgtggcccgcgcaagcgcacgcggtggccgtcgccgtggtggtggcactgaccgcggtgaactacgccgggatacagaagtccgcctggctcacccggtcgatcgtcgccgtggtgttggtggtcttgaccgcagtcgtggtcgccgcctatggctccggcgctgcggacccggcgcgactcgatatcggtgtagatgcacacgtctgggggatgctgcaggcggccggcctgctgtttttcgcgttcgccggctatgcccgcatcgccacgctgggggaggaggtccgcgacccggcccgcacgatcccacgcgccatcccgctggcgctgggcatcaccctggcggtgtatgccctggtcgccgtggccgtgatcgctgtgttgggtccgcagcggctcgcgcgggccgccgccccgttgtcggaggccatgcgggtcgcgggggtgaactggctgattcccgtcgtgcagataggggccgcggtggccgcattgggctcgctactggccttgattctcggggtctcccgcaccaccttggcgatggcacgcgaccggcacctaccgcgctggctggccgccgtgcaccctaggttcaaggtgccctttcgtgccgaactggtggttggcgcggtggtggcggcgctggcggcgacagcggatatccgtggtgcgatcggcttttcgtccttcggtgtgctggtctactacgcgatcgccaacgcctccgccttgactctggggctcgacgagggccggccccgccgcctgattccgctggtgggactgatcggctgcgtagtcctggcgttcgcgctgccactctcctcggtggccgccggggccgcggtgctcggtgtcggtgtggcggcatacggtgtgcgccgcatcatcactcgtcgagcacgacagactgattctggtgatacccaacgaagtggtcatccgtccgcaacctag

SEQ ID NO: 28447 - DNA, 3984 bp, Mycobacterium tuberculosis
gtgcgctgtggcatcgtcgtcaatgtgaccggaccgccgcccaccatcgaccggcgctaccacgacgctgtcatcgtcggcctcgacaacgtggtcgacaaggccacgcgagtgcacgccgcggcatggacgaagttcttggatgactacctcacccgacgaccccagcggaccggcgaagaccattgccccctcacccacgacgactaccgccgcttcttggccggcaaacccgacggtgtagccgacttcttggccgcccgcggaatcaggctgccgccgggctccccgactgatctcaccgacgacaccgtgtacgggctgcaaaacctcgagcgccagacattcctgcaactgttgaacaccggtgtccccgagggcaagtcgattgcctcgttcgcacgtcggctgcaggttgccggtgtccgcgtggccgcccacacctcccaccgtaactacgggcacacgctggatgccaccggcctggcagaagtgtttgccgtctttgtcgacggcgccgtcaccgccgagctcgggctaccggccgagcctaacccggccggcctgatcgagacggcgaagcggctgggagcaaaccccggtcgctgtgtggtcatcgacagctgccagaccggtctgcgcgccggccggaacggcggattcgcgctggtgattgccgtcgacgcgcacggcgatgccgagaacctgctgtccagcggagccgacgccgtggtcgcagacctggccgctgtcacggtgggaagcggcgacgccgccatctccacgattcccgacgccctgcaggtctacagccaattgaaaagactactgaccggccgacgaccagcggtgtttctcgatttcgacggcacgttatccgatatcgtcgagcgccccgaagcggcaacgctcgtcgacggcgcagcagaagcgttgcgagcgctggcggcccagtgtccggtggcggtgataagcggacgcgacctggccgacgttcgcaaccgggtcaaagtcgacgggctgtggctggccggcagccacggcttcgaattagtggcgccagacggcagccatcaccaaaacgccgccgccactgcagctatcgacggattggccgaggcggcagcgcaattggccgacgcactccgcgaaatcgccggagcagtagtggaacacaaacgcttcgcagtcgcagtgcactatcgcaacgttgccgacgacagcgtcgacaacctgattgcggcggtgcgccgactcggacacgcagcagggctgcgtgtcaccaccggccgcaaagtcgtcgagcttcgcccggatatagcctgggacaagggcaaagcactcgattggatcggtgagcggctcggcccggccgaagtcggccccgacctacggttgccgatctacatcggcgacgaccttaccgacgaagatgcctttgatgccgtgcgtttcaccggtgtcgggattgtggtgcgccacaacgaacacggtgatcgacggtctgccgctacctttcgtctcgaatgtccttacaccgtttgccaattcctctcccagctggcttgcgatctgcaggaggcagtgcagcacgacgatccgtggactctggtcttccacggctacgaccccggccaggagcggctgcgtgaagcgctgtgcgcggtgggcaacggctacctgggttcgcggggctgcgcacccgaatcagcggaaagcgaggcacattacccgggcacctatgtggccggggtgtacaaccagctcactgaccacatcgaagggtgcaccgttgacaacgaaagcctggtcaacctccccaactggttgtcgctgaccttccgtatcgacggcggagcatggttcaacgtcgatacggtcgagttgttgtcctaccggcagacgttcgacctacgccgtgccacgttgacccgcagcttgcgattccgagacgccggcggacgagtgaccacgatgacccaggagcggttcgcgtccatgaaccggcccaacctggtcgcactgcaaactcggattgaatccgaaaattggtcgggcacagttgatttccggtcactagtcgacggaggtgtgcataacaccctggtggaccgctatcggcaactatccagccaacaccttaccaccgccgagatagaagtcctggcggactcggtgttgttgcgcacccagacgtcgcaatcgggtatcgcgatcgcggtcgccgctcgcagtaccctgtggcgcgatggccaacgggtcgacgcgcaatatcgggtcgccagggacaccaaccgcggcggccatgacatccaggtcaccctgtcagcggggcaatcggtcacgctggaaaaggtcgcgacgatcttcacgagccgggacgccgcgacattgacagcggcaataagcgcacagcgctgtctaggtgaggccggtcgctatgccgagctctgtcaacagcacgtccgcgcgtgggcacggctgtgggaacgatgcgccatcgatttgaccggcaacaccgaggaattgcggctcgtgcgactgcacctactgcacctgctacagaccatttcgccgcataccgctgagctcgacgccggggtcccagcgcgcgggctgaacggagaggcctaccgcgggcatgtcttctgggatgcgctgttcgtcgctccggtgctcagcctgcggatgccgaaggtggcgcgatcgctgctggactatcggtaccgacgactacccgcggcccgccgagcggcgcaccgggcgggccaccttggcgcgatgtatccctggcagtcgggcagcgacggaagcgaagtgagtcagcagctgcacctcaatccacggtccgggcggtggactcccgatcccagtgatcgtgcccatcacgtcggtctagcggttgcctacaacgcgtggcactactaccaagtgaccggtgaccgccagtatctcgtcgactgcggggcagagctgctggttgagatcgcacgcttctgggtaggcctggccaagttggatgacagtcgcggccgctacctgatccggggagtaatcggtcccgacgaattccattcggggtatcccggcaacgagtacgacggaatagacaacaatgcgtacaccaacgtgatggcggtatgggtgatcctgcgggcaatggaggcgctggacctgctaccgctgaccgatcgccgccatctgatcgaaaagctcgggctgacaacgcaggagcgcgaccaatgggacgacgtgagccgacgcatgttcgttccattccacgacggcgtgatcagccagttcgagggctattcggaactggcggaactggattgggatcactatcggcaccgatacggaaacatccaacgactcgaccggatcctggaagccgagggcgacagcgtgaacaactaccaggcgtccaagcaagccgacgcgctgatgctgctctacctgctgtcttccgacgagctgatcggcctgttggcccggcttggctaccgcttcgcgcccacacaaatcccaggcaccgtggattactatcttgcccgcacctcggatggatctaccctgagcgctgtcgtgcatgcgtgggttctcgcccgcgccaaccggagcaatgccatggagtacttccgtcaggtcctgcgctccgatatcgccgacgtccagggcggcacaacccaggaaggaattcacctggcggccatggctggcagcatcgacctgctgcagcgttgctattccggattggaactgcgcgacgaccggctggtgttgagcccgcaatggccggaagcacttggaccacttgagtttccgtttgtgtaccgccgccaccagctgagcctgcgaatcagtggccgaagcgccacattgaccgcagaaagtggagacgccgagccaattgaggtcgaatgccgtggccacgtgcagcggctacggtgcgggcacaccatcgaagtcggttgcagcaggtga

SEQ ID NO: 28448 - DNA, 300 bp, Mycobacterium tuberculosis
gtggcgccggggatgaagtgggcagccaagaccgaccacttggcgatcgttctactcccgcgtcaccatcgccggcattcccgacgaggccgagcgctacctgctcgctcccgctcggcgctcggctggatcatcgagcgctaccgcgtcaccaccgacaaagcgtcgggcatcgtcaacgaccccaacgactggtgcgacgaacacgacgatcccacctacatcgtcgacctcatcaagaaggtgaccaccgtcagcgtcgagaccatgaagatcgtcgacggcctcgccggcggttaa

SEQ ID NO: 28449 - DNA, 1020 bp, Mycobacterium tuberculosis
atgacggagccagcggcgtgggacgaaggcaagccgcgaatcatcactttgaccatgaaccccgccttggacatcacgacgagcgtcgacgtggtgcgcccgaccgagaaaatgcgttgtggcgcacctcgctacgatcccggcggcggcggtatcaatgtcgcccgcattgtgcatgtcctcggcggttgctcgacagcactgttcccggccggcgggtcgaccgggagcctgctgatggcgctgctcggtgatgcgggagtgccatttcgcgtcattccgatcgcggcctcgacgcgggagagcttcacggtcaacgagtccaggaccgccaagcagtatcgtttcgtgcttccggggccgtcgctgaccgtcgcggagcaggagcaatgcctcgacgaactgcgcggtgcggcggcttcggccgcctttgtggtggccagtggcagcctgccgccaggtgtggctgccgactactatcagcgggttgccgacatctgccgccgatcgagcactccgctgatcctggatacatctggtggcgggttgcagcacatttcgtccggggtgtttcttctcaaggcgagcgtgcgggaactgcgcgagtgcgtcggatccgaactgctgaccgagcccgaacaactggccgccgcacacgaactcattgaccgtgggcgcgccgaggtcgtggtggtctcgcttggatctcagggcgcgctattggccacacgacatgcgagccatcgattttcgtcgattccgatgaccgcggttagcggtgtcggcgccggcgacgcgatggtggccgcgattaccgtgggcctcagccgtggctggtcgctcatcaagtccgttcgcttgggaaacgcggcaggtgcagccatgctgctgacgccaggcaccgcggcctgcaatcgcgacgatgtggagaggttcttcgagctggcggccgaacccaccgaagtcgggcaggatcaatacgtttggcacccgatcgttaacccggaagcctcgccatga

SEQ ID NO: 28450 - DNA, 2625 bp, Mycobacterium tuberculosis
gtgaagcttggcgcctgggtggcagcgcagctgcccaccacacggaccgcggtgcggacgcggctgacgcgcctggtggtcagcatcgtggccggtctgctgttgtatgccagcttcccgccgcgcaactgctggtgggcggcggtggttgcgctcgcattgctggcctgggtgctgacccaccgcgcgacgacaccggtgggtgggctgggctacggcctgctattcggcctggtgttctacgtctcgttgttgccgtggatcggcgagctggtgggccccgggccctggttggcactggcgacgacgtgcgcgctgttccccggcatcttcggtctgttcgccgtcgtggtacgcctgttgccgggttggccgatctggttcgcggtggggtgggcggcgcaggagtggttgaagtcgatccttccgttcggtggatttccgtgggggtcggtcgccttcggtcaagccgaaggcccgctgttgccgttggtccagctcggcggtgtggcgctgctgtcaacgggggtagcgctggtcggatgcggcttgaccgcgatcgcgctggaaatcgagaagtggtggcgaaccggtggtcagggggatgcgccgccggcggtggtgctgccggccgcgtgcatatgcctggtcttgttcgccgccatcgtcgtctggccgcaggtgcggcatgcgggtagcggatcgggcggcgaacccacggtcaccgtcgcggtggtccagggcaatgtgccccggctcggtctcgacttcaatgcgcaacgtcgggcggtgctagacaaccacgttgaggagacgttgcggctggccgccgacgtgcatgcggggctggcgcagcaaccccagttcgtcatctggccggagaactcgtcggacatcgacccgttcgtcaaccccgacgccggtcaacggatctccgcagcggccgaagcgatcggcgcgccgatcctgatcggcaccctgatggatgttccgggccgtcctcgtgaaaatccggagtggaccaatacggccattgtctggaatcccggcaccgggccggccgaccgccacgacaaggcaatcgtgcagcccttcggcgagtacctgcccatgccgtggctgtttcggcacctctccggctacgccgaccgcgccggccacttcgtgcccggcaacggcaccggtgtggtgcgcatcgctggggtcccggtcggggtggctacctgctgggaggtgatcttcgaccgcgccccgcggaagtcgattctgggcggcgcgcagctgttgaccgtgcccagcaacaacgccaccttcaacaagacaatgagcgaacagcagctggcattcgccaaggtacgggccgtcgagcacgacagatacgtggtggttgccggtaccactgggatcagtgcggtgatagcaccagacgggggtgagctgatccggaccgactttttccagcccgcatacctggacagccaggtgcgcctcaagacgaggctgacaccggcaactcgatggggtccaatcctgcaatggattctcgtcggggcagccgcagcggtcgttctcgtcgccatgcggcagaatgggtggttcccgcgtccgaggcgctcggagccaaagggcgaaaatgacgattccgatgcgcccccgggcagatctgaggcctccggtccgccggccctgagtgaatccgacgacgaactcattcagcccgagcagggcggccgacactcatccggtttcggacgacacagagcaacatcgaggagttacatgaccaccggccagccggcgcccccagccccgggtaaccgtcccagccagcgcgtcctggtgatcattcctacgttcaacgagcgggagaaccttccggtgatccaccggcggctgacgcaagcatgccccgccgtgcacgtgctggtcgtcgacgacagcagccccgacggcaccggccagctcgccgacgagctggcgcaggccgatcccggccgcacccacgtgatgcaccgcaccgccaagaacggtttgggcgcggcgtacctggcaggtttcgcctgggggttgagccgggagtattcggtgctggtcgagatggatgccgacggcagccacgcgcccgaacagctgcagcgcctgctggacgccgtcgacgctggtgccgatcttgcgattggttcgcgctatgtcgcgggggggacggtacgaaactggccttggcggcggctagtcctgtccaaaaccgctaacacctattcgcgcctggcgctcggaatcgggatccacgacatcaccgctggctaccgcgcgtaccgccgcgaagcactcgaagcgattgacctggacggcgtggactccaagggctactgcttccagatcgatctcacctggcgcacggtgagcaacgggttcgtcgtcaccgaggtgccgattacctttaccgagcgcgagctcggtgtgtccaagatgagcgggtccaacattcgtgaggcgctggtcaaagtcgcccgctggggcatcgagggacgcctttcgcgctcggaccacgcacgcgcacgaccggacattgcccggccgggagcagggggttcccgggtcagccgcgccgacgtgaccgaatga

SEQ ID NO: 28451 - DNA, 1605 bp, Mycobacterium tuberculosis
gtgagccagattcccgtcaaactcctggtcaacggccgggtgtacagccccacccaccccgaagccaccgcgatggcggtgcgcggcgatgtcgtcgcctggttgggcagcgacgacgtcggccgcgaccagttcccagacgctgacgtgcaggatctcgacggccgattcgtggcgccggggttcgtggacagccacatccacctgaccgcgaccggtctgatgctcagcgggctggacttgcggcccgcgacctcacgcgcgcagtgcctacggatggtcgccgactatgcggccgaccatccgggtcagccgctgtggggtcacggttgggatgagtcggcctggccggagaatgctgcgcccagcaccgccgacctagacgcggttctcggtgactgtcccgcctacctggccaggatcgactcgcactccgcgttggtctcctccggactgcggcggctggtccccgagctggcggcggcaaccggttacacggcccagcggccgctgaccggtgatgcccaccacctagcccgggccgccgcacgctacctcttgaccgacgtccagcttgccgacgcccgggccgtggcgctgcaggccatagccgcggccggcgtcgtcgccgtgcacgaatgcgccggtccggaaatcggcgggctcgacgactggttgcggctgcgtgcactcgagcacggagtcgaggtgatcgggtactggggtgaggccgtggccacgccggcccaggcccgtgacctggtgaccgagaccggggctcgagggctggccggtgatttgttcgtcgacggggcgctcgggtcgcgcaccgcctggctgcacgagccctacgcggacgcccccgactgcatcggcacctgccaccttgacgtagacggcatcgaagcgcacgtacgagcatgcaccaaggccgaagtgaccgccggcttccacgtcatcggcgacgctgcggtgtcggccgcagtcgccgccttcgaacgggtggtggcagatctcggcgtggttgccgtcgcccgctgcggccaccgcctcgagcatgtggagatggtcaccgcggaccaggccgcgaagctgggcgcttggggggtcatcgccagtgtgcagcccaacttcgatgagctgtggggcggtggcgacggcatgtacgctcgccgcctgggcgcccagcgaggcagcgaactcaacccgctggcgctgttagcatcccaaggcgtgcccctcgcgcttggctccgacgcgcccgtcacgggctttgatccctgggccagcgtgcgcgcggcggtcaatcaccgcacgccgggcagcggggtatcggcgcgggcggcgtttgctgccgcgacccgcggcggctggcgggccggtggtgttcgagacggccggatcggcaccctggtgccgggcgcgcccgcgtcctacgcgatatgggacgccggggactttgacgtcgacgcaccgcgcgacgcagtccagcgctggtctaccgacccgcgctcccgggtacccgcattgccgcggctgggcccgaccgacgccttgccgcgttgccgccaaaccgtgcatcgaggtgcggtcatctatggctag

SEQ ID NO: 28452 - DNA, 306 bp, Mycobacterium tuberculosis
gtggccaagaagtccaagatcgtcaagaatcagcggcgggcggccaccgtcgcccgttacgcatcgcgtcgcaccgcgctcaaagacatcatccgatccccatcgagcgcccccgaacagcgcagtaccgcccagcgagcccttgcccgccagccccgcgacgccagtcccgtgcggttacgcaaccgcgacgccatcgacggccggccgcgcggacatctccgcaaattcgggctctcccgtgtgcgggtccgccaactggcccacgacggacacctgcccggtgtccggaaggccagctggtag

SEQ ID NO: 28453 - DNA, 165 bp, Mycobacterium tuberculosis
atggcgcgcaccgacatccggccgattgtgaagctgcgttccacggcgggcaccggctacacctacaccacccgcaagaaccgccgtaatgaccccgaccgtctcatcttgcgcaaatacgacccgatcctgcggcgtcacgtggactttcgcgaggaacgctga

SEQ ID NO: 28454 - DNA, 237 bp, Mycobacterium tuberculosis
ttgtccgcccactgccaagtcaccggccgcaagccgggatttggaaacaccgtctcgcactcccatcgccgaagccgtcggcgatggtcgcccaacattcagcaacgaacgtattacctgccctccgagggccgtcgcattcggctgcgggtgtccacgaagggtataaaggtcatcgaccgcgacggtatcgaagcggtcgtggcccgcctgcgtcgccaggggcagcggatctga

SEQ ID NO: 28455 - DNA, 756 bp, Mycobacterium tuberculosis
atgacggtctatttcatcggagcgggccccggcgccgccgacctaatcaccgtccgcggccaacggctcctgcaacgatgcccggtgtgcctgtatgcgggttcgatcatgcccgacgacctgttggcgcagtgtccgcccggcgcgacgattgtcgacaccggtccgctgaccctcgaacaaatcgtgcgcaaacttgccgacgccgacgccgacggccgcgacgttgcccggctgcattccggcgacccgtcgctgtacagcgcgctggccgaacagtgccgcgaactcgacgcgctgggcatcggctacgaaatcgtgccgggcgtaccggcttttgccgcagccgcggcggcgctaaagcgcgaactcaccgtgccgggcgtggcgcagacggtgacgctcacccgggtggcgacgctgtccacacccataccgcccggtgaggacctggccgcgctcgcccgatcccgcgccactctggtcttgcacctggccgcagcccagatcgacgccatcgttccgcgactgctagacggtggttaccgacccgaaacgccggttgcggtggtggctttcgcgagttggccgcaacagcggacgctacgcggcacgttggccgatatcgccgcgcggatgcacgatgccaagatcaccaggaccgccgtgatcgttgttggcgacgtgctgaccgctgagggctttaccgacagctacctatattcggtggcacggcacggtcggtatgcacagtga

SEQ ID NO: 28456 - DNA, 939 bp, Mycobacterium tuberculosis; identical to SEQ ID NO: 28266

SEQ ID NO: 28457 - DNA, 876 bp, Mycobacterium tuberculosis
gtgacctggccgttgcccgatcgcctgtccattaattcactctctggaacacccgctgtagacctatcttctttcactgacttcctgcgccgccaggcgccggagttgctgccggcaagcatcagcggcggtgcgccactcgcaggcggcgatgcgcaactgccgcacggcaccaccattgtcgcgctgaaataccccggcggtgttgtcatggcgggtgaccggcgttcgacgcagggcaacatgatttctgggcgtgatgtgcgcaaggtgtatatcaccgatgactacaccgctaccggcatcgctggcacggctgcggtcgcggttgagtttgcccggctgtatgccgtggaacttgagcactacgagaagctcgagggtgtgccgctgacgtttgccggcaaaatcaaccggctggcgattatggtgcgtggcaatctggcggccgcgatgcagggtctgctggcgttgccgttgctggcgggctacgacattcatgcgtctgacccgcagagcgcgggtcgtatcgtttcgttcgacgccgccggcggttggaacatcgaggaagagggctatcaggcggtgggctcgggttcgctgttcgcgaagtcgtcgatgaagaagttgtattcgcaggttaccgacggtgattcggggctgcgggtggcggtcgaggcgctctacgacgccgccgacgacgactccgccaccggcggtccggacctggtgcggggcatctttccgacggcggtgatcatcgacgccgacggggcggttgacgtgccggagagccggattgccgaattggcccgcgcgatcatcgaaagccgttcgggtgcggatactttcggctccgatggcggtgagaagtga

SEQ ID NO: 28458 - DNA, 1194 bp, Mycobacterium tuberculosis
atgagcctttccgtccgtcgccccccggcggcccgagcagcggccattgtggaggctgaaagctggttcttgaagcgtggtctgccctcggtgctgaccatgcggggccggtgccgtcggctgtggccgcggtcggctccgatgttggccgcctgggcggtggtcgagggctgcctcatggccgtcttcttcgtcaccgacggcggcgaagtcttcatcagcgcgacgccgacgacagcgcaatgggtgatcctggcgctgctcgcggttgctcttccgctggcctccctcgtcggctggttggtgtcgcagatatcaagcgggcgtggccaagcggcggtggcgaccatggcggtggccttcgcggccgcatccgacgtcatcgaatccggcccgatccagctgttgcggaccgccgtcgtggtgggcctggtgctgctgcagaccggctgcggcgtcgggtcggtgcttggctgggcggtgcggatgacgctggagcaccttgcgacggtcggcacgctggcggtccgggccctgccgatcgtgctactgacggcattggtgttcttcaacacctatgtctggctgatggccgccaacatcaacggcgagcggctgacgctggcgatggtttttctgctcgccatcgccggggcgttcgtcgtgtccaagacggtggaacgggtgcgtccgctgcttcgctcaacgacggtgatgccccaaggcagccaaagcctggccggcacacccttcgcgaccatgggcgacccctctcccggcttccccctcacccgggccgaacgcctcaacgtggtcttcctgctggcggcctcgcaactcgtcgagatcctggtagtggcgtcggtcggcgccgcgatatacctcgttctgggcatgatcattctcactccgccgctgcttcgggaatggacgcactacgattcgatgaccacgacggtgctcggcatgacgttcccggcgccggattcgctcatccgtatgtgtcttttcctgggcgcgctgacgttcatgtacatcagcgcccgcgcggtcgacgacgccgagtaccgcgcgatgttcctcgaccctctgatcgacgacctgcacaccgcgctgctcgcgcgcaaccgctaccgcaacaacgtggtgaccgcgccgtgcgccggtgttgacgccggtcacgtcgatgactag

SEQ ID NO: 28459 - DNA, 855 bp, Mycobacterium tuberculosis
atgctgcgggtcgcggttcccaacaagggtgcgctgagcgagccggccaccgagatcctcgcggaggccggctaccgccgccgcaccgattccaaagacttgaccgtcatcgatccggtcaacaacgtcgagttcttcttcttgcggcccaaagacattgccatatatgtcggttcgggagagctcgacttcgggatcaccggacgcgacctggtgtgcgattccggtgcacaggttcgggaacgcctggcgctgggcttcgggtcgtccagcttccgctatgccgctcccgccgggcggaactggacgactgccgacctagccgggatgcggatcgccaccgcctacccgaatctggtccggaaagatctggccaccaagggaatcgaagcaacggtcatcagacttgatggtgccgtggagatctcggtgcagctcggggtggccgatgccatcgccgatgtggtggggtcgggtcgcacgctgagccagcacgacctggtggcctttggtgagccgctgtgcgattcggaggcggtgctcatcgagcgggccggtacggacggccaagaccagaccgaggcgcgcgatcaactggtcgctcgggtgcagggggtggtcttcggccagcagtatctgatgctcgactacgattgcccgcgctcggcgttgaagaaggccacggcgatcacgccggggctggagtcaccgaccatcgccccgctggccgacccggactgggtggcaatccgcgccctggtgccgcgccgggacgtcaacggcatcatggatgagctcgctgcgatcggggccaaagcgattctggcgtcggacatcaggttctgccgattctga

SEQ ID NO: 28460 - DNA, 3579 bp, Mycobacterium tuberculosis
gtgactgcggccgacaagcacctctacgacaccgatctgctcgacgtcttgtcgcagcgagtgatggtcggcgacggtgcaatgggaacccaactacaggccgcggacctcacgctcgacgacttccgcggcctggagggctgcaacgagatcctcaacgaaacccgccctgacgtgctggaaaccattcaccgcaactatttcgaagcgggcgccgacgccgtcgagacgaacacgtttggctgcaacctgtccaacctcggcgactacgacatcgccgacaggatccgcgatctatcacagaagggcaccgcgatcgcacgccgggtggccgacgagctgggcagtcccgaccgcaagcgctacgtgctggggtcgatggggccgggcaccaagctgccgactctgggccacaccgaatacgcggtgatccgcgacgcctacaccgaggccgcgctgggcatgctggacggcggagccgacgccatcctggtggaaacctgccaggacctactgcagctgaaggcggcggtgttggggtcgcggcgggcgatgacgcgggccgggcggcacattccggtgtttgcccacgtcaccgtcgagaccaccggcaccatgctgctgggcagcgagatcggggcggcgttgaccgctgtcgagccgctcggtgtggacatgatcggcttgaactgcgcgacgggtccggccgagatgagcgagcacctgcgccacctgtcccggcacgcccgcatcccggtgtcggtgatgcccaacgccgggttgccggtgctgggcgccaagggcgccgaatatccgttgctgcccgacgaattggccgaggcgctggccggcttcatcgccgagttcgggctctcgctggtcggtggctgctgcggcaccaccccggcccatatccgcgaagtggctgccgcggttgcgaacatcaagcgtcccgagcgacaggtcagctacgagccgtcggtgtcgtcgctgtacaccgcaatcccgttcgcccaggacgcctcggttctggtgatcggggagcgaacgaacgccaacggctccaagggttttcgtgaggcgatgatcgccgaggactaccagaagtgcctggacatcgccaaggaccagacccgcgacggcgcccacctgctggacctgtgtgtggactacgtgggccgcgacggtgtggccgacatgaaggcgctggccagccggctggccacgtcctcgacgctgccgatcatgctggactccaccgaaaccgcggtgctgcaggcgggtttggagcatctgggtggccgttgcgcgatcaactcggtgaactacgaggacggcgacggcccggaatcgcgctttgccaagaccatggcgctggtcgccgagcacggcgcggcggtggtcgcgctgaccatcgacgaagagggccaggcccgcaccgcgcagaagaaggtcgagatcgccgagcggctgatcaacgacatcaccggcaactggggcgtcgacgaatcatccatcctcatcgacaccttgacgttcaccatcgccaccggtcaggaggagtcccgccgcgacggcatcgagaccatcgaggcgatccgcgaactgaaaaagcgccacccggatgtgcagaccacacttggtctgtccaacatctcgtttggtctcaatcccgcagcgcgccaggtgctcaactcggtgttcctgcacgaatgccaagaagcggggctggattcggcgatcgtgcacgcgtcgaagatcctgccgatgaaccggattcccgaggagcaacgcaacgtcgccctggatctggtctacgaccgccgccgcgaggactacgatccgctgcaggagctgatgcggctgttcgaaggcgtgtcggcggcctcctcgaaagaggaccgactggctgaactagctgggctgccgctgttcgaacggctggcccaacgcatcgtcgacggcgagcgcaacggcctggacgccgatctcgacgaggcgatgacgcaaaagccgccgcttcagatcatcaacgaacatctgctggccggcatgaagacggtcggcgagctcttcggctccggccagatgcagctgccgttcgtgctgcagtcggcggaggtaatgaaagccgccgtcgcgtatctggaaccgcacatggagcgctcggacgacgattcgggcaagggacgcatcgtgctggccaccgtcaagggcgacgtgcacgacatcggcaagaacctggtcgacatcatcttgagcaacaacggctacgaagtggtcaacatcggcatcaagcagccaatcgccaccatcctcgaagtcgccgaggacaagagcgccgacgtggtcggcatgtcgggcctgctggtgaagtcgaccgtggtgatgaaggaaaacctcgaggagatgaacacccggggagtcgccgaaaagttcccggtgctgctcggcggcgcggcgttgacgcgcagctatgtcgaaaacgacctggccgagatctaccagggcgaagtgcattacgcgcgagacgctttcgagggcctgaagttgatggacaccatcatgagcgccaagcgcggcgaggcgcccgacgaaaacagcccggaagccattaaggcgcgtgagaaagaagccgaacgtaaggcccgccaccagcgatccaaacgcattgccgcacagcgcaaagccgccgaagaaccagtcgaggtgcccgaacgctccgatgtcgcggccgacatcgaggtcccggcgccgccgttctggggttcgcggatcgtcaagggcctggcggtggccgactacaccggtctgctcgatgagcgcgcattgtttttgggccagtggggtttacgcggccagcgcggcggtgagggtccgtcctacgaagatctcgtcgagaccgagggccggccgcggctgcggtactggttggaccggctgtccaccgacggcatcttggcgcacgccgccgtggtgtacggctatttcccggcggtgtccgagggcaacgacatcgtggtgctcaccgagcccaagcccgacgccccggtgcgctaccggtttcacttcccgcgccagcagcgcggtcggtttttgtgcattgccgatttcatccgctcgcgggagctggccgccgagcgtggcgaggttgacgtgctgccgttccagctggtgaccatgggtcagccgatcgcggatttcgccaacgagctgttcgcgtccaacgcctaccgcgactacctggaggtgcacggtatcggcgtgcagctcaccgaggcgctggccgagtactggcaccggcggatccgtgaggagctcaagttctccggggatcgggcgatggcggccgaggatccggaggcgaaagaagactatttcaagctcggctaccgcggtgctcgctttgccttcggctacggcgcatgcccggatctggaggaccgcgccaagatgatggcgctgctggagcccgaacgcatcggtgtgacgttatccgaggaattacagctgcatcccgaacagtcgaccgacgcgttcgtcctgcaccatccggaagccaagtacttcaacgtttaa

SEQ ID NO: 28461 - DNA, 783 bp, Mycobacterium tuberculosis
atgccgcttacacctgccgacgtccacaatgtggcgttcagtaagccgcctatcggcaaacgtgggtacaacgaagatgaggtcgacgccttcctcgacctggtggaaaacgagctgacccgcctgatcgaagagaactccgatctgcgtcagaggatcaacgagctggatcaagagctcgccgcgggcggcggtgccggcgttacgccgcaggccacccaggcaatcccggcgtatgagcccgaaccgggcaagccggcgccggcggcggtctcggcggggatgaacgaggaacaggccctgaaggcggcgcgagtgctgagtctggcccaagacaccgccgaccggcttacaaacaccgccaaagccgagtcggacaagatgctggccgatgcccgtgccaatgcggagcagatcctcggtgaggcccgacacaccgccgacgccacggtcgccgaggcccgccagcgtgccgatgccatgctggccgatgcccaatcccgatccgaggcccagttgcgccaggcgcaggagaaggccgatgccttacaggccgatgcggaacgcaagcactccgagatcatgggaaccatcaaccagcagcgcgcggtgcttgaaggccgcctcgagcagctgcgtaccttcgaacgtgagtaccgcaccaggctcaagacctacctggaatcgcagctggaggaactcggccagcgtggatcggcggcgccggtcgattccaatgcggatgccggtggcttcgatcaattcaaccggggcaaaaactag

SEQ ID NO: 28462 - DNA, 726 bp, Mycobacterium tuberculosis
gtgaatagtcactgtagtcacaccttcatcacagacaacagatctcccagggctagaaggggtcacgcaatgagcacactgcacaaggtcaaggcctacttcggtatggctcccatggaggattacgacgacgagtactacgacgaccgcgctccctcgcgcgggtatgcgcggccccgattcgacgacgactacggccgctacgatgggcgcgactacgacgacgcgcgcagcgattcacgcggtgacctgcgcggtgagccggccgactatccaccaccgggatatcgcggcgggtacgcggacgaaccacgtttccggccccgggagttcgaccgcgcggagatgacacggccgcgcttcggatcgtggctgcgcaactccacccgcggcgcgctagcgatggacccccgccggatggcgatgatgttcgaggatggccatccgctctcgaagatcaccacgctgcggcccaaggactacagcgaggctcgcaccatcggtgagcggttccgcgacggcagcccggtcatcatggatctggtgtcgatggacaacgccgatgccaagcggctggtcgatttcgcggccggcctggccttcgcgctgcgcggctcgttcgacaaggtcgcgaccaaggtgttcctgctctcgcctgcagacgtcgatgtgtcccccgaggagcgccgcaggatcgccgaaaccgggttctacgcctaccaatag

SEQ ID NO: 28463 - DNA, 777 bp, Mycobacterium tuberculosis
atggcggcggatctttcggcgtatccagaccgcgaatcggaattgacgcatgcgttggcggcaatgcgatcgcgacttgcggcggccgcggaggcggcgggtcgcaatgtcggcgaaattgaacttctaccgattaccaaattctttccagcaaccgatgttgcgattttgtttcgattgggttgtcggtccgttggcgaatcgcgcgaacaggaagcttcagccaagatggccgaacttaatcggttgttggcggctgccgagttgggtcactcggggggtgtgcactggcacatggtgggccggattcaacgcaacaaagccgggtcgctggctcgctgggcgcacaccgctcactcggtggacagctcgcggttggtgaccgcgctggatcgggcggttgttgcggcgctggccgaacaccgtcgtggcgagcggctgcgggtttacgtccaggtcagcctcgacggtgacggatcccggggcggcgtcgacagcacgacgcccggcgccgtagaccggatttgcgcgcaggtgcaggagtcagagggcctcgaactggtcgggttgatgggcattccgccgctggattgggacccggacgaggcctttgaccggctgcaatcggagcacaaccgggtgcgtgcgatgttcccgcacgcgatcggtctgtcggcgggcatgtccaacgaccttgaagtcgccgtcaaacatggttcgacctgtgtgcgtgtcggtaccgcgctattgggtccgcggcggttacggtcaccgtga

SEQ ID NO: 28464 - DNA, 1140 bp, Mycobacterium tuberculosis
atgacccccccgcacaactacctggccgtcatcaaggtcgtgggtatcggtggtggcggtgtcaacgccgtcaaccgaatgatcgagcagggcctcaaaggcgtggaattcatcgcgatcaacaccgacgcccaggcgttgttgatgagcgatgccgacgtcaaactcgacgtcggccgcgactccacccgcgggctgggcgccggcgccgatccggaggtcggccgtaaggccgccgaggacgccaaggacgagatcgaagagctgctgcgcggtgccgacatggtgtttgtcaccgccggcgaggggggcggaaccggcaccgggggggcacccgtcgtcgccagcatcgcccgcaagctgggcgcgttgaccgtcggtgtggtcacccggccgttctcgttcgagggcaagcgacgcagcaatcaggccgaaaatggcatcgcggcgctgcgggagagttgcgacaccctcatcgtgattcccaacgaccggttgctgcagatgggagatgccgcggtatcgctgatggatgctttccgtagcgccgacgaggtgctgctcaacggcgtgcagggcatcaccgacctgattaccaccccgggtctaatcaacgtcgacttcgccgacgtcaagggcatcatgtccggtgccggcaccgcactgatgggcatcggctcggcccggggcgaaggccggtcgctcaaagcggccgagatcgccatcaactcgccgttgctggaagcctcgatggagggcgcgcaaggcgtgctgatgtcgatcgccggcggcagcgacttgggcttgttcgagatcaacgaggcggcctcgttggtacaagacgccgctcaccccgatgccaacatcatcttcggcaccgtcatcgacgattcgctcggtgacgaggtgcgggtgaccgtgatcgcggccggcttcgacgtcagcggtcccggccgcaagccggtgatgggcgagaccggcggcgcccaccggatcgagtcagccaaggcaggcaagctcacctcgaccttgttcgagccggtcgacgccgtcagcgtgccgttgcacaccaacggcgcaaccctgagcatcggcggtgatgacgacgatgtcgacgtgccgcccttcatgcgccgctga

SEQ ID NO: 28465 - DNA, 945 bp, Mycobacterium tuberculosis
atgacggaacacaacgaggacccacagatcgagcgcgtggccgacgacgccgccgacgaggaggcggttacggagccgttggccaccgaatcgaaggacgaaccggccgagcacccagaattcgaagggccgcgtcggcgcgcccgccgcgaacgtgccgaacgtcgcgccgcgcaggctcgagctaccgcgatcgagcaggctcgccgcgcggccaaacggcgagcccgcgggcagatcgtcagtgagcagaaccccgccaaaccggccgcccgaggtgttgttcgagggctgaaggcgctgctcgcgacggtcgtgctggccgtcgtcgggatcgggcttgggctcgcgctgtacttcacgccggcgatgtcggcccgcgagatcgtgatcatcgggatcggggcggtgagccgcgaggaggttctcgacgccgccagagtgcggccggcaacgccgttgctgcagatcgacacccaacaggttgctgaccgagtggccacgatccggcgggtggccagtgcgcgggtgcagcggcagtacccgtcggccttgcggatcaccatcgtcgagcgggtcccggtggtggtcaaggatttttcggacggcccgcacctttttgaccgcgacggcgtcgacttcgcgaccgatccgccaccgccggcgttgccttatttcgatgtggacaatcccggtcctagcgatccgacgaccaaggcggcgctgcaggtgttgaccgcgctgcatcctgaagttgcaagccaggtggggcggatcgcggccccgtcggtggcctcgatcaccctgacgttggccgatggccgcgtggtgatctggggaaccaccgaccgctgcgaagagaaggccgaaaagctggcggcgctgttgacccagccaggcagaacgtacgacgtgtccagccccgacctgccgaccgtgaaatag

SEQ ID NO: 28466 - DNA, 1485 bp, Mycobacterium tuberculosis
gtgagcaccgagcagttgccgcccgatctgcggcgggtgcacatggtcggcatcggcggagctggcatgtcgggcatcgcccgaatcctgctggaccgcggcgggctggtctccgggtcagacgccaaggagtcgcgcggtgtgcatgcgctgcgggcgcggggcgcgttgatccggatcggacacgacgcgtcgtcgctggacctgttgcccggtggcgccacggcggtcgtcactacccatgccgccatccccaaaaccaaccccgagctcgtcgaagcgaggcgccgcggcattcccgtggtgctgcggccggccgtgctggccaagttgatggccgggcgcaccacattgatggtcaccggcacgcacggcaagacaacgacgacgtccatgctgatcgtcgccctgcagcactgcgggcttgacccgtcctttgcggtcggcggtgagctgggggaggccggtaccaacgcccatcacggcagtggcgactgtttcgtcgccgaagccgacgaaagcgatggctcgctgttgcagtacacaccccacgtcgcggtgatcaccaacatcgagtccgatcacctggacttctacggcagcgtcgaggcgtatgttgcggtgttcgactccttcgtggagcgcattgtccccgggggtgcgctggtggtgtgcactgacgaccccggaggggccgcgctggctcagcgcgcgactgagctgggaattcgagtgctgcgatacgggtcggtgccgggtgagaccatggcagccacgttggtctcgtggcagcaacagggggtcggcgcggtcgcacatatccggttggcctcagaactagccacagcacagggtccccgcgtgatgcggctgtcggtgcccgggcgacacatggcgctcaacgcgctgggagcgctgctggccgcggtgcagatcggcgccccggccgacgaggtgctcgacgggctggccggcttcgaaggagtgcggcgacgattcgaactggttgggacctgcggcgtcggaaaggcgtcggtgcgcgtgttcgatgactacgcccaccacccgacggagatcagcgcgacactggcggcggcgcgcatggtgctcgaacagggcgacggtggccgctgcatggttgtgtttcaaccccatttgtattcgcggacaaaggcattcgctgctgagtttgggcgtgcgctgaatgccgctgacgaggtgttcgtactcgacgtctacggagctcgtgaacaaccgctggccggtgtcagcggagccagcgtcgctgagcacgtcactgtgccgatgcgctacgtcccggatttttcggcggtcgcacagcaagtggccgccgccgctagtccgggcgacgtcatcgtcacgatgggtgccggagacgtgaccttgctgggcccggaaatcctgaccgcccttcgggtccgggccaaccgaagcgcccccggccgtccgggggtgctgggatga

SEQ ID NO: 28467 - DNA, 1233 bp, Mycobacterium tuberculosis
gtgaaggacacggtcagccagccggccggcgggcgcggggcaacggcgccccggcccgccgatgccgcctcgccgtcttgtggttcctcgccgtctgctgattccgtgtcggtcgttctcgccggcggcgggaccgccgggcacgtcgagcccgccatggccgtcgccgacgccttggtcgcgttggatccgcgcgtccggattaccgcgttgggcaccctccgtggactagagaccaggctggtgccccagcgcggctaccacctggagctgatcacggcggtgccgatgccgcgcaagcccggcggcgacctggcccggctgccgtcgcgggtgtggcgcgccgtccgggaggcccgggacgtgctcgacgatgtcgacgccgacgtcgtcgtcggtttcggtgggtacgtcgcgctaccggcttacctagccgctcgcggcctgcctttgccgccccggcgccggcgccggatcccggtggtgatccacgaagccaacgccagggcgggactggccaaccgggtcggcgcccataccgcggaccgggtgctctccgcggtgccggattccgggctgcggcgcgccgaggtggttggggtcccggtccgtgcgtcgatcgccgcgctggaccgcgcggtgctgcgagccgaggcgcgggcacacttcggcttccccgacgacgcgcgggtgctgctggtgttcgggggttcgcagggcgcggtctcgctcaaccgggcggtgtccggcgccgccgccgacctggccgccgccggtgtttgcgtgctgcatgcccatggaccccagaacgtgctggagttgcgccgtcgggctcaaggtgacccaccgtacgtggcggtgccctatttggaccggatggagctggcctacgccgccgccgatctggtgatctgccgggccggggcgatgacggtcgccgaagtatccgccgtcggtctgccggccatctacgtgccgctgccgatcggcaacggtgaacagcggctgaatgcgttgccggtagtcaatgccggcggcggcatggtggtcgccgacgccgccctgacccccgagttggtggcccgccaggttgccgggctgctcaccgaccccgcgcggctggccgcgatgaccgcggccgcagccagggtgggacatcgcgatgccgcgggccaggtggcccgggccgcgctggccgtcgccaccggggccggtgccaggacaacgacgtga

SEQ ID NO: 28468 - DNA, 1575 bp, Mycobacterium tuberculosis
gtgctaacccggttgctgcgtcggggcaccagcgacaccgacggctcccagactcgaggggccgagccggtcgaggggcagcggacgggcccggaagaagcctctaacccgggttcggcgaggccccgcacccgtttcggtgcctggctgggccgtccgatgacctcgtttcacctcatcatcgccgttgccgcattgctgaccacccttggactgatcatggtgctgtcggcatcggcggtgcggtcctacgacgacgacggatcggcttgggtgatcttcggcaagcaggtcttgtggacgcttgtgggtcttatcggcggctatgtctgtctgcggatgtcggtgcggttcatgcggcgcatcgccttctccggtttcgcgatcaccatcgtgatgctggtgctggtgctggtgccggggatcggcaaggaggccaacggctcgcgcggctggttcgtggtcgcgggcttctcgatgcagccctctgagctggctaagatggcgttcgccatctggggagcgcatctgctggccgcccggcgcatggaacgggcttcactgcgcgagatgctgattccactggtgccggccgccgtcgttgcgctggcgctgatcgtggcccagcccgacctcggacagaccgtgtcgatgggcatcatcttgttgggcctgctgtggtatgcggggctgccgctgcgcgtcttcctcagctcactggcggcggtcgtcgtctcggccgccatcctggcggtgtccgcgggctaccgatccgaccgggtgcggtcgtggctcaaccccgaaaacgatccgcaagactccggctaccaggcccgacaggcaaagttcgcgctggctcaaggtggcattttcggcgacggtctgggccaaggcgtggccaagtggaactacttgcccaacgcccacaacgacttcattttcgccatcatcggcgaagagctgggtctcgtcggcgcgctcggactgctggggctattcggattgttcgcctacaccggcatgcgcatcgctagccggtccgccgacccgttcctgcggctgctgaccgccaccacgacactgtgggtgctgggacaggcgttcatcaacatcggctatgtgatcgggctgctgcccgtcaccggcctgcagctgccgctcatctccgccggtggaacctccacggccgcaacactttcgctgataggcatcatcgccaacgcggctcgccacgaaccggaggcggtggccgcgctgcgggctgggcgcgacgacaaggtgaaccggttgctgcggctgccgctgcccgagccgtatctgccccctcgtctcgaggcgtttcgtgaccgcaagcgcgccaacccgcaaccggcccaaacgcagcccgcgcggaagaccccccgcacggcgcccggacagcctgcccggcagatgggcctgcccccgcgacccggctcgccccgcacggccgatccgccggttcgtcgatcagtgcatcatggagctggccagcggtacgcgggccagcgtcgcacacggcgcgttcgggcattggaaggtcagcgttacgggtga

SEQ ID NO: 28469 - DNA, 1461 bp, Mycobacterium tuberculosis
gtgcttgaccctctggggccgggtgcgcccgtgttggtagccggtggccgggtgaccggtcaggcggtggccgcggtgctgactcggtttggtgcgacgccgacggtgtgcgacgacgatccggtcatgctgcgaccgcacgccgaacgtgggctgccgaccgttagttcctcggacgcggtgcagcagataaccgggtatgcgctggtggtcgccagtcccggcttctcgcccgcaaccccgctactggccgcggccgcggcggcgggggtgccgatctggggtgacgtggagttagcctggcggctagacgcagcgggctgctacggaccgccgcgcagctggctggtggtgaccggcaccaacggcaagaccaccacgacgtcgatgctgcacgccatgctgatcgccggtggccgccgcgccgtgctgtgcggcaatatcggcagtgcggtgctggatgtgctggacgagccggccgagctgctggccgtggagttgtccagtttccagctgcactgggcgccgtcgctgcggcccgaggccggcgcggtgctcaacattgccgaagaccacctggactggcatgccacgatggccgaatacaccgcggccaaggcccgggtgctgaccggcggggtagcggtggccgggctggatgacagccgagcggccgcactgctggacggctcaccggcgcaggtgcgggtcggcttccggctcggcgagccggccgcgcgggaactgggcgtgcgcgacgcccacctggtcgatcgcgccttctccgacgacttgacgctgctgccggtcgcgtcgataccggtgccaggtccggtcggcgtgcttgacgccctggccgcggcggcgctggcccgctcggtcggggtgcccgccggtgcgatcgccgacgcggtcacgtcgtttcgagtgggccgacaccgcgccgaggtggtggccgttgccgacggcatcacctacgtggacgactccaaggccaccaacccgcacgccgcgcgggcttcggtgcttgcatacccgagggtggtatggatcgccggtggcctgctcaagggcgcgtcgcttcacgccgaggttgcggcgatggcgtcgcggctggtcggtgcggtgctgatcggccgggatcgcgcagcggttgccgaggcgttatcacgacacgcgcccgatgtcccagtcgttcaggttgtggcaggcgaggatactggtatgcctgcgactgttgaggttcctgttgcttgtgttctagatgtggcaaaagatgacaaagccggtgagaccgttggcgctgccgtgatgaccgctgcggtggccgcggcccggcggatggcccaacccggtgacaccgtgctgctggcaccggccggcgcctcattcgaccagttcaccggttatgccgaccggggcgaggcattcgcgaccgcggtccgcgcggtgatccggtag

SEQ ID NO: 28470 - DNA, 1080 bp, Mycobacterium tuberculosis
atgaggcagatccttatcgccgttgccgtagcggtgacggtgtccatcttgctgaccccggtgctgatccggttgttcactaagcagggcttcggccaccagatccgtgaggatggcccgcccagccaccacaccaagcgcggtacgccgtcgatgggcggggtggcgattctggccggcatctgggcgggctacctgggcgcccacctagcgggcctggcgtttgacggtgaaggcatcggcgcatcgggtctgttggtgctgggcctagccaccgctttgggcggcgtcgggttcatcgacgatctgatcaagatccgcaggtcgcgcaatctcgggttgaacaagacggccaagaccgtcgggcagatcacctccgccgtgctgtttggcgtgctggtgctgcagttccggaatgctgccggcctgacaccgggcagcgcggatctgtcctacgtgcgtgagatcgccaccgtcacattggcgccggtgctgttcgtgttgttctgcgtggtcatcgtcagcgcctggtcgaacgcggtcaacttcaccgatggcctggacgggctggccgccggcaccatggcgatggtcaccgccgcctacgtgctgatcaccttctggcagtaccgcaacgcgtgcgtgacggcgccgggcctgggctgctacaacgtgcgcgacccgctggacctggcgctcatcgcggccgcaaccgctggcgcctgcatcggttttttgtggtggaacgccgcgcccgccaagatcttcatgggtgacactgggtcgctggcgttgggcggcgtcatcgcggggttgtcggtgaccagccgcaccgagatccttgcggtggtgctgggtgcgctgttcgtcgccgagatcacctcggtggtgttgcaaatcctgaccttccggaccaccgggcgccggatgtttcggatggcgcccttccaccaccatttcgagttggtcggttgggctgaaaccacggtcatcatccggttctggctgctcaccgcgatcacctgcggtctgggcgtggccttgttctacggtgagtggcttgccgcggtcggtgcctga

SEQ ID NO: 28471 - DNA, 1533 bp, Mycobacterium tuberculosis
atgatcgagctgaccgtcgcgcagatcgccgagatcgtcgggggcgcagtggccgatatctccccgcaagacgccgcgcaccgccgcgtcaccgggaccgtcgagttcgactcgcgcgccatcggcccgggcgggctgttcctcgccctgccgggggcgcgcgccgacggccacgaccatgccgcgtcggcggtagccgcgggcgccgccgtcgtgctggccgcccgcccggtgggggtgccggccatcgtggttccgccagtggccgcgccgaacgtattggccggcgtcctcgagcacgacaacgacgggtcgggggcggcggtgctggccgcgctggccaagctggccaccgcggtggccgcgcagttggtggccggcgggctcaccatcatcgggatcaccggctcgtcgggcaagacgtcgaccaaggacctgatggccgccgtgctggccccgctgggggaggtggtggccccgcccggatcgttcaacaacgagctgggtcacccgtggacggtgctgcgcgcgacgcggcgcaccgactacctgattttggagatggcggcacgccatcacggcaacatcgccgcgctcgccgagatcgcgcccccgtcgatcggagtcgtgctcaacgtcggcaccgcacatttgggtgagttcggctcccgcgaggtcatcgcacagaccaaagccgaactgccgcaggctgttccgcattccggagcggtcgtcctcaacgctgatgaccccgcggtggcggcgatggccaagctgaccgcggcccgggtggtgcgggtcagccgggacaacaccggtgacgtttgggcggggccggtgtcgctggacgaattggccaggccgcgctttacgctgcatgcccacgatgcccaagccgaggtccgactcggggtctgcggcgaccaccaggtcactaacgcgctgtgcgccgcggcggtcgcgctggagtgtggggccagcgttgaacaggtcgcggccgcgctgaccgcggcgccgccggtgtcgcggcatcggatgcaggtgaccacccgcggcgacggggtgacggtgatcgacgacgcctacaacgccaaccccgactccatgcgggccgggctgcaggcgctggcctggatcgcgcaccaacccgaggccacccgccgcagctgggcggtgctgggtgagatggccgagctgggtgaggacgcgatagccgagcacgatcgcatcggccggctcgcggtgcgcttagatgtgtctcgactcgttgtcgtgggaaccgggaggtcgatcagcgccatgcaccacggagcggtcctggagggggcgtggggctcgggggaagccactgctgatcacggtgcggatcgcacggccgtcaatgtggccgacggtgacgccgccctggcactactgcgcgccgagctgcgacccggggatgtggtcttggtcaaggcctcgaacgcggccgggctgggtgcggtggccgatgcattggtcgcagacgacacatgcgggagtgtgcgcccatga

SEQ ID NO: 28472 - DNA, 1608 bp, Mycobacterium tuberculosis
gtgtcatcgctggcccgagggatctcgcggcggcgaacggaggtggcgacacaggtggaggctgcgcccactggcttgcgccccaacgccgtcgtgggcgttcggttggccgcactggccgatcaggtcggcgcggccctggccgagggtccagctcagcgtgccgtcaccgaggaccggacggtcaccggggtcacgctgcgcgcccaggacgtgtcacccggtgacctgttcgccgccctgaccggctcgaccacccacggggcccgccacgtcggcgacgcgatcgcacgcggcgccgtcgcggtgctcaccgaccccgccggggtcgccgagatcgccggacgagcggccgtgcccgtgttggtgcaccccgcaccccgcggcgtgctcggcggcttggccgccaccgtgtacgggcatccgtccgagcggttgacggttatcgggatcaccggaacgtccggcaagaccaccaccacctatctggtcgaggccgggttacgggctgccggacgcgtcgccgggctgatcggcaccatcggcatccgcgtcggcggcgccgaccttcccagcgcgctgaccaccccggaggcccccacgctgcaggcgatgctggcggcgatggtcgaacgcggggtggacaccgtggtcatggaggtgtccagccacgcgctggcgctgggccgggtggacggcacccggttcgccgtcggcgccttcaccaatctctcccgtgaccacctggatttccaccccagcatggccgactacttcgaggccaaggcgtcattgttcgatccggactcggcactgcgcgcccgcaccgccgtggtgtgcatcgacgacgacgccgggcgcgcgatggcggcgcgggccgccgacgcgatcaccgtcagcgccgccgaccggcccgcacactggcgcgccacggatgtggcgcccacggacgcgggcgggcaacaattcaccgccatcgaccccgccggcgtagggcatcacatcggaatccggctaccgggccgctacaacgtcgccaattgcctggtcgccctggcgattctggacaccgtcggggtctccccggaacaggcggtgccgggcctgcgtgagatccgggtcccggggcggctcgagcagatcgaccgcggccagggctttctcgcgctggtcgactacgcgcacaaaccggaagcgctgcggtcggtgctgaccaccttggcgcacccggaccgccggctggcggtggtgttcggcgccggcggcgatcgtgacccgggcaagcgggccccgatgggccggatagccgcgcagctggccgacttggtggtcgtcaccgacgacaacccgcgtgacgaagatcccacggcgatccgccgcgaaatcctggctggggcggccgaagtcggcggtgatgcccaggtcgtcgagatcgcagaccggcgggacgcgatccggcacgcggttgcctgggcgcgccccggcgacgtggtgctcatcgccggcaaaggccacgagaccgggcaacgcggcggcgggcgggtccgcccgttcgacgaccgggtggagctggctgccgcgctagaggccctcgagcggcgcgcatga

SEQ ID NO: 28473 - DNA, 1035 bp, Mycobacterium tuberculosis
atgaaatttgtcaaccatattgagcccgtcgcgccccgccgagccggcggcgcggtcgccgaggtctatgccgaggcccgccgcgagttcggccggctgcccgagccgctcgccatgctgtccccggacgagggactgctcaccgccggctgggcgacgttgcgcgagacactgctggtgggccaggtgccgcgtggccgcaaggaagccgtcgccgccgccgtcgcggccagcctgcgctgcccctggtgcgtcgacgcacacaccaccatgctgtacgcggcaggccaaaccgacaccgccgcggcgatcttggccggcacagcacctgccgccggtgacccgaacgcgccgtatgtggcgtgggcggcaggaaccgggacaccggcgggaccgccggcaccgttcggcccggatgtcgccgccgaatacctgggcaccgcggtgcaattccacttcatcgcacgcctggtcctggtgctgctggacgaaaccttcctgccggggggcccgcgcgcccaacagctcatgcgccgcgccggtggactggtgttcgcccgcaaggtgcgcgcggagcatcggccgggccgctccacccgccggctcgagccgcgaacgctgcccgacgatctggcatgggcaacaccgtccgagcccatagcaaccgcgttcgccgcgctcagccaccacctggacaccgcgccgcacctgccgccaccgactcgtcaggtggtcaggcgggtcgtggggtcgtggcacggcgagccaatgccgatgagcagtcgctggacgaacgagcacaccgccgagctgcccgccgacctgcacgcgcccacccgtcttgccctgctgaccggcctggccccgcatcaggtgaccgacgacgacgtcgccgcggcccgatccctgctcgacaccgatgcggcgctggttggcgccctggcctgggccgccttcaccgccgcgcggcgcatcggcacctggatcggcgccgccgccgagggccaggtgtcgcggcaaaacccgactgggtga

SEQ ID NO: 28474 - DNA, 1599 bp, Mycobacterium tuberculosis
atgtcgtttgtgattgcggcgccggaggtgatggcagcggccgccacggatttggcgaacatcgggtcgtcgatcagcgccgccagtgcggcggcggcaggccccacgatgggaatcctggcggccggcgccgacgaggtgtcggtggcgatctcggcgttgttcgggtcgcacgcccagggctatcagacgttgagcgctcagctggcggcgtatcacaaccagttcgtgcgggccctgaacgccggcgcgggctcgtatgccagcgccgaggccgccaacgtgcagcagaccctgctcaacgcgatcaacgcgcccacccaaacgttgctggggcgcccgttgatcggcaacggcgccgacgggggtcccgggcaaaacggtgggcccggcggcttgttgtacggcaacggtggtaacggcggggccggtgacaccgccaatcccaacggcggcaacggcggatcggcggggctgatcggcaacggcggggccggaggcgcgggtgcggccaccggagcgggaggtgcgggcggcaatggcggatggctgtacggcaacggggggcccgggggtgcggccgggctcggcaccgccgggggcgtcagccccgccggcggggccggcggggccgccgggctgtggggccatggcggggccggcggggccggcggcagcgcatccggggcaccgggggccggcggcgccggtggtgacggagggcgcggcgggctgctgtacggcgacggcggggccggcggggctggtgggaacggaagcaacggggtgaccggggtgcacggcggaaacggcggtgccggcggcgccgccgggctgatcggcaacggtggcgccggcggtgacggcggtaacggcgggctcagcaacaccggcgccagcggtggggcgggtggtgccggcggggccgccctgatcggtaatggcggcgacggggggcacggcggcaacggtggccacggcaacagcggtggggccggcggcgccggtggggccggtggggccggtggggccggtgggcacgtcgggctgatcggcaacggcggcaacggcggtgccggcggcaacgggggcaacgacaacagctccacccttgccgatgcggggtccggcggcgccggcgcggccggcggcaacggcgggctgttctacggcaacggcggcgtcggcgggcgcggcggcaacggcggcttctcgtcggccggcaccagcggcggggacggcggcatcggcggtgccggcgggatcggcgggctgatcggcagcggcggcggcggcggggacggcggcaacggcggacaggctcccacgccgggtaatgccggtgacggcggcgccggcggcaacgccaggctgatcggtgacggcgggcgcggcggcaacggcggggaaggcggcgacggccccccaggcgttaaaggcgacggtggtaacgggggcaacggcggcaacgccgtggtgatcggcaacggcggcaacggcggggccggcggcttcggcatacccgtcggaagtggtggtgccggcggcagccgtggtgtgctgttcggcacccctggagcaaacggcgccgacggctga

SEQ ID NO: 28475 - DNA, 2040 bp, Mycobacterium tuberculosis
gtgagccgcgccgcccccaggcgggccagtcagtcgcagtcgacgcgaccggcgcgcggtttgcgccggccaccgggagcccaggaggttgggcaacgcaaacggcccggcaaaacgcagaaagcccggcaagcccaggaagccacgaaatcccgccctgcgacacggtcagacgtcgcacccgcgggtcgctcgactcgtgcgaggcgcacccggcaggtggtggacgtcgggacgcgcggtgcgtcgttcgtctttcggcatcggaccggaaacgcggtcatcttggtgttgatgttggtcgcggcaacacaattgttctttctgcaggtatcacatgccgcgggcctgcgtgcgcaggcggccggccaactcaaggtcaccgacgtccagccagcggctcgcggcagcatcgtcgaccgcaacaatgaccggctcgcgttcaccatcgaggcgcgtgccctgacgttccagccgaagcggattcggcggcaattggaagaggccaggaagaagacgtcggctgcacccgacccgcagcagcgcctgcgcgatatcgcccaggaggtcgccggcaagctgaacaacaagccagatgccgcggccgtgctgaagaagctgcaaagcgacgagaccttcgtctacttggcgcgtgcggtcgacccggctgtcgccagcgcgatctgcgcgaagtatcccgaggtcggtgcggaaagacaggatctgcgtcagtacccgggtgggtcgctggcggcaaacgtcgtcggtggcatcgactgggatggtcatgggctgctgggtctggaggactccctggatgcggtgctggccggaaccgacggatcggtcacctacgaccgtgggtcagacggcgtcgtcatccccggcagctaccggaatcggcacaaggcggtccacggttccaccgtcgtgctcaccctcgacaacgacatccagttctacgtgcagcagcaggtgcagcaggccaagaacctatcgggggctcacaacgtctcggccgtcgtcctggacgccaagaccggcgaggtgctcgcgatggccaacgacaacaccttcgacccgtcgcaagacatcgggcgccagggcgacaagcagttgggcaacccggcggtgtcgtcgcccttcgagccgggctcggtgaacaagatcgtcgccgcgtccgcggtcatcgagcacgggttgagcagccccgacgaggtgctacaggtgcctggctcgatccagatgggcggtgttaccgtgcatgacgcttgggagcacggcgtgatgccctataccaccacgggggtgttcggaaagtcctccaacgtcggcacgctgatgctttcccaacgtgtcggaccggaacgctattacgatatgctccgcaagttcgggttgggacagcgcaccggcgtgggcctgcccggtgagagcgccggactggtgccgccaatcgaccagtggtcgggcagtacgttcgctaatcttcctattggccaaggtctttcgatgactttgctgcagatgaccggcatgtaccaggccatcgccaacgatggagtgcgggtacccccacgcattatcaaggccaccgtcgcacccgacggcagccgaaccgaagaaccgcgccccgacgacattcgcgtggtgtcggcgcagaccgcccagaccgtgcgccagatgctgcgtgccgtggtgcaacgcgatccgatgggctaccagcagggtaccgggccgacggccggggtgcccggctatcagatggccggcaagaccggtaccgcgcagcagatcaaccctggctgcggctgctacttcgacgacgtgtattggatcaccttcgccggaatcgccactgccgacaatccccgctacgtgatcggcatcatgttggacaacccggcgcgcaactccgacggcgcgcctgggcactcggccgccccgctgttccacaacatcgcgggctggctgatgcagcgcgaaaacgtcccgctgtcacccgatcccgggcctcctttggtcttgcaggccacctag

SEQ ID NO: 28476 - DNA, 1191 bp, Mycobacterium tuberculosis
gtgcaaacccgtgcaccgtggtctctgcccgaagcgaccctggcgtacttccccaacgccaggttcgtgtcttcggacagggacctcggtgcaggggcggcgcctggaatagccgcgtcccgaagtacggcttgccagacctggggaggtatcacggtggctgatccaggttcggggccaaccggtttcggtcatgtgccggtattggcgcaacgttgcttcgaactgcttacccccgcactaacccgctactatccagacggctcgcaggcggtccttctcgacgcgaccatcggcgcgggcgggcatgcggagcggtttttggagggattgccgggtctgcgcctgatcgggctcgaccgtgacccaaccgctctggacgtcgcgcggtctcggctggtgcgattcgctgaccgacttaccctggtgcacacccgctatgactgtctgggcgcagcgctggctgaatccggttatgccgcagtgggatcagtcgacggaatcctgttcgatctcggcgtctcatccatgcagctcgaccgcgccgagcggggcttcgcctacgccacggacgcgccattggacatgcggatggacccgacgacgccgttgaccgcagctgacattgtcaacacttacgacgaggcggcactagccgacatcctgcgtcgctacggagaggagcggtttgctcggcgcatcgctgccggtatcgtccgccgacgcgcaaaaaccccgttcacctcgaccgccgaactggttgccctgctgtaccaggcgattccagctccggcccggcgtgtcggcgggcatccagccaagcgaacattccaggcgctgcgcatcgcggtcaacgatgagctggaatcgctgcgcacggccgttcctgccgcgctggatgccctcgctatcggtgggcgcatcgcggtgctggcctaccagtcgctagaggacaggatcgtcaaacgggtgttcgccgaggcagtcgcgtcggccacccctgcgggacttccggtcgaacttcccggccatgagccgcgattccgttcgttaacgcacggcgccgaacgagcgagtgtggctgagatcgaacgcaatccccgcagtactccagtgcggttgcgggccctgcaacgagtcgagcaccgggcgcaatcgcagcaatgggcaaccgagaagggtgattcatga

SEQ ID NO: 28477 - DNA, 432 bp, Mycobacterium tuberculosis
atgtttctcggcacctacacgcccaaactcgacgacaaggggcggctgacgctgccggccaagtttcgcgacgcgttggcaggggggttgatggtcaccaagagccaagatcacagcctggccgtttacccgcgggcggcgttcgagcagctggcgcgccgggccagcaaggcgccacgaagcaaccccgaggcgagagcgttcctacgtaatctcgccgccggtaccgacgaacagcatcccgacagtcaaggccggatcaccttgtcggccgaccaccgccgctacgcaagcctttccaaggactgtgtggtgatcggcgcggtcgactatctcgagatctgggatgcgcaagcctggcagaactaccaacaaatccatgaagagaacttctccgcggccagcgatgaagcactcggtgacatcttctga

SEQ ID NO: 28478 - DNA, 1041 bp, Mycobacterium tuberculosis
gctgaagcgcttgcggcgggacaacgccgaattgcgaagggcgaacgcgattttaaagaccgcgtcggctttcttcgcggccgagctcgaccggccagcacgctaattacccggttcatcgccgatcatcagggccaccgcgagggccccgatggtttgcggtggggtgtcgagtcgatctgcacacagctgaccgagctgggtgtgccgatcgccccatcgacctactacgaccacatcaaccgggagcccagccgccgcgagctgcgcgatggcgaactcaaggagcacatcagccgcgtccacgccgccaactacggtgtttacggtgcccgcaaagtgtggctaaccctgaaccgtgagggcatcgaggtggccagatgcaccgtcgaacggctgatgaccaaactcggcctgtccgggaccacccgcggcaaagcccgcaggaccacgatcgctgatccggccacagcccgtcccgccgatctcgtccagcgccgcttcggaccaccagcacctaaccggctgtgggtagcagacctcacctatgtgtcgacctgggcagggttcgcctacgtggcctttgtcaccgacgcctacgctcgcaggatcctgggctggcgggtcgcttccacgatggccacctccatggtcctcgacgcgatcgagcaagccatctggacccgccaacaagaaggcgtactcgacctgaaagacgttatccaccatacggataggggatctcagtacacatcgatccggttcagcgagcggctcgccgaggcaggcatccaaccgtcggtcggagcggtcggaagctcctatgacaatgcactagccgagacgatcaacggcctatacaagaccgagctgatcaaacccggcaagccctggcggtccatcgaggatgtcgagttggccaccgcgcgctgggtcgactggttcaaccatcgccgcctctaccagtactgcggcgacgtcccgccggtcgaactcgaggctgcctactacgctcaacgccagagaccagccgccggctga

SEQ ID NO: 28479 - DNA, 1551 bp, Mycobacterium tuberculosis
atgactactccgagccatgctccagcggttgatttggctacagcgaaagatgctgttgtccaacacctttcgcgacttttcgagttcactaccggtccgcagggcggaccggcgcggctgggcttcgccggcgcggtgctgatcaccgcaggcgggctgggagccggcagcgtccgccaacatgacccgctgctggagtcgattcacatgtcctggctgcgcttcggccacggactcgtgctgtcgtcgattctgttgtggacaggtgtgggtgtgatgctgcttgcgtggctgggtctaggccgacgggtcctcgccggcgaagccaccgagttcaccatgcgggcaaccaccgttatctggctggcgccgctactgctgtcggtgcccgtcttcagccgggacacttactcgtatctggcccaaggggcgcttctgcgcgacggtctggatccttacgctgttggcccggtcggtaatcccaatgcgctgctggacgacgtaagcccgatctggacgatcaccaccgcgccctacggtcctgcgttcattctggttgcgaagttcgtcacggtaatcgtcggcaacaatgtcgtcgccggaaccatgctgttgcgtttgtgcatgctgcccgggctggcgttgctggtctgggccactccacgcttggccagccatctcggcacccacggcccgaccgcgctgtggatctgcgtgctgaacccactggtcctcatccatctgatgggcggggtgcacaacgagatgctgatggtgggtctgatgaccgccggtatcgcgttgaccgtccagggccgtaatgtcgcggggatcatcctgatcaccgttgcgatcgcggtgaaggccaccgccggaatcgcgttgcccttcttggtctgggtttggctgcgtcatctgcgtgagcgacgggggtaccggccggtccaggcgttcctggcagccgccgcgatatcgctgctgatcttcgtcgcggtgttcgcggtgctgtctgcggtagccggcgttggcctagggtggctgaccgcgctggccggctcggtgaaaatcatcaactggctgacggtgcccaccggggcggccaacgtgatccacgcgctgggcagagggctcttcacggtcgacttctacaccttgctgcggatcacccggctgatcggaatcgtgatcatcgcggtgtcgctgccgctgttgtggtggcggttccggcgcgacgaccgggccgcgctgaccggggtcgcatggtcgatgctgatcgtggtgctgttcgtacccgccgccctgccgtggtactactcctggccgctggcggtcgctgccccgttggcccaggcacgacgggcgatcgcggccatcgccgggctctcgacttgggtgatggtgatcttcaaacccgacggatcgcacgggatgtattcgtggctgcacttctggatcgccaccgcctgcgcactgactgcgtggtatgtcctgtatcggtcaccggaccggcgcggagtgcaggctgcaaccccggtggtcaatacgccatag

SEQ ID NO: 28480 - DNA, 1200 bp, Mycobacterium tuberculosis
ttgcgtctgctcacgcaaggtggacccgctagcctgacccaggtgagccgggtcctgttggtaactaacgactttccaccccgacgcgggggcatccagtcctatctgggggagttcgtcggtcggctggtcggctcccgagcgcatgcgatgacagtgtatgcaccgcagtggaaaggcgccgacgccttcgacgacgcagcccgtgctgccggttaccgggtggtgcgccatcccagcacggtgatgctgccgggtccaacggtcgatgtccggatgcgccggctgatcgccgagcacgacatcgaaaccgtctggttcggtgcggccgcaccgctggccctgctggccccgcgtgcccggctggctggagctagccgggtgttggccagcacgcacggccacgaagtgggctggtcgatgcttccggtcgctcgatcggtgctacgccgcatcggcgacggcaccgacgtggtgactttcgtcagcagctacacgcggtcccggtttgcttctgcgttcgggcccgcggcttcgttggaatacctaccgccgggagtggacaccgaccggttccgccccgatccggccgcacgcgccgagttgcggaagcgctatcggctaggcgagcggcccacggtagtgtgtctgtcgcggttggtgccgcgcaaaggccaggacaccctggtcacggcgctcccgtcgatccggcgtcgcgttgatggagccgcgttggtgattgtcggcggcggtccatatctagagacgttgcgcaagctggctcacgactgtggggtggccgaccacgtgacgttcaccggcggcgtggcaaccgacgaacttcccgcccaccacgcactggccgacgtgttcgccatgccatgccgcacccgcggcgccgggatggacgtcgagggcttgggcatcgtgttcctcgaagcctccgccgccggcgtgccggtaatcgccggcaattctggcggagcgccggaaacggtgcagcacaacaagactgggctagtggtcgacggtaggtcggtggaccgggtggccgacgccgtggccgagttgctgatcgatcgggatcgggccgtcgcgatgggcgccgccggccgagaatgggtcacggcgcagtggcgttgggacacgctggccgccaagctagcagattttctgcgcggcgacgatgcggcccgttga

SEQ ID NO: 28481 - DNA, 1938 bp, Mycobacterium tuberculosis
gtgcaggggcctaacgtcgcggccatgggtgcaaccggtgggactcagctgagtttcgccgacctggcacacgcccagggggcagcctggaccccagccgacgagatgtccctgcgcgagaccaccttcgtcgtggtcgacctggaaaccacaggtgggcgcacgacgggtaacgacgcaacaccgccggacgcgatcaccgaaatcggggcggtcaaggtatgcggcggcgcggtgctcggtgaattcgccaccctggtaaacccgcaacacagcattccgccccagatcgtgcggctcaccggtatcactacggcgatggtgggtaatgccccgacgatcgacgccgtcctgccgatgttcttcgagttcgccggcgactcggtgctcgtggcccacaacgctgggttcgatatcggattcctgcgcgccgccgcgaggcggtgcgatatcacctggccccaaccacaggtgttgtgcacgatgcggctggcccggcgggtgctgagccgagacgaagcccctagcgtgcgtctggccgcgctagcgcggctgttcgccgtcgccagcaaccccacccaccgcgccctcgacgacgctcgcgccaccgtcgacgtgctgcacgcactcatcgagcgagtgggcaaccagggcgtgcacacctatgccgagctgcgctcgtatctgcccaacgtgacccaggcgcagcgctgcaaacgggtactggcggaaacactgccgcaccggccgggggtgtacctgttccgcggaccgtcgggcgaggtgctctatgtcggcaccgcggcggacttgcgccgccgggtaagccagtacttcaacggcaccgaccgccgcaagcggatgacggagatggtcatgctggccagctcgatcgatcatgtcgaatgcgcgcaccccctggaggccggtgtccgtgagctgcggatgctgtcgacgcatgccccgccgtataaccgcaggtcgaagttcccataccggtggtggtgggtggcgctcaccgatgaagcatttccacgcctgtcggtcatccgggccccgcgacacgaccgcgtcgtcggcccgttccgatcccgctccaaggccgccgagacggcagcgctgctggcacgctgcacgggactgcgaacctgcaccactcggctgacacgttccgcccggcacggacccgcctgccccgagctggaagtgtcggcctgcccggccgcccgcgacgtcacggccgcgcaatacgccgaggcggtactgcgcgcggcggccttgatcggcggattggacaacgccgcgctggccgcggccgttcaacaggtcactgagctcgccgagcgccgtcgctatgagagcgctgcccgactgcgtgaccacctcgccaccgccatcgaggcgttgtggcatggccaacgattgcgagcactggccgcgctgcccgagttgatcgccgccaagccggacggccccagggagggcggctaccaactggccgtcattcgccacggccaactcgccgctgccggcagggcaccgcgcggggttcctccgatgcctgtggtcgacgccatccgccgcggcgctcaggcgatcctgcctacgccggcaccgctcggcggggcactggtggaggagatcgcgctcatcgcccgctggctggccgagccgggagtgcgcatcgtcggggtctcgaacgacgccgcagggttggcctccccagtgcgctcggccggcccgtgggcagcgtgggcggcaacggcgcgctcggcccagttggccggcgagcagctcagcagaggttggcagtcagatctgccgaccgaaccgcacccatcgcgcgagcaactgttcggccgcaccggtgtcgattgccgcactggcccgccgcaacccctcctcccaggccggcagccattcagcacggctggataa

SEQ ID NO: 28482 - DNA, 1113 bp, Mycobacterium tuberculosis
gtggcgctgtcagctgagggttcttcggggggatctcgcgggggctcgccgaaagcagaagccgcatcggtgccgtcctggccgcagattttggggcggttgaccgacaaccgcgatctggcgcggggccaggctgcctgggccatggaccagatcatgaccggcaatgcgcggccggcgcagatcgccgccttcgcggtggcgatgacgatgaaggctccgaccgccgacgaagtcggtgagctcgctggcgtcatgctcagccacgcgcatccgttgcccgccgatacggtccccgacgacgccgtcgacgtcgtcggcaccggtggcgacggagtcaacacggtgaacctatccaccatggcggcgattgtggtggcggctgcgggtgtgccggtggtcaagcacggcaaccgagcggcgtcctcgttgtccggtggcgccgacacgctggaggcgctgggggtgcgcatcgacctgggacccgacctggtcgcgcgcagcctcgcggaggttgggatcgggttctgcttcgcgccgcggttccatccctcctaccggcacgcggccgcggtacgccgcgagatcggtgtgcccaccgtgttcaatcttctcgggccgctgaccaatccggcccggccccgggctggactgatcggatgcgcgttcgccgacctcgccgaagtgatggccggggtgtttgctgcgcgccggtccagtgtgctggtggtacacggcgacgatgggctggacgagttgaccaccaccaccacgagcacgatctggcgcgttgcggcgggcagcgtggataagttgacgtttgatcccgccggattcgggtttgcgcgcgcccagcttgaccagctggctggaggcgatgcgcaagccaacgcggccgcggtgcgcgcggtgttgggcggtgccaggggcccggtccgggacgctgtggtgctcaacgccgccggtgcgatcgtcgcccacgccggattatccagccgtgctgaatggctgccggcctgggaggaggggttgcggcgggccagtgcggcaatcgacaccggtgcggccgaacagttgctcgcgcgatgggtgcggttcggtcggcagatctga

SEQ ID NO: 28483 - DNA, 1290 bp, Mycobacterium tuberculosis
atgagccgcgccgacgacgatgcagtgggggtaccacccacttgcgggggacgaagcgatgaggaggagcggcgcatagtgcccggacctaacccgcaagacggggccaaagacggggctaaggcaaccgccgtcccccgtgaaccggacgaagccgcgctggccgcgatgtccaaccaggagctgctcgcattgggcggcaagctggatggtgtccggatcgcctacaaagagccccgctggccggtcgagggcaccaaagccgagaagcgcgccgagcgttcagtggcggtgtggcttttgctaggtggcgtgttcggactggcgctgttgctgatcttcctgttctggccgtgggagttcaaggcggcggatggcgaaagcgacttcatctactcgctgactaccccgctctacggcctgactttcggattgtccatcctgtcgatcgccatcggcgccgtgttgtatcagaaaaggtttattcccgaagagatttcaatccaggaacgtcacgatggcgcttcgcgggagatcgaccgcaagacggtggtggcgaacctgaccgacgcgttcgagggctcgacgatccgacggcgcaagctgatcgggctgtccttcggcgtgggcatgggtgcgttcgggctaggcaccttggtcgcgtttgctggtggcctcatcaagaacccctggaagccggttgtccccaccgccgagggcaaaaaggcggtgctctggacgtcgggttggaccccccgctaccagggcgagacgatctatctggcgcgcgccaccggcacggaggacggaccaccgttcatcaaaatgcgcccggaggatatggacgccggtggaatggagaccgtttttccctggcgggagtccgacggcgacggcaccaccgtcgaatcacaccataagctgcaggaaatcgcgatgggtatccgtaacccggtgatgctcatccggatcaaacccagtgacctgggccgcgtggtcaagcgcaagggccaggagagtttcaacttcggcgaattcttcgcgttcaccaaggtctgctctcatttgggttgcccgtcatcgctgtacgagcagcagagctaccgaatcctgtgcccttgtcaccagtcgcagttcgacgcattgcatttcgctaagccgatcttcggtccagcggcccgcgccttggcgcaactgccgatcacgatcgacacggacgggtatctggtcgccaacggtgactttgtcgagcccgtcggaccagcattctgggagcgaacaacaacatga

SEQ ID NO: 28484 - DNA, 900 bp, Mycobacterium tuberculosis
atgagcgggccgaatcccccgggacgggaacctgacgaacccgaatcggaacccgtcagcgacacgggcgacgaacgggcttccggcaaccacttgccgcccgtcgccgggggcggcgacaaactgcccagtgaccagacgggcgagaccgacgcatattctcgggcatactctgccccggaatccgagcacgtcaccggcggcccgtatgtgccagccgatctcaggctctatgactacgacgactatgaggagtcgtccgacctggacgacgaactggccgctccgcgctggccgtgggtggtcggtgtcgccgccataattgccgccgttgcgctcgtggtttcggtgtcgttgctcgtcacgcgaccacataccagcaaactcgccaccggcgacactacgtcctctgcaccgcccgtgcaggacgaaatcacgaccaccaagccggcgccgccaccgccgccaccagccccaccgcccaccaccgagatcccgacagcgacggagacacagacggtcactgtgacgccgccaccaccgcccccaccggcgacaaccacggcgccgccgccggcgaccaccacaacggcggcggcaccgccgcccacgaccaccacgccgaccggtccgcggcaagtcacctattcggtgaccggtaccaaggcgccgggtgacattatctcggtgacttacgtcgatgccgccgggcgccgacggacacagcacaatgtgtacatcccgtggtccatgacggtcaccccgatctcgcaatccgacgttggctcggtggaggcctccagccttttccgggtcagcaaactcaactgctcgatcaccacgagcgacggaacggtgctctcatcgaactccaacgatggaccgcaaacgagctgctga

SEQ ID NO: 28485 - DNA, 1092 bp, Mycobacterium tuberculosis
gtgacacctcgcgggccaggtcgtttgcaacgcttgtcgcagtgcaggcctcagcgcggctccggagggcctgcccgtggtcttcgacagctggcgctcgcagcaatgctgggggcattggccgtcaccgtcagtggatgcagctggtcggaagccctgggcatcggttggccggagggcattaccccggaggcacacctcaatcgagaactgtggatcggggcggtgatcgcctccctggcggttggggtaatcgtgtggggtctcatcttctggtccgcggtatttcaccggaagaagaacaccgacactgagttgccccgccagttcggctacaacatgccgctagagctggttctcaccgtcataccgttcctcatcatctcggtgctgttttatttcaccgtcgtggtgcaggagaagatgctgcagatagccaaggatcccgaggtcgtgattgatatcacgtctttccagtggaattggaagtttggctatcaaagggtgaacttcaaagacggcacactgacctatgatggtgccgatccggagcgcaagcgcgccatggtttccaagccagagggcaaggacaagtacggcgaagagctggtcgggccggtgcgcgggctcaacaccgaggaccggacctacctgaatttcgacaaggtcgagacgttgggcaccagcaccgaaattccggtgctggtgctgccgtccggcaagcgtatcgaattccaaatggcctcagccgatgtgatacacgcattctgggtgccggagttcttgttcaagcgtgacgtgatgcctaacccggtggcaaacaactcggtcaacgtcttccagatcgaagaaatcaccaagaccggagcattcgtgggccactgcgccgagatgtgtggcacgtatcactcgatgatgaacttcgaggtccgcgtcgtgacccccaacgatttcaaggcctacctgcagcaacgcatcgacgggaagacaaacgccgaggccctgcgggcgatcaaccagccgccccttgcggtgaccacccacccgtttgatactcgccgcggtgaattggccccgcagcccgtaggttag

SEQ ID NO: 28486 - DNA, 1959 bp, Mycobacterium tuberculosis
gtgtgtggactgctggccttcgtcgcggccccggccggtgctgcggggcccgaaggtgccgacgctgccagcgccatcgcccgcgcatcgcatttgatgcgccaccgcgggcccgatgaatcgggcacctggcacgccgtcgatggcgcctccggaggcgtcgtgttcgggttcaaccgactgtccatcatcgacatcgcgcactcgcatcagccgctgcggtgggggccgccggaggctccggaccgctacgtgctggtgttcaacggcgagatctacaactacttggagctgcgtgacgagctgcgcacccagcacggcgctgtgttcgccaccgacggcgacggtgaggcgatcctcgccggctatcaccactggggcaccgaggtgctgcagcggttgcgcggcatgttcgcattcgcgctgtgggacaccgtcacccgcgaattgttctgcgcgcgagatccgttcggcatcaagccgttgtttatcgccaccggagccggcggcacggcggtggccagtgagaagaaatgcctgctggacctcgtcgagttggtggggttcgacaccgagatcgaccatcgggcgttgcagcactacaccgtcctgcagtacgtgccggaacccgagacactgcaccgtggggtacgtcggctggaatcaggctgcttcgcccggatccgtgccgaccagctcgcgccggtgatcacccgttatttcgtgccgcgatttgcggccagtccgatcaccaacgacaacgaccaggcccgctatgacgagatcacggcagtgcttgaggactcggtggccaagcatatgcgcgccgatgtcaccgtcggcgcgtttctgtccgggggtatcgactccacggccatcgcggcgctggccatccggcacaatccgcggctgatcaccttcaccaccggtttcgagcgcgagggcttctccgagatcgacgtcgcggtggcttcggcagaggccatcggtgcccgtcacatcgccaaggtggtcagcgccgacgagttcgtcgccgccctgcccgagatcgtctggtacctcgacgagccggtcgctgacccagcgctggtaccgttgttcttcgtcgcccgcgaggcccgaaagcacgtcaaagtggtgttgtcgggcgaaggcgccgacgaactgttcggcggctacacaatctatcgagaaccgctgtcgttgaggccgtttgactacctgcccaagccactgcgccggtcgatgggaaaagtttccaagccactgccggagggcatgcgcggcaagagtctgctgcaccgcggatcgctgacactcgaagagcgctactacggcaatgcccgcagtttctccggcgcgcagctgcgcgaagtactgcccgggttccggccggactggacccacacagatgtcacggcgccggtctacgccgaatcggccggctgggatccggtggcgcgaatgcagcacatcgacctgttcacctggctgcgcggcgacattctggtcaaggccgacaagataacgatggccaactccctggagctgcgggtgccgttcctggacccggaggttttcgcggtggcctcccggttgccggcgggcgccaagatcacccgtaccaccaccaagtacgcgctgcggcgcgcgctggagcctattgtgcccgcacacgtgctgcaccggcccaagctcgggttcccggtcccgatccggcattggctgcgtgccggcgagctgctggagtgggcgtatgcgacggtgggctcgtcgcaggccggtcacttggttgacatcgccgccgtgtatcgcatgctcgacgagcaccggtgcggcagcagcgaccacagccgccggctgtggaccatgctgatctttatgctgtggcacgcgatcttcgtcgagcacagcgtggtgccccagatcagcgagccgcagtaccccgtccagttgtaa

SEQ ID NO: 28487 - DNA, 1107 bp, Mycobacterium tuberculosis
atgaccagcggctcccttcaattcacggtgttacgtgcggtcaatccggccaccgacgcgcagcgtgaatcgatgctgcgggagccgggtttcggcaaataccacaccgaccatatggtgtcgatcgactatgccgagggccgtggttggcacaacgcgcgggtaatcccttatggcccgatcgagctggatccctcggcgatcgtgctgcactatgcgcaggaggtgttcgaagggctcaaagcctaccgctgggccgacgggtccatcgtgtcgtttcgcgccgacgccaacgccgccaggttgcgttcgtcggcgcggcggttggcgattcccgaactgcccgacgcggtgttcatcgaatccctgcgccagctaatcgctgtcgacaaagcttgggtgcccggtgccggcggtgaggaggcgctgtatctgcggccgttcatcttcgccaccgagccgggactgggcgtgcggcctgccacccaataccgttacctgttgatcgcctcgccggccggtgcgtacttcaagggcggcatcgcccctgtcagcgtctgggtttcgacggagtatgtacgggcctgtccgggcggcaccggtgcggccaagttcggcggcaactacgccgcctcgttgctggcgcaggccgaagccgccgagaacggatgcgaccaggtggtgtggctggacgctgtggaacgccgctatatcgaagagatgggtggcatgaacatcttcttcgtgctcggcagcggcggatcggcgcggctggtcaccccggagctgtccggttccctgctgcccgggatcacacgggattcgttgttgcagttggctattgatgccggattcgcggtcgaggaacgcaggattgatatcgacgagtggcagaagaaagccgccgccggcgagatcaccgaggtgtttgcgtgcggcaccgccgctgtcatcaccccggtcgcgcgggtgcggcacggtgccagcgagttcagaatcgccgacggtcagccgggtgaggtgaccatggcactacgcgatacgctgaccggcatccagcggggcaccttcgcggacacccacggctggatggcgcggctggggtag

SEQ ID NO: 28488 - DNA, 1140 bp, Mycobacterium tuberculosis
gtgtgccagcagggacgcccattagggtgggacgccgtgagcgatgtgccagagctgatacacggaccgctggaagaccgccatcgcgagctgggtgcgagtttcgccgagttcggcggctggctgatgccggtctcgtatgccggaaccgtcagcgagcacaacgccacccgcaccgccgtcggccttttcgacgtcagccacctgggcaaggcactggtccgtggaccgggtgcggcgcagttcgtcaactccgcgctcaccaacgacctgggtcgtatcgggcccggcaaggcgcaatacaccttgtgctgcaccgaatccggcggtgtgatcgacgacctgatcgcctactacgtcagcgacgacgagatctttctggtgcccaacgccgccaataccgccgcggtggtcggcgcgctacaagctgccgcaccgggcggtctgagcatcaccaatctgcatcggtcctacgcggtgctggccgtacaggggccgtgttcgaccgacgtgctcaccgcgttggggctgccaaccgagatggactacatgggctacgccgacgcttcgtactcgggggtgccggtgcgtgtctgtcgcaccggctacaccggtgagcacggttacgaactgctgccgccatgggagtcggcgggtgtggtgttcgacgcactgttggcggcggtatcagccgcgggcggcgagcccgccggcctcggtgctcgcgacacactgcgcactgaaatgggctatccgctgcacgggcacgagctttcgctggacatctcgccgctgcaggcccgatgcggctgggcggtcggctggcggaaggacgccttctttggtcgtgcggcgttgttggccgagaaagcggccgggccgcggcggctgctgcgggggctgcgcatggtcggtcgcggtgtgctgcgccccgggctggctgtgcttgtcggggatgagacggttggggtcaccacgtcgggaacgttttctcccacgttgcaggtcggcatcgggctggcgctgatcgacagtgatgccggcatcgaagacggccagcaaatcaatgtcgacgtccgcggccgtgctgtcgaatgtcaagtggtgtgtccgccgttcgttgccgtgaaaacgcgctga

SEQ ID NO: 28489 - DNA, 1548 bp, Mycobacterium tuberculosis
gtgaccaccgaaccgggttacctatccccctccgtcgccgtcgcgacctcgatgccgaaacgtggtgtcggcgctgcggtgttgatcgtgccggtcgtctcgaccggcgaagaggatcggcccggcgcggtcgttgcctcggccgagcccttcctgcgcgccgacacggttgccgaaatcgaggcgggcctgcgagcgctggacgccaccggcgccagtgaccaggtgcaccggctggcggtgccgtcgttgccggtgggcagcgtcctgacggtcggcctgggcaaaccgcggcgcgaatggccggccgataccatccgctgcgccgccggcgtggccgcgcgtgcgctcaacagttcggaggcagtgatcaccacgctagccgaattacctggcgacggcatctgctcggccaccgtcgaggggctgatcctgggcagctaccgattcagcgccttccgcagcgacaagaccgcgcccaaagacgccggactccgcaaaatcaccgtgctctgctgtgcaaaggacgccaagaagcgcgcgttgcacggtgcggccgtcgcgaccgcggtggccaccgcccgggacttggtcaacactcccccaagccacctgtttcccgccgagttcgctaagcgcgcaaagactttgagcgaatctgtcggcctcgacgtggaagttatcgacgaaaaggcgctgaagaaggccggctatggcggggtgattggtgtcggccagggctcgtcgcggccgccgcgactggtgcggttgattcatcggggatcgcggctggccaagaacccccaaaaggccaagaaggtggccttggttggcaaggggatcaccttcgataccggcggcatctcgatcaagccggcagcgtcgatgcaccacatgacctcggacatgggcggagcggccgcggtgatcgccactgtcacgctggctgcccggctgcgactgccgattgacgtgatcgccacggtgccgatggccgagaacatgccgtcggcgacggcgcagcgcccgggcgacgtgctgacccaatacggtgggaccaccgtcgaggtgctcaacaccgacgcggagggccggttgatcctggccgacgccatcgtccgggcatgtgaggacaagccggactatctgatcgagacatccacgttgaccggtgcgcaaacggtggcgctggggacgcgcataccgggtgtgatgggcagcgacgagttccgcgaccgggtcgccgcgatctcgcagcgggtgggcgagaacggctggccgatgccgctgcccgatgacctcaaggatgacttgaaatccacggtggccgacctggccaatgtgagtggccagcgtttcgcaggcatgctggtggccggggttttcctgcgtgagttcgtcgccgaatcggtggattgggcgcacatcgacgtggccggcccggcctacaacaccggcagcgcctggggttacacgcccaagggcgccaccggtgtgcccacccgcaccatgttcgcggtgctcgaggacatcgcgaagaacgggtag

SEQ ID NO: 28490 - DNA, 1662 bp, Mycobacterium tuberculosis
atggccttctccgtccagatgccggcactcggtgagagcgtcaccgaggggacggttacccgctggctcaaacaggaaggcgacacggtcgaactcgacgagcccctcgtggaggtgtcgaccgacaaggtcgacaccgaaatcccctcgccggccgcgggtgtgctgaccaagatcatcgcccaggaggatgacacggtcgaggtcggcggcgagctcgctgtcattggcgacgccaaggatgccggcgaggccgcggccccggcacccgagaaagtccctgcggcccaacccgagtccaagccggcacccgaaccaccaccggtccaaccgacgtccggagcgcctgctggtggcgatgccaagccggtgctgatgcccgagctcggcgaatcggtgaccgaggggaccgtcattcgttggctgaagaagatcggggattcggttcaggttgacgagccactcgtggaggtgtccaccgacaaggtggacaccgagatcccgtccccggtggctggggtcttggtcagtatcagcgccgacgaggacgccacggtgcccgtcggcggcgagttggcccggatcggtgtcgctgccgacatcggcgccgcgcccgcccccaagcccgcacccaagcccgtccccgagccagcgccgacgccgaaggccgaacccgcaccatcgccgccggcggcccagccagccggtgcggccgagggcgcaccgtacgtgacgccgctggtgcgaaagctggcgtcggaaaacaacatcgacctcgccggggtgaccggcaccggagtgggtggtcgcatccgcaaacaggatgtgctggccgcggctgagcaaaagaagcgggcgaaagcaccggcgccggccgcccaggccgccgccgcgccggccccgaaagcgccgcctgcccctgcgccggcgttggcacatctacggggcaccacccagaaggccagccggattcgtcagatcaccgccaacaagacccgcgaatctttgcaggcaacggcacagctgacacaaacccatgaggtcgacatgaccaagatcgtggggctacgggcccgggccaaggcggcgttcgccgagcgtgagggcgtgaacctgaccttcctgccgttcttcgccaaggccgtgatcgatgccctcaagattcacccgaacatcaacgctagctacaacgaggacaccaaggagatcacctactacgacgccgagcacctaggattcgctgtcgacaccgagcagggcctgctctccccggtcatccacgacgccggcgatctgtcactggccggtctggcgcgggcgatcgccgatatcgcggcccgtgcccggtcgggcaacctgaaacccgacgagttgtccggcggcaccttcaccatcaccaacatcggtagccagggcgcgttgttcgacaccccgatcctggttccgccgcaggccgccatgctgggcaccggggcgatcgtcaagcggccgcgggtggtcgtcgatgccagcggcaacgagtcgatcggggtgcgctcggtctgctacctcccgttgacctatgaccatcggctcatcgacggcgccgacgccggacgtttcctcaccacgatcaagcaccgcctcgaagagggagcgttcgaggccgatttaggactgtga

SEQ ID NO: 28491 - DNA, 906 bp, Mycobacterium tuberculosis
atggccaacgccgttgtcgcgatcgcgggttcgtctggcttgatcggctctgccctgaccgcggcgctgcgcgcggccgaccacacggtgctgcggatcgtgcgccgggcacctgcgaattccgaagaactgcactggaatcccgaaagcggcgaattcgatccgcacgcgctcaccgatgtcgacgccgtggtcaacctctgcggcgtcaacatcgcccagcgtcggtggtcgggggctttcaaacagagcctgcgcgacagccggatcacacccaccgaggtgctatccgccgcagtcgccgacgccggcgtcgctaccttgatcaacgccagcgcggtgggctactacggaaacaccaaggaccgggtggtcgacgaaaacgactcggcgggaacaggttttctggcccagctgtgcgttgactgggaaaccgccacgcggccggcgcagcagagcggtgcccgcgtggtgctggcccggaccggagtggtgctgtctccggcggggggcatgctgcgacgcatgcggccactgttttcggtgggcctgggcgcgcggctgggcagcggccggcaatatatgtcatggatcagcctggaggacgaggtgcgggcgctgcagttcgctatcgcgcagcccaacctgtccggcccggtgaacttgaccgggccggcccccgttaccaacgccgaattcaccaccgcgtttggccgcgccgtcaaccgccctaccccgctgatgttgcctagcgtcgcggtacgcgcggcgtttggtgagttcgccgacgaggggttgctcattggtcagcgcgccatcccctccgcgctggagcgagccggatttcagttccaccacaacaccattggcgaggcgctcggctacgccaccacccggcccggctag

SEQ ID NO: 28492 - DNA, 936 bp, Mycobacterium tuberculosis
atgagtgtcgctgccgagggccggcgcctgttacgcctggaggtgcgcaacgcgcagaccccaatcgagcgcaaaccgccgtggatcaagacacgagcccgcatcgggccggagtacaccgagctgaagaacctggtccgccgcgaggggctgcacacggtctgcgaggaggccggctgccccaacatcttcgaatgctgggaggaccgagaagccaccttcctgatcggcggtgaccagtgcacccgccgatgcgatttctgccagatcgacaccggaaagcccgccgagctggaccgcgacgagccacgccgagtcgccgacagcgtgcgcacgatgggcctgcgctatgccaccgtcaccggcgtggctcgcgacgacctgcctgacggcggggcctggctgtacgccgcgaccgtgcgcgccatcaaggaactcaatccgtcgaccggcgtcgaactgctgattcccgacttcaacggcgaaccaacccggctggccgaggtcttcgagtccggcccggaagtcctggcacacaatgtcgaaaccgtgccccgtatcttcaagcggatccggccggcgttcacgtaccggcgcagcctgggtgtgcttaccgctgcgcgcgacgccggcctggtcaccaagagcaacctcatcctcggcctgggcgaaacctccgacgaggtgcgcaccgccctgggcgatctgcgcgacgccggctgcgacatcgttaccatcacccaatacctgcggccgtcggcgcgccaccatccggtcgagcgctgggtgaagcccgaggagttcgtccagttcgcgcgattcgccgaagggctgggcttcgccggggtattggcgggacccctggttaggtcgtcatatcgggcgggccggctctacgaacaggcacgtaactcacgggccttggcatcccgctag

SEQ ID NO: 28493 - DNA, 753 bp, Mycobacterium tuberculosis
atggcgaaaccccgaaatgccgctgaaagcaaggccgccaaagctcaggcaaacgctgctcgtaaggctgccgcccgccagcgccgcgctcagctgtggcaagcgttcaccctgcagcgcaaggaggataagcgcctgctgccgtacatgattggtgctttcttgctgatcgtgggcgcatcggtgggggtcggggtgtgggctggcgggttcaccatgttcacgatgatcccgctgggggtgctgctgggtgcactggtggcgttcgtcatcttcggccggcgagcccagcgaacggtttaccgcaaagccgaaggccaaaccggcgcagccgcctgggcgctggacaacctgcggggcaagtggcgggtgacgcccggggtggccgccaccggcaacctcgacgccgtgcaccgggtgatcggccggcccggtgtcatcttcgtcggcgagggatcagcggcccgcgtcaaaccactgctggctcaggagaaaaagcgcaccgcgcgactggtcggggacgtgccgatctacgacattatcgtcggcaacggcgatggcgaggttccgctggccaagttggagcgccacctcacccgccttccggccaacatcacggtcaagcagatggacacggtggagtcgcgactggcggcgctgggttcgcgtgccggtgcgggcgtcatgcccaagggaccgctacccaccacggccaagatgcgcagcgtccagcgcacggtccgccgtaagtaa

SEQ ID NO: 28494 - DNA, 1341 bp, Mycobacterium tuberculosis
atggaccgacagaaggaattcgttcttcgtaccctggaagaacgcgacatccgcttcgtccggctgtggttcacagacgtgctcggtttcctcaagtcggtcgccatcgccccagccgaactcgagggcgccttcgaggaaggcatcggcttcgacggatcctcgatcgagggctttgcgcgggtctcggaatccgatacggtggcgcacccggacccgtcgaccttccaggtgctgccctgggccaccagttccggccaccaccactcagcgcggatgttttgcgacatcaccatgccggacggctcgccgtcgtgggcggacccgcggcacgtgttgcggcggcagctgacgaaggccggcgaactcggcttctcctgctacgtgcatcccgaaatcgagttcttcctgctcaagcccggacccgaggacgggtcggtgcccgtcccggtcgacaacgccggctatttcgaccaagcggtgcacgactccgccttgaactttcgccgccacgcgatcgatgccctggaattcatgggcatctcggtggagttcagccatcacgaaggcgcacccggccagcaggagatcgacctgcggtttgccgacgctctgtcgatggctgacaacgtgatgaccttccgctacgtcatcaaagaagtcgcgctggaagagggcgcccgggcgtcgttcatgcccaagccattcggccagcacccgggctcggcgatgcacacccacatgagcctgttcgagggtgatgtcaacgcgttccacagcgctgatgatccgctgcagctgtcggaagtgggtaaatcgttcatcgccgggatcctggagcacgcttgcgagatcagcgcggtcacaaatcagtgggtcaactcttacaagcggctggtgcagggcggcgaagcgcccacggccgcgtcgtggggggccgccaaccgatccgccctagtgcgggtgccgatgtacacgccgcacaagacctcgtcgcggcgggtcgaagtacgcagccctgattcggcgtgcaatccctatctgacattcgccgtgctgctggccgcgggattgcggggtgtagagaagggttacgtgctgggcccgcaggccgaggacaacgtatgggacctcacacccgaggaacgccgagcgatggggtaccgagaattgccgtccagtttggatagtgcgctgcgcgccatggaggcctccgaactcgtcgcggaggccttgggggagcacgtttttgactttttcttgcgcaacaagcgcacggagtgggcgaactaccgcagccacgtcacgccatacgagctgcgcacctacctgtcgctgtag

SEQ ID NO: 28495 - DNA, 846 bp, Mycobacterium tuberculosis
atgtctgagcagactatctatggggccaatacccccggaggctccgggccgcggaccaagatccgcacccaccacctacagagatggaaggccgacggccacaagtgggccatgctgacggcctacgactattcgacggcccggatcttcgacgaggccggcatcccggtgctgctggtcggtgattcggcggccaacgtcgtgtacggctacgacaccaccgtgccgatctccatcgacgagctgatcccgctggtccgtggcgtggtgcggggtgccccgcacgcactggtcgtcgccgacctgccgttcggcagctacgaggcggggcccaccgccgcgttggccgccgccacccggttcctcaaggacggcggcgcacatgcggtcaagctcgagggcggtgagcgggtggccgagcaaatcgcctgtctgaccgcggcgggcatcccggtgatggcacacatcggcttcaccccgcaaagcgtcaacaccttgggcggcttccgggtgcagggccgcggcgacgccgccgaacaaaccatcgccgacgcgatcgccgtcgccgaagccggagcgtttgccgtcgtgatggagatggtgcccgccgagttggccacccagatcaccggcaagcttaccattccgacggtcgggatcggcgctgggcccaactgcgacggccaggtcctggtatggcaggacatggccgggttcagcggcgccaagaccgcccgcttcgtcaaacggtatgccgatgtcggtggtgaactacgccgtgctgcaatgcaatacgcccaagaggtggccggcggggtattccccgctgacgaacacagtttctga

SEQ ID NO: 28496 - DNA, 408 bp, Mycobacterium tuberculosis
atgaacagcttgttcgacgggatcgggccgctgctggccgacctgcgcaccgccggtgtccggctggccgtcgccacctccaaggcagagccgaccgcacggcgaatcctgcgccacttcggaattgagcagcacttcgaggtcatcgcgggcgcgagcaccgatggctcgcgaggcagcaaggtcgacgtgctggcccacgcgctcgcgcagctgcggccgctacccgagcggttggtgatggtcggcgaccgcagccacgacgtcgacggggcggccgcgcacggcatcgacacggtggtggtcggctggggctacgggcgcgccgactttatcgacaagacctccaccaccgtcgtgacgcatgccgccacgattgacgagctgagggaggcgctaggtgtctga

SEQ ID NO: 28497 - DNA, 492 bp, Mycobacterium tuberculosis
gtgtctgatccgctgcacgtcacattcgtttgtacgggcaacatctgccggtcgccaatggccgagaagatgttcgcccaacagcttcgccaccgtggcctgggtgacgcggtgcgagtgaccagtgcgggcaccgggaactggcatgtaggcagttgcgccgacgagcgggcggccggggtgttgcgagcccacggctaccctaccgaccaccgggccgcacaagtcggcaccgaacacctggcggcagacctgttggtggccttggaccgcaaccacgctcggctgttgcggcagctcggcgtcgaagccgcccgggtacggatgctgcggtcattcgacccacgctcgggaacccatgcgctcgatgtcgaggatccctactatggcgatcactccgacttcgaggaggtcttcgccgtcatcgaatccgccctgcccggcctgcacgactgggtcgacgaacgtctcgcgcggaacggaccgagttga

SEQ ID NO: 28498 - DNA, 348 bp, Mycobacterium tuberculosis
gtgcctgtcactcaggaagaaatcattgccggtatcgccgagatcatcgaagaggtaaccggtatcgagccgtccgagatcaccccggagaagtcgttcgtcgacgacctggacatcgactcgctgtcgatggtcgagatcgccgtgcagaccgaggacaagtacggcgtcaagatccccgacgaggacctcgccggtctgcgtaccgtcggtgacgttgtcgcctacatccagaagctcgaggaagaaaacccggaggcggctcaggcgttgcgcgcgaagattgagtcggagaaccccgatgccgttgccaacgttcaggcgaggcttgaggccgagtccaagtga

SEQ ID NO: 28499 - DNA, 1251 bp, Mycobacterium tuberculosis
gtgagtcagccttccaccgctaatggcggtttccccagcgttgtggtgaccgccgtcacagcgacgacgtcgatctcgccggacatcgagagcacgtggaagggtctgttggccggcgagagcggcatccacgcactcgaagacgagttcgtcaccaagtgggatctagcggtcaagatcggcggtcacctcaaggatccggtcgacagccacatgggccgactcgacatgcgacgcatgtcgtacgtccagcggatgggcaagttgctgggcggacagctatgggagtccgccggcagcccggaggtcgatccagaccggttcgccgttgttgtcggcaccggtctaggtggagccgagaggattgtcgagagctacgacctgatgaatgcgggcggcccccggaaggtgtccccgctggccgttcagatgatcatgcccaacggtgccgcggcggtgatcggtctgcagcttggggcccgcgccggggtgatgaccccggtgtcggcctgttcgtcgggctcggaagcgatcgcccacgcgtggcgtcagatcgtgatgggcgacgccgacgtcgccgtctgcggcggtgtcgaaggacccatcgaggcgctgcccatcgcggcgttctccatgatgcgggccatgtcgacccgcaacgacgagcctgagcgggcctcccggccgttcgacaaggaccgcgacggctttgtgttcggcgaggccggtgcgctgatgctcatcgagacggaggagcacgccaaagcccgtggcgccaagccgttggcccgattgctgggtgccggtatcacctcggacgcctttcatatggtggcgcccgcggccgatggtgttcgtgccggtagggcgatgactcgctcgctggagctggccgggttgtcgccggcggacatcgaccacgtcaacgcgcacggcacggcgacgcctatcggcgacgccgcggaggccaacgccatccgcgtcgccggttgtgatcaggccgcggtgtacgcgccgaagtctgcgctgggccactcgatcggcgcggtcggtgcgctcgagtcggtgctcacggtgctgacgctgcgcgacggcgtcatcccgccgaccctgaactacgagacacccgatcccgagatcgaccttgacgtcgtcgccggcgaaccgcgctatggcgattaccgctacgcagtcaacaactcgttcgggttcggcggccacaatgtggcgcttgccttcgggcgttactga

SEQ ID NO: 28500 - DNA, 930 bp, Mycobacterium tuberculosis
atgagcgccgggcagctgcgccggcatgagatcggcaaggtcaccgcgctgaccaatcccctgtcaggccatggcgccgccgtaaaggctgcacacggcgcgatcgcccggctgaagcatcggggggtggacgtcgtcgagatcgtcggcggggacgcccacgacgcacgccatctgctcgccgcggcagtcgcaaaaggcactgacgcggtgatggtgaccggcggtgacggagtcgtctccaacgcgctacaggtcttggcgggcaccgacattccgttaggaatcattccggccggcactggtaacgaccacgcacgcgaattcgggcttcccacaaagaatcccaaggcagccgcagatatcgttgttgacggctggacggaaaccattgacctgggccggattcaagacgacaacggtatcgaaaagtggttcggtaccgtggcggctaccggattcgactccctggtcaacgatcgcgccaaccgaatgcgctggccacacgggcggatgcgctattacatcgcgatgctcgccgaactgtcgcggctgcggccgttgccgttccggctggtgctcgacggcaccgaagagatcgtcgccgacctcacacttgccgacttcggcaatacccgcagctacggcggcggattattgatctgccccaacgccgaccactcggacggcctgctcgacatcaccatggcccagtcggattcccgtaccaagttgctccgcctgttccccaccattttcaaaggcgcccatgtcgagcttgacgaggtgagcaccacacgagccaagacagtccacgtcgagtgccccggtatcaacgtctatgccgacggcgacttcgcctgcccgttaccagccgagatctccgcggtgccggccgcccttcaggttcttcgcccccgccacggataa

SEQ ID NO: 28501 - DNA, 939 bp, Mycobacterium tuberculosis; identical to SEQ ID NO: 28266

SEQ ID NO: 28502 - DNA, 1659 bp, Mycobacterium tuberculosis
atgagcgacaatgccaaacaccacagggatgggcatttggtggctagcggacttcaggatcgcgcagcgcgcacaccgcaacacgagggcttcctcgggccggaccgaccatggcacctgtcgttcagtctgctgctggcgggttctttcgtgctgttctcgtggtgggcattcgactacgcagggtccggcgcgaacaaagtcatcctggtgctcgccaccgtcgtcggcatgttcatggccttcaacgtcggcggcaatgatgtcgccaactcgtttggcaccagcgtcggcgcgggcacgttgaccatgaaacaggcgcttctggtcgcggcgatcttcgaggtcagcggcgcggtgatcgccggcggcgacgtcaccgagaccatccgcagcggcatcgttgatctgtccggggtgtccgtcgacccacgcgacttcatgaacatcatgctgtcggcgctatcggcagccgcgctctggctgctgtttgctaaccgtatggggtacccggtgtcgaccacacactcgatcatcggcggcatcgtcggcgcggcgatcgcgctggggatggtgagcggccagggcggtgccgcactcaggatggtccagtgggatcaaatcggccagatcgtggtgtcctgggtgctgtcgccggtgttgggcggcttggtgtcgtacctgctctacggcgtcatcaaacggcacatcctgctgtacaacgaacaggccgaacgacggctaacagaaattaagaaagagcgcatcgcacaccgcgagcgccacaaggcggcgttcgaccggctcaccgagatccagcagatcgcctataccggcgccctggcgcgcgacgccgtcgcggcaaaccgcaaggactttgatcccgacgaactggaatccgattactaccgcgagctacacgaaatcgacgccaagacatcgtcggtcgacgcgttccgggccctgcagaactgggttccgctggtcgccgccgccggatccatgatcattgtcgcgatgctgctgttcaaggggttcaagcacatgcacttgggccttaccacgatgaataactacttcatcatcgcgatggtcggtgcagcggtgtggatggccacctttattttcgccaagacacttcggggcgaatcactttcacggtcaacgtttttgatgttcagctggatgcaggtctttacggcctcgggcttcgccttcagccacggcagcaatgacattgccaacgccatcgggccgttcgcggcaatcctggatgtgctgcgcacgggcgccattgaaggcaacgcagcggtgcctgccgcggccatggtaacgttcggcgtcgcgttgtgcgcggggttgtggttcattggacgacgggtgatcgccaccgttggacacaacctcaccacgatgcacccggcatcggggtttgctgccgaattgtcggccgccggggtggtcatgggagccacggtcctgggtcttccggtttccagcacgcacattcttatcggcgccgtcctcggcgtcggcatcgtaaaccggtccaccaactggggactgatgaaaccgatcgtgctagcgtgggtcatcacgctgccttcggcggcgatcctcgcctcggtcggtcttgtcgcgctacgcgcgattttctga

SEQ ID NO: 28503 - DNA, 1629 bp, Mycobacterium tuberculosis
atgaatggtcgacgcaccataggcgaggatgggctggtgttcgggctcgtcgttatcgttgcgctggtcgccgccgtggtcgtggggaccgtcctgggccaccgctatcgcgtgggccctccagtgttgctcatcctgtccggttccctgctgggtctgattccccgtttcggtgacgttcagatcgatggcgaggtggtgctgctgctgttcctgccggcgatcctttattgggagagcatgaacaccagctttcgcgagatccgctggaacctgcgcgtcatcgtcatgttcagtatcgggctggtgattgccaccgcggtcgcggtgtcgtggacggcacgagcgctgggcatggagtcccacgccgcggctgtcctcggtgccgtgctctcccccaccgatgccgcggcggtggccggcctggcgaaacggttgccgcgccgggcgctgacagtgctacgcggcgagagcctcatcaacgacgggaccgcgctcgtgctgttcgccgtcaccgtggcggtcgcggaaggtgccgctgggatcggcccggccgcgctggtcggccggttcgtcgtctcctatctcggcggaatcatggccgggctgctggtcggcggcctggtgacattgctacgccgcagaatcgacgcaccattggaggagggagccctgagcttgctgacgccgttcgcagcgttcttgctcgctcaatctctgaagtgcagcggtgtggttgcggtgctggtttcggccctggtcctcacctacgttggtccgacggtgatacgcgctcgttcccgcctgcaggcgcatgcgttttgggacatcgccacgttcctgatcaacggctcgttgtgggtgtttgtcggcgtccagatcccgggcgcgatagaccacatcgccggcgaggacgggggactaccacgggccacagtcctggccctggcggtgacgggtgtcgttatcgccacccggatcgcctgggtacaggcaaccacggtcctgggtcacaccgtggaccgggtcctgaagaagcccacccgccacgtcggcttccgtcagcgttgcgtcacaagctgggccggtttccgcggcgcggtatcgcttgccgcagcgctggcggtgccgatgaccaccaatagcggcgctccattcccagaccgcaacctgatcatcttcgtcgtctcggtcgtcattctggtcaccgtgctggtccaagggacttccttgcccaccgtcgttcggtgggcgaggatgcccgaagacgtcgcgcacgccaacgaattgcagctggcccgcacccgtagcgcccaagccgccctcgacgctttgccgacggtcgccgacgaactcggggtcgcccccgatctcgtcaaacacctggaaaaggaatacgaagaacgcgcggtgctcgtcatggccgatggcgccgactccgcgaccagcgatctggccgagcgcaacgatctggtccggcgcgtgcgtctaggcgtgctgcaacaccagcggcaggccgtcaccacgttgcgcaaccaaaacctcatcgacgacatcgtgctgcgcgagctgcaggcggcgatggatctagaggaagtgcaactcttggaccccgccgacgccgagtga

SEQ ID NO: 28504 - DNA, 972 bp, Mycobacterium tuberculosis
atgaaatatctggacgtcgacggaatcggacaggtcagccggatcgggttgggcacttggcagttcggctcgcgtgaatggggatatggggaccggtacgccaccggcgccgcccgcgacattgtcaaacgcgcacgcgccttgggggtcacgctgttcgataccgccgagatctacggcctgggcaaaagcgagcgtattctcggggaggccctcggcgacgaccgcaccgaggtggtggtggctagcaaggtcttcccggtcgcgccgtttccggcggtgatcaagaaccgcgagcgcgccagtgcgcggcggctgcagctgaaccgtatcccgctgtatcagatccaccagcccaacccggtggtccccgattcggtgatcatgccggggatgcgtgacctgctggacagcggcgacattggcgcggccggtgtctccaactactcactggcgcgatggcggaaggccgacgccgcgcttgggcgcccagtcgtcagcaaccaggtacatttctcgctcgcccaccctgatgcgctcgaagatctggtgccgttcgccgagctcgagaaccgcatcgtgatcgcctacagcccgctggcgcaaggactattgggtggcaagtacggactcgagaatcgtcccggtggcgtgcgcgcgttgaacccgctgttcggcaccgagaacctgcgccggatagagccgctgctggctacgttgcgcgccatcgccgtcgacgtcgacgccaagcccgcccaggtggcactggcctggctgattagcctgccgggggtggtcgccattcccggagcgtccagtgtcgagcaactcgagttcaacgtcgcggccgctgacatcgagctcagcgcgcaatcccgcgacgcgctcaccgacgccgcccgggcgtttcgcccggtttccaccggccgcttcctcaccgacatggtgcgtgagaaggtcagccgtcgttga

SEQ ID NO: 28505 - DNA, 1944 bp, Mycobacterium tuberculosis
atgaacgcccatgtcgagcagttggagtttcaggcggaggcccggcaactgctggatttgatggtccactcggtctactccaataaggacgcgtttctgcgggagttgatctcgaatgcctccgatgcgctagacaagctgcggattgaggcgctgcggaacaaggacctggaggtcgacacctccgatctgcacatcgagatcgacgcagacaaagctgcaaggactcttaccgttcgtgacaacggcatcgggatggcgcgcgaggaggtggtggatctgattggcacgctggccaagtcgggcaccgccgagctgcgcgcacagctgcgtgaggccaagaacgcggccgcctccgaggaactgatcggtcagttcggcatcggcttctactcgtcgttcatggtggccgacaaggtccaactgcttacccgcaaggctggcgagagcgcggccaccagatgggagtccagcggtgagggcacctacaccatcgagtccgtcgaggatgccccccagggcacgtcggtcaccctgcacctcaagccggaagacgccgaggacgacctgcacgactacacctcggaatggaagatccgtaacctggtcaagaaatactccgacttcatcgcctggcccatccggatggacgtcgagcgccgcaccccagcctcccaggaagaagggggggaaggcggcgaggagaccgtcaccatcgaaaccgaaaccctcaactcgatgaaggcgctgtgggcgaggcccaaagaagaggtgtctgagcaggagtacaaggagttctacaaacacgtcgcgcacgcctgggacgacccgctcgagatcatcgcgatgaaggccgagggcaccttcgagtaccaggccctgctgttcatcccgtctcatgccccgttcgatctgttcgaccgggacgcccacgtcggtatccagctctacgtcaagcgggtgttcatcatgggcgactgcgaccagctcatgcccgagtacttgcgttttgtcaagggtgtggtcgacgcgcaggacatgtcgctcaacgtttctcgcgaaatcctgcagcaggaccggcagatcaaggccatccgccggcggctgaccaagaaggtgctgtccacgatcaaggacgtgcagtccagccggccggaggactaccgcacgttctggacacagttcggcagggtcctcaaagagggactgctgtcagacatcgataaccgggagaccctgctcggtatttcttcgtttgtctccacgtacagcgaggaggaacccaccacgctggccgaatacgtcgagcgcatgaaggacggtcagcaacagatcttctacgccaccggcgagacgcgccaacaactgctgaagtcaccgcacctggaggcgtttaaggccaaggggtacgaagtgctgctgctcaccgacccggtcgacgaggtctgggtgggaatggtgccggagttcgacggcaaaccgctgcagtcggttgccaagggcgaggtggacttgagttccgaagaggacaccagcgaggccgagcgcgaggagcggcagaaggaatttgccgacctgctgacctggttgcaggagacgttgagcgatcacgtcaaggaggtgcggctgtccacccgcctgaccgagtcaccggcctgtctgatcaccgatgccttcgggatgacacccgcgctcgcgcgcatctaccgggcttccggccaggaggttccggtcggcaagcggatacttgagctcaacccgagccatccgttggtgaccggcctgcgccaagcccaccaggaccgcgcagacgatgccgagaaatcattggccgaaaccgcggaattactttacggcacagcgcttctcgccgaaggcggcgcactcgaggatccggcgaggttcgccgagctgctggccgaacgtctcgcgcgtaccttgtag

SEQ ID NO: 28506 - DNA, 849 bp, Mycobacterium tuberculosis
atgaccacaacttcggccccggcacgcaacgggactcgtcgcccgtcacgtccgattgtgctgttgattccggtgccgggtagctcggtcatccacgacctgtgggccggcaccaaattattggtggttttcggcatttcggtgttgctgacgttctacccgggatgggtgacgatcgggatgatggcggctttggtgctggccgcggcccgaatcgcgcacattccgcgcggcgcgctgccgtcggtacctcgctggctgtggatcgtcctcgcgatcggctttctgaccgctgcgctagccggtggcactccagtggtcgccgtgggcggagtgcagctcggattgggcggcgcactgcacttcctgcggatcaccgcgctgtcggttgtgctcctggcgctgggggcgatggtgtcctggaccaccaatgttgccgaaatcagccctgcggtagccactttgggtcggccgtttcgggtgttgcggatcccggtcgacgaatgggcggtggcgttggcgctcgcgctgcgcgccttcccgatgttgatcgacgaattccaggtgctctacgccgcgcgccggctgcggcccaagcggatgccgccaagccgcaaggctcggcgccagcggcatgcgcgcgagctgatcgacctgcttgccgctgccatcacggtgaccctgcgccgtgccgacgagatgggcgacgcgatcaccgcccgtggcggcaccggccagctgtcagcgcatcctgggcgacccaaacttgccgactgggtgacgcttgcgatcactgccatggccagcgggacagcggtggcgatagagagcctgatattgcactcctag

SEQ ID NO: 28507 - DNA, 1614 bp, Mycobacterium tuberculosis
atgaaccgcacgcagctcctcacgctcatcgccactggcctgggcctgttcatgatctttctcgacgcactgatcgtgaacgtggcgctgcccgacatccagcgcagtttcgcggtgggggaggacggcctgcagtgggtggtggcgtcctacagcctcggaatggcggtcttcatcatgtcggcggcgacgcttgccgacctcgacggtcggcgccgctggtacttgataggtgtttcgttgttcacgctgggatctatcgcctgcgggttggcgccctcaatcgcggtgctcaccaccgcgcggggcgcgcagggcctaggtgcggcggccgtcagcgtaacctcgctcgccctggtcagcgcggcctttccggaggcgaaggagaaggcgcgcgccatcgggatctggaccgccatcgcgagcatcggtacgacgacgggcccgacactgggcggtctgctggtggaccagtgggggtggcgcagcatcttctatgtcaacctgcccatgggcgcactcgtcctcttcctgactttgtgctacgtcgaggagtcgtgtaacgagcgggcacgccgcttcgatctgtccgggcagctgctgttcatcgttgccgtgggtgccctggtgtatgcggtcatcgaaggcccccagatcggctggacgtctgtccagaccatcgtgatgctctggacagccgccgtcggctgcgccctgttcgtctggcttgagcgcagatcatcgaatccgatgatggatctgaccctgttccgcgacacctcatacgccctggccatcgcgaccatctgcacggtgttcttcgccgtctatgggatgctgctgctcaccacccagttcctgcagaacgtgcgcggctataccccgagcgtgaccggcctgatgatccttccgttcagtgcggccgtggccatcgtgtcgccacttgttgggcacctggttggccggatcggagcacgcgttcccatcctggcggggctgtgcatgttgatgctgggtctgctcatgctcatcttcagcgagcaccggagctcggccctggtcctggtcgggctgggcttgtgcgggagcggcgtcgcgttgtgcctgacgccgatcacgaccgtcgccatgaccgcggtccccgccgagcgtgcgggcatggcgtccggcatcatgagtgctcagcgggcgatcggctcgacgatcgggttcgcggttttgggctccgtccttgccgcctggctttcggccacactcgagccccatctggagcgcgcggtgcccgacccggtccagcgccacgtccttgccgagatcattatcgacagtgccaatccgcgagcgcatgtgggcggaatcgtcccccggcggcacattgagcatcgcgaccccgtcgcgattgcggaggaggatttcatcgaaggcattcgggtggcgttgctcgtcgccactgcaacactggctgtcgtgtttctcgccggctggcgatggtttccgcgtgacgtgcacaccgcgggcagcgacctaagcgagaggctgcctacagcgatgaccgtcgagtgcgcggttagtcatatgccgggagccacatggtgtcgactatggcctgcctga

SEQ ID NO: 28508 - DNA, 933 bp, Mycobacterium tuberculosis
atgagcatcgccgaggacatcacccaactcatcgggcgcacaccgctggtccgactgcgccgagtcaccgacggcgccgttgccgacatcgtcgccaagctggaattcttcaacccggccaacagcgtaaaagaccgtatcggggttgccatgctccaagcggccgagcaggcaggtttgatcaagccggacacgatcattctcgaacccacgagcggtaacaccggcatcgccctggccatggtttgcgcggcacgcggctaccggtgcgtgctgaccatgcccgagacgatgagtctggagcgccggatgttgctgcgcgcatacggtgctgaactcatcctcactccgggtgcggacggcatgtcaggtgccatcgccaaggctgaggagctggccaagaccgatcaacgctacttcgtgccccagcaattcgagaacccggcgaacccggccatccatcgcgtcacgaccgccgaggaggtctggcgtgacaccgacggcaaggtcgacatcgtcgtcgcgggagtcggcaccggtggcaccatcaccggcgtcgcgcaggtcatcaaggaacgcaagccgtcggcccggttcgtggccgtagagccggccgcgtcgccggtcctttctggtggccagaagggaccgcacccgatccagggcatcggcgccgggttcgtcccgccggtactcgaccaggacctagtcgacgagatcattaccgtcggtaacgaagacgcgctcaacgtggcgcgccggctggcccgggaagagggcttgctggtcggcatctcctcgggcgccgccacagtggccgctcttcaggtggcccgccggccagagaacgccgggaagctaatcgtcgtagtgctccccgacttcggcgaacgatatctgagcacaccgttgttcgccgacgtggctgactaa

SEQ ID NO: 28509 - DNA, 690 bp, Mycobacterium tuberculosis
atgctgacggccatgcggggcgacatccgagcagcccgggagcgggatccggcggcccctaccgcgctggaagtcatcttctgctacccgggcgtgcacgccgtgtggggccaccgcctcgcccactggctgtggcagcgtggcgccaggctgctcgcgcgggcagctgccgaattcactcgcatcctgaccggtgtagatatccaccccggtgccgtcatcggtgctcgcgtgttcatcgaccacgcgaccggcgtggtgatcggagaaaccgcggaggtcggcgacgacgtcacgatctatcacggcgtcactctcggcggcagtggcatggttggcgggaaacgccatcccaccgtcggtgaccgcgtgatcatcggcgccggggccaaggtcctcggtccgatcaagatcggcgaggacagccggatcggcgccaatgccgtcgtggtcaagcccgtcccgccgagcgcggtggtggtcggggtgcccgggcaggtcatcggccaaagccagcccagtcccggcggcccgtttgattggaggctgcccgatctcgtgggagccagcctcgattcgctgctcaccagggtggccaggctggaggccctcggcggcggcccgcaagcagcaggagtcatccggccacccgaagccgggatatggcacggcgaggacttctcgatctga

SEQ ID NO: 28510 - DNA, 1920 bp, Mycobacterium tuberculosis
atgtccggccggatctccgatcgcgatatcgcggcaatccgcgagggggcccgtatcgaggatgtcgtcggcgactatgtccagctcaggcgtgccggtgccgattcgctgaaggggctgtgcccgtttcacaacgagaagtccccgtcctttcacgtgcggcccaaccacggccacttccactgcttcggctgcggcgagggcggcgacgtgtatgcgttcatccagaagatcgagcacgtcagcttcgtcgaggcggttgagttgcttgccgaccggatcggccacacgatcagctacaccggtgcggccaccagcgtgcagcgcgaccgcggcagtcgcagcaggctgctggccgccaacgcggccgcggcagcgttctatgcgcaggcgctgcagtccgacgaggcggcaccggctcgccagtacctgaccgaacgcagcttcgacgcggcggccgctcgtaaattcggctgtgggttcgccccgtcgggctgggactcattgacaaaacatctgcagcgcaagggttttgagttcgaggaactggaggccgcgggactgtcccggcagggccggcacggcccgatggaccggtttcaccgtcggctgctgtggcccatccgcacctcggccggcgaggtggtcgggttcggtgcccggcgactgttcgacgacgacgcgatggaggccaagtacgtcaacacgcccgagacattgctgtacaagaagtcatcggtgatgttcggcatcgacttggccaaacgcgacatcgccaagggacatcaggccgtcgtcgtcgagggctacaccgatgtcatggccatgcatctggccggggtcaccaccgcggtggcgtcgtgcgggaccgcattcggcggcgagcacctggcgatgctgcgcagactgatgatggacgacagcttcttccgcggcgagctgatctacgttttcgacggcgacgaggccggccgcgccgccgcgctcaaggccttcgacggtgagcagaagctggctggtcagtctttcgtcgcggtggctcccgacggcatggacccctgcgacctacgactgaagtgcggcgacgctgccctgcgcgacctcgtggcacgacgaaccccattgttcgagttcgcgattcgcgccgcgattgccgagatggacctggatagcgccgagggcagggtggccgcgctgcgccgttgcgtaccgatggtgggccagatcaaagaccccacgctgcgtgacgaatacgcccgtcagctcgccggctgggtcgggtgggccgacgtcgcacaggtcatcggtcgggtgcggggtgaggccaaacgaaccaagcaccccaggctgggcagactgggatcgacgaccatcgcccgggcagcgcagcggcccaccgccggccccccgaccgaactcgcagtccgacctgatccgcgtgacccgaccctgtggccacagcgtgaggcactcaaatcggcgttgcagtacccggcgttggccggcccggtgttcgacgcgctgaccgtcgaaggcttcacgcaccccgagtacgcggctgtgcgcgcggccatcgacacggcgggcggtacctcggctggccttagcggtgcgcagtggctggatatggtgcgccagcagacgacatcaaccgtgacctcggctttgatcagcgagctgggggtggaggcgattcaggtcgacgacgacaagctgccgcgctatatcgccggcgtgctggcccgtctgcaggaggtttggttggggcggcagatcgccgaggtgaagtccaaactgcagcgcatgtcgccgatcgagcaaggcgacgaataccacgcgctgttcggcgacctggtcgccatggaggcctatcggcgcagcctgttagagcaggccagcggcgacgatctcaccgcgtga

SEQ ID NO: 28511 - DNA, 1983 bp, Mycobacterium tuberculosis
atgcgtctcgttcgcctgctcggcatggtcctgactatcctcgccgccgggctgctgctggggccgcccgctggcgcgcaaccacctttccggctgtcgaactacgtgaccgacaacgcgggcgtgctgactagctccggtcgcaccgcggtgacggcggccgtcgaccggctctatgccgatcgccgcatccgactgtgggtggtctacgtcgagaacttctccggtcagagtgcgctcaactgggcgcagcgcacgacgcggactagcgagctgggtaactatgacgcgcttctggccgtggccaccaccggtcgcgaatatgcctttctagtgccatccgcgatgccgggtgtcagcgaggggcaggtcgacaacgtgcggcgctatcagatcgaaccggcgctgcacgacggcgactacagcggcgcggccgttgcggcggcgaacggactcaaccggtcacccagttcgtcgagtcgagtggtgttgttggtcacggtcggcatcatcgtcatcgtcgtcgcggtcctgctggtggtgatgcgccaccgcaaccggcggcgccgcgccgacgagctggccgcggcacgccgcgtcgaccctaccaacgtaatggcactggccgccgtgccgcttcaggccctcgatgacctctcccggtcgatggtggtagacgtcgacaacgccgtgcgcaccagcaccaacgagctcgcgctggccatcgaggagttcggcgaacggcgaaccgcaccgtttacccaagcggtgaacaacgccaaagcggctctgtcccaggcgttcaccgtacgccaacaacttgatgacaacacgcccgagacgccggcgcagcgacgtgagctactcacccgagtgatcgtgtcggcggcgcacgccgaccgtgaactcgcgtcgcaaaccgaggccttcgagaagctacgcgatttggtgatcaacgccccggcccggcttgatctgctcacccagcagtacgtcgaactgaccacccggatcggcccgactcagcaacgcctggccgagctgcataccgaattcgacgctgcggcgatgacgtcgatcgccggcaatgtcaccaccgccaccgagcggctggcgttcgccgaccgtaacatcagcgcggctcgggatctggccgaccaggcagtgagcggacggcaagccggactggtggatgcggtgcgtgccgccgagtcggcactcgggcaagcccgggcgctgctcgacgcggtggacagcgccgccaccgacatccggcacgccgtcgcgtcgctgccggcggtcgtggccgacatccagacgggcatcaagcgagccaaccaacacctacagcaggcgcaacaaccccaaaccgggcgcaccggtgacctgatcgcagcccgcgatgcggcggccagggccctcgatcgcgcgcgcggagccgccgatccgttgaccgcatttgaccagttgaccaaggtcgacgctgacctcgaccggctgctcgccaccctggccgaagaacaggcaaccgccgatcggctcaaccgctcacttgagcaggcgctgtttaccgcggagtcgcgggtgcgcgccgtctcggagtacatcgacacccgccgcggcagcatcgggccggaggcccggacccggctggccgaggcgaaacggcagctggaagccgcacatgaccggaaatcgagcaacccgaccgaagcgatcgcctacgctaacgcggcatcgacgctggccgcacatgcgcagtcgctggccaatgccgacgtgcaatccgcccagcgcgcatacacccgtcgtgggggcaacaacgccggcgcgatcctcggtggcatcatcatcggcgacctgcttagcggaggcaccagaggcgggttgggtggatggatccccacgtcgttcggcggttcgtcgaacgcgccgggaagttcacccgacggcgggttcttgggcggcggcgggcggttctaa

SEQ ID NO: 28512 - DNA, 939 bp, Mycobacterium tuberculosis; identical to SEQ ID NO: 28266

SEQ ID NO: 28513 - DNA, 1392 bp, Mycobacterium tuberculosis
gtgcaccaccccgtggcgcccgtcatcgacaccgtggtcaacctagccaaacggcgaggcttcgtctatccgtcgggcgagatctacggcggcacaaagtcggcgtgggactatggtccgctaggggttgagctcaaagagaacatcaagcgccagtggtggcgatcggtggtgactggccgcgacgacgttgtcggaatcgattcgtcgatcatcctgccgcgtgaggtgtgggtggcttccggtcacgtcgatgtctttcatgacccgctggtcgagtcgctgatcacacataagcgctaccgggccgaccatctcatcgaggcctacgaagccaaacacgggcatccgccgcctaacgggttggccgacattcgcgacccggaaaccggcgaacccggccagtggacgcagccacgcgagttcaacatgatgctcaagacctacctcggacccatcgagaccgaggaggggctgcactatctgcgcccggaaaccgcgcagggcatcttcgtgaactttgccaacgtggtgacaactgctcgtaagaagccgccattcggtatcggacagatcggcaagagctttcgcaacgagatcactccgggcaacttcatcttccggacccgcgagttcgagcagatggagatggagttcttcgtcgagccggcgactgccaaggaatggcatcagtactggatcgacaaccggctgcagtggtatatcgacctgggtattcgtcgggagaacctgcggttgtgggagcaccccaaagacaagttgtcacattactccgaccgcaccgtcgacatcgagtacaagttcggcttcatgggcaatccatggggtgaactggaaggtgtggccaaccgaaccgattttgacctatcgacgcatgcgcggcattccggcgtcgacctgtctttctacgaccagatcaacgatgttcggtacacgccgtacgtcatcgagccggcagctggcttgacccggtcattcatggcgtttttgatcgacgcgtacaccgaggacgaggccccgaataccaagggtgggatggataagcgcacggtgctgcgattggacccgcggctggcgccggtcaaggcggcggtgttgccgctgtcccggcacgcggacctgagcccgaaggcccgggacctgggcgccgaattacggaaatgctggaacatcgatttcgatgatgccggcgctatcgggcggcgttaccggcgccaggacgaggtcggtaccccgttctgtgtgacggttgacttcgactcgctgcaggacaatgccgtcaccgtgcgggagcgtgacgccatgacgcaggaccgggttgcgatgagcagcgtggccgactatctcgcggtgcggctcaagggcagctag

SEQ ID NO: 28514 - DNA, 891 bp, Mycobacterium tuberculosis
gtggctagggatgcacggaagcggacgtccagcaacttcccgcagctgcctccggcccccgacgactacccgacctttcctgatacgtcgacgtggcccgtcgtcttcccggagttgccggcagcgccctacggaggcccctgccggccaccgcagcacacttcgaaagcggccgcgccacgaataccggccgaccggctgcccaaccatgtcgccattgtcatggacggcaatggccgctgggccacccaacgtgggctggcccgcaccgaaggtcacaagatgggcgaggcggtggtgatcgacatcgcttgcggtgctatcgaacttgggatcaagtggctcagcctctacgccttctccacggagaactggaagcgttcgcccgaggaagtccgcttcctgatgggcttcaaccgcgacgtggtgcgacggcgccgagacaccctaaagaagctaggggtccggatccggtgggtgggttcacgaccacggctgtggcgtagcgtcatcaatgagttggcggtcgcggaggagatgaccaaaagcaacgacgtcatcaccatcaactattgcgtcaactacggcggacgcaccgaaatcaccgaagccacccgcgaaatcgctcgtgaggtcgccgcgggcaggctcaacccggagcggatcaccgaatccacgatcgcccgccacctgcagcgacccgacattcccgacgttgacctcttcctgcggacctcgggtgagcagcgctccagcaacttcatgctgtggcaggcggcctacgctgaatacatattccaggacaagctctggcccgactatgaccgccgcgacttgtgggcggcctgcgaggaatacgcgtcgcgcactcggcggttcgggagcgcctag

SEQ ID NO: 28515 - DNA, 903 bp, Mycobacterium tuberculosis
atgaccgaattccattctggctttgtgtgtttggtcggccggccgaacaccggcaagtccacgctgaccaatgcgctggtcggggcgaaagtggcaatcacgtcgacgcgcccgcagaccaccaggcacgccattcgtgggatcgtgcatagcgacgacttccagatcatcctcgtcgacactcccggtctgcaccggccgcgcactctgctgggcaagcggctcaacgacttggtccgcgaaacctacgcggcggtcgacgtcatcgggctatgcatccccgccgacgaggcgatcggtccgggagaccggtggattgtcgagcagcttcgttcgaccggccctgccaatacgacactggtggtcatcgtcaccaagattgacaaggtgccgaaagaaaaagtggtcgcccagctggtagcggtcagcgaactcgtcacgaatgcggccgagattgtcccggtttcggcgatgaccggcgaccgggtagacctgttgatcgacgtactggccgcggcattgccggccggccccgcgtattaccccgacggtgagttgactgacgaacccgaggaggttctgatggccgagctcatccgcgaggcggcccttcagggcgtgcgcgatgagctgccccattcgctggcggtggtgattgacgaggtcagtccacgtgaggggcgtgacgacctgatcgacgtacacgccgcgctgtacgtcgagcgagatagtcagaagggcatcgtcatcggcaagggtggtgcccggctgcgggaggtgggtaccgcggcccgtagccagatcgaaaacctgctgggcaccaaggtctatctcgacttgcgggtcaaggtcgccaagaactggcagcgcgaccccaaacagcttggccgactggggttttag

SEQ ID NO: 28516 - DNA, 1308 bp, Mycobacterium tuberculosis
ttgaccgggtactaccagctgctcggctcgatcgtattgatcggtttgggtgggttgttcgccgcgattgacgccgccatcagcaccgtgtctccggcccgggtggatgagctagtacgcgaccagcggccgggcgcggggtcgctgcgtaaggtgatggccgaccggccgcggtacgtcaacctggtcgtgttgctgcggaccagctgtgagatcaccgcgaccgcgctgctggtggttttcatccgataccacttcagcatggtgtgggggttgtatcttgccgcgggcatcatggttttggccagctttgtcgtcgtgggagtggggccacgcacccttgggcgccagaacgcatattccatctcgttggccacggcccttccgctgcggctgatctcgtggttgttgatgccgatcagccgcttgctggtgttgctgggcaacgcactgacccccgggcgcggctttcgcaacgggccgtttgcatccgagatcgagctgcgcgaagttgtcgacctagcccagcagcggggcgtggttgctgccgacgagcgccggatgatcgagtcggtcttcgagctgggtgacaccccagcccgcgaggtgatggtgccgcgcaccgagatgatctggatcgaaagcgacaagacagccggtcaagcaatgaccctggcggtacgcagcggacattcccgaatcccggtgatcggcgagaacgtcgacgacatcgtcggcgtggtgtacctgaaagaccttgtcgagcagacgttctgctcgacgaacggcggccgcgaaacgaccgtcgcgcgggtgatgcggccagctgtgttcgtgccggactccaagccgctggacgcattgctgcgggaaatgcagcgcgaccgtaaccacatggccctgctggtcgacgagtacggcgcgatagccggcctcgtcagcatcgaagacgtgctggaggagatcgtcggcgagattgccgacgagtacgaccaggccgagacggcgccggtggaagacttgggcgacaagcgtttccgggtatcggcgcgcctgcccatcgaagacgtcggcgagctgtacggcgtggagttcgacgacgaccttgacgtcgacacggtgggcgggctgctggccctagaactgggccgggtgccgctgcccggcgctgaggtgatatcgcatggcctgcggctgcatgccgagggtggcaccgatcatcggggacgggtacgaatcggcaccgtgttgctgagtccggccgaacccgacggcgccgatgatgaggaggccgatcaccctggctga

SEQ ID NO: 28517 - DNA, 789 bp, Mycobacterium tuberculosis
atggtggcgatgctgttttacgtcgacacactgcccgacaccggtgcggtggcggtcgtagacggcgacgaaggatttcacgccgccaccgtgcggcggatccgtcccggcgagcagttggtgcttggtgacggtgtcggtcgcctggcccgctgtgtggtggagcaggccggacgtggcgggctgcgggcccgggtgcttaggcgctggagcgtcccgcccgtgcggccaccggtgaccgtggtgcaggcgctgcccaaatccgaacgctccgaattggcaatcgagctggccaccgaagccggagccgacgcgttcctggcatggcaggcggcgcgctgcgtggcgaactgggacggggcgcgtgtcgacaagggtttgcgtcggtggcgagcggtggtccgctcggcggcccggcaatctcgtcgggcgcgcatcccgccggtcgacggcgtgttgtcgacgccaatgcttgtacagcgtgtccgagaagaggtggccgccggcgcggcggtgctggtcctgcacgaggaggcgaccgagcggattgtggatatcgctgcggcgcaagctggttcgttgatgctcgtggttggacccgagggtgggatcgcaccggacgagcttgccgcgctgaccgatgccggcgccgtcgcggtccggctgggcccgacggtgctgcggacatcgaccgcggccgcggtggcattgggtgctgtcggtgtgctcacatctcgttgggatgcatcagcgagcgactgtgaatactgcgacgtgacacgccggtag

SEQ ID NO: 28518 - DNA, 5049 bp, Mycobacterium tuberculosis
atgtggttcgtgcagatggccgaccccagcggtgcgttactcaacatctgtgtgtcctaccgcatcaccggtgacatcgatctggccaggttgcgcgacgcagtcaacgccgtcgcccgtcgccatcggatactgcgtaccacctaccctgtcggcgacgacggagtcgcccagccgaccgtgcacgcggatcttcgccccggctggacacaatacgacctgacggacctgtcccaacgcgcccagcggctgcgcctggaggtgttggctcagcgcgaattctgcgctcccttcgagctttcccgcgacgcgccattgcgaatcacggtggtgcgcacggctgccgacgaacacgtgctgctgttggtggcccaccacatcgcctgggatgatggttcgtggcgggtgttcttcaccgatctcacccaggcgtactcgcgagctgacctaggggccgatctggggccagaacaccgtccgtcggccgcatccggacccgacactaccgaggccgacctcaactattggcgcgcgatcatggccgatccgccagagccgctggaacttcccggcccagccggaacgtgtgtgccgaccagttggcgtgccgcgcgcgccacgttgcggctgcccgccgacaccgctgcgcgggtggccacgatggcgaagaacaccggttgcactccctacatggtgctgctggccgcgttcggtgccctggtgcatcgctacacccacagtgacgacttcctcgtggcggctccggtgctcaaccgtggcgccggaaccgaagatgccatcggctatttcggcaacacggtagcgatgcggctgcgaccgcaatcggcgatgagtttccgggagttgctgaccgccacccgcgacatcgccagcggggcgttcgcacaccaacggatcaacctcgaccgcgtggtaagggaactgaaccccgatcgccggcacggtgccgagcgcatgacccgggtcagcttcggtttccgggagcccgacggcggcggattcaacccgccaggcatcgagtgcgagcgctacgacctgcgcagcaacatcacgcagctgccgttgggcttcatggtcgaattcgaccgcgcgggtgtgctggtcgaggccgaacacctggtggagatcctggaacccgccctggccaagcagatgcttcgacacttcggtgtgctgctcgacaatgcgctggccgcccccgacaacacgttgtcggggctggcgctgatggatgagcgcgacgccgccaggctgcgcgaggtgtcgcgcggcgagcggttcgatacccctgtcaaaaccctcgtggacctggtgaacgagcagaccacgcggactcccgacgccaccgccgtggtgtatgagggccaacacttcacctaccacgacctcaatgaggcgtcgaaccggttggggcactggctgatcgagcaggggataggcagcgaagaccgggtcgcggtacttcttgacaaatcgccggacctgatcgtcacggccttgggggtggtcaagtccggggcggtgtatgtgcccgtggatcccagctacccgcaagaccggctggatttcatcctcgccgactgcgacgcgaaactggtgctgcgcacgccagtacgtgagctggccggataccgcagcgacgaccccaccgacgccgatcgaatccggccgctacggccagacaacacggcctatctcatctacacgtccggtaccaccggattgcccaaaggtgtcgcggtgccacaccgccccgtcgccgagtacttcgtctggttcaagggcgaatacgacgtcgacgacaccgaccggctactgcaggtcgcctcacccagcttcgacgtctcgatcgccgagatcttcggcacgctggcctgtggcgcgcggatggtgataccacgccccgggggactcaccgacattggatatctcaccgccctgttgcgcgacgagggcatcacggcaatgcatttcgtgccgtccctactcgggctgttcctgtcgctgccgggtgtgagccagtggcggacgttgcagcgggtacccatcggcggggagccgctacccggtgaggtggccgacaagttccacgcgacattcgatgcgctgctgcacaacttctacggtccaaccgaaaccgtgatcaacgccagccggtttaaagtggtgggcccacagggcacccgcatcgtgcccatcggccggcccaagatcaacaccaccatgcacctgctcgacgattcgttgcagccggtgccgaccggtgtgatcggcgagatctatattggagggacgcatgtcgcatacggataccatcgccgcgccgggctgaccgcggagcgattcgttgccgacccgtttaatcccggttcccgcatgtaccggtccggggatctggcgcgccgcaatgctgacggtgacatcgagttcgtgggccgtgccgacgagcaggtcaagattcgcggattccgaatcgaactcggtgacgtagcagcggccatcgcggtcgaccctacggtcgggcaggccgttgtggtggttagcgacctgccgcggctgggcaagagtctggtgggctacgtgacacccgccgcgggcggcgacggacccgccgatgtcggcgtcgatctcgaccgcatccgcgcccgggtggccgcggcactgcctgaatatatgctgcccgcggcctatgttgtgctggatgagattccgatcaccgcgcatggcaaaatcgaccgcgccgcgctgccggaaccgcagatcgcgtcggacaccgagttccgcgcgccgcagaccgccaccgagcggcgccttgcccaactgttcggtgagctgctcggccgcgaccgagtgggtgctgacgactcgttcttcgacctcggcggtcactcgctgctggcaaccaaactcgttgcggccgtgcgcaacgcgttcggcgtcgatgtcggtgtgcgggagatcttcgaattcgccacggtgaccgcgttggccggacacatcgatacgttggattcggattcggcgaggccgcggctgacccgggtggatcatgacgggccagtgcgattgtcgtcgtctcaaatgcgtagctggttcaactatcgcttcgacgggcccaacgccgtcaacaacattcccttcgccgcggcattgcatgggccctgcgacaccaacgcgttcgcggcggccatcaccgatgtggtggcacgccacgagatcctgcgcaccgtctaccgcgagatcggcggcgtgccacaccagatcatccagccgcccgccgaggtgccggtgcggtgcgccgccgggtccgacgccgcgtggctgcgagccgaactgaacaacgagcgaggttacgttttcgacctggaaaccgactggccgatccgggcggcgctgctgagcacgccggagcagaccgtgttgtcgctggtggtgcatcacatcgccggcgaccactggtcggctggggtgttgttcaccgatctgctgaccgcataccgggcccgcagcaccggacaacggccgtcgtgggcaccgctgccggtgcagtacgccgactacagcgtgtggcagtcggcgctactcgacgacggtgcgggcatcgtcggtccgcaacgcgactactggatccgccagctggggggcctggcaggcgaaaccggtctgcgcccggacttcccgcgcccggccctgctcagcggtgccggtgacgcggtcgaatttcgtctcggcgccgcgatccgcgacaaattggctgccgtgagccgagacctcggtgtcaccgagttcatgctgctacaggccgccgtcgcggtggtgttacacaaggccggcggcggggtagacgtccccatcggcgccccggtggccggtcgcagcgaggccaacctggaccagctcatcgggttcttcatcaacatcgtggtgttgcgcaacgacctgcgcgggaaccccacgctgcgcgaggtgctgcagcgcaccaggcagatggcgctggcagcgtatgcacatcaggacctgccgttcgaccaggtggtggaggcggtcaacccccagcggtcgctgtcccgcaatccgttgttcgacattgttgtgcacgttcgcgaacaaatgccgcaagaccacgtcatcgacaccgggcccgacggtgacaccacgttgcgcgtgctggagccgacattcgatgccgcgcaagccgatctatcggtcaacttcttcgcctgcggcgacgagtaccgcggccacgtcatctaccgcaccgagttgtatgagcgcgccaccgcacaacgcttcgccgactggctagtccgtgtcgtcgaggcgttcgccgaccgtccggaccaaccgctgcgcgaggtcgagatggtcagcgcgcaagccagacggcgcattttggaccggtccaatgcgggcgccggaacggcccgggtgtacctgcttgacgacgcacttaagcccgttccggtaggcgtggtgggtgacgtttattacggtggcggtcccgccgtcggtgcccggttggcccggccatcggagaccgcgacccgattcgttgccgatccgttcgccgcgcaaccgggttctcggctctaccgcaacggcgagcgcggagtgtggaaggccgacggccaactggagctgctggccgaaatcgaacggctgccaacggcgcaggcggcaccggtgccggccgagcccgccgacaccgaaaccgagcgcgcgctggctgccatcctcgccgacgtgctcgaggtgggggaggtcggacgctacgacgacttcttcaacctcggcggcgacagcatcctcgcgactcaggtggctgcccgggctcgagatggcgggataccgctgaccgcgcggatggttttcgagcatcccgttttgtgtgagctcgccgccgcggtcgacgccaagcctcacgtcgaggccgagccggacgacaagcatcacgcgccgatgagcacatcagggctttccccagacgaactgtcggccctgaccgcgtcatgggaccagtggccgtga

SEQ ID NO: 28519 - DNA, 1698 bp, Mycobacterium tuberculosis
atgccaccgaaggcggcagatggccgccgacccagtcccgacggcggactgggtggctttgtaccgttccccgcggatcgggccgcgtcgtaccgggcggccggctattggtcggggcgaaccctggacaccgtgctctccgatgccgcgcggcgctggcctgaccgcctcgcggtggccgacgccggtgatcgtcccggccacggcggcctcagttacgccgaactcgaccagcgggccgaccgggccgccgcggcgctgcacggcctgggcatcacgccaggcgaccgggtactgctccagctgccaaacggctgccagttcgcggttgccctgttcgcgttattgcgggcgggagcgatcccagtgatgtgcctgcccggtcaccgcgccgccgaattgggccacttcgccgccgtcagcgcggccaccgggctggtggtcgccgatgtggccagcgggttcgactatcggccgatggcgcgcgaacttgttgccgatcaccccaccctgcgccatgtcatcgtcgatggcgatccgggaccgttcgtgtcgtgggcgcagctgtgcgcccaggccggcaccggttcgccggcaccgccggccgatcccggatcgccagcgctgctgctggtctccggcggcaccactggcatgcccaaactcattccacgcacccacgacgactacgtgttcaacgcgacggccagcgccgcactctgtcggcttagcgccgacgacgtctatctggtggtgctggccgccggccacaatttcccgctggcctgcccgggcctgctcggcgcgatgaccgtcggggccaccgccgtgttcgcccccgatcccagcccggaggccgccttcgccgccatcgagcgccacggtgtcaccgtcaccgcgttggttccggcactggccaaactgtgggcccaatcctgtgagtgggagccggtgacaccgaagtcactgcggttgttgcaggttggcgggtccaagctagaacccgaggacgctcgccgggtacgcaccgcgctcaccccgggcctgcagcaggtgttcggcatggcggaggggctgctgaacttcacccgcatcggcgacccacccgaagtggtggagcacacccaggggcggccactatgcccggccgacgaactgcgcatcgtcaacgccgatggtgagccggtggggcccggggaggaaggcgaactcttggtgcgcgggccctacacgctgaacggctattttgctgccgaacgcgacaacgagcgctgcttcgatccggacggcttctaccgcagcggcgacctggtccgccgccgcgacgacggcaatctggtggtcaccgggcgcgtcaaggatgtcatctgccgtgcgggagaaaccatcgccgccagcgacctcgaagaacagctgctgagccatccggcgatcttctcggccgcggcggtgggactacctgaccagtatctgggggaaaaaatctgcgctgcagtcgttttcgctggagctccgattacgcttgcggagttgaacggctaccttgaccggcgtggtgtggccgcgcatacgcgacccgaccagctggtcgcgatgccggcgctgcccacaacgccgatcgggaagatcgacaaacgagcgatcgtccgccagctcggcatcgcgacgggtcccgtgacgacccagcgctgccattga

SEQ ID NO: 28520 - DNA, 1932 bp, Mycobacterium tuberculosis
gtgagtgtttggttgcgagcgggcgccttggtggctgcagtgatgctgtcgctgagcggatgtggcggcttccacgcgggtgcgccaagcacggccggtccgtgcgagatcgtccccaatggcacgccggcgcccaagacacccccggctaccgtgccttcgtcgcgcaacctcgcgaccaaccccgagatcgccaccggctaccgccgggacatgaccgtggtgcggaccgcccactatgcggcagccaccgccaatccgctggccactcaggtggcctgccgagtattgcgcgacggtggtaccgccgccgatgccgtcgtggccgcccaggcggtgctggggttggtcgaaccgcaatcctccgggatcggcggcggcggatatctggtgtacttcgacgcccgcacgggctcagtgcaggcctacgacggccgtgaggtggccccagcggccgccaccgagaactaccttcgctgggtcagcgacgtcgaccgcagcgcgcccaggcccaacgcccgagcctcgggacggtcgatcggagtaccgggcatcctgcgaatgctggagatggtgcacaacgagcacgggcgcacaccctggcgcgacctcttcggccccgcggtaacgctggccgatggcggttttgacatcagcgccaggatgggcgcggccatctccgacgctgcgccgcaactgcgagacgacccggaggctcgcaagtatttcctcaatcccgacggcagcccgaaacccgcgggaacccggctgacgaaccccgcgtactcaaaaaccctgtccgccatcgcctccgccggcgccaacgccttctattccggcgacattgcccacgacatcgtggcggcggcgagcgacacatcgaatggccgcacgccgggcctgttgaccattgaggacctggcgggttacctcgccaagagacgccaaccgttgtgcacgacctatcgcggccgggagatctgcggcatgccatcgtcgggtggcgtcgccgtggccgcaaccttgggcatcctcgagcacttcccgatgagcgactacgcgcccagcaaggtcgacctcaacggcggtcgcccgaccgtgatgggggttcacctgatagcggaggccgaacggctggcctatgccgaccgcgaccaatatatcgctgacgtcgattttgtccggctgcccggcggctcgctcaccacgctggttgacccgggctacttggcagcacgcgccgcgctaatctcgccgcaacacagcatgggcagcgccagaccgggggacttcggcgcaccgacggccgtcgccccgccagtgcctgagcatggcaccagccacctcagcgtcgtcgattcgtacggcaatgcggccacgttgacgacgacggtggaatcttcgttcggctcctaccacctggtggacggattcatcctcaacaaccagctgagcgatttcagcgccgagccacacgctactgacggatcaccggtggctaaccgggtcgagcctgggaagcgaccgcgcagttcgatggcaccgacgttggtgttcgatcactcgtcggcggggcgcggtgcgctgtacgcggtgctcggttctccgggcggctccatgatcatccagttcgtcgtgaaaacacttgtggcgatgctggattggggtctgaatccgcagcaggcggtttccctggtcgatttcggcgccgcgaactcgccgcacactaacctcggcggtgagaatcccgagatcaacacttccgacgatggtgatcatgacccgctggtgcaaggcctgcgcgcgctggggcatcgagttaatcttgccgagcaatccagtgggctctcggcgatcacccgcagcgaggcgggttgggccggcggcgccgacccacgccgcgaaggcgcggtcatgggcgacgatgcctga

SEQ ID NO: 28521 - DNA, 261 bp, Mycobacterium tuberculosis
gtggccaacatcaagtcgcagcagaagcgcaaccgcaccaacgagcgcgcccggctgcgcaacaaggcggtgaagtcctcgcttcgtaccgctgtccgtgccttccgcgaagctgcccatgcaggcgacaaggcaaaggccgcggaactgctggcgtcgaccaaccgcaagctggacaaggcggccagcaagggcgtgatccacaaaaaccaggccgccaacaagaagtcggcactggcccaggcgctcaacaagctctga

SEQ ID NO: 28522 - DNA, 1545 bp, Mycobacterium tuberculosis
atgggcttcggcgcgtcccgtttggacgtacgcctggtcccggcggcgctggtcagctggattgtgacggcggccgggatcgtgtggccgatcggcaacgtgtgtgccttgtgctgcgtcgtggtggccctcggcggcggcgcactgtggtggtgtgtggcgcgccggtcgtggcacgctccgcgactgggttcgatcagcgccggcctggtcgcggtcggtatggtgggcgcggggtacgggcttgcggtcgcgttgcgctccgaggcggtcgatcgccacccaatcaccgtggcatttggcacctccgcgctggtcacggtcacccccagcgagagcccagtgtcgctggggcggggccggttgatgttccgggcgacggttcaacggctgcgggatgacgagacatccggccgggtagtggttttcgcgcgagcgctggacttcggcgagctgatggtcggacagcccgtccagttccgcgcgcgtatcagtcgcccggcgcgtcacgacctgacggtcgcggtgttcaatgcgaccggtcggccgaccgtgggccgtgccggcccggtacaccgcgccgctcacatcgtccgccatcgattcgcggccgcggttcgtgaggtgctgcccgctgaccaggccacgatgttgccggccctggttctcggcgatacctcgacggtcaccgccttaaccagccgcgagttccgtgcggcgggcctgacgcacttgacggcggtctcgggggccaatgtcacgatcgtgtgtgcggcggcgctggtttcggcacggttgatcggaccgcgtgcggccgtggtgtgcgcggccgtcgcgttggtggcattcgtcatcctggtgcagccgacggccagcgtgttgcgggcagctgtgatgggcgccattgccctcgtggggatgctgtctgcgcgccggcggcaggcgattccagctttgtcgggtagcgtgctggttttgctggctgccgctccccatcttgctgtggacatcggcttcgcgctgtccgtggcggccacgggtgcactggtcgtcatcgcgccggtttggtcacgccgcttggtcgaccgcggatgtccgaaggtgctggccgatgccctcgcagtcgcggcggccgcgcagctggtgacggcgccactggtggccgccatctccggccgggtcagtctggtggccgtggtggccaatctggcggtggcggccgtgatcgcgccgatcaccgtgctgggcagcgttgcggccgtgctggtcgtgccgtggccggccggcgcgcaggtgctgatccggttcaccgggcccgaagtgtggtgggtgttgcgcgtggcgcattgggcgtcgggtgtgcccgcggcgaccgttccggtggccgcaggtctgcccggcgtactgctggtcggtggcgccaccgtgttcacggttgcgcagtggcgctggcgctggtttcgcgcggccatgtgcaaaacgatggcggtggccgtcatatgtctgcttgcctggtcgctgtccgggctggtcggcccttcgtga

SEQ ID NO: 28523 - DNA, 1248 bp, Mycobacterium tuberculosis
atgaccgtgccagcaccgtcgcagctcgacttgcgtcaagaggtgcacgacgccgcacgccgcgcccgggtggccgcccgccggctggcatcgctgccgacgactgtcaaagaccgcgcgctgcacgcggctgccgacgagctactggctcaccgcgaccagatcctggcggccaacgccgaagacctgaacgcggcgcgcgaggcggacaccccggccgccatgctggaccggttgtccttgaacccgcaacgagtcgacggtatcgccgccgggttgcggcaagtcgcgggactgcgcgatccggtcggtgaagtgctgcgtggctataccctgcccaacgggctgcagctgcgccagcagcgcgtccccctgggcgtggtcggcatgatctacgagggccgccccaatgtcaccgtggatgccttcgggctgacactcaagtcgggtaacgctgcattgctgcgcggcagctcgtcggccgcaaagtccaacgaggccctggtggcggtgttacgcaccgcgctggtcggcctggagctgccggccgacgcggtccagctgctgtcggctgccgaccgcgccaccgtcactcacctgattcaggcccgcggcctggtcgatgtggtgattccacgcgggggagcgggcctgatcgaggcggtcgtacgcgatgcccaggtgcccaccatcgagaccggcgtcgggaactgccatgtctacgtgcaccaagcggccgacctggacgtggccgagcgtatcttgctgaactccaagacgcggcggcccagcgtctgcaacgccgccgagacgctgctggtcgacgcagcgatcgccgaaacggcgttgcctcgattgctggccgccctgcagcacgccggtgtcaccgtacatctcgacccggacgaggccgacctgcgccgcgaatacctgtcgctggacatcgcggtggcggtggtcgacggtgtcgacgctgccatcgcccatatcaacgaatacggcaccgggcacacagaagcgattgtgaccaccaatcttgatgcggcccaacgctttaccgaacagatcgatgcggccgcggtgatggtgaacgcatcaacggcgttcaccgacggcgagcaattcggcttcggcgccgagatcggcatctccacccagaaactgcatgcccgcggaccgatgggactaccggaattgacgtcgaccaagtggatcgcatggggagccggccacacccgtccggcctga

SEQ ID NO: 28524 - DNA, 588 bp, Mycobacterium tuberculosis
atgccactgctaaccattggcgatcaattccccgcctaccagctcaccgctctcatcggcggtgacctgtccaaggtcgacgccaagcagcccggcgactacttcaccactatcaccagtgacgaacacccaggcaagtggcgggtggtgttcttttggccgaaagacttcacgttcgtgtgccctaccgagatcgcggcgttcagcaagctcaatgacgagttcgaggaccgcgacgcccagatcctgggggtttcgattgacagcgaattcgcgcatttccagtggcgtgcacagcacaacgacctcaaaacgttacccttcccgatgctctccgacatcaagcgcgaactcagccaagccgcaggtgtcctcaacgccgacggtgtggccgaccgcgtgacctttatcgtcgaccccaacaacgagatccagttcgtctcggccaccgccggttcggtgggacgcaacgtcgatgaggtactgcgagtgctcgacgccctccagtccgacgagctgtgcgcatgcaactggcgcaagggcgacccgacgctagacgctggcgaactcctcaaggcttcggcctaa

SEQ ID NO: 28525 - DNA, 1440 bp, Mycobacterium tuberculosis
gtgcctcggtttgtcgatcgggtcgtcatccacaccagagcgggttcgggcggtaacggctgcgcttcggtccatcgcgagaaattcaagccgctgggcggccccgatggcggaaatggcggccggggcggcagcatcgtcttcgtcgtcgatccgcaagtgcacaccctgctcgacttccatttccgcccgcatctcaccgcggcttcgggcaagcacgggatgggcaataaccgcgacggggccgccggcgcggatttggaagtgaaagttcccgaaggcaccgtggtattggacgagaacggccggctactggccgacctggtcggcgcgggcacccgctttgaagccgccgccggaggccgtggcggtttgggcaacgccgcgctggcttcccgcgtgcgtaaggcccccggtttcgcactcctcggcgaaaagggacagtcccgagacctcaccttggaactcaagaccgtcgccgacgtcggcctggtcgggtttccgtcggccggaaaatcctcgctggtgtcggcgatttcggcggccaagccgaagatcgccgactacccgttcaccaccctggtgcccaacctcggtgtggtctcggctggcgagcacgcgttcaccgtcgccgacgtgccggggttgatcccgggcgcatcccggggccgtggtctggggctggactttctgcggcacatcgagcgctgcgctgtactggtgcatgtggtggattgcgctaccgccgagccgggccgcgaccccatctcggacatcgacgcgctggaaacggaactcgcgtgctacacgcccacgctgcaaggggacgcggctctgggcgatctcgccgcacggccgcgtgcggtggtcctcaacaaaatcgatgtgccggaggcccgcgagctcgcggagttcgtccgtgacgacatcgcccagcgcggctggccggtgttctgcgtgtcgaccgcaacccgggaaaacctgcagccgttgatctttgggctgtcgcagatgatctcggactacaacgctgcgcggccggtggcggtgccacggcggccggtgattcgtccgattccggtggacgacagcggttttaccgtcgaacccgacgggcatggtggctttgtcgtcagcggtgcccggcccgagcgttggattgaccagaccaacttcgacaacgacgaggccgtcggctatctcgccgaccggctggcgcgcctgggtgtcgaggaggaattgctgaggctgggtgcgcggtcaggatgcgcggtgaccatcggcgagatgacgttcgattgggagccgcaaacgcctgcgggtgagccggtcgcgatgtccggccggggcaccgatccgcggctggacagcaacaagcgggtgggcgcggccgagcgaaaggccgctcggagtcggcgtcgcgaacacggggatggctga

SEQ ID NO: 28526 - DNA, 261 bp, Mycobacterium tuberculosis
atggcacacaagaagggggcttccagctcgcgcaacggtcgcgattccgccgcccagcggctgggggttaagcggtacggcggccaggtcgtcaaggccggcgagatcctggtccgccagcgcggtaccaaattccatcccggcgtcaacgtcgggcgtggcggcgatgacaccttgttcgccaagacggccggggcggtcgagttcggcatcaaacgcggacgtaagacggtgagcatcgtcggttcgaccactgcctga

SEQ ID NO: 28527 - DNA, 315 bp, Mycobacterium tuberculosis
atgatggcgacctacgcaatcgtcaagaccggcggcaagcagtacaaagtcgctgtcggagatgtggtcaaggtcgaaaagctggaatccgagcagggggagaaggtgtccctgccggtggctctggttgtcgacggcgccaccgtcaccaccgatgcgaaggcactggccaaggtcgcggtgaccggtgaggtgctcgggcacaccaagggccccaagatccgtatccacaagttcaagaacaagactggctaccacaaacggcagggacaccgtcagcagctgacggtcctgaaggtcaccggcatcgcataa

SEQ ID NO: 28528 - DNA, 1476 bp, Mycobacterium tuberculosis
atgaccgcccccttggatcgtgcgccggtcacggatttgccggctaacaacaaaggccgagaccgcacccactggctgtatctcgcggtcattttcgcagtgatagccggtgtgatcgtggggctgacggcgccgtcgaccggaaaaagcctcacggtgctcgggacggtgttcgtcaacctgatcaagatgatgatcgcaccggtcatcttctgcacgatcgtgctcgggatcggctcggtgcgcaaagccgcggccgtgggcaaggtcggcgggctggctttggcctactttctaacgatgtcatcggtggcgctcgggatcgggttgatcgtcggcaacctactcagtccgggtagggatctgcaccttaggcctggtgcggtcggaagcggcgcagcattggccggccaggctgcggagtcacacggaatcgctgggttcatccagcagatcattccgaggtcgctcccctcagcccttactgaaggcaacgtgctgcaggtgttactcgtcgcgctgctggtcggtttcgcggtccaaggcctgggccccgcaggcgagtccatcctgcgtgccgtcgagaacctgcaaaagctggtgttcaaggtgctcgtgatggtactgtggctggctccgatcggcgcgttcggtgcgatcgccaatatcgtcgccacgactggcttcaacgccgtcaccaacctgctgctgctgatggccggcttctacctgacgtgcgtggtgttcgttttcggcgtcctgggagtgctactgcgcatcgtgtcgggtttgtcgatctttcggctgctgcgctatctagcccgcgagtacttgctgatcttcgcaacatcgtcgtcggaggtggtgctgcccagactgatcaccaagatgaaacacttgggcgtgcaatccagcacggtcggcgtggtggtgccgaccggctactcgttcaatcttgacggcaccgctatctatctgaccatggcgtcgctgttcatcgccgacgcgatgggacatcgcttgacatggggcgagcagatcgcgctgctggcgttcatgatcatcgcgtccaagggcgctgccggggtcagcggtgcgggccttgcgacgctggccggcggcctgcaggctcatcgccccgagctgctggacggtgtcgggctgattgtggggatcgaccggttcatgtcggaagcccgttcgctcacgaacttctccggcaacgccgtcgcaaccatcctggttgcctcgtggacaaagaccattgacctgtccaaagccgacgaggtgttgcgcggtcgtgatcccttcgacgaatcgaccatggtcgatccccacgatgaggagccacccgccgccacaccccacgggggcggcgtcccgacgaaccctgcgctgtgcgatttcgagcaggtcagtctaggcggattggtgggccggccggccggcccgcaacgcgccgacgtggacgggtag

SEQ ID NO: 28529 - DNA, 2862 bp, Mycobacterium tuberculosis
gtgatagacggtgccccaccttcagatccaccagaaccgagccagcatgaggaactgccggaccgcctaagagtccattcgctggcacgaacgctgggaaccaccagcaggcgggtgctggatgcgctcaccgcgctcgacggacgggtccgcagcgcacattccacggtggatcgcgtcgatgcggtccgggtgcgcgatctgctggccactcatctcgagactgccggcgtgctggcggcctcggtccatgcgcccgaagcgtccgaggaacccgagtcccggctgatgctagagacccaggagactcggaatgccgacgtggagcggccgcactatatgccgctgttcgtcgcgccccagccgattcccgagccgttagcggacgacgaggacgtcgacgatggccccgactacgtcgccgacgattccgacgctgacgacgaagggcagctagaccggccggcgaaccggcggcgacgtcgcggccgtcggggtcgcggtcgcggacgcggggagcagggtggatccgacggtgatccggttgaccagcaatccgagccccgggcccaacaatttaccagcgcggacgccgccgaaaccgacgacggcgacgatcgagattccgaagataccgaagccggtgacaacggcgaggacgaaaacggttcgctggaggccggcaatcgtcgccggcgccgccggcgacggcgtaagtcggcttctggtgacgacaacgacgctgcgttagagggcccgttgcctgacgatccgcccaacactgtcgtacacgaacgcgtgccccgcgcgggtgacaaggccggcaactcgcaggatggcggctctggctccactgagatcaagggcatcgacggctcgacccgcctggaagccaagcggcaacgccgccgcgacgggcgcgacgccggccggcgccgcccaccggtgttgagtgaggccgagtttctggctcgccgtgaggcggtcgagcgggtgatggtggtgcgcgaccgggtccgcaccgagccaccgctgccgggcacgcggtacacccagattgcggtgctcgaagacggtatcgtcgtggagcatttcgtgacgtctgcggcctcggcttccctggtgggcaacatctacctgggaattgtgcagaacgtgctgccgtcgatggaggcggcgttcgtcgacatcgggcgcggtcgcaatggagtgctctacgccggtgaagtcaattgggatgcagcggggttgggcggggccgatcgcaagatcgagcaggccctcaaacccggcgactatgtcgtggtgcaggtcagcaaggacccggtagggcataagggcgcgcggctgaccacgcaggtgtcgctggccggtcgatttctggtttatgtgccgggcgcgtcgtcgaccgggatcagccgcaagctgcccgacactgaacgtcagcggctcaaggagatcctgcgcgaggtggtgccgtctgacgctggggtcatcatccgtaccgcgtctgagggcgtcaaagaggacgacattcgcgcagacgtcgctcggctacgggaacgctgggagcagatcgaggccaaggcacaagagaccaaggagaaggccgcgggcgctgcggtggcgctgtacgaagaaccggacgtgctggtcaaggttatccgtgacctgttcaacgaggacttcgtcggcctcatcgtttccggcgacgaggcttggaacacgatcaatgaatacgtgaattctgttgctcccgaattggtttcgaagttgaccaagtacgagtccgctgacgggccggatggccagtccgcgccggacgtcttcacggtgcaccgcattgacgagcagctggccaaagcgatggaccgcaaggtgtggttgccgtcgggcgggacgctggtgatcgaccggaccgaagccatgacggtcattgacgtcaacaccggtaaattcaccggagccgggggcaacctcgagcagacggtcaccaagaacaatctggaagcggccgaggagatcgtgcgccagctgcggctgcgcgatatcggcggcatcgtggtcatcgacttcatcgacatggtgctggagtccaaccgcgacttggtgttgcgccggttgaccgagtcgctggcccgcgatcgcacccgccaccaggtgtccgaggtgacgtcgctggggctggtgcagttgactcgcaagcggttgggaaccggactgatcgaagcgttctccacatcgtgtccgaactgcagtggccgcgggatcctgctgcacgccgacccggtcgattcggccgcggcgactgggcgaaagtctgagcccggtgctcggcggggcaagcgatcgaaaaagagccggtccgaagagtccagtgataggagcatggtcgccaaggtccccgtgcacgctcccggtgagcatcccatgttcaaggcgatggcagcgggcttgtcctcgctggctggtcgcggtgacgaggaatccggggagcccgctgccgaactcgccgagcaggccggcgatcaaccgcccactgacctcgacgacaccgcccaagcggacttcgaggacaccgaggacaccgacgaagacgaggacgagctcgacgccgacgaggacctcgaggacctcgacgacgaggacctcgacgaggatctcgacgttgaagactccgattccgacgacgaagactccgacgaagacgccgccgatgccgacgtcgacgaggaggatgcagccggcttggacggttccccgggcgaagtcgacgtccccggtgtcacggagctggcccctacccgtccacgtcggcgcgttgcgggccggccggccggcccaccaatccgcctagactga

SEQ ID NO: 28530 - DNA, 2631 bp, Mycobacterium tuberculosis
atgctgcccaagtcgtgggatccggccgcgatggagagcgccatctatcagaagtggctggacgctggctacttcaccgcggacccgaccagcaccaagccggcctattcgatcgtgctgccgccgccgaacgtgaccggcagcctgcacatgggccacgcgctggaacacaccatgatggacgccttgacgcggcgcaagcggatgcagggctatgaggtgctctggcagccgggcaccgaccatgccgggatcgccacccagagcgtggtcgagcagcagctggcggtcgacggcaagactaaagaagacctcggccgcgagctgttcgtggacaaggtgtgggattggaagcgagagtctggcggtgccatcggcggccagatgcgccgactcggtgacggggtggactggagccgcgaccggttcaccatggacgaaggtctgtcgcgggcggtgcgcacgatcttcaagcggctttatgacgccgggctgatctatcgggccgagcggctggtcaactggtcgccggtgctgcagaccgcgatctccgacctcgaggtcaactaccgcgacgtcgaaggcgagctggtgtcgtttaggtacggctcgcttgacgactcgcaaccccacatcgtggtcgccaccacccgggtcgagacgatgctgggcgataccgcgatcgccgtccatcccgatgacgagcgctaccgtcacctggtcggcaccagcctggcgcacccattcgtcgaccgggagctggccattgtcgccgacgagcacgtggaccctgaattcggcaccggcgcggtcaaagtcacacccgcccacgaccccaacgacttcgaaatcggggtgcgccaccagctgccgatgccctcgatcctggacaccaagggccggatcgtcgacaccggaacgcgattcgacggcatggaccgcttcgaggcacgggtcgcggtgcgccaagcgctcgcggcccagggccgcgtggtcgaagaaaagcgaccctacctgcacagcgtcggacactccgaacgcagcggcgagccgatcgagccgcggctatccctgcagtggtgggtccgggtggaatcgctggccaaagcggccggggatgcggtgcgcaacggggacaccgtgattcacccggccagcatggaaccccgctggttctcctgggtcgacgacatgcacgactggtgcatctcgcgacagctctggtgggggcatcggatcccgatctggtacggacccgacggcgaacaggtgtgcgtcggcccggacgaaacacccccgcagggctgggaacaggatcctgacgtgctggatacctggttttcgtcggcgctgtggccgttttccacgctgggttggccggacaagacggcggagctggaaaagttctatccgacaagcgttctggttaccggctatgacatcttgttcttttgggtggccagaatgatgatgttcggcaccttcgtcggcgacgacgccgccatcaccctcgacggccgccggggcccgcaggtgccgttcaccgacgtgtttctgcatgggctgatccgcgacgagtctggccgcaagatgagcaagtccaagggcaacgtcatcgacccgctggattgggtggaaatgttcggggccgatgcgctgcggttcacgctggcccgcggggccagtcccggtggtgacttggcggtgagcgaggatgccgtgcgggcgtcgcgcaatttcgggaccaagctgttcaacgccactcggtacgcactgctcaatggcgccgcgccagcacccctgccatcgccgaacgagctgaccgacgccgaccgctggattctcggaaggttggaagaggttcgggccgaagttgattcggccttcgacggatacgagttcagccgcgcttgtgagtccctgtatcacttcgcctgggacgaattctgcgactggtacctcgaactggccaaaacgcagcttgcccagggactcacacacaccaccgccgtgctggccgccgggctggacacgctgctgcgcctgctgcacccggtgattcccttcctcaccgaggcgctatggctggcgctgaccggcagggaatcgctggtcagcgccgactggccggagccttccgggattagcgtggaccttgttgccgcgcaacggattaacgatatgcagaagttggtgaccgaagtgcggcggttccgcagcgatcaaggtctggccgaccggcagaaggttccggcccgaatgcacggtgtgcgggactcggatctgagcaaccaggtggccgccgtgacctcgctggcgtggctcaccgagccgggcccggattttgagccgtcggtctcgttggaggttcggctcggccccgagatgaaccgcaccgtcgtcgtcgagctcgacacctcgggcaccatcgacgtggccgccgagcgtcgccgcctggaaaaggagttggccggcgcccaaaaggagctggcgtcgaccgccgccaagttggccaacgcggactttctggccaaagcgcccgacgccgtcattgccaagatccgggaccgccagcgcgtggcgcagcaggaaaccgagcgcatcaccacccggttggctgcgctgcaatga

SEQ ID NO: 28531 - DNA, 1122 bp, Mycobacterium tuberculosis
atgacccgctccggcgatgaagcacagctcatgaccggcgtgaccggtgatttggcgggcaccgagctcggcctgactccgagcttgaccaagaacgctggggtgcccaccacggatcagccgcagaagggcaaggatttcaccagtgaccaggaggtgcgctggtgcccgggctgcggcgactacgtcatcctcaacaccatccgaaacttcctgcccgaactggggctgcggcgtgagaacatcgtgttcatcagcggtatcggatgctccagccggttcccctattacctggaaacctacggctttcattcgattcacggccgcgcgcccgcgatagcgaccggtctggcgctggctcgcgaggatctgtcggtatgggtggtcaccggcgacggtgacgccttgtcgatcggcggtaaccacctgatccacgcgctgcgccgcaacatcaacgtgacgattctgctgttcaacaaccggatctatgggctgaccaaaggacagtattcgccgacatcggaggtcggcaaggtcaccaagtcgacaccgatgggctcgctggatcacccgttcaatccggtgtcgttggcgctgggggcagaggcgacgttcgttggccgcgcgctggactcagaccgtaacgggctgaccgaagtgctgcgtgccgcggcccagcatcgcggtgctgccctggtcgaaatcctgcaggactgcccgatcttcaacgacggctcgttcgatgcgctgcgcaaggagggcgccgaggagcgggtcatcaaggtccgccacggcgagccgatcgtcttcggggccaacggcgaatactgcgtggtcaagtccggattcggcctcgaagtggccaagacggccgatgtggccatcgacgagatcattgtgcacgatgcgcaggtcgacgacccggcctacgccttcgcgctgtcccggctgtccgatcagaacctggaccacaccgtgctgggaatctttcggcacatcagccggccaacctacgatgatgcggcccgctcgcaggtagtcgcggcccgaaacgccgccccgtccggcaccgctgcactgcagtcactgttgcacgggcgcgacacttggaccgtcgactga

SEQ ID NO: 28532 - DNA, 1257 bp, Mycobacterium tuberculosis
atgtcgggcaccgttgtggcagtgccgccacgggtggcgcgtgcgctggacctgctgaatttctcgttggctgatgttcgcgacggtctgggcccctatctgtcgatatacctcctgttgatccacgattgggatcaagcctcgatcgggttcgtcatggcggtcggcggcattgcggccatcgtggcccagacgccgattggcgccctggtggaccggaccacggccaagcgggcgctggtcgtcgccggcgcggtgctggtcaccgccgccgcagtggcgatgccgctgtttgcgggcttgtattccatctcggtgctgcaggccgtcaccgggatcgccagctcggttttcgctccggcgttggcggcgatcacgttgggtgctgtcggtcctcagtttttcgccagacggattgggcgtaacgaagcgttcaaccacgccggtaacgcgtcggcggctggggcgaccggcgcgctggcgtacttcttcgggccggtggtggtgttctgggtgctggccggcatggcgttgatcagcgtgctggcgacactgcggatcccgccggacgcggtcgaccacgatttagcgcgtggtatggaccatgcgcccggcgagccgcatccgcagccgtcgcggttcaccgtgttggcgcacaaccgcgaactggtgatcttcggggcggcggttgtcgcgttccacttcgccaacgcggcgatgctgccgctggtcggcgagctgttggcgttgcacaatcgagacgaaggaacggcgctgatgtcgtcgtgcatcgtcgcggcgcaggtcgtgatggtgccggtggcgtatgtggtcgggaccagggccgacgcgtgggggcgaaagccgatctttttggtggggttcgctgtcttgaccgctcgcgggttcctctacacgttgtcggataactcctactggctggtgggcgtgcagttgctcgacggtatcggagccggcattttcggggcgttgtttccccttgtcgtacaggacgtcacacacggaacgggacatttcaatatcagcctcggggcggtaaccacggcaacgggcattggtgccgcgctgtctaatcttgttgccggctggatcgtggtcgtcgcgggctatgacgcggcattcatgtcgctgggtgcgctcgccggggccggcttcctcctgtacctggtcgcgatgccggaaaccgtggattcggatgtccgggtgcggtcgcggccaaccctcggggggaagtga

SEQ ID NO: 28533 - DNA, 1281 bp, Mycobacterium tuberculosis
atggcgcgcataggagacggtggtgacctgctgaagtgctcgttctgcgggaagagccaaaaacaggtcaagaagctcattgccggccccggcgtgtacatctgcgatgagtgcatcgacctgtgtaacgagatcatcgaagaggaactcgccgacgccgacgatgtgaaactcgacgagctgcccaagccggccgagatccgggagttcctcgagggctacgtcatcgggcaagataccgccaaacgcacgctggccgtggcggtgtacaaccactacaagcggatccaggccggggagaagggccgtgactcccgatgtgagcccgttgagttgaccaagtcgaacatcttgatgctcggacccaccggttgtggcaagacctacctggcccagacgctggccaagatgcttaacgtgccgtttgccatcgccgacgccaccgcgctgaccgaggccggttacgtcggcgaggacgtcgagaacatcttgctcaaacttattcaggccgccgactacgacgtcaaacgcgccgagaccggcatcatctacatcgacgaggtcgacaagatcgcccgcaagagtgagaacccgtcgattactcgcgacgtctccggtgagggcgttcagcaggccttgctgaaaatcctggagggcactcaggcgtcggttccgccgcaggggggccgtaagcacccgcatcaagagttcatccagatcgacaccaccaacgtgctgttcatcgtcgcgggagcgttcgccgggctggagaagatcatttacgagcgcgtcggcaagcggggcctcggctttggcgccgaggttcgttccaaggccgagatcgacaccaccgaccactttgccgacgtgatgccggaggatctgatcaagttcggcctgatcccggaattcatcggccgcctgccggtggtcgcctcggtcaccaacctggacaaagagtcgttggtcaagatcctgtccgagccgaagaacgctttggtcaagcagtacatccggctgttcgagatggatggcgtggagttggagttcaccgacgatgcgctggaagcgatcgccgaccaggcgatccatcgcggcaccggtgcccgcggcctgcgggcgatcatggaagaagtcctgctgccggtgatgtacgacatcccgagccgcgacgatgtcgccaaagtggtggtcaccaaggagaccgtgcaggacaacgtgttgccgacaatcgtgccacgcaagccgtcccgttcggagcgccgcgacaagagcgcgtag

SEQ ID NO: 28534 - DNA, 489 bp, Mycobacterium tuberculosis
atgtcgggcatgcgcgtctacctgggggccgaccacgccggatatgagctcaagcagcggatcatcgagcacctgaagcaaaccggccacgagccgatcgactgcggcgcgttgcgctacgacgccgacgacgactacccggcattctgcattgccgcagcgacgcgcactgtcgccgatccgggcagcctgggcatcgtgctgggcggatcgggcaacggggagcagatcgccgccaacaaggtgcccggcgctcgctgcgcgctggcctggagtgtgcagaccgcggcgctggctcgcgagcacaacaacgcccaattgatcggcatcggcggccgcatgcacacggtggccgaggcactggcgatagtcgacgccttcgtcaccacgccgtggtcgaaagcgcaacgccaccaacggcgtatcgacattctcgccgagtacgaacggacccacgaagcgccgccggtgcccggcgctccggcctga

SEQ ID NO: 28535 - DNA, 2586 bp, Mycobacterium tuberculosis
gtggcccttccaaacctcacgcgggaccaagccgtcgaacgcgccgccctgataaccgtggacagctaccagatcattctcgatgtgaccgacggtaacggcgctcccggcgaacgcaccttccggtcgaccaccaccgtggtgttcgacgcactccccggcgccgacacggtcatcgacatctccgcccacaccgtgcgccgcgccagcctcaacgaccaagacctggacgtctcgggatatgacgaggcggccgggatcccgttgcgcggactggcccagcgcaacgtcgtcgtcgtcgacgccgactgccactactccaataccggcgagggcctgcatcggtttgtcgatccggtggacggcgagacctacctgtactcgcaattcgaaaccgccgacgccaagcgcatgttcgcctgcttcgaccaacccgacctcaaggccacgtttgacgtgcgggtgaccgcgcccgcgcactggaaggtgatctccaacggcgcgccgctggccgcggcaaacggcgtacacaccttcgccactaccccgcggatgagcacctatctggtggccttgatcgccggaccatacgcggcctggacggacacttacatcgacgaccacggggaaatcccactcggcatctattgccgggcctcgcttgccgaatacatggacgccgagcggctgttcacccaaaccaagcagggattcggcttctaccacaagcactttggcctgccatacgcgttcggcaagtacgaccagctcttcgtccccgaattcaacgccggcgcaatggaaaacgccggcgcggtgaccttcttggaggactacgtcttccgcagcaaggtcacccgggcatcctatgagcggcgcgcggagaccgtgctgcacgagatggcccacatgtggttcggcgacctggtcaccatgacctggtgggacgatctgtggctgaacgagtccttcgccaccttcgcctcggtgctgtgccaaagcgaggccaccgaattcaccgaggcttggacgacgtttgcgaccgtggagaagtcttgggcgtatcgccaagaccagctgccgtcgacgcacccgatcgccgccgacatccccgacctggccgctgtcgaggtgaacttcgacgggatcacctacgccaagggcgcctcggtgctcaaacagctcgttgcctacgtcgggctggagcgctttctggccggcctgcgtgactacttccgcacgcacgcttttggcaatgccagctttgacgatctgctggccgcgttggaaaaggcctcgggccgcgacctgtcgaattggggcgagcagtggctgaagacgaccgggctcaacaccctgcgaccagatttcgaggttgatgccgagggcaggttcacccggttcgcggtgacacagagcggtgcggcacccggcgcaggtgagaccagggtgcatcggttggcggtgggcatctacgacgatgatggttccaagagttccggcaagctggtccgggtgcaccgcgaggaactcgatgtctccggtccgatcacgaacgtccctgcgctggttggcgtttcgcgcgggaaactgattctggtcaacgacgacgacctgacctactgttcgctgcggctggacgagcggtcgctacagaccgcgctagaccgcatcgccgacatcgccgagccgctgccgcgcacgctggtgtggtcggccgcctgggaaatgacccgtgaagccgaactgcgtgcccgcgacttcgtgtcactggtgtccggcggcgtgcacgcagaaacggaggtcggggtcgcgcagcggctgctgctacaggcgcagacagcgttgggttgctatgccgagcccggctgggcccgggagcggggatggccgcagttcgccgaccggctgctggagttggcgcgcgaagccgagcctgggtcggatcatcagctggcctatatcaactcgctgtgttcgtcggtgttgtccccccggcatgtgcagaccctaggggcgttgctcgagggtgagcccgccgcatgtggattggcaggcttagccgtcgacaccgacctgcgctggcggatcgtaaccgcgctggccaccgcgggcgccatcgacgccgacgggccggagacaccgagaatcgacgccgaggtgcagcgcgacccgactgccgccggaaagcggcatgccgcccaggcccgcgcggcgcggccacagttcgtcgtcaaggacgaggcattcaccacggtggtcgaggacgacaccctggccaacgccactggccgcgcgatgatcgccggcattgccgcacccggacaaggcgagctgctcaagccgttcgcgcgacgctactttcaggcgatccccggagtatgggcacggcgatccagcgaagtcgcgcaatcggtggtgattggcctgtatccgcactgggacatcagcgagcagggcatcaccgccgccgaggagttcctcagcgaccccgaggttccgcccgcattgcgccggctggtgctcgagggccaggccgcggtgcagcgatcgttgcgggcccgcaacttcgacgctgacggctag

SEQ ID NO: 28536 - DNA, 387 bp, Mycobacterium tuberculosis
atgccgaagtctttctacgacgcggtcggcggcgccaaaaccttcgacgcgatcgtgtcgcgtttctatgcgcaggtcgccgaggacgaagtactgcggcgggtgtaccccgaagatgacttagccggcgccgaggaacgattgcggatgttcctcgagcagtactggggcggcccacgaacctactcggagcagcgcggccacccccgattgcggatgcggcatgccccgtttcggatctcgctcatcgaacgcgacgcctggctgcggtgcatgcatacggctgtggcctccatcgactcagaaacgctcgatgacgagcaccgtcgagagttgctggattatctggagatggccgctcactcgctggtcaactccccgttttga

SEQ ID NO: 28537 - DNA, 1641 bp, Mycobacterium tuberculosis
atggaccaacaccagcgaccggatccaatgggccccggctctcctcgcgccagcgctcgtcgaccggagccagatccgatgggcgagccgtggtggtcgcgagccgtgttctaccaggtctatccccgatcgttcgccgacagcaacggcgacggggtgggcgacctggacgggttggcgagccggcttgaccacctgcaacagctcggtgtcgacgcgatctggatcaacccggtcaccgtctcgccgatggcagaccacggatacgacgtcgccgatccccgcgacatcgacccactcttcggcgggatgccggcgttcgaacggttggtcgctgcggcacaccggcagggcatcaaagtcaccatggacgtggtgcccaaccacaccagttcggcgcacccatggtttcaggccgcgctggctgacctcccgggtagcccggcgcgggatcgctatttctttcgcgacgggcggggccccgacgggtcgctgccgccgaacaactgggagtcggtgttcggcgggccggcctggacccgagtgcgcgaaccggacggcaacccgggccagtggtacctgcaccttttcgacaccgaacagccggacctgaactgggacaacccggaaatccttgacgacttcgagaaaacactgcgcttctggctggaccgcggcgtggatggcttccgcatcgacgtggcgcacggcatggccaagcccccgggcctgccggactcaccggacctgggcatcgaggtgctgcaccaccgcgatgacgacccgcgcttcaaccacccgaatgtgcacgcgattcaccgcgacatccgcacggtgatcgacgagtaccccggagcggtaaccgtcggcgaggtgtgggtacacgacaacgcccgctgggcggagtatctgcggcccgacgaactgcatctcggcttcaatttccggctggcgcgaaccgagttcgacgccgccgagatccgcgacgcggtggcgaactccctggccgccgcggcgctgcagaacgcgaccccaacctggacgctggccaatcacgatgtgggacgggaggttagccgctacggcggcggcgagatcgggctgcgccgggccaaggcgatggcggtggtgatgctcgccctgccgggcgtggtcttcctctacaacggccaggaactgggtttgcccgacgtggacctgcccgacgaggtgctgcaggatccgacgtgggaacgctcgggacgcaccgaacgcggtcgcgatggctgccgggtgccgattccctggtcgggcaacattcccccgttcgggttctcgacgtgtccagacacctggttgccgatgccgccggaatgggcggcgctgaccgccgaaaaacaacgcgctgatgccggctcgaccttgtcgttttttcgacttgcactcagattacgtagggaacgaaatgaattcgacggcgacgtcgactggctggccgcgcccgacgatgcgctgatattccggcgtcacggcgggggtttggtgtgcgcgctcaacgccgctgagcgtccgctggcgctgccggcaggtgaacccatcctggccagcgcaccgttgaccgacgccacgttgccacccaatgccgcggcctggctggtgtag

SEQ ID NO: 28538 - DNA, 417 bp, Mycobacterium tuberculosis
gtgagcgtcgggttcgtcacgccggtgggggtgcgctggtctgacatcgacatgtatcagcacgtcaaccacgccaccatggtcacgattctcgaagaggcacgggtcccgtttcttaaggatgctttcggagccgacatcacgtccaccgggctgctgatcgccgatgtccgggtgacctacaagggtcaactgcggttgtccgactcgccgctacaggtgacgatctggaccaagcggctgcgggcggtcgacttcacgctcgggtacgaggtgcggtcggtcaacgcggagccagactcgaggcctgcggtcatcgccgagtcgcagctggccgcgttccatatcgaggaacagcggttggttcgactatcgccacaccatcgcgagtacctgcaacggtggtttcggggatag

SEQ ID NO: 28539 - DNA, 4875 bp, Mycobacterium tuberculosis
atgacgatcgatcccggggctaagcaggatgttgaggcgtggaccacgttcaccgcgagtgcggacattcctgactggatctcgaaggcctacatcgacagctatcgaggaccgcgcgacgactcgtcggaagccaccaaggccgccgaggccagttggcttccagcctccctgctgacgcccgccatgctgggcgcacattatcggcttggccggcaccgcgcggccggtgaaagctgtgtcgccgtctatcgggcggacgatcccgcggggttcggtccggcgctgcaggtggtcgccgagcacggcggcatgctgatggattccgttacggtgctgctgcaccggcttggaatcgcctacgcggcgattctgaccccggtgttcgacgtgcaccgcagccccacgggagagctgctgcgcatcgaaccgaaggccgagggcacgtcgccgcacctgggtgaggcctggatgcacgtagcgctctcgcccgccgttgatcacaaaggcctcgccgaggtggagcggttgctgcccaaggtgctggccgacgtccagcgggtggccaccgacgccacagcgctgatcgccaccctgagcgagctggcgggagaagtcgaatccaatgccggcggccgattttccgcgcccgaccgacaagacgtcggggaactgttgcgttggctgggtgacgggaacttcctgctgctgggctaccaacggtgccgggtggctgacgggatggtctacggcgaggggtcaagcggtatgggcgtcctgcggggccgcaccggttcgcgtccccggctgaccgacgacgacaaactgctggtgttggcccaagcgcgggtcggcagctacctgcgttacggcgcctatccctatgccatcgcggtccgcgaatacgtcgacggcagcgtggtcgagcaccgcttcgtcgggctcttcagcgtcgcggccatgaatgcggacgtgctggagatcccgacgatctcgcgccgggtccgcgaggcgctggcgatggccgaaagcgatcccagccacccaggccaattgctgctcgacgtcatccagaccgtcccgcgaccggagctgttcaccctgagcgcgcagcgcctgctgaccatggccagggccgtggtggacttgggatcgcaacggcaggcgttgttgttcctgcgcgcggatcggttgcagtacttcgtgtcgtgcctggtctacatgccccgagatcgctacaccaccgccgtgcgcatgcaattcgaggacatccttgtccgcgagttcgggggaacacgactggagttcaccgctcgggtcagtgaatcaccttgggcactcatgcatttcatggtgcggctacccgaagtgggtgtggcaggagaaggggcggccgccccgccggtggacgtttccgaagccaaccggatccggatccagggtctgctgaccgaagccgcgcgaacctgggccgaccgtttgatcggcgcggcggcggcggctggctccgtcggacaggccgacgctatgcattacgctgccgccttctccgaggcctacaaacaggccgtcaccccggccgatgccattggcgacattgcggtcatcacggagctgaccgacgattcggtcaagctggtgttttccgaacgcgacgagcagggtgtcgcccagttgacctggttcctcggtgggcgcaccgcttcgctgagccagctgctgccgatgctgcaaagcatgggagtcgtggtgctcgaagagcgaccgttctccgtcacccggccggacggtctgccggtctggatctatcagttcaagatctcgccgcatcccacgatcccgttggccccgacggttgccgagcgggccgcgaccgcgcaccgattcgccgaggcggtgaccgcgatctggcacggccgggtcgaaatcgaccgattcaacgagctggtgatgcgtgccgggctgacttggcagcaggtcgtgctgctccgtgcctacgcgaagtacctgcgccaggcgggcttcccgtacagccagtcctacattgaatcggtgctcaacgagcaccctgctaccgttcggtctttggtcgatctgttcgaagcgcttttcgttccggtgccgtcggggtcggcgagcaatcgcgatgcccaagcggccgctgccgctgtcgccgcggacatcgacgcgctggtgagcctggacaccgaccggatcctgcgcgccttcgcgtcgttggttcaggccacgttgcgcaccaattactttgtgacacgccagggttcggcccgctgccgtgatgtattggcgctgaaactcaatgcccagttgatcgacgaacttccgctgccgcgtccccggtacgagatttttgtgtattcgccccgcgtcgaaggcgtgcatctgaggttcggcccagttgcgcgtggcgggttgcgctggtcggaccgccgtgacgatttccgaaccgagattctcggattggtcaaggcgcaagcggtgaagaacgccgtcatcgtgccggtcggggccaagggcgggttcgtggtcaagcgtcccccgctgcccaccggcgaccccgccgccgaccgcgacgccacccgcgccgaaggggtcgcctgctatcagctgttcatctccgggttgctcgatgtcaccgacaacgtcgatcatgcgaccgcaagcgtcaaccccccgcccgaggtggtgcgacgtgacggcgacgacgcctacttggtagtggccgccgacaaaggtactgccaccttttccgatatcgccaacgatgtcgccaagtcctatgggttctggctgggcgacgcgttcgcctcgggcggatcggtgggctacgaccacaaggccatgggcatcaccgcccggggggcctgggaggccgtaaaacggcatttccgagagatcgggatcgacacccagacccaggatttcaccgtcgtgggaatcggcgacatgagcggcgacgtattcggcaacggcatgttgctgagcaagcacatccggctgatcgccgccttcgaccaccgccacatcttcctcgaccccaaccccgatgccgcggtgtcgtgggccgaacgccggcggatgttcgagttgccccggtccagctggagcgactatgacaggtctctgatcagcgagggcggcggggtgtacagccgcgaacagaaagccatcccgctcagcgcgcaggtccgcgccgtcctcggcatcgacggctcagttgacgggggggccgccgagatggccccgcccaaccttattcgggcgattctgcgggcgccggtggacctgctgttcaacggcggcatcggcacttacatcaaggccgagtcagagtcggatgctgatgtcggcgatcgcgccaacgatccggtgcgagtcaacgcgaatcaagtgcgcgccaaggtcattggcgaaggtggcaatctcggagtgacggcgttgggccgtgtcgaattcgatctgtccggcggccggatcaacaccgacgcgctggacaactccgccggcgtggactgctcggaccacgaggtcaacatcaagatcctgatcgactcgctggtgagcgccggcacggtcaaagccgacgaacgcacacagctgctcgagtcaatgaccgacgaggtagcgcaactggtgctcgccgacaacgaagatcagaacgacttgatgggcaccagtcgcgccaacgcggccagcctgctgccggtgcacgcaatgcagatcaagtatttggtggctgagcgcggggtcaaccgcgaattggaagcgctgccgtcggagaaggagattgcccggcgctccgaggccggcatcgggctcacctcgcccgaactcgccacgctgatggcgcacgtcaagctggggctcaaagaggaggtgctagccaccgaactaccggatcaggatgtcttcgcttccaggttgcctcgttatttcccgacggcgctgcgcgaacggttcaccccggagatccgttcccaccagctgcgccgcgagatcgtcaccaccatgctgatcaacgatctggtggataccgccggcatcacctatgcgttccggatcgccgaagacgttggtgtcacgccgatcgatgccgtgcgcacctatgtcgccaccgatgccatcttcggtgtcggtcacatttggcgccggatccgtgcggcgaacctgccaatcgcgctgtcagacaggttgacgctggacacccgtcggctgatcgaccgtgccggacgctggctgctcaactaccgtccgcagcccttggccgtcggcgccgagatcaaccgattcgcggccatggtcaaggcactgacaccgcgcatgtcggagtggttgcgtggtgatgacaaggccatcgtcgaaaagacagctgcggaattcgcatcgcagggtgtgcctgaagacttggcctaccgtgtctcgaccggcctgtaccggtacagcctgctcgacatcatcgacatcgccgacatcgccgacatcgacgccgccgaggtcgctgacacctatttcgccctgatggaccggctgggcaccgatggcctgctgaccgcggtatcccagctgccccgacacgaccgctggcattcgttggcgcgcttggcgattcgcgacgatatttacggtgcgctacggtcgttgtgtttcgacgtgctggccgtgggggaacccggcgagagtagcgagcaaaagatcgccgagtgggaacacctcagcgcctcccgggtggcgcgggcacgtcggacactcgacgacatccgtgccagcggccagaaggatctggcgacgttgtcggtcgccgcgcggcagatccgccgcatgacacggacaagcgggcgaggaatctcggggtga

SEQ ID NO: 28540 - DNA, 1677 bp, Mycobacterium tuberculosis
atggctgagttcatctacacgatgaagaaggtccgcaaggcgcacggcgataaggtgatcctcgacgacgtgacgttgagtttctatccgggcgccaagatcggtgtcgtcggccccaacggggccggtaagtcgagcgtcttgcggatcatggccggtttggacaagccgaacaacggcgatgccttcctggccaccggcgccaccgtgggcatcctgcaacaggaaccgccgctgaacgaggacaagaccgttcgcggcaatgtggaagagggcatgggggacatcaagatcaagctcgaccgcttcaacgaggtcgccgaattgatggccaccgactacaccgacgagctgatggaagagatgggtcggctgcaagaggaactggaccacgccgacgcgtgggacctcgacgcgcagctcgagcaggccatggatgcgctgcgctgtccgccggccgacgagccggtaaccaacctatccggtggcgagcgtcgccgggtggcgctgtgcaaactgctgttgtccaaacccgacctgttgttgctcgacgagccgaccaaccacctagacgcggaaagtgtgcagtggctcgaacagcatctggccagctaccccggtgcgatcctggcggtcacccacgaccgttacttcctggacaacgtcgcggaatggatcctggagctcgatcgtggccgcgcctacccctatgagggcaactactcgacctatctggagaaaaaagccgagcggctcgcggtgcaaggccgcaaggacgcgaagctgcaaaagcggttgaccgaggagttggcttgggtccggtccggggccaaggcgcgccaggccaaaagcaaggcgcgcctgcagcgctacgaggagatggcagccgaggcggagaagacccgcaagctcgacttcgaggagattcagatcccggtcgggccccgcctaggcaacgtggtggttgaggtcgaccacctcgataagggctacgacgggcgcgccctgatcaaggacctgtcgttcagcttgccccgcaatggcatcgtcggcgtcattgggcccaacggggtaggcaagaccacactgttcaaaaccatcgtcgggctcgagacaccggacagcggcagcgtcaaggtcggcgagaccgtcaagctgagttacgtggaccaggcccgtgctggcatcgatccgcggaagaccgtctgggaggttgtctcggacggtctggactatatccaggtcggtcaaaccgaagtgccgtcacgggcctacgtgtcggcattcgggtttaagggaccggaccagcaaaaaccggccggtgtgctatccggcggggagcgcaacaggctcaaccttgcgttgacgctcaaacagggcggcaacctgattctgctcgacgaaccgacgaacgacctggatgtcgagactctgggttcgctggagaatgctctgctgaacttccccggctgcgccgtggtgatttcgcacgatcgctggtttcttgaccgcacgtgcacgcacatcctggcgtgggagggtgacgacgacaacgaggcgaagtggttctggttcgagggcaacttcggcgcctacgaggagaacaaggtggaacggctcggtgtcgacgccgctcgaccgcatagggtcacccaccgcaagctgacgcgcggctaa

SEQ ID NO: 28541 - DNA, 1041 bp, Mycobacterium tuberculosis; identical to SEQ ID NO: 28478

SEQ ID NO: 28542 - DNA, 2085 bp, Mycobacterium tuberculosis
gtgtcgttggtgatcgcgacgccgcagctgctggcaactgcggctttggatttagcgagtattggttcgcaggtgagcgcggctaatgcggccgcggcgatgccgacgacggaagtggtggctgcggctgccgatgaagtgtcggcggcgattgcggggttgttcggggcccatgctcggcagtatcaggcgctcagcgtacaggtggcagcgtttcacgagcagtttgtgcaggcgttgactgcggccgcgggtcggtatgccagcactgaggccgctgttgagcggagtctgctgggtgcggtgaatgcgcccaccgaggcgcttttggggcgcccgttgatcggaaacggcgccgacgggacggcacccgggcagcctggcgcggccggcgggttgctgtttggcaacggtggcaacggcgcggctggcgggttcggtcaaaccggcggcagcggaggcgcggccgggttgatcggcaacggcggcaacggcggggccggtggtaccggcgcggccggcggtgccggtgggaacggggggtggttgtggggcaacggcggcaacggcggtgtcggcggcaccagcgtggccgcaggcatcgggggtgcgggcggtaacggcggcaacgccgggctgttcggccatggcggcgccggtggtaccggcggcgccggcctcgccggggcaaacggggtcaatcccacgcccggccccgcggccagcaccggggacagcccggcagatgtgtccggcatcggtgatcaaaccggcggcgacggcggcacgggcggccatggcactgccggcacgccgaccggtggcaccggcggcgacggtgccaccgcgacggcaggctcgggcaaggccaccggcggtgccggtggtgacggcggtaccgccgctgccggtggcggcggcggcaacggcggcgacggcggagtcgcgcagggcgacattgcgagcgcctttggcggtgatggtggcaacgggtccgacggtgtagccgccggcagtgggggtggtagcggcggcgccggaggcggcgctttcgtacacatcgccactgccacctctaccggtggtagcggcggtttcggtggtaacggggctgccagtgccgcctccggcgccgacggtggcgcagggggagctggcggcaatggtggcgccggcgggttgctattcggtgatggcggcaacggtggcgccggtggcgcgggtggtatcggtggtgacggcgccacgggggggcccgggggaagcggcggcaacgctggcatcgcgaggtttgacagcccagaccccgaggcagaacccgatgtggtcggcggcaagggtggtgatggcggcaagggcggcagcggccttggcgtcggcggcgccggcgggaccggcggcgcgggcggcaacggcggcgccggcgggttgttgttcggcaacggcggcaacggcggcaacgccggggccggcggggatggcggcgccggcgttgccggtggggttggcggtaacggcggcggtggtggcaccgcgacgtttcacgaagacccggtcgctggtgtctgggcggtcggtggcgtaggtggtgatggtggctccggcggcagctcgcttggtgtcggcggggtgggcggagccggtggcgtgggtggcaagggtggcgccagcggcatgttgatcggcaacggcggcaacggtggcagcggcggagtcggtggggccggtggagtcggcggggctggcggtgacggcggcaacggcggctccggtggcaacgccagtacttttggcgatgagaactccatcggcggggccggcgggacgggcggcaacgggggcaacggcgcaaacggcggtaacggtggcgctggcggtattgccggcggtgcgggtgggtccggagggttcctcagcggtgccgcaggagtcagcggcgctgacggtatcggtggcgcgggcggcgcaggcggtgccggtggcgcgggcggtagcggcggtgaggcaggcgcggggggcctcaccaacggccccgggtcccctggcgtttccggcaccgaaggcatggccggcgcgcccggctag

SEQ ID NO: 28543 - DNA, 1047 bp, Mycobacterium tuberculosis
atgactcaaatcgcagaccgtccggccaggccggatgagacgcttgcggtagcggtgagcgacatcacgcagtcgttgaccatggtccaggcgatcaaccgcgccctgtacgacgcgatggccgccgacgagcgggtattggtgtttggcgaggatgtcgcggtcgagggtggggtgtttcgggtgaccgagggactggccgatacgttcggtgcagaccggtgcttcgacacgccactggcggagtccgcgatcatcggaatagccgtcgggttggcactacgtggctttgtgccggtgccagaaatccagttcgacggcttttcctatccggctttcgaccaagtggtgagccatctggccaagtaccggactcgcacccgcggtgaggtggacatgccggtgaccgtccggatcccctcgtttggcggtatcggtgcggccgaacatcattcggactccacggagtcctactgggtgcacaccgcgggcctcaaggtggtggtgccgtcgacacccggtgacgcttactggctgctgcggcacgctatcgcctgcccggaccccgtgatgtatctggagcccaaacgccgctaccacggccgcgggatggtcgacactagccggccggaaccgccgatcgggcacgcgatggtgcgccggtccggcaccgatgtgaccgtggtaacgtacggaaacctggtgagcaccgccctgtctagcgcggatactgcagagcagcaacatgattggagtctggaggttatcgatctgcggtcgttggcgccgctggacttcgacaccattgctgcgtcgatccagcgcaccgggcgttgcgtggtgatgcacgaagggccgcgcagcctcggctatggtgccggtctggccgcgcgcatccaggaagagatgttctaccaattggaggctccggtgttgcgtgcctgcggttttgacacaccctacccgcctgcgcggttggaaaaattgtggttacccggccccgaccggctgttggactgcgtcgaacgtgtgctgcgtcagccatga

SEQ ID NO: 28544 - DNA, 1104 bp, Mycobacterium tuberculosis
atgggggagggttctcggaggccatctgggatgttgatgtctgtcgatcttgagccggtgcaactcgtcggcccggacggtacgccgacggccgaacgccgctaccaccgtgaccttcctgaggaaacgctgcgttggctctacgagatgatggtggtcacccgcgagctggataccgaattcgtcaatctgcagcgccagggggagctggcgttgtacacgccctgtcgcgggcaggaagccgcgcaggtgggtgcggcggcttgcctacgcaaaaccgactggttgttcccccaataccgagaattgggcgtctacctagtgcgtggcatcccgcctggacatgttggggtcgcgtggcgtggaacctggcacggcgggctgcaattcaccacgaagtgctgtgcaccgatgtcggttcccatcggcacccagaccttgcacgcggtgggcgcggcgatggccgcgcaacgcctggacgaggactccgtgacggtggcctttctgggcgacggcgccaccagcgagggcgacgtacatgaggcgctcaatttcgcggcggtgttcaccacaccgtgcgtgttctacgtgcagaacaaccagtgggcaatctcgatgccggtatccaggcagaccgccgcaccatctatcgcgcacaaggcgattggctacgggatgccaggcatccgggtggacggcaacgacgtgctggcatgctatgcggtgatggccgaagctgccgctcgggctcgggccggcgacggtccaacgctgatcgaggcggtcacttaccgtcttggtccgcacaccaccgccgatgatccaacccggtaccgcagccaggaggaggtggaccgctgggcgacgctggacccgattccgcgctatcgcacttacttacaagatcagggcctgtggtcgcaacgcctcgaggaacaggtgacggctcgggcaaaacacgtgcggtccgagctacgcgacgcggtctttgatgcgcctgacttcgacgtcgatgaggtgttcaccacggtgtacgccgaaatcacacccgggttgcaggcgcagcgcgaacagctgcgtgccgaactggcgcggactgactga

SEQ ID NO: 28545 - DNA, 822 bp, Mycobacterium tuberculosis
atgaacctgcgtgccgccggtccggggtggctgttctgccctgccgatcgtccggaacgctttgcgaaggctgccgccgcggccgacgtggtgattctcgacctcgaggacggcgtggccgaggcgcagaagcctgccgcgcgcaatgcgttgcgggacaccccgctggacccggaacgcacggtggtgcgtatcaatgcgggcggtactgctgatcaggcccgcgatctggaggccctcgcaggcaccgcctataccacggtgatgctgcccaaggccgaatcggcggcccaagtcatcgagcttgcgccgcgtgatgtcatcgcgctggtggagaccgcgcgcggtgccgtgtgcgccgccgaaatcgccgcggccgatcccaccgtgggaatgatgtggggtgccgaagacttgatcgccacccttggcggtagctcgagccggcgggccgacggtgcctatcgtgacgtggcccgacatgtccgctcgaccatcctgctcgccgcgtccgcgttcggccgtctcgcgctcgatgccgtacatctggatatcctcgatgtcgagggcttgcaggaagaggccagagacgccgcggcggtgggctttgacgtgaccgtgtgcattcacccgagtcagatcccggtggtgcgcaaggcctatcgacccagccacgagaagctggcctgggctcggcgggttttggccgcgtcgcgaagcgagcgtggggcgttcgcgttcgaaggccagatggtcgactctccagtgctcacgcacgcggaaacgatgttgcggcgagccggggaagccacctccgaatga

SEQ ID NO: 28546 - DNA, 1965 bp, Mycobacterium tuberculosis
atgtttgacaccgtactagtggccaaccgcggtgagatcgcggttcgggtgattcggacgctgcgccggctaggcatccggtcggtcgcggtctacagcgaccccgacgtcgatgcccgccacgtcttggaggcggacgctgcggtgcggctggggcccgccccagcacgcgaaagctacctcgatatcggcaaggtgctcgatgctgcggcgcgcaccggagcccaggcgatccatccgggctacgggtttcttgccgagaatgccgatttcgctgcggcgtgtgaacgcgcccgggtggtgttcctgggtccgccggcgcgcgcgatcgaggtgatgggcgacaagatcgccgccaagaacgcggtcgccgctttcgatgttccggtggtgcccggtgtggcgcgcgccgggctgacggacgacgcgctggtcaccgctgccgctgaggtgggctatccggtgctgatcaaaccgtcggccggcggcggcggcaaagggatgcggttagtgcaagatccggcgcggctgcctgaggcgctggtgagtgcccggcgcgaagccatgtcttcgttcggggacgatacgctattcctggagcggtttgtgttgcggcccaggcacatcgaagtgcaggtgcttgccgacgctcacggcaacgtggtgcatctgggtgagcgtgagtgcagcctccagcggcgccaccagaaggttatcgaggaggcgccgtcgccactgcttgacccgcagacccgcgagcgcatcggggtcgcggcctgcaacaccgcccgctgcgtggactacgtcggcgccggcacggtggagttcatcgtctccgcgcagcgccccgacgagttctttttcatggagatgaatacccggctgcaggtggaacacccggtcaccgaggcgattactggattggacctggtcgagtggcagttgcgggtgggtgcgggcgaaaagttgggcttcgcccaaaacgacatcgagctgcgtgggcacgcgatcgaggctcgggtgtatgcggaggatcccgcgcgggaattcctgcccaccggcggccgggtgctggcggtgttcgaacccgccggccccggggtgcgggtggattcgtcactgctaggcggcacggtggtcggcagtgattacgacccgttgctcaccaaggtgattgcgcacggggccgatcgcgaggaagcgctggatcggctggaccaggcgctggcgcggactgcggtgctgggagtgcagaccaatgtcgagttccttcgctttctgctcgccgacgagcgggtgcgggtcggggatttggacaccgctgtactggacgagcgatcggccgatttcactgcgcggccggcgcctgacgacgtgctagctgccggcggcctctaccgccagtgggccctggcccggcgcgcacagggcgacctgtgggccgcgccgtccggatggcgcggcgggggccatatggcaccggtccgcaccgccatgcgcaccccgctgcgcagcgagaccgtttcggtgtgggggccacccgagtcggcgcaggttcaggttggcgatggtgagatcgattgtgcgagcgtgcaggtcacccgagaacagatgagcgtgacgataagcgggctgcgccgggattatcggtgggcagaggctgaccggcacctgtggatcgccgacgagcgcgggacttggcacctgcgcgaggccgaggagcacaagattcaccgcgccgtgggtgcgcggccggcggaggtcgtcagccctatgcctggcagcgtgatcgccgtgcaggtcgagtccggctcccagatctctgcgggtgatgtggtggtggtggtggaagcgatgaagatggagcactcgctggaggcgccggtttcgggacgggtacaggtgttggtgtccgttggcgatcaggtgaaagtcgaacaggtactggcgaggatcaaggactag

SEQ ID NO: 28547 - DNA, 1590 bp, Mycobacterium tuberculosis
gtgaccaccccgtcgatagcaatagccccctcgttcgccgacgagcaccgccggctggtggcggaattgaacaataagctcgccgccgccgccctgggcggcaacgaacgcgcccggaaacgccacgtcagccgcggcaagctgttgccccgcgaacgggtggaccgcctgctcgacccgggcagccctttcctcgagctggctccgctggccgctggcggcatgtacggcgacgaatccccgggcgcgggaatcatcaccgggatcggccgggtatccggacgccagtgcgtgatcgtcgccaacgacgcgacggtcaagggcggtacctactacccgatgacggtcaagaagcacctgcgcgcccaggaggtcgcgctgcagaatatgctgccgtgcatctatctggtcgactccggcggcgccttcctgccccgccaagacgaggtgtttcccgaccgcgagcatttcgggcggatcttctacaaccaggcgacgatgagcgccaagggcattccgcaggtggcggcggttctcggctcctgcacggcgggtggcgcttatgtgccggcgatgagtgacgaggccgtcatcgtccgtgagcagggcacgatcttcctcggcggtccgccactggtgaaggcggccaccggcgagatcgtctcggccgaggaacttggcggtggcgacttgcactcgcgcacgtccggtgtcaccgaccatctggctgacgacgacgaggacgcgctgcggatcgtgcgcgcgatcgcggacaccttcggcccgtgcgaacccgcccaatgggatgtgcgccgttcggtcgagcccaagtacccgcaggccgagctctacgatgtggtgcccccggatccccgggtcccttacgacgttcatgaggtcgtcgtgcggattgttgacggcagcgaattcagcgagttcaaggctaaatacggcaagactctggtgactgcgtttgcacgcgtccacggccacccggtcgggatcgtcgccaacaacggcgtgttgttcagcgaatccgcgctcaagggagcgcatttcatcgagctgtgcgacaaacgcaagattccgctgctgttcctgcagaacatcgccggcttcatggtcggccgcgactacgaggccggcggaatcgccaagcatggcgccaagatggtcaccgcggtggcctgcgcgcgggtgcccaagttgaccgtggtgatcggcggatcctatggtgcgggtaactattcgatgtgcggacgcgcgtactcgccccggttcctgtggatgtggccgaacgcgcggatctcggtgatgggcggtgagcaggccgcgtccgtgttggcgaccgtgcgcggcgagcagctgtccgcggccggcacaccctggtcacccgacgaggaggaagcgttcaaggcgcccatccgagcgcagtacgaagaccagggtaacccctactattcaactgcccggctgtgggatgacggtatcatagaccctgcggacaccagaacggttgttgggcttgccctttcgttgtgtgcccacgctccgctggatcaggttggctacggcgtcttccggatgtga

SEQ ID NO: 28548 - DNA, 1644 bp, Mycobacterium tuberculosis
gtggcagccgcggaagtcgtagaccccaatcggctttcctatgatcgcggtccgagtgcgccatcattgctcgagtcgaccatcggcgccaacctcgcagcgaccgctgccaggtacggacatcgggaagcactcgtggacatggtggcccggcgacggttcaattacagcgaactgctgactgacgtgcaccggctggcgacggggctggtgcgggcggggatcggcccgggcgatcgggtcggcatctgggcgccgaaccggtgggagtgggtgctcgtccagtacgcgaccgctgagatcggcgcgatcctagtgaccataaaccccgcctatcgggtccgcgaagtggagtatgcgcttaggcagtccggtgtcgcgatggtgattgccgtagcgagtttcaaggatgcggactatgccgcgatgctggccgaggttgggccgcgatgccccgatctggccgacgtgattttgctggaaagcgatcgctgggacgcgctggcgggtgccgagcccgatctgcctgcgctgcagcagaccgcggcgaggctagacggcagtgatccggtaaacatccaatacacctccggcacaacggcatacccgaagggtgtcacgctaagccaccgcaatatcctcaacaacggctacctggtgggcgagctgctcgggtacaccgcacaagatcggatttgcatcccggtgcccttctaccactgcttcggcatggtaatgggaaatctggcggccaccagtcacggggcggccatggtgatcccggcgccgggctttgaccctgcggccacgctgcgcgcggtgcaggacgagcgatgcaccagcttgtacggcgtgccgacgatgttcatcgccgagctgggcctgccggacttcaccgactacgaactgggcagtctgcgcaccgggattatggccggcgccgcgtgcccggtcgaggtgatgcgcaaggtgatctcacgcatgcatatgcccggggtctcgatctgctatggaatgaccgaaacgtcaccggtttccacgcagacgcgcgccgacgactcggtggatcgacgggtcggcacggtcggtcgggtgggtccacaccttgagatcaaggtggtggatccggccacgggcgagacggtcccgcgcggggtggtcggcgagttctgcacgcgaggctattcggtgatggccgggtactggaatgacccgcagaagactgcggaggtgatcgacgccgacggctggatgcacaccggagatctggctgagatggacccgtccgggtacgtgcggatcgccggccggatcaaagacctcgtcgtccggggcggcgagaacatctcgccgcgggagatcgaggaactcctccacacgcatcccgatattgtcgacggtcacgtcatcggggtgcccgacgccaaatacggcgaagagctcatggcggtggtcaagctgagaaacgacgcgccggaactgaccatcgagcggctgcgcgagtactgcatgggccgcatcgcgcgattcaagatcccgcggtacctgtggatcgtcgacgagttcccgatgaccgtcaccggcaaagtacgcaaagtggagatgcgacaacaggcgctcgaatacctccgcggccaacagtga

SEQ ID NO: 28549 - DNA, 393 bp, Mycobacterium tuberculosis
atgggcatcgtcggtgtggggatcgacctggtctccattcccgatttcgccgagcaggtcgaccagcccggaacggtgttcgccgagaccttcaccccgggtgagcgccgggacgcctcggacaagagttcgtcggcggcccggcacctggcggcccgctgggccgcgaaggaggcggtgatcaaggcctggtccggatcgcggttcgcgcagcggccggtgttgccggaggacatccaccgcgatatcgaggtggtcaccgatatgtggggcaggccgcgggtcaggctgaccggggccatcgctgagtatttggccgacgtgacgatccatgtgtcgctgacccacgaaggggataccgcggccgcggtcgccatcctggaggccccgtga

SEQ ID NO: 28550 - DNA, 471 bp, Mycobacterium tuberculosis
atgtcggacagaaagccggttcgcggacgacatcaggcccgtaagcgcgcggtggccctgctgttcgaggccgaggtccgcggcatcagcgcggccgaggtggtcgacacccgtgccgcgctggccgaagcgaagcccgacattgcccggctacatccgtacacggccgcggtggctcgaggggtcagtgaacacgccgcccacatcgacgacctgatcaccgcgcatctgcggggctggacgctggaccggttgcccgccgtggatcgcgccattctgcgcgtctcggtatgggagctgctccacgcggcggatgtgccggagccggtggtcgtcgacgaggccgtccagctggccaaggagctgtcgaccgacgactcgccgggctttgtcaacggggtgctgggccaggtcatgctggtgaccccgcagctgcgtgcggccgctcaagcggtgcgtgggggggcgtga

SEQ ID NO: 28551 - DNA, 1206 bp, Mycobacterium tuberculosis
gtgttgcgctggatcaccgcgggggagtcacacggccgcgccttggtggccgtggtcgaaggcatggtcgccggcgtgcacgtcacctcggccgacatcgccgaccagctggcccgacgccggctgggctacggccgcggcgcacggatgacgttcgagcgcgacgcggtgaccgtgctgtccgggatacgccacggcagcaccctgggcgggcccatcgccatcgagatcggcaacaccgaatggcccaaatgggagaccgtgatggccgccgacccggtcgaccccgccgagctggccgacgtcgcacgcaacgccccgctcacccggccgcggccgggccacgccgactacgcgggcatgctcaaatacggcttcgacgacgcgcggccggtgctggagcgggccagcgcccgcgagaccgccgcccgggtcgcggcgggcacggtcgcacgggcattcctgaggcaggcgctgggtgtcgaggtgctctcccacgtcatctcgatcggcgcgtcggcaccctacgagggtccgccgccgcgggccgaggacctacccgccatcgacgccagcccggtacgcgcctacgacaaggccgccgaggcggacatgatcgcccaaatcgaggcggccaagaaagacggcgacaccctcggcggcgtggtggaggcggtcgcgctgggcctgccggtggggctggggtcgttcaccagcggcgaccatcggctcgacagccagctggccgccgccgtcatgggcatccaggcgatcaagggcgtggagatcggcgacggattccagaccgcgcgccgccgcggcagccgcgcccacgacgagatgtaccccgggcccgacggcgtcgtccgctccaccaaccgggccggggggctggaaggcgggatgaccaacgggcagccgctgcgggtgcgtgcggcgatgaagccgatctccacggtgccgcgcgcgctggccaccgtcgacctggcgaccggcgatgaggccgtcgccatccatcagcgctcggatgtgtgcgcggtgccggcggccggggtcgtggtggagaccatggtggcgttggtgctggcccgggcggcgctggaaaaattcggcggggattcgctggccgaaacccagcgcaacatcgccgcctaccagcgcagcgtcgccgaccgcgaagcaccggccgcgcgggtctccggttaa

SEQ ID NO: 28552 - DNA, 420 bp, Mycobacterium tuberculosis
atgctggcggcggcggtgttggcctggatgggagtgttgtgcgtttgcgacgtccggcagcgccggctacccaactggctcaccctgcccggggcgggggtgatcctgctcttcgcgggccttgccggccgcggtgtgccggcgctggccggggcggccgccttggccggggtgtacctgctggtgcacctggctttgcccgccgcgatgggcgccggtgacgtcaagctggcgatcggtctgggcgggctgaccggctgcttcggggtcgaggtgtggtttctggcggcgctggccgcgccgctgctgaccgcggtgtgcggcgtgatggtgacgccatggggtgtccgcaccctgccgcacgggccgtcgatgtgtgtggccagcctgggggcggtggggttggcgctgctgggctga

SEQ ID NO: 28553 - DNA, 810 bp, Mycobacterium tuberculosis
atgagcgaaggtcccaaaaaagccggcgtgcttggttcgccgatcgcgcattcccgctccccgcagctgcacctggccgcctaccgggcgttggggctgcacgactggacctatgagcgcatcgaatgcggtgcggccgagttgcccgtcgtggtcggtggtttcggaccggagtgggtcggtgtttcggtgaccatgccgggcaagttcgccgccctgcggttcgccgacgagcgcaccgcacgcgcggaccttgtcggttcggccaacaccctggttcggacgccgcatggctggcgggccgacaacaccgacatcgacggggtggccggggcgttgggggcggctgctggacacgcgctggtgctggggtccggggggaccgcaccggcggccgtggtggggctggccgaactcggggtcaccgacatcaccgtggtggcgcgcaactcggacaaggcggcccggctggtggacctgggcacacgggtcggcgtggcgacccggttctgcgcgttcgacagcggtgggttggccgatgcggtggccgccgcggaagtgctggtcagcaccattccagcggaggtggccgcggggtatgccggcaccttggccgcgatcccggtgctgttggacgccatctacgatccgtggcccacaccgctggccgccgcggtcggatcggcgggcgggcgggtgatcagcgggctgcagatgttgctgcatcaggcgttcgcgcaggtggagcagttcaccgggctacccgccccccgcgaagcgatgacttgcgcgctggccgcgttggactag

SEQ ID NO: 28554 - DNA, 513 bp, Mycobacterium tuberculosis
gtggtcccagcacagcaccgcccgcccgaccggcccggcgatccagcgcacgaccctggacggggacgacgcctcggtatcgacgtgggcgccgcgcgtatcggcgtggcttgcagcgacccggacgcgatcttggccaccccggtggaaacggtgcgccgcgatcgttccggcaagcacctgcgcaggctggctgcgctggccgccgagttggaggcggtcgaggtgatcgtcgggctcccgcgcacgctggccgaccgcatcggccgctcggcccaagacgcaatcgaactggccgaggcgctggcacgccgtgtttctcctacgccggtgcggctggccgacgagcggctcaccacggtcagtgctcaacgatctttgcggcaggcgggggtgcgggcctccgagcagcgtgcggtgatcgaccaagcggccgcagtggcaatactgcagagctggctggatgaacgtctcgcggcgatggccgggactcaagaaggctccgatgcctga

SEQ ID NO: 28555 - DNA, 2715 bp, Mycobacterium tuberculosis
gtgcagacacacgagatcaggaagcggttcctcgatcatttcgtgaaggcgggccacaccgaggtgcccagcgcctcggtgatcctcgacgaccccaacctgttgttcgtcaacgccgggatggtccagttcgtgcctttcttcttgggacagcgcacgccgccgtacccgacggccaccagcatccagaagtgcatccgtacccccgatatcgacgaggtgggcataaccacccggcacaacacgttttttcagatggccggcaatttcagcttcggcgactatttcaaacgcggggccattgaactggcctgggcactgctgaccaacagcctcgccgccggcggctacggcctggacccggaaagaatctggacgacagtctatttcgacgacgacgaagctgtccggctatggcaggaggttgccgggctgccggcggagcgaatccagcgccgcggcatggccgacaactactggtcgatgggcattcccggaccgtgcgggccgtcatcggagatctattacgaccgcggacccgaattcggtcccgcaggcggtcccatcgtcagcgaagaccgctacctcgaggtctggaacctggtgttcatgcagaacgagcgcggagagggaaccaccaaggaggactaccagatcctcgggccgctgccccgcaagaacatcgacaccggcatgggcgtcgagcggatcgcgctggtgctgcaagacgtgcacaacgtctacgagaccgacctgctcaggccggtcatcgataccgtggccagggtcgccgcgcgtgcctacgacgtcggcaaccacgaagacgacgtgcggtaccgcatcatcgcagaccacagccgcaccgccgcgatcctgatcggtgacggcgtcagccccggcaacgacggtcgcggttatgtgctgcgccggctgctgcgtcgggtgatccgctccgccaagctgctgggcatcgacgctgcgatcgttggcgacctgatggccacggtgcgcaacgcgatgggcccgtcatatcccgaactcgtcgccgacttcgagcggatcagccggatcgcggtcgccgaggagacggcgttcaaccgcacgctggcgtcgggttccaggctgttcgaggaggtggctagctccaccaagaaatccggagccaccgtgctgtccggatcggacgctttcacgttgcatgacacctacgggttcccgatcgagctcacgctggagatggcggccgaaaccggtctgcaggtagacgaaatcgggttccgtgagctgatggccgagcagcgccgccgtgccaaggccgacgccgccgcgcgcaaacacgcgcatgctgacctgagcgcctaccgcgagctggttgacgccggcgccaccgagttcaccggattcgacgagttgcgttcccaggcgcggattctgggcatcttcgtcgacggtaagcgggttccggtggtggcgcacggtgtagccggcggagccggggaagggcagcgtgtcgaacttgtcttagatcgcaccccgctctacgccgaatcgggtgggcagatcgccgatgagggcaccatcagcggaaccggttccagcgaagctgcccgggccgcggttaccgacgtgcagaagatcgccaaaacgctttgggtgcaccgagtcaacgtggaatccggggaattcgtcgagggtgacaccgtaatcgcggcggtggatcccgggtggcgccggggtgccacgcagggccactcgggcacccacatggtgcatgccgcgctgcgacaagtgctggggcccaacgcggttcaggcgggatcgctgaaccggccgggatatttgcgcttcgactttaactggcagggtccgttgaccgacgaccagcgcacccaggtcgaagaggtcaccaacgaggccgtgcaagcggacttcgaggtgcgcacgttcaccgaacagctcgacaaggccaaggcgatgggtgccatcgcgctgttcggcgagagctaccccgacgaagtgcgggtggtggagatgggtggaccgttctcgctggagctatgtggcggcacccatgtgagcaacacggcgcagatcggtcccgtgacgatcctgggcgagtcgtcgatcggctccggggtgcgccgggtggaggcctacgtggggttggattcgtttcgtcacctggccaaggagcgtgcgttgatggccgggttggcctcgtcactgaaggtgccgtccgaagaggtaccggcccgggtggccaatctagtggagcgcctgcgggccgccgagaaggaactcgaacgtgtccggatggccagcgcccgggcagccgccaccaatgccgccgccggggctcagcggatcggtaacgtccgtttggtggcgcagcgaatgtccggcgggatgaccgcggcagacctgcggtcgttgatcggcgacatccgcggcaagctgggtagcgagccggcggtggtggcgctgattgccgagggcgaaagccaaactgtgccgtatgcggtcgcggccaatcccgctgcccaggacctcggaatccgtgccaacgacctggtcaaacaacttgcggtggcggtcgaaggccgcggtggcggtaaggcggacctggcgcagggctcgggaaagaatccgaccggtatcgacgccgcgctcgacgcggtccgctccgagatcgccgtgatagcgcgggtcggttga

SEQ ID NO: 28556 - DNA, 1359 bp, Mycobacterium tuberculosis
atgcctgaagccgtgtccgacggtctgtttgacgtgcccggcgtaccgatgacgtccggccatgacctgggcgcttcggccggggcaccgctggcggtgcggatgcgtccggcgtcgctggacgaagtggtcggccaggaccacttgctggcgcccggttcgccgttgcgccggctggtcgagggctcgggggtggcgtcggtgatcctctacggtcccccgggcagcggcaagacaacgctggcggcgttgatctcgcaggccaccggccgccggttcgaggccctgtcggcattgtcggccggcgtcaaggaagtgcgggcggtcatcgagaattcgcgaaaagcgctgcttcacggcgagcagaccgtgctgttcatcgacgaggtgcaccgattttccaagacccaacaagacgccctgctgtcggcggtggaacaccgggtggtgctgttggtggcggcgaccaccgagaacccgtcgttttcggtggtggcaccgctgctgtcgcggtcgctgatcctgcagctgcggccgctgacggccgaggacacccgcgcggtagtacaacgcgcgatcgatgacccccgcggcctgggcagggcagtcgcggtagcgcctgaggccgtcgacctgctggtgcaactcgcggccggcgacgcccggcgcgccctgaccgcgctggaagtagcggccgaggcagcccaggcggccggcgagctggtcagcgtgcaaaccatcgagcggtcggtggacaaagccgcggtgcgctacgaccgtgacggcgaccagcactacgacgtcgtcagcgccttcatcaaatcggtgcgcggttccgacgtcgatgccgcgctgcactatttggcccgcatgctggtcgccggggaggacccgcggttcatcgcccgccggctgatgattctggccagcgaggacatcggcatggccggcccgagcgcgctgcaggtggcggtcgccgccgcacagacggtggcgctgatcggcatgcccgaagcccagctgacgctggcgcacgccaccatccacctggccaccgcaccgaagtcaaacgccgtcaccacggcgttggccgcggcgatgaacgacatcaaggccggcaaggccggtctggtgccggctcatctgcgtgacgggcattactccggggcggcggcgctgggcaatgcacagggctacaaatattcccatgacgacccggatggcgttgtggcccagcaatacccgcccgacgagttggtggacgtggactactaccggcccactggtcgcggcggcgaacgcgagatcgccggccgcctggaccgcctgcgggcaatcatccgcaagaaacgggggtga

SEQ ID NO: 28557 - DNA, 1050 bp, Mycobacterium tuberculosis
atgctttttgcggctttgcgtgatgtccaatggcgaaaacgacgccttgtcatcgcaatcgtcagcaccggcctagttttcgcgatgacgctcgttctgaccggacttgtgaacgggtttcgggtcgaggccgagcgaaccgtcgattccatgggtgtcgacgcattcgtggtcaaggccggcgcggcaggaccgttcctgggttcgacaccattcgcccaaatcgacctgccccaggttgctcgtgcgcctggcgtcttggctgccgccccactagcgactgcgccgtcgacgatccggcagggcacgtcagcgcgaaacgtcaccgcgttcggggcaccagagcacggacccggcatgccgcgggtctcggacggtcgggcgccatcgacgccggacgaggtcgcggtgtcgagcacgctgggccgaaacctcggcgacgatctgcaagtgggtgcgcgcactttgcggatcgtcggcatcgtgcccgagtcaaccgcgctggcaaagattcccaacatcttcctgaccaccgaaggcctacagcagttggcatacaacggacagccgacaatcagttcgatcgggatcgacgggatgccccgacagctcccggacggctatcagaccgtcaatcgagcggatgctgtcagcgatctgatgcgcccgttgaaggtcgcggtggatgcgatcacggttgtggcggtcttgctgtggatcgttgcggcgttgatcgtcggctcggtggtctacctctctgcgttggagcggctgcgtgactttgcggtgttcaaggcgatcggcgtgccgacgcgctcgattctggccgggctggcgctgcaggcggtcgtcgtcgcgctgctcgcggcggtggttggcggcatcctttcgctgctgttggcgccgttgttcccgatgactgtcgtggtacccctgagtgccttcgtggcgctaccggcgatcgcgactgtgatcggtctgctggccagcgtcgcaggactgcggcgcgtggtggcgatcgatccggcactagcgttcggaggtccctag

SEQ ID NO: 28558 - DNA, 2655 bp, Mycobacterium tuberculosis
atggcaccctcagcttctgccgctaccaacggctacgacgtcgaccgcctgctggccggataccgcaccgcgcgtgcccaggaaacactgttcgacctgcgggacggcccgggagccggctatgacgaattcgtcgacgacgacggcaacgtgcgaccgacctggaccgagctcgccgacgcggtcgccgaacgtggcaaggcggggctggaccggctgcgctcggtggtgcacagcctgatcgaccacgacggcatcacctacaccgcaatcgatgcacaccgggacgcgctgaccggcgaccatgatctggaaccggggccgtggcgcctggacccgctgccgctggtgatttccgcggccgattgggaagtgctggaggccggcttggtgcagcgatcgcgcttgcttgatgccatcctcgcggacttgtacgggccccgcagcatgctcaccgagggtgtcctgccgccagagatgctgttcgctcatcccggctacgtgcgtgccgctaacgggatccagatgcctgggcgccaccaacttttcatgcacgcctgtgatctcagccggttgcccgacgggacttttcaggtcaacgccgactggacgcaggcgccctcgggctccggctatgcgatggccgatcgacgtgtcgtcgcgcacgccgttcccgatctgtacgaggaactggcgccgcgacccaccacaccgttcgcccaggcgctccggctggcactgattgacgcggcacccgatgtcgcccaagaccccgtcgtggtggtgctcagcccgggcatctattcagaaaccgctttcgaccaggcgtatctcgcaacgctgctgggtttcccgctagtggaaagcgcggacctggtggtgcgcgacggcaagctgtggatgcgttcgctgggcacgctgaaacgcgttgacgtcgttcttcgccgcgtcgatgcccactacgcggatccactggatctacgcgccgattccaggctcggtgtcgtcggtttggtggaagcgcagcaccgcggaacagtgaccgtcgtcaacacgctgggcagcggcatcctggagaacccaggcctgttgcgcttcctgccgcagctatccgagcgcctgctcgacgaaagcccgctgctgcacaccgctccggtctactggggcggcatcgccagcgaacgctcacacctactggccaatgtctcgtcgctgctgatcaaaagcactgtcagcggggaaactcttgtcggaccgacactttcgtctgcacaactggccgatctggcagtgcgtatcgaggcgatgccgtggcagtgggtgggccaggagctgccgcagttctcgtcggcgcccaccaaccatgccggggtgttgtcgtccgccggggtaggcatgcgactgttcaccgttgcccagcgcagtggttacgcgccgatgatcggcggcctcggctatgtactggcgcccggccctgccgcatatacgctgaaaaccgttgcagcaaaagatatctgggtgcgcccaacggagcgtgcgcatgccgaggtgataacggtgccggtgttggcgccgccggccaaaaccggagcgggcacctgggcggtcagctctccgcgcgtgctgtccgatctgttctggatgggccgctacggcgagcgcgcggagaacatggcccggctgctgatcgtcacccgcgagcgctaccacgttttccggcaccagcaggacaccgatgaaagcgagtgcgtgccggtgctgatggccgcgctgggcaagatcaccggatatgacaccgcaactggcgccggcagcgcttacgaccgggccgacatgatcgcggtcgccccgtcgacactgtggtctttgaccgtggatccggaccggccgggttcccttgttcagtcggtggaggggctggcacttgccgcccaggcggtgcgcgaccagctgtccaacgacacctggatggtgctggccaatgtggaacgcgcggtggagcacaagtccgacccgccgcagtcgctggcagaggcggacgccgtgcttgcgtcggctcaggcggagacgctagccggcatgctgacgttgtccggggtggccggcgagtcgatggtgcacgacgtgggctggacgatgatggacatcggcaagcgtatcgaacgcggcctgtggctgaccgcgttgctacaagccacgttgagcaccgtgcgccaccccgccgccgagcaagccatcatcgaggcaaccctggtggcgtgtgaatcgtcggttatctatcggcgccgcaccgtaggcaagttcagtgtcgccgctgtgaccgagctgatgttgttcgacgcccagaacccgcgctcgctggtgtatcagctggaacggctgcgcgccgacctgaaagacctgcctggctcgtcgggatcgtctcgtccggaacggatggtggacgagatgaacacccgcctgcgccgctcacacccagaagagttggaagaggtctccgccgacgggctgcgcgccgagttggcggaactgctggccgggatacatgcctcgctgcgtgacgtggccgacgtcctcaccgccactcagttggcgttgcccggcggcatgcaaccgctgtggggtccagaccaacggcgggtgatgccggcctaa

SEQ ID NO: 28559 - DNA, 1068 bp, Mycobacterium tuberculosis
atgagcgcttcgctgctagtcaggacggcctgcggcggccgtgcggtcgcccaacggttgcgcaccgtgctgtggccgatcacccagacatcggtcgtcgccggcctcgcgtggtatctcacccatgacgtgttcaaccatccgcaggcgttcttcgcgccgatttcggctgtggtgtgcatgtcggcgaccaacgtgctgcgcgcacgacgtgcccaacagatgatcgtcggggtggcgctggggatcgtgctgggtgctggcgtgcatgctctgcttggttccggaccgatcgccatgggtgtggtggtgttcatcgcgttgtcggtcgcggtgctgtgcgcacgcgggttggtcgcgcaaggcttaatgttcatcaaccaggccgccgtctccgcggtgctggtcttggtcttcgcgtccaacggcagtgtggttttcgaacgcctcttcgacgcgctggtcggtggtgggctggctatcgtgttcagcattctgctcttcccgcccgacccggtggtcatgctgtgcagtgcgcgcgccgacgtgttggccgctgtgcgcgacatcctcgccgagctggtgaacacggtgagcgatcccaccagcgccccgcccgactggccgatggcagccgctgatcgactgcatcagcagctgaacgggctcatcgaggtgcgcgccaacgctgccatggtggcgcggcgagcgccccgccgatggggggtgcgcagcactgtccgcgatctcgatcaacaggccgtctacctggccctgctggtcagttcggtgttgcatctggctcgcaccattgccgggcctggtggcgataagctgccaacgcccgtgcacgccgtgctcaccgacctcgccgcgggaaccggcctggccgacgcggatccgacggcagcgaacgagcacgcggccgccgcccgcgcaaccgcgtcgacactgcaatcggctgcttgtggcagcaacgaagtggtgcgcgccgatatcgtccaagcgtgtgtcaccgatctacaacgggtaatcgaacgcccgggcccgtcgggcatgtcagcctga

SEQ ID NO: 28560 - DNA, 1791 bp, Mycobacterium tuberculosis
gtgtttgtgctgcgcagccacgccgcgggtttgctacgggaaggcgacgccgggcagcaggtgacattggccggctgggtggctcgccgccgcgaccacggcggcgtgatcttcatcgatctgcgggacgcttcgggcatcgcacaggtggtgttccgcgacccccaggacactgaggtgctggcgcaggctcaccggctgcgtgcggaattctgcgtatcggtggccggcgtcgtcgagatccgcccggaaggcaacgccaacccggagatcgccaccggcgagatcgaggtcaacgccacgtcgttgaccgtgctgggcgaatgtgcgccgctgccgtttcagctggacgaaccggcgggtgaggagttgcgactgaagtaccgctacctcgatctgcgccgcgacgaccccgctgcggcgattcgactgcgttcccgggtgaatgccgctgcgcgcgcggtgctggcgcgtcacgacttcgtcgagatcgagacgccgacgatcacccgctcgaccccggagggagcgcgcgacttcctggtgccggcccgactgcaccccggttcgttttacgccctaccgcagagcccgcagctgttcaagcagctgctgatggtggcggggatggaacgctactaccagatcgcccgctgctaccgcgacgaggacttccgcgccgaccgccagcccgaattcacccagctcgatatggagatgagcttcgtcgacgccgaggacatcatcgcgatctccgaggaagttctgaccgagctgtgggcgctgataggctaccggattccgacgcccatcccgcggatcggctatgccgaagcgatgcgccgattcggtacggacaaacccgacctgcggttcgggctggagctcgtcgaatgcacggatttcttctccgacaccacatttcgtgtcttccaggcaccgtatgtgggcgcggtggtgatgcctggcggggcgtcgcagccgcggcgcacgctggacggctggcaggactgggccaagcagcgcggccaccgcggactggcctacgtgctggtcgccgaagacggcacgctgggcggtccggtggccaaaaacctgaccgaggccgagcgcaccggactggccgaccatgtcggggccaaacccggcgattgcatcttcttctcggccggtccggtcaaatcgtcgcgggcactgctgggcgcggcccgcgtcgagatcgccaaccggctgggcctgattgaccccgatgcgtgggcattcgtctgggtcgttgacccgccgctgttcgagccggccgacgaagcgaccgccgccggtgaggtcgcggtcggctcgggggcctggaccgcggtgcaccatgccttcaccgcgccgaaaccggaatgggaggaccgcatcgaatccgataccggcagcgtgctggccgacgcgtacgacatcgtctgcaacggccacgagatcggtggcggctcggtgcgtatccaccgccgtgatatccaggaacgggtgttcgcggtgatgggcctggacaaggccgaggcggaggaaaagttcggattcctgttggaggcgttcatgtttggcgcaccgccgcacggcggaatcgcgttcgggtgggaccggaccaccgcgctgctggccgggatggactcgatccgtgaggtgatcgcgttcccgaagaccggcggcggcgtcgatccgctcaccgacgcgccggcgcccattaccgctcagcaacgtaaggagtccggaatagatgcccagcccaagcgggtccagcaggcatga

SEQ ID NO: 28561 - DNA, 1272 bp, Mycobacterium tuberculosis
gtgacggaattctcgtcattttcggcccccaagggggtaccggactacgtcccgcccgactcggcgcagttcgtcgcggtgcgcgacgggctgctcgcggcggcccgtcaagccggctatagccacatcgagctgcccatcttcgaggacaccgccctgttcgcccggggcgtgggtgaatccaccgacgtggtgtccaaggagatgtatacgttcgccgaccgtggcgaccgctcggtgacgctgcggcccgagggcaccgccggggtggtgcgtgcggtgatcgaacacgggctggatcgcggcgcgctgccggtgaagttgtgttatgcgggcccgtttttccgctacgagcgtccgcaggccggccggtatcgccagttacagcaagtcggggtggaggcgatcggcgtcgacgacccggcgttggacgccgaggtgatcgccattgccgacgccgggttccgctcgttgggtctcgacgggttccggctggaaatcacctccctgggagacgagagttgccgtccgcagtaccgggaactgttgcaggagttcttgtttggactcgatctcgacgaggacacccgcaggcgcgcagggatcaatccgctgcgggtgctcgacgacaagcgacccgaattgcgtgcgatgacggcgtcggcgccggtgttgctggatcatctgtctgatgtcgccaagcagcatttcgacaccgtgctcgcccatctggacgcgcttggagtgccctatgtcatcaacccgcgcatggtgcgcggcctggactactacaccaagaccgccttcgagttcgtccatgacgggcttggtgcgcaatcggggatcggcggcggggggcgctacgacggcctgatgcaccagcttggcgggcaggacttgtcgggcatcgggttcgggctgggcgtggaccggaccgtgctggcgctgcgggccgagggcaagacggcgggggacagcgcccggtgcgacgtgttcggcgtgccgcttggcgaggcggccaagctcaggctggcggtgctggctggacgactgcgcgcggccggggtgcgggttgaccttgcctatggtgatcgcgggctcaaaggcgcgatgcgcgcggccgctcgttccggcgcccgtgttgcgttggtagcgggcgaccgcgacatcgaggccgggacggtcgcagtgaaggacttgacgacgggtgagcaagtttcggtctcgatggattcggttgtggccgaagtaatttcgcggctggctgggtag

SEQ ID NO: 28562 - DNA, 2373 bp, Mycobacterium tuberculosis
gtggccgaggaccagctcacggcgcaagcggttgcaccgcccacggaggcttctgcggctctcgagcccgctctcgagacgcccgagtcgccggtcgagactcttaagaccagcatcagcgcgtcgcgtcgggtgcgggcccgattggcccggcggatgaccgcccagcgcagcaccaccaatccggtgctcgagccgttggtggcggtgcaccgggagatctatcccaaggccgacctgtcgatcttgcagcgagcctacgaggtcgctgaccaaaggcatgccagccagttgcggcagtccggtgatccctacatcacccacccgttggccgttgccaacattctggccgagttgggcatggacaccaccactttggtggccgcgctgctgcacgacaccgtcgaggacaccggttacaccctggaggcgttgaccgaggaattcggcgaagaggtgggccatctcgtcgacggggtgaccaagctggatcgggtggtgttgggcagcgccgccgaaggcgagactattcgcaagatgatcaccgcgatggcccgcgatccgcgggtgctggtgataaaggtggctgaccggttacacaacatgcgcaccatgcgcttcttgccgccggagaagcaggcccgcaaggcccgtgagacgttggaagtcattgcacccctggcgcatcggctgggcatggccagcgtcaagtgggagttggaggacctgtccttcgcgatcctgcatcccaagaagtacgaggagatcgtccggctggtcgccggtcgcgcgccgtcccgggacacctacctggccaaggtgcgtgccgaaatcgtcaacacgctgaccgcgtcgaagatcaaggcgacggtggagggccgccccaagcactattggtcgatctaccagaagatgatcgttaagggccgcgacttcgacgacatccacgacctggtcggtgtgcgcatcctgtgcgacgaaatccgggactgctacgcggctgtcggcgtagtgcattcgctatggcagccgatggcgggtcggttcaaggactacatcgcccagcccagatacggtgtgtaccagtcactgcacaccactgtggtcgggcctgagggcaagccgctggaagtgcagatccgtacccgcgacatgcaccgcaccgccgaatacggcatcgccgcgcattggcgctacaaagaagccaagggccgcaacggtgttcttcatccgcatgccgccgcggagatcgacgacatggcctggatgcgtcagctgctcgactggcaacgtgaggcggccgaccccggtgagttcttggaatcattgcgctacgaccttgcggtgcaagagattttcgtgtttacccccaagggcgacgtgatcacgctgccaaccggttcgacgccggtggacttcgcttacgcggtgcacacagaggtgggccaccgctgcatcggcgcccgagtgaacggccggttggtagcgctggaacgcaagctggaaaacggagaagttgtcgaggttttcacgtccaaggcgccgaacgccgggccgtcgcgggactggcagcagttcgtggtgtcgccgcgcgcaaagacgaagatccgccagtggttcgccaaggagcggcgtgaggaggcgttggagaccggtaaggatgcgatggcccgcgaggtgcgccgcggtggacttccgttgcagcgcttggtcaatggtgagtccatggcggcggtggcccgcgagctgcactacgcggacgtgtcagcactctataccgccatcggtgaggggcacgtgtcggcgaaacacgtcgtgcagcggttgttggccgagctcggcggtatcgaccaggcggaagaggaactcgccgagcggtccacgccggcgaccatgccgcggcgcccacgcagcaccgacgatgtcggggtctccgtccccggcgccccgggcgtgctgaccaagctggccaagtgctgcacgccggttccgggcgatgtgattatggggttcgtcacccgtggcggcggggtcagtgtgcaccgcaccgactgcaccaacgccgcatcgctgcagcagcaggccgagcgcatcatcgaggtgctatgggcgccgtcgccgtcgtcggtgtttctggtggcaatccaggtcgaggcactcgaccggcaccggctgctgtcggatgtgacgcgcgcactggccgacgagaaggtcaatatcctgtccgcgtcggtcaccacttcgggggaccgggtggcgatcagtcgattcaccttcgagatgggtgaccccaagcacctcgggcacctgctcaacgccgtccgcaacgtcgaaggtgtctacgacgtctaccgggtgacctcggccgcgtag

SEQ ID NO: 28563 - DNA, 597 bp, Mycobacterium tuberculosis
gtgagcgttccacgggtcggggtgctggcgctgcagggcgacacccgggagcacctggctgcgctgcgcgaatgcggggccgagccgatgacggtgcggcgccgcgacgaacttgacgcggtggacgcgctggtcatcccgggcggggaatccaccacgatgagccacctgctgctcgacctcgacctgctgggaccgctgcgggcccggctcgccgatgggcttccggcctatggttcgtgcgcgggcatgattctgttggccagcgagatcctggacgccggtgcggcaggccgccaggcgctgcccctgcgtgcgatgaatatgacggtgcggcgcaatgcttttggaagtcaggttgactcgtttgaaggcgatatcgagttcgctggtctagacgatccggtgcgcgcggtgttcatccgggcgccatgggttgagcgagtcggtgacggtgtgcaggtgctggcccgcgcggcggggcacatcgtcgcggtgcgccagggtgcggtgcttgccaccgcgtttcatccggagatgaccggcgatcgccgcattcatcagttgttcgtcgacatcgtcacctccgcggcgtga

SEQ ID NO: 28564 - DNA, 900 bp, Mycobacterium tuberculosis
atggatcctgcaggtaacccagcgaccggtacggcgcgggtcaagcgcggcatggccgagatgctcaagggcggcgtcatcatggacgttgtcaccccggagcaggcccgcatcgccgagggcgccggtgcggttgcggtaatggcgttggaaagggtgcccgccgatatccgcgcccagggcggggtgtcgcggatgagtgaccccgacatgatcgagggcatcatcgccgcggtcaccatcccggtgatggctaaagtgcgcatcggccactttgtcgaggcgcagatcctgcagacgttgggcgtcgactacatcgacgagtccgaggtgctgacgcccgctgactacgcccaccatatcgacaagtggaacttcacggtgcctttcgtgtgtggggcgaccaatctcggtgaggcgttgaggcgcatcagcgagggagcggccatgatccggtccaagggcgaggccgggaccggagacgtctccaacgcgaccacacacatgcgggccatcggtggtgagatccgccggttgacgtcgatgtcggaggacgaattgtttgtcgcggcaaaagaattgcaagcgccctatgaactcgttgccgaggtagctcgggcgggcaagttgccggtcacactgttcaccgccgggggtatcgccacgcccgccgacgcggcgatgatgatgcagcttggcgccgagggcgtcttcgtgggttccggtattttcaagtccggcgcccctgagcaccgcgccgccgcgatcgtcaaggccaccacgttcttcgacgatcccgatgtgctggccaaggtgtcgcgcgggctgggcgaggcgatggtgggcatcaacgtggacgagatcgctgtcggtcatcggctcgcccagcgcggctggtga

SEQ ID NO: 28565 - DNA, 2079 bp, Mycobacterium tuberculosis
atgagcgcccccgcacaacccgccccgggagtcgatggcggcgacccgtcgcaagcccgaattcgggttcctgccgggaccaccgcggccaccgccgtcggcgaagcgggtttaccgcggcgcggtacgcccgatgcgatcgtcgtcgtgcgcgacgccgacggcaacctgcgcgacctgagctgggtgcccgacgtcgacaccgatatcacgccggtggccgccaacaccgacgacggtcgcagcgtgatccgccattcgaccgcgcacgtgttggcccaagccgtccaagagctgtttccgcaggccaagctcggcatcggaccacccatcaccgacggcttctactacgacttcgacgtgcccgagccgttcacgcccgaggacttggcggcgctggaaaagcggatgcgccagatcgtcaaggaaggccagctgttcgaccggcgggtctacgaatccaccgaacaggcccgcgccgagctggccaacgagccctacaagctggaactcgtcgacgacaaatcgggtgacgccgagatcatggaggtcggcggtgacgagctcaccgcctacgacaacctcaacccccgcacccgcgagcgcgtctggggcgacctgtgccgcggaccgcacatcccgaccaccaaacacatcccggcgttcaagctcacccgcagctcggccgcctactggcggggcgatcagaaaaacgccagcctgcaacggatctacggcaccgcgtgggaatcccaggaggcgctcgacaggcacctggagttcatcgaagaggcgcagcgccgcgaccaccgcaagctgggtgtcgagctggacctgttcagcttccccgacgaaatcggttccggcctagcggttttccaccccaagggcggcatcgtgcgtcgcgaactggaggactactcgcggcgcaagcacaccgaggcgggctaccagttcgtcaacagcccgcacatcaccaaggcccagttgttccacacctcgggacatctggactggtacgccgacggcatgttccccccgatgcacatcgacgcggagtacaacgccgacggctcgctgcgcaaacccggccaggactactacctcaagccgatgaactgcccgatgcactgcctgatcttccgcgcgcgcgggcgatcctatcgggaactgccgttgcggctcttcgagttcggcacggtgtatcgctacgagaagtccggtgtggtgcacgggttgacccgggtgcgtgggctgaccatggacgacgcgcacatcttctgcacccgcgaccagatgcgcgacgagctgcggtcgctgctgcggtttgtgctcgacctgctcgccgactacggcctcaccgacttctacctcgaactgtccaccaaggacccggagaagttcgtcggcgccgaggaggtctgggaggaagccaccaccgtgctggccgaggtgggcgccgaatccgggctggagctggtgcccgatccaggcggcgcggcgttctacgggcccaagatttcagtgcaggtcaaagacgcgctgggccgcacctggcagatgtcgaccatccagctggacttcaactttccggaacgtttcggcctggagtacaccgccgccgacggaacccgccaccgcccggtgatgatccaccgcgcgctatttgggtcgatcgagcggttcttcggcattctcaccgagcactacgcgggggcgttcccggcctggttggcgcccgtgcaggtggtcggcatcccggtcgccgatgagcacgtcgcctatctggaagaggttgccacgcaactgaagtcgcacggggtgcgggccgaggtggacgccagcgacgatcggatggccaagaagatcgtgcaccacaccaaccacaaggtgccgttcatggtgttggcgggtgatcgtgacgtcgccgccggcgcggtgagtttccggttcggtgaccgcacccaaatcaacggtgtggcccgtgacgatgcggtggcggccattgtcgcctggatcgctgaccgcgaaaatgcggttcctacagcggaactggtgaaagtggccggtcgtgagtga

SEQ ID NO: 28566 - DNA, 1386 bp, Mycobacterium tuberculosis
atgtcgtttgtcaacgtggccccacagttagtgtccacagccgcggccgatgcagcgcggatcggctcggcgatcaacaccgccaacaccgcggcggcggcgaccacccaggtgttggccgccgcccaagacgaggtgtcaacggcgatcgccgcgctgttcggcagccacggccagcactatcaagcgatcagcgcgcaggtcgcggcctatcagcaacggttcgtgctggccttaagccaagctggcagcacctacgcggtcgccgaagcggccagcgcaacaccgctgcagaacgtgctcgatgcgatcaacgcacccgttcagtcgctgaccgggcgcccattgatcggcgacggcgcgaacgggatcgacgggaccgggcaagccggcggtaacggcgggtggctgtggggcaacggcggcaacggcgggtcgggggcacccgggcaggccggcggggccggcggtgcggccgggttgatcggcaacggtggggccggcggagctggcggccagggcctaccctttgaggccggcgcgaacggcggagccggcggcgccggtggatggctgttcggcaacggcggggccggcgggaacggcgggatcggtggggccggcaccaacctcgctatcggcgggcatggtgggaacggcggcaacgccgggctgatcggcgccggcgggaccggcggggccgggggcaccggcggcggcgagccctccgcgggggctagcggcggcaacggcgggaacggcgggaacggcggcctactgatcggcaacagcggggacggcggggccgccggaaacggggcaggcatttctcagaacggtccagcgtccggattcgggggtaacggtggtcacgccggaaccaccggactgatcggcaacggcggcaatggcggagccggcggagccggtggtgatgtgtccgccgatttcgggggcgttgggtttggcgggcaaggcggtaacggcggcgccggcgggctactctacggtaacggcggggccggcggaaacggcggtgccgccgggtcgcccgggtctgttacggccttcggagggaatggcggtagcggcggcagcggtggaaacggcggcaatgccctcatcggcaacgcgggggccggtgggagcgccggggccggcgggaacggagcgagcgccggcactgctggcgggtccggcggtgacggcgggaaaggcgggaacggcggcagcgtcggactgatcggcaacggtggaaacggcggaaacggcggcgccgggagcctcttcaatggcgctccaggcttcggcgggcccggcggcagcggcggtgcatcactgttggggccacccggcctggccggcaccaacggagccgacggctaa

SEQ ID NO: 28567 - DNA, 2337 bp, Mycobacterium tuberculosis
atgtcatttgtgattgcggtgccggaagcattgacgatggcggcttcggatctggccaacattgggtcgacgatcaacgcggcgaatgcggcggcggcattgccgaccacgggggtggtggcggctgccgcggatgaggtttcggcggcagttgcggccttgttcgggtcgtacgcgcagagctatcaggcttttggtgcgcagctgtcggcgtttcacgcccagttcgtgcagtcccttacgaacggcgcgcgctcatacgtagttgccgaggccaccagtgctgcgccgttgcaggatttgttgggcgtggtaaatgcccccgcccaggcgttgttggggcgcccgttgatcggcaatggcgctaacggggccgacgggacgggggctcccggtgggccgggcgggctgttgcttggcaacggcgggaatggcggatcgggtgcgccgggtcagccaggtggtgctggcggggatgcggggttgatcggtaacggcgggactggcggtaaaggtggggacgggctggtcgggtccggtgctgccgggggtgtcggtggtcgcggtggatggttgctgggtaatggcgggaccggtggggctggtggggctgcaggggccactttggtcggcggtactggcggtgtcggtggggcgacggggttgatcggcagcgggggcttcggcggtgctggcggggccgcggcgggggtgggcaccaccggcggcgtgggcgggagcggtggcgttggcggcgtgttcggcaatggtggattcggcggggccggtggccttggcgccgccggcggcgtcggaggggcggccagctacttcgggaccgggggcggtggcggcgttggtggggacggtgcgcccggtggtgacggcggtgcgggtccgctattgatcggcaatggcggtgttgggggtctgggtggggccggggcggccggtggtaatggcggtgccggcgggatgttgttgggcgatggcggtgccggcggacagggtgggccggccgtggcgggtgtcctgggcgggatgcccggcgcgggcggcaacggcggtaatgccaactggttcgggtccggtggtgccggcgggcagggtggcaccggtctggccgggacaaacggggtcaaccccggctcgattgcgaaccccaacaccggtgcgaacggtaccgacaacagcggcaacgggaatcaaactggcgggaacgggggtcccggccccgccggtggcgtcggcgaggctggcggcgtcggcgggcagggcgggctgggggagtcgctcgacggcaacgacggcaccggcggtaagggtggagccgggggtactgccggtaccgatggcggtgccggcggcgctggcggcgctggcggcataggtgagaccgacggcagcgccggcggcgtggctaccgggggtgaggggggtgacggtgccaccggaggggtcgacggtggcgtgggtggtgctggcggcaagggggggcaggggcacaacacgggtgtaggtgacgctttcggcggtgacggcggaatcggcggtgacggtaacggggcactaggcgcggcgggcggtaacggcggcaccggtggtgccggtggaaacggtggacgtggcgggatgttaatcggcaacggcggcgccggtggggccggcgggacgggcggcaccggtggtggtggcgccgccggcttcgcgggcggtgtcggcggcgcgggcggagagggtctcaccgacggtgcgggtaccgcggaaggcggcaccggcggtctggggggcctcggcggtgtcggcggtaccggcggtatgggtggcagcggcggtgtcggcggcaacggcggggcggctgggtcgctcatcgggcttggtggtggcgggggtgccggcggtgtcggcggcaccggtggcatcggcggcatcggtggtgccggcggcaacggtggcgccggcggcgcgggtaccaccaccggcgggggagcgacaattggcggtggcggcggtacaggcggcgtggggggcgctggtggcactggcggtaccggcggcgccggcgggaccaccggcggcagcggcggagccggcgggctgatcgggtgggcaggagctgccggcggcaccggcgcaggcggcacgggtgggcaaggtggcctcggcggccagggcggcaacggcggcaacggcgggaccggcgcgaccggcggtcagggcggcgatttcgcgctgggcggcaacgggggcgccggcggcgcgggtgggtcaccgggtggcagctccggcatccagggcaatatgggcccgcccggcacccagggcgccgacggatag

SEQ ID NO: 28568 - DNA, 381 bp, Mycobacterium tuberculosis
atgtcgaatctgcatccgttaccagaggtggcgagctgcgtagtcgcgccgctggtgcgcgaaccgctgaatcctccggccgcggccgaaatggcggcccggttcaaagccctggccgatccggtgcgattgcagctgctgagctcggttgccagtcgcgccggcggcgaggcctgcgtctgcgacatttccgcgggagtcgaggtgagccagcccacgatttcgcatcatctcaaggtgctgcgcgacgcgggtttgctgacctcgcggcgtcgggcctcgtgggtgtactacgccgtggtccccgaggcgctgaccgtgttgtcgaacctgctcagcgtgcatgccgatgccgcacccgccctgggggcaccggcatga

SEQ ID NO: 28569 - DNA, 987 bp, Mycobacterium tuberculosis
aaagaccgcgtcggctttcttcgcggccgagctcgaccggccagcacgctaattacccggttcatcgccgatcatcagggccaccgcgagggccccgatggtttgcggtggggtgtcgagtcgatctgcacacagctgaccgagctgggtgtgccgatcgccccatcgacctactacgaccacatcaaccgggagcccagccgccgcgagctgcgcgatggcgaactcaaggagcacatcagccgcgtccacgccgccaactacggtgtttacggtgcccgcaaagtgtggctaaccctgaaccgtgagggcatcgaggtggccagatgcaccgtcgaacggctgatgaccaaactcggcctgtccgggaccacccgcggcaaagcccgcaggaccacgatcgctgatccggccacagcccgtcccgccgatctcgtccagcgccgcttcggaccaccagcacctaaccggctgtgggtagcagacctcacctatgtgtcgacctgggcagggttcgcctacgtggcctttgtcaccgacgcctacgctcgcaggatcctgggctggcgggtcgcttccacgatggccacctccatggtcctcgacgcgatcgagcaagccatctggacccgccaacaagaaggcgtactcgacctgaaagacgttatccaccatacggataggggatctcagtacacatcgatccggttcagcgagcggctcgccgaggcaggcatccaaccgtcggtcggagcggtcggaagctcctatgacaatgcactagccgagacgatcaacggcctatacaagaccgagctgatcaaacccggcaagccctggcggtccatcgaggatgtcgagttggccaccgcgcgctgggtcgactggttcaaccatcgccgcctctaccagtactgcggcgacgtcccgccggtcgaactcgaggctgcctactacgctcaacgccagagaccagccgccggctga

SEQ ID NO: 28570 - DNA, 471 bp, Mycobacterium tuberculosis
gtgaccgacgccgacgagttggccgccgtcgccgcacgcaccttcccgctggcgtgcccaccagcggtcgccccggagcacatcgcgtcgttcgtcgacgccaacctgtcgtcggcccggttcgccgagtatctgaccgatccgcggcgcgccatcctcaccgcccgccatgacggccgaattgtcggttacgccatgctcattcgcggtgacgaccgggacgtggagctgtccaagctgtacctgctgccgggttatcatggcaccggagccgctgcggcattgatgcacaaggtgctggctaccgccgccgactggggcgcgctccgggtgtggctgggtgtcaaccagaaaaaccaacgcgcacaacgcttctacgcgaagactggtttcaagatcaacggcaccaggacgtttcgactgggagcccaccacgagaatgactacgtcatggttcgcgagcttgtatga

SEQ ID NO: 28571 - DNA, 663 bp, Mycobacterium tuberculosis
atgaaagtagctgtcgccggagcgggtgcggtgggccgctcggtcacccgcgaactcgtggaaaacggacacgacatcaccctgatcgagcgcaaccccgaccacctcgacgccgccgccatcccggaggcgcattggcggcttggcgatgcctgcgaactgagcctgctggagtcgattcacctcgaagagttcgacgtggtcgtcgccgccaccggggacgacaaggtcaacgtggtgctcagcctgctagccaagaccgaattcgcggtgccgcgggtggtggcccgggtcaacgatccccgcaacgagtggctgttcaacgacgcctggggggtcgacgtcgcggtgtccacaccccgcatgctggcgtcgctgatcgaagaggccgtcacgatcggcgacttggtgcggctgatggagttccgcacgggtcaggccaatctggtagagatcaccctgcccgacaacacgccgtggggcggcaaaccggtgcgcaaacttcagctgccgcgggatgccgcgctggtgacaatcctgcgcgggccacgagtcatcgtgccggaggccgacgagccgctggaaggcggcgacgagttgctcttcgtcgcagtcaccgaagccgaggaggagctgagcaggctgctgctgccgtccatgtaa

SEQ ID NO: 28572 - DNA, 798 bp, Mycobacterium tuberculosis
atgaccagcaccggccccgagacgtccgaaacaccgggtgccacgacacagcgtcatggcttcggcatcgacgtcggcggcagcggcatcaagggcggaatcgtcgacttggacaccggccagctgatcggcgaccggatcaagctgctgaccccgcaaccggccactccgttggcggtcgccaaaaccatcgccgaggtcgtcaacggtttcggctggcggggtccgctgggggtgacctatcccggcgtcgtcactcacggcgtcgtccggaccgcggctaacgtggacaagtcctggatagggaccaacgcacgcgacactatcggcgccgagctgggcggtcagcaggtcaccatcctcaacgacgctgatgccgccgggctggccgagacacgctacggggccggcaagaacaaccctggcttagtggtactgctcacattcggaaccgggatcgggtccgcggtcatccacaacgggacgttgatacccaacaccgagttcggacatcttgaggtcggcggcaaggaagcggaggaaagggccgcctcctcggtaaaggaaaagaacgactggacctatccaaagtgggccaagcaggtgatacgcgtgctcatcgccatcgagaacgcgatctggcctgacctgttcatcgccggcggcggcatcagccgcaaggccgacaaatgggtgccgctactggaaaaccgcacaccagtagtgcccgcggccctgcagaacaccgccggaattgtcggtgcggccatggcctctgtcgcagatacgacgcactga

SEQ ID NO: 28573 - DNA, 1587 bp, Mycobacterium tuberculosis
gtggcagcgaccaaagcaagcacggcgaccgatgagccggtaaaacgcaccgccaccaagtcgcccgcggcttccgcgtccggggccaagaccggcgccaagcgaacagcggcgaagtccgctagtggctccccacccgcgaagcgggctaccaagcccgcggcccggtccgtcaagcccgcctcggcaccccaggacactacgaccagcaccatcccgaaaaggaagacccgcgccgcggccaaatccgccgccgcgaaggcaccgtcggcccgcggccacgcgaccaagccacgggcgcccaaggatgcccagcacgaagccgcaacggatcccgaggacgccctggactccgtcgaggagctcgacgctgaaccagacctcgacgtcgagcccggcgaggacctcgaccttgacgccgccgacctcaacctcgatgacctcgaggacgacgtggcgccggacgccgacgacgacctcgactcgggcgacgacgaagaccacgaagacctcgaagctgaggcggccgtcgcgcccggccagaccgccgatgacgacgaggagatcgctgaacccaccgaaaaggacaaggcctccggtgatttcgtctgggatgaagacgagtcggaggccctgcgtcaagcacgcaaggacgccgaactcaccgcatccgccgactcggttcgcgcctacctcaaacagatcggcaaggtagcgctgctcaacgccgaggaagaggtcgagctagccaagcggatcgaggctggcctgtacgccacgcagctgatgaccgagcttagcgagcgcggcgaaaagctgcctgccgcccagcgccgcgacatgatgtggatctgccgcgacggcgatcgcgcgaaaaaccatctgctggaagccaacctgcgcctggtggtttcgctagccaagcgctacaccggccggggcatggcgtttctcgacctgatccaggaaggcaacctggggctgatccgcgcggtggagaagttcgactacaccaaggggtacaagttctccacctacgctacgtggtggattcgccaggccatcacccgcgccatggccgaccaggcccgcaccatccgcatcccggtgcacatggtcgaggtgatcaacaagctgggccgcattcaacgcgagctgctgcaggacctgggccgcgagcccacgcccgaggagctggccaaagagatggacatcaccccggagaaggtgctggaaatccagcaatacgcccgcgagccgatctcgttggaccagaccatcggcgacgagggcgacagccagcttggcgatttcatcgaagacagcgaggcggtggtggccgtcgacgcggtgtccttcactttgctgcaggatcaactgcagtcggtgctggacacgctctccgagcgtgaggcgggcgtggtgcggctacgcttcggccttaccgacggccagccgcgcacccttgacgagatcggccaggtctacggcgtgacccgggaacgcatccgccagatcgaatccaagactatgtcgaagttgcgccatccgagccgctcacaggtcctgcgcgactacctggactga

SEQ ID NO: 28574 - DNA, 1407 bp, Mycobacterium tuberculosis
atgcgtgaatacgacatcgtggtgatcgggtcaggcccgggcggacagaaagccgccatcgcctcggcgaagctgggcaagtccgtggccatcgtcgaacgcggccgaatgctcggcggcgtctgcgtcaacacaggcacgatcccatccaaaacgttgcgtgaggctgtgctctacctcaccggcatgaaccaacgcgagctgtacggcgcaagctaccgcgtgaaggaccggatcaccccggccgacctgttggcgcggacccagcacgtgatcggcaaggaagtcgacgtggtgcgcaaccagctgatgcgtaaccgcgtcgatctgatcgtgggccatggccggttcatcgacccgcacaccatcctcgtggaggaccaggcccgcagggaaaagaccaccgtcaccggcgactacatcatcatcgccactggcaccaggccggcacggccatccggagtcgaatttgacgaagaacgggtgctcgactccgacgggatcctcgatctcaaatcgctgccatcctcgatggtcgtggtcggtgccggcgtgatcggcatcgaatacgcctccatgttcgctgcgttgggcaccaaagtcaccgtcgtggagaagcgggacaacatgctggacttctgcgaccccgaggtcgtcgaggcgctgaaattccacctgcgcgacctggcggtgacattccggttcggcgaggaagtgaccgcggtcgatgtcggctctgcgggcaccgtgaccaccctggccagcggcaaacagattccagccgagaccgtaatgtactcggcgggacgtcagggacaaaccgaccacctcgacctgcacaacgccggactcgaggtgcagggccgcgggcggatcttcgtagacgaccgtttccagaccaaggtagaccacatctacgccgtcggcgacgtcattggcttccccgccttggccgcgacgtcgatggagcaggggcggctggccgcctaccacgccttcggcgaaccaaccgacggaatcaccgaacttcagccgatcggtatttattcgattcccgaggtgtcctacgtcggcgccaccgaggtggaactgaccaagagctccatcccatacgaggtgggagtggcccgctaccgggagctggcccgcggccaaatcgccggcgactcctacggcatgctcaagctgctggtttccaccgaggatctcaagctgctcggcgtgcatatcttcggcaccagcgccaccgagatggtgcacatcgggcaggccgtgatgggatgcgggggcagcgtcgagtacctggtcgacgcggtgttcaactacccgaccttctcggaggcctacaagaacgccgcactggacgtgatgaacaagatgcgcgcactcaaccagttccgccgctga

SEQ ID NO: 28575 - DNA, 1194 bp, Mycobacterium tuberculosis
atgggtgcttccggcctggtctggaccctcaccatcgtcctgatcgccggcttgatgttggtcgactacgtcctccacgtacgcaagacccatgtaccgacgttacgtcaggccgtcatccagtcggcgaccttcgtggggatagcgatcctgttcggcatcgcagtggtggtgttcggcggctcagagctggcggtcgaatatttcgcctgctacctgaccgacgaagccctgtcggtcgacaacctgttcgtatttctggtcatcatcagcagcttcggggtgcctcgtctcgcgcaacaaaaggtgctgttgttcggtatcgcgtttgcgctcgtcacgcgcaccggattcatcttcgtcggcgccgcgctcatcgagaacttcaactcggccttttacctgttcggcctggtcctactggtcatggcgggcaacctcgccagacccaccgggctagaaagccgcgacgccgaaacgctcaagaggtccgtcattatccggctagccgaccgcttcttgcggacctcacaggactacaacggagaccggttgttcacggtctcgaacaacaagcgaatgatgaccccgttgttgctggtcatgatcgccgtgggtggcactgacatactatttgcgttcgattcgattccagcacttttcggcctgacccaaaacgtctatctggtgttcgccgccaccgcgttctcgctgttgggcctgcgccagctgtacttcttgatcgacggcctgctggatcggctagtctatctgtcttacgggttggccgtgattcttggcttcatcggcgtcaaactgatgctggaagcattgcacgacaacaagattccgttcatcaacggcggcaagccggtcccgaccgtggaggtgagcaccacccagtcgttgacggtgatcatcatcgtcctgctgatcacgaccgcggcgtcgttctggtcggcgcgcggacgggcgcagaacgccatggcgagggcccggcggtatgcaaccgcatacctcgacctgcactatgagaccgagtcggccgaacgcgacaagatctttaccgcactgctggccgctgaacgccagatcaacactctcccaacgaaataccgcatgcagcccggacaggacgacgacctgatgacgctgctgtgcagggcccatgccgcgcgcgacgcgcacatgtga

SEQ ID NO: 28576 - DNA, 906 bp, Mycobacterium tuberculosis
atggccagcgtcgaattcgcgaccattctggcgctgggcgccgcgttgctggccgggatcgggtatgtgacacttcagcggtccgcgcgacaggtcaccgctgaagaatatgtcggccatttcacgttgttccacctctctttgcgtcacgctctgtggtggctgggcagcctggccgcagtcgccagtttcaccctgcaggccattgcgctgacgatgggttcggtggtgttggtgcagtcgctgcaggccaccgcactgttgttcgcgctgctgatcgatgctcggttgactcatcaccgctgtactcccagggagtggatgtgggcggtattgctggccggcgcggtggccgtcatcgtcatgtcgggcaacccggcggccggcactactcgggcccccttctcgacctgggcggtggttgctgtcgtggttgttccggcggtggtgctttgtgtggttggtgcacggattgcctcgggttcgctgtccgcggtgctgctggcggtggcgtcgtcggcaacgttggcggtattcaccgtgctgaccaaaggggtcgtgacggagctcggcgaggggttcgcgacactgatccggacccccgcgttgtatgcctggatcctggttctaccgatcgggctgatgcttcagcagtcgtcgttgcgggtgggcgcgctaaccgcctcgttgccgacgatcaccgtggcgaggccggtgatcgcttcggtgctggggatcaccgtgctcgatgaggtgctgcacaccggccgggtggccctggtcgcgctggtggcagcggtagtggtggtggttgtcgcgaccgtagccttggcccgtgacgaggtcgcgatgatgacggtttccgccggcgaattgggggccgcgggccagcttgcggttcgttga

SEQ ID NO: 28577 - DNA, 2373 bp, Mycobacterium tuberculosis
atgacgcagacccccgatcgggaaaaggcgctcgagctggcagtggcccagatcgagaagagttacggcaaaggttcggtgatgcgcctcggcgacgaggcgcgtcagccgatttcggtcattccgaccggatccatcgcactagacgtggccctgggcattggcggcctgccgcgtggccgggtgatagagatatacggcccggagtcgtcgggtaagaccaccgtggcgctgcacgcggtggccaacgctcaggccgccggtggtgttgcggcgttcatcgacgccgagcacgcgctggatccggactatgccaagaagctcggtgtcgacaccgattcgctgctggtcagccagccggacaccggggaacaggcactcgagatcgccgacatgctgatccgctcgggtgcgcttgacatcgtggtgatcgactcggtggcggcgctggtgccgcgcgcggagctcgaaggcgagatgggcgacagccacgtcgggctgcaggcccggctgatgagccaggcgctgcggaaaatgaccggcgcgctgaataattcgggcaccacggcgatcttcatcaaccagctccgcgacaagatcggagtgatgttcgggtcgcccgagacgacaacgggcggaaaggcgttgaagttctacgcgtcggtgcgcatggacgtgcggcgagtcgagacgctcaaggacggtaccaacgcggtcggcaaccgcacccgggtcaaggtcgtcaagaacaagtgcctcgcagagggcactcggatcttcgatccggtcaccggtacaacgcatcgcatcgaggatgttgtcgatgggcgcaagcctattcatgtcgtggctgctgccaaggacggaacgctgcatgcgcggcccgtggtgtcctggttcgaccagggaacgcgggatgtgatcgggttgcggatcgccggtggcgccatcgtgtgggcgacacccgatcacaaggtgctgacagagtacggctggcgtgccgccggggaactccgcaagggagacagggtggcgcaaccgcgacgcttcgatggattcggtgacagtgcgccgattccggcggatcatgcccggctgcttggctacctgatcggagatggcagggatggttgggtggggggcaagactccgatcaacttcatcaatgttcagcgggcgctcattgacgacgtgacgcgaatcgctgcgacgctcggttgcgcggcccatccgcaggggcgtatctcactcgcgatcgctcatcgacccggtgagcgcaacggtgtggcagacctttgtcagcaggccggtatctacggcaagctcgcgtgggagaagacgattccgaattggttcttcgagccggacatcgcggccgacattgtcggcaatctgctcttcggcctgttcgaaagcgacgggtgggtgagccgggaacagaccggggcacttcgggtcggttacacgacgacctctgaacaactcgcgcatcagattcattggctgctgctgcggttcggtgtcgggagcaccgttcgagattacgatccgacccagaagcggccgagcatcgtcaacggtcgacggatccagagcaaacgtcaagtgttcgaggtccggatctcgggtatggataacgtcacggcattcgcggagtcagttcccatgtgggggccgcgcggtgccgcgcttatccaggcgattccagaagccacgcaggggcggcgtcgtggatcgcaagcgacatatctggctgcagagatgaccgatgccgtgctgaattatctggacgagcgcggcgtgaccgcgcaggaggccgcggccatgatcggtgtagcttccggggacccccgcggtggaatgaagcaggtcttaggtgccagccgccttcgtcgggatcgcgtgcaggcgctcgcggatgccctggatgacaaattcctgcacgacatgctggcggaagaactccgctattccgtgatccgagaagtgctgccaacgcggcgggcacgaacgttcgacctcgaggtcgaggaactgcacaccctcgtcgccgaaggggttgtcgtgcacaactgttcgccccccttcaagcaggccgagttcgacatcctctacggcaagggaatcagcagggagggctcgctgatcgacatgggtgtggatcagggcctcatccgcaagtcgggtgcctggttcacctacgagggcgagcagctcggccagggcaaggagaatgcccgcaacttcttggtggagaacgccgacgtggctgacgagatcgagaagaagatcaaggaaaagcttggcattggtgccgtggtgaccgatgatccctcaaatgacggtgtcctgcccgcccccgtcgacttctga

SEQ ID NO: 28578 - DNA, 450 bp, Mycobacterium tuberculosis
atggccgagctgaccgaaacatcgccggaaacccccgaaaccaccgaggccattcgtgccgtcgaggcgttcctcaacgccctgcagaacgaagacttcgacaccgtcgacgccgcactgggcgacgacctggtctatgagaacgtcgggttttccaggatccgcggtggccgccgcacggcaacgctgcttcgccgcatgcagggccgcgtcggcttcgaggtgaagatccaccgcatcggcgccgacggcgccgcggtgctcaccgaacgcaccgacgcgctaatcatcggaccgctgcgggtgcagttctgggtctgcggcgtattcgaggtggacgatgggcggatcaccctgtggcgggactacttcgatgtctacgacatgttcaagggcctcttgcgaggcctggtggcgctggtggtgccatcgctgaaggcaacgctgtag

SEQ ID NO: 28579 - DNA, 1578 bp, Mycobacterium tuberculosis
atgtcatttgtgatcgcggcaccggagtttttaacggcggcagcaatggacttggcgagcatcggctcgacagtgagcgcggccagtgccgccgcatcagcccccacggtcgcgatcctggccgcgggcgccgatgaggtgtcgatagccgtcgcggcgctgttcggaatgcatggccaggcatatcaggccctcagcgtgcaggcatcggcgtttcatcagcaatttgtgcaggccttgaccgcgggcgcgtactcgtatgcctccgctgaagccgccgccgtgacaccgcttcagcaactagtcgatgtgataaatgcgcccttcagaagcgcgctcggccgccccctgatcggcaacggcgccaacggtaaaccggggaccggacaagacggcggggccggcggactcttgtacggcagcggcggtaacgggggatcagggctggccggctccggccagaagggcggtaacggaggagctgccggattgtttggcaacggcggggccggcggtgccggcgcgtccaaccaagccggcaacggcggcgccggcggaaacggcggcgccggtgggctgatctggggcaccgcggggaccggtggcaacggcgggttcaccacctttcttgatgccgctgggggtgccggcggggccggcggcgccggtgggctgttcggcgcgggcggggccggcggcgtaggcggcgccgccctcggcggcggcgcccaggccgccggtggcaacggcggtgcgggcggggtcggtgggctgttcggcgccggcggtgccggcggcgccggcggcttcagcgacaccggtgggaccggcggggctggcggggccggcgggctgttcggcccgggcggcggctcgggcggcgtcggtggcttcggcgacaccggtgggaccggcggcgacggcggcagcggcgggctgtttggcgtcggcggggccggcgggcacggtggcttcggcagtgctgccggcggcgacggcggcgcgggcggcgccggcggcacggtcttcggctcgggcggggccggcggtgcaggcggagtcgccactgtcgctggccacggtggtcacggcggtaatgccggcctgctatacggcaccggtggggccggcggagccggcgggttcggcgggttcggcggcgacggcggcgacggcggtatcggcgggttggtcggttctggcggcgccggcggcagcggcggcaccggtaccctaagtggtggtcgcggcggggccggcggtaacgccggcacgttctacggttccggcggcgccggcggcgccggcggggagagcgacaacggcgacggcggaaacggcggcgtgggcggcaaggccgggttggtcggcgagggcggcaacggcggcgacggcggtgccacgatagcaggaaagggtggtagcggcggtaacggcggcaacgcctggctgacgggccagggcggcaacggcggcaacgccgcatttggcaaagccgggactggcagcgtcggcgtcggtggcgccggcgggctgctggagggccagaacggcgagaacggattgctgcctagctga

SEQ ID NO: 28580 - DNA, 630 bp, Mycobacterium tuberculosis
atgagcaggtcaacccgttattctgttgccgtgtcggcgcagcctgaaacgggtcagatagcaggccgcgcccgcattgccaacctcgccaatatcctgacgctgttgcggctggtgatggtcccggtcttcctgctggccttgttctatggcggcggccaccactccgcggcccgcgtagtggcgtgggcgatatttgcaaccgcctgcattaccgatcgattcgacggcctgctggctcgcaattacgggatggcaaccgaattcggtgcgtttgtcgatccgatcgcggacaagactctgatcggctcggcgctgatcggattgtcgatgctcggcgacttgccgtggtgggtcacggtgctaatcctgacccgcgaactcggagtgaccgttttgaggttggcggttattaggcgcggtgtcattcccgcgagctggggcggcaagctgaagacctttgtccaggcggtggcaattggcttattcgtgttgccactttcgggtccgctgcacgttgcggcggtggtagtgatggccgccgcgatcctgctcaccgtgatcactggtgtcgattacgtggccagggctctgcgggacatcggggggatccgccagaccgccagctga

SEQ ID NO: 28581 - DNA, 2652 bp, Mycobacterium tuberculosis
atgctggggcctcctggaactccgcgcgtcgggcggcgtgacgcggcacgatcacttgtcaccctactcaggagaccctggcaacgaggcgagcagatcgccgttaccagtgtggcggatggtgtagatggtgtgatagcgactaggcttgccgttatgtctagcaagaccgttgcccgctccggcactcgaacgagcaggtcaaaggccacttcgcggggcgcgtcccgaagtgcgcgatcggccgtgcccagaaagaggtcgaggcccgtcaaaggggtcggcagaccctcccgacggcaccatcggtcgctgctggtgtctaccggactcgcctgcggccgggccatgcgtgccgtctggatgatggcggccaagggcaccggcggcgcggcgcggtcgatcgggcgagcccgcgacatcgagcccgggcatcgccgcgacggaatcgcgctggtgctgctcggccttgccgtggtagtcgccgcgagctcgtggttcgacgccgcccggccgctcggcgcgtgggtcgacgccttgttgcggacgttcatcgggtcggcagtggtcatgctcccgctggttgccgccgccgtggccgtggtgctgatgcgtacgtcgcccaaccccgattcgcggccgcggctgatcctcggcgccagcctgatcggcttgtcgtttctcggcttgtgccacctgtgggcgggctcacccgaggccccggagtcgcgtttgcgcgccgcggggttcatcggtttcgcgatcggcgggccgctctcggacgggttgaccgcctggatcgccgcgccgctgttattcatcggcgcgctgttcggattgctcctgctggccgggatcacgatccgagaggtgccagatgccatgcgcgccatgttcggcacccggctgttgccacgggaatacgccgacgacttcgaggacttcgcggacttcgatggtgacgacgcggacaccgtcgaagtcgcccgccaggacttctccgacggttactacgacgaggtgcccctgtgctccgacgacgggccaccggcctggccgtcggccgaggttccgcaggatgacactgcgacgataccggaagcctccgccggtcggggctccggaagacgcggccgccgcaaagatacccaagtgctggaccggatcgtcgagggtccctacacgctgccgtcgctggacctgctgatatccggtgatccgcccaagaaacgcagtgcggccaacacccacatggccggcgccatcggtgaggtgctgacccagttcaaggtcgacgcggccgtcacgggctgcacccgcgggcccaccgtcacccgctacgaggtcgaactggggcccggcgtcaaggtcgagaagatcaccgcgctgcagcgcaacatcgcctacgcggtggctaccgagagcgtgcgcatgctggcaccgatccccggcaagtccgccgtcggcatcgaggtacccaacaccgaccgggaaatggtgcggttggccgacgtgctcaccgcacgagagacccgtcgcgaccatcatccgttggtgatcgggctgggcaaggacatcgaaggcgacttcatctcggccaacctggccaagatgccgcacctgctggtggccggctcgacgggctcgggaaagtccagcttcgtcaactccatgctggtgtcgctgttgacccgggccaccccggaagaggtcaggatgatcctgatcgacccgaagatggtggaactgacgccgtatgaaggcattccgcatctgatcacgccgatcatcacccagccgaagaaggccgcggccgcgctggcctggctggtcgacgagatggagcagcgctaccaggacatgcaggcctcccgggtgcgccacatcgacgacttcaacgacaaggtgcgatccggggccatcaccgcgccgctgggcagccagcgcgagtatcggccctacccctacgtggtggccatcgtcgacgagttggccgacctcatgatgaccgcgccgcgtgacgtcgaggacgccatcgtgcggatcacccagaaagcccgcgccgccggcatccacctggtgctggccacccagcgcccgtcggtggacgtggtcaccgggctgatcaagaccaacgtgccgtcgcggctggcgtttgccacctcgtcgctgaccgacagccgggtgatcctggaccaggcgggcgcggaaaagctgatcggcatgggcgacggcctgttcttgccgatgggtgcgagcaaacccctccggctgcagggcgcttacgtctccgacgaagagatccacgccgtcgtcaccgcctgcaaggaacaggccgaacccgaatacaccgagggcgtcaccacggctaaacccaccgcggagcgcaccgacgtcgaccccgacatcggcgacgacatggacgtcttcctgcaggccgtggaactggtggtgtccagccagttcgggtcgacgtcgatgctgcagcgcaagctgcgggtcggcttcgccaaagcgggccgtttgatggacctgatggagacccgcggcatcgtcgggcccagcgaaggctcgaaggcccgtgaggtgctggtcaagcccgacgagttggcgggcacactggccgcgatccggggtgacggcggcgagtag

SEQ ID NO: 28582 - DNA, 1677 bp, Mycobacterium tuberculosis
gtggatgtagaccttcccccgccaggtcccctgacctccggcgggttgcgggtcaccgcgctgggcggcatcaacgaaatcggccgcaacatgacggttttcgaacacctgggccgactgttgattatcgactgcggtgtgttgtttcctggccacgacgagcccggtgtcgatctgatcctgccggacatgcgccatgtcgaagaccggcttgacgacatcgaggcgctggtgttgacccacgggcacgaggaccacatcggggcgattccgtttctgctcaagctgcgacccgacatcccggtcgtcggctcgaagttcaccttggctctggttgcagagaaatgtcgtgagtaccgcataacaccggtgttcgtcgaggtccgcgagggccagagcacccggcacggcgtgtttgagtgcgagtacttcgccgtcaaccattccactccggacgcgttggccatcgcggtgtataccggcgcgggaaccatcctgcacaccggcgacatcaagttcgaccaattgccaccggacggccgtcccaccgatctaccgggcatgtcgcggctcggcgacaccggcgtggacctgttgctgtgcgactcgacgaacgccgagatccccggtgtcgggccatcggaaagcgaagtgggcccaacgctgcaccggctcatccggggtgccgacggacgggtgatagttgcgtgtttcgcctccaacgtggatcgggtacagcagatcatcgatgccgcagtggcattgggccggcgagtgtcgttcgtcggccgatcgatggtgcgcaacatgcgcgtcgcaaggcaactgggcttcctacgagtggctgattccgatctcatcgacatcgccgccgccgaaacgatggcgcccgaccaagttgtgttgatcaccaccggcacccaaggcgagccgatgtcggcgttgtcgcgaatgtcgcgtggggagcatcgcagcatcacgttgactgctggtgatctcatcgtgttgtcgtcgtcgctgatccccggcaacgaggaggcggtcttcggagtcatcgatgcactgtccaagatcggcgccagagtcgtcaccaacgcccaagcaagggtgcatgtttccggccacgcgtacgccggtgagctgctgttcctctacaacggggtgcggccgcgcaacgtgatgccggtgcacggaacctggcggatgctgcgcgccaatgccaagctggccgccagtaccggcgtaccgcaagagtcaattctgttggccgagaacggtgtcagcgtcgacctggttgccggcaaagccagtatctccggtgcggtgccggtgggcaagatgttcgtcgacggcttgatcgccggcgacgtcggcgatatcaccctgggcgagcggctcattttgtcgtcgggctttgtcgcggtgaccgtcgtggtcagacgtggcaccggccagccgttggctgcgccacatctacactcgcggggtttctccgaagatcccaaggcgctcgaacccgccgtgcgcaaggtggaggcagagctggaatcgttggtggccgccaacgtcaccgatccgatccggatcgctcaaggggtgcgccgcacggtcggcaagtgggtgggggaaacctatcgccgccagccgatgattgtgccgacggtcatcgaggtgtaa

SEQ ID NO: 28583 - DNA, 1623 bp, Mycobacterium tuberculosis
atgccgcccaggaagaagcaggcgccgcaggcgccgtcgacgatgaaggagctcaaagacacgctctggaaggccgccgacaagctgcgcgggtcgctgtcggccagccaatacaaggacgtgatcctcggcctggtgttccttaagtacgtgtccgacgcgtatgacgaacggcgcgaggcaatccgtgccgagttggcggccgaaggaatggaggagtctcagatagaagacctgatcgacgatcccgagcagtaccagggttacggcgtattcgtcgtgccggtgagtgcgcgctggaagttcttggcagagaacacaaaaggcaagccagccgttggtggtgagccggcgaagaacatcggtcagctgatcgacgaggcgatggacgcggtaatgaaggccaatccaacactcggtgggacgctgccgaggctgtataacaaggacaacatcgaccagcgccggctcggtgagctgatcgacctatttaacagtgcgcgcttcagccggcagggcgagcaccgcgcccgggatctgatgggtgaggtctacgaatacttcctcggcaatttcgctcgcgcggaagggaagcggggtggcgagttctttaccccgcccagcgtggtcaaggtgatcgtggaggtgctggagccgtcgagtgggcgggtgtatgacccgtgctgcggttccggaggcatgtttgtgcagaccgagaagttcatctacgaacacgacggcgatccgaaggatgtctcgatctatggccaggaaagcattgaggagacctggcggatggcgaagatgaacctcgccatccacggcatcgacaacaaggggctcggcgcccgatggagtgataccttcgcccgcgaccagcacccggacgtgcagatggactacgtgatggccaatctgccgttcaacatcaaagactgggcccgcaacgaggaagacccacgctggcgcttcggtgttccgcccgccaataacgccaactacgcatggattcagcacatcctgtacaagttggcgccgggaggtcgggcgggcgtggtgatggccaacgggtcgatgtcgtcgaactccaacggcgagggggatattcgcgcgcagatcgtggaggcggatttggtttcctgcatggtcgcgttacccacccagctgttccgcagcaccggaatcccggtgtgcctgtggtttttcgccaaagacaaggcggcaggtaagcaagggtctatcgaccggtgcgggcaggtgctgttcatcgacgctcgtgaactgggcgacctagtggaccgggccgagcgggcgctgaccaacgaggagatcgtccgcatcggggataccttccacgcgtggcgcgggtcgaagtcggctgccgtcaaagggattatgtacgaggatgttccggggttctgtaagtcggcgacgttggcggagatcaaggcgaccgactatgcgctcacgccggggcggtatgtgggtacgcccgcggtcgaggacgacggagagccgatcgacgagaagatggcccggttgtcgaaggcgttgctggaggcgttcgatgagtcggcgcggctggaaagggtcgtgcgggagcaactggggcggcttagatga

SEQ ID NO: 28584 - DNA, 480 bp, Mycobacterium tuberculosis
atggtggggctgatctgggctcaagcgacatcgggtgtcatcggccgcggcggcgacatcccctggcgcttgcccgaggaccaggcgcatttccgggagatcaccatggggcacacgatcgtgatgggccggcgcacatgggattcgctgccggctaaagtccggccgctgcccggccggcgaaatgtcgtactgagccgccaagctgactttatggccagcggggctgaggttgtcggttcactcgaggaggcgctgaccagcccggagacgtgggtgatcggaggcggacaagtctatgcgctggcgctgccgtacgcgaccagatgtgaggttaccgaggtcgacatcggcctgccgcgcgaagccggtgacgcgctggcccccgtgctggacgagacatggcggggcgagacgggggagtggcgcttcagccggtccgggttgcggtaccggttgtacagctaccaccgctcatga

SEQ ID NO: 28585 - DNA, 792 bp, Mycobacterium tuberculosis
gtgacgccatacgaggacctgctgcgcttcgtgctcgaaacgggtacgcccaaatccgaccgcaccggcaccggaacccgcagcctgttcggccagcagatgcgctatgatttgtcggccggtttcccgctgctcactaccaagaaagtccatttcaaatcggtagcctacgagctgctgtggtttttgcgcggcgattccaatatcggttggctgcacgagcacggagtcaccatctgggacgaatgggcaagtgatacaggcgaactcgggccgatctacggtgtacaatggcgatcgtggccggctccatccggtgagcacatcgaccagatcagcgcggcgctggatttgctgcgcaccgatcccgattcccggcgcatcatcgtgtcggcctggaacgtcggcgaaatcgagcggatggcgctgccgccctgtcatgcgttcttccagttctacgtcgccgatggccggctgagctgtcagctctaccaacgcagcgccgacctgtttctgggtgtgccgttcaacatcgccagctatgcgttgctcacccacatgatggccgcccaggccggcttgtcggtcggcgagttcatctggaccggtggcgactgccacatctacgacaatcacgtcgagcaagtacggctgcagctcagccgcgagccgcggccatatccgaaactacttctagccgaccgggattcaatcttcgagtacacctatgaagacatcgttgtgaagaactacgatccgcatccggcgatcaaagctccagtcgcggtatga

SEQ ID NO: 28586 - DNA, 738 bp, Mycobacterium tuberculosis
atgcgggtaggcgtccttggagccaaaggcaaggtcggagcgacgatggtgcgggcggtggcggccgccgacgacctgaccctatccgccgagctggatgccggcgatccgctgagcctgctaacggacggtaacaccgaggtcgtcatcgacttcacccacccggacgtggtgatgggcaatctggagttcctcatcgacaacggaattcacgccgtggtcggtaccacggggttcaccgccgagcggtttcaacaagtcgaatcgtggctcgtcgcaaaacccaacacatcggtgttgatagcgccaaacttcgcgatcggagcggtgctgtccatgcatttcgccaagcaggccgcacggtttttcgactcggccgaggtcattgagctgcatcatccgcacaaggctgacgcgccgtcaggcacggccgcgcgtaccgcgaagctgatcgccgaggcccgaaaaggcttgccgcccaatcccgatgccaccagtaccagcctgccgggcgcgcgtggtgccgacgtcgacggcataccggtgcacgcggtgcggctggccggactggtcgcccaccaggaggtgctgttcgggaccgagggggagactctgaccatccgccacgatagcctcgatcgcacatcgtttgtgcccggtgtgctgttggcggtgcgccgcatcgccgaacgccctggtctcaccgtaggtcttgagcccctactcgatctgcactga

SEQ ID NO: 28587 - DNA, 1035 bp, Mycobacterium tuberculosis
atggtgttgggcttctgggacatcgcggtgccgatcgtcggcgccccgatggccggcggcccgagcaccccggcgttggccgcggcggtgtccaacgctggcgggcttggtttcgtcgccggcggctatctgagcgcggaccggctcgccgacgatatcgccgctgcgcgcgccgccactaccggtcctatcggagccaatctgtttgtgccccaacccagcgtcgccgactgggcgcagctggagtattacgcggacgagctcgaagaggtcgccgagtactaccacaccgaggtgggccagcccgtctatggtgacgacgacgactgggtgcgcaaactcgaggtggtagccgatgttcgtccggaggtggtgtcgttcaccttcggcgcgccgccgccggatgtcgtgcagcggttgagcgcgctgggactgttggtctcgatcaccgtgacgtcggtctacgaggccggtgtggccattgccgcgggcgcggacagcctggtggtccagggcccggctgccggcgggcaccgcggaacgttcgcgccggacatggaacccggtacggagtcgctgcaccaactcctcgatcggattggcagcgcccatgatgtgccgctggttgcagccggtggcctgggcacggctgaggacgtggccgccgtgctgcgccgcggagcgatcgccgcgcaggttggtaccgcattgctgctggccgacgaagccggtaccaatgccgcacaccgtgccgcgctgaagaatccagagttcgatgccaccctggtcactcgggcgttctcgggtaggtatgcgcgcggtctggccaacaacttcactcgcctgctcgaccacgtggcgccgctgggttatccggaggtccaccagatgacgaagccgatacgggcggcggcggtgcaggcggacgacccgcacggaacaaacctttgggcgggatcggcgcaccggaagacccggccgggacccgcggccgacatcatcgcttcccttactcccgacgtgtgctcggcgtaa

SEQ ID NO: 28588 - DNA, 1317 bp, Mycobacterium tuberculosis
atgccgcgacggtcaccagctgaccccgcggcggcgctggcgccgcggcgcaccaccctgccgggcgggctgcgagtggtcaccgaattcctgcccgcggtgcactccgcgtcggtcggggtgtgggtcggcgtcggatcgcgcgacgaaggcgccacggtggccggggcggcgcacttccttgagcatttgctgttcaagtcgacgcccacccgctctgccgtggacattgcgcaggcgatggacgcggtgggcggggaactgaacgcattcaccgccaaggagcacacctgctactacgcccacgtgctcggcagcgacttgccgttggccgtcgacctggtcgccgatgtggtgctcaacggccgctgtgccgccgacgatgtcgaggtggaacgtgacgtcgtcctcgaggagatcgcgatgcgcgacgacgaccccgaggacgccttggcggacatgttcctggcggcgttgttcggcgaccacccggtcggtcgcccggtgatcggcagcgcgcaatccgtgtcggtgatgacgcgggctcaactgcaatcgtttcacctgcggcgctataccccggagcggatggtcgtcgcggccgccggcaatgtggatcacgacgggctggttgcgttggtccgcgagcacttcgggtcccggttggtccgggggagacggccagttgcgccgcgcaagggtaccggccgggtcaacggcagcccccggttgacactggttagccgcgacgccgaacagacgcatgtgtcgctgggcatccgcacacccgggcgcggctgggagcatcgttgggcactgtcggtgctgcacaccgcgctgggcggtggcttgagttcccggctgttccaggaggtccgcgagacccgcgggctggcctactcggtctactccgcgctggatctcttcgccgacagcggcgcgctttcggtgtacgcggcctgcctgcccgaacgcttcgccgacgtgatgcgggtgaccgccgatgtgctggaaagcgtggcacgcgacggcatcaccgaggcggaatgcggcatcgccaagggatcgctgcggggtgggctggtgctagggctggaggattccagctcccggatgagccggctcggccgcagcgagttgaactacggcaagcaccgcagcatcgaacacaccttgcggcaaatcgagcaggtcaccgtggaggaggtcaacgcggtggcccgccacctgctgagcaggcgctacggtgctgccgttcttggcccacacggatcgaaacgatcactgccgcaacaacttcgagcgatggtagggtag

SEQ ID NO: 28589 - DNA, 2259 bp, Mycobacterium tuberculosis
atgtctgccgctgaaattgacgaaggcgtgttcgagacgaccgccaccatcgacaacgggagctttggcacccggaccatccgcttcgagaccggccgattggccttgcaggccgccggcgcggtggtcgcctacctcgacgacgacaacatgctgctgtcggcgaccaccgccagcaagaaccccaaagaacacttcgacttcttccccctcacggtcgacgtcgaggagcgcatgtatgcggccggccgcatccccggttcgttcttccgtcgcgagggccgaccctccaccgacgcgatcctgacctgccggctcatcgaccgcccgctgcgcccgtcgtttgtcgacgggctgcgcaacgagatccaaatcgtggtgacgattctcagcctggatccgggcgatctctacgacgtattggcgatcaacgcggcgtcggcgtccacccagctgggcggtctgccgttctccgggcccatcggcggtgtgcgggtggcgctcatcgacggcacctgggtcggcttccccaccgtcgaccagatcgagcgcgccgtgttcgacatggtcgtggccggccggatcgtcgagggtgatgttgccatcatgatggtcgaagccgaggccaccgaaaacgtcgtcgagctcgtcgaaggtggtgcccaagcgccgacggaaagcgtggtggccgcgggcctggaggcggccaagccgtttatcgccgcgctgtgcaccgcgcagcaggagcttgccgatgccgctggaaagtcgggcaaaccgaccgtcgacttcccggtgttccctgactacggcgaagacgtgtactactcggtgtcctcggtggccaccgacgagttggccgccgcgttgaccatcggcggtaaagccgagcgcgaccagcgcatcgacgaaatcaagacccaggttgtgcagcggctcgccgacacctacgagggtcgcgaaaaggaggtcggcgccgcgttgcgtgccctgaccaaaaagctggttcggcagcgcatcctcaccgaccatttccgtatcgacggccgcggcatcaccgacattcgcgcattgtcggccgaggtggccgtggttccgcgcgcgcacggcagcgcgctgttcgaacgcggcgaaacccagatcctgggtgtgaccacactcgacatgatcaagatggcccagcagatcgactcgttggggccggagacatcgaagcggtacatgcaccactacaacttcccgccgttctccaccggcgagaccggtcgggtcggttcgcccaagcggcgtgagatcgggcacggcgcactggccgagcgggccctggtgccggtgttgccgagcgtcgaggaattcccgtatgccattcgccaggtgtcggaggctctgggctccaacgggtcgacctcgatggggtcggtgtgcgcgtcgacgctggcgctgctcaacgccggggtgccgctcaaggcgccggtggccggcatcgcgatgggcctggtctccgacgacattcaagtagaaggggcggtcgacggcgttgtggagcgtcgcttcgtcaccctcaccgacatcctcggcgccgaagacgcgttcggtgacatggacttcaaggtcgccgggaccaaggacttcgtcaccgcgctgcagctggacaccaagctcgacgggatcccttcgcaggtgcttgccggagcactcgagcaggccaaggacgcccgcctcacgatcttggaggtgatggctgaggccatcgatagacccgacgaaatgagtccctacgccccgcgggtgaccaccatcaaggttccggtggacaagatcggggaggtcatcggacccaagggcaaggtcatcaacgccatcaccgaggagaccggcgcgcagatctccatcgaagacgacggcaccgtgttcgtcggcgccaccgacgggccatcggcacaggccgcgatcgacaagatcaacgccatcgccaacccgcagctgccgacggtgggcgaacggttcctcggaaccgtggtcaagaccaccgatttcggtgcctttgtatcgttgctgcctggccgcgacggtctggtgcacatttccaaactcggcaagggcaagcgcatcgcgaaggtcgaggacgttgtcaatgtcggtgacaagctgcgggtggagatcgccgacatcgacaaacggggcaagatctccctgatcctggtcgccgacgaggacagcaccgccgccgctaccgatgccgcgacggtcaccagctga

SEQ ID NO: 28590 - DNA, 270 bp, Mycobacterium tuberculosis
gtggcgctgacagccgagcaaaaaaaggagattctgcgctcctacggcctgcatgagaccgataccggatccccggaagcacagatcgcgttgctgaccaaacgcatcgccgacctcaccgagcatctcaaggtgcacaagcacgaccatcattcgcggcgaggactgctgttgctggtgggccggcggcgccggctgatcaagtacatttcccagatcgatgtggagcgttatcgttcactcatcgagcggctgggcctgcgtcgctga

SEQ ID NO: 28591 - DNA, 996 bp, Mycobacterium tuberculosis
gtgcgccgtaggcttgcgatcgtgcagcgctggcgtggccaggacgagatcccgacggattggggcagatgcgtgctcaccatcggggtatttgacggcgtgcaccgcgggcacgccgaactgatcgcgcacgcggtcaaggccggccgcgctcgcggtgtaccggccgtgctgatgacgttcgacccgcacccgatggaggtggtctatccaggcagtcacccggcgcagctgaccaccctgacccgacgcgcggagctcgttcaagacttgggcatcgaagtgttcctggtgatgccgttcaccaccgatttcatgaagctcacgccggatcgcttcatccatgagctgctcgtcgagcacctacatgtggtggaggtcgtcgtcggcgagaacttcaccttcggcaaaaaggccgccggcaatgtcgacacgctgcgtcgggctggcgagcggttcgggttcgcggtggaatcgatgtcgttggtgtccgagcaccacagcaacgagaccgtgacgttctcctccacctacatccggtcctgcgtggacgccggcgacatggtggcggccatggaagctctgggccgaccgcaccgcgtggagggggttgtggtacgcggtgaggggcggggcgcggagctgggctttcccaccgcgaacgtggcgccgccgatgtattcggcgattccggccgacggcgtgtacgccgcttggttcacggtgctcgggcatgggccggtgaccggcacggtcgtcccgggtgagcgctaccaggccgcggtgtcggtcgggaccaatcccaccttctccggacgcacccgcaccgtcgaagcgttcgtgctggacaccaccgctgacctctacggtcaacatgtggccttggacttcgtcgggcgtatccgcggccagaagaagttcgaatcggtgcgccagctggtcgctgcgatgggtgccgataccgagcgggcacgtgacctgttgtctacgggttga

SEQ ID NO: 28592 - DNA, 1380 bp, Mycobacterium tuberculosis
atggcgaaattcgagattcctgagggctggatggttcaggctttccggttcacgctcgatccgaccgccgagcaggcccgcgcgttggcacggcatttcggtgcccgccgcaaggcctacaactggaccgtcgccaccctgaaagccgatatcgacgcctggcaggcgaccgggatccagacggcaaagccgtcgctgcgggtgttgcggaagcgctggaacaccgtcaagaacgacgtgtgcgtcaacatcgagaccggtgttgtgtggtggccggagtgctcgaaggaggcctacgccgacggtattgacggcgcggtcgacgcgtactggaactggcagaactcgcgatcaggcaaacgtgatggcaaaaggatgggctttccccggtttaagaagaagggacgcgacccagaccgggtgacgttcacgaccggagcgatgcgcgtcgagcccgaccggcgccacctcacgctgccggtcatcgggaccgtccgcacccacgagaacacgcgccgggttgagcggctcatcgccaaaggccggtcgcgggtgctcgcgatcacggtgcgccgtaacgggacccggatcgatgcgagtgtgcgggtcctcgtgcagcgcccgcagcaaccgaaggtgaccgaccccggttcacgggtcggcgttgatgtcggggtgcgccgcctggccacggtcgccaccgccgacggcgcggtgctcgaacgagtgccgaatccacggccactcgacgcggcactcaacgagctacggcatgtctgccgggcacggtcgcgctgcacgaaaggctcacgtcgctaccgtgagcgcaccaccgaaatatcccggctgcaccgccgggtcaacgatgttcgcacccaccacctgcactgtctgacaacgcatttggctaagacccacggccgcatcgttgtcgaaggcctggacgcggcagggatgctgcggcaacagggcctctcgggtgcccgcgctcgccggcgcggactctccgacgcggccctgggcaccccgcgccgccacctgtcctacaagacaggctggtacgggtcacaactagtggtcgctgaccgctggttcccatcgtcgaaaacctgccacgtctgcgggcatgtccaagagatcggatgggccgagcactggcaatgcgattcgtgctcggcatcgcatcagcgtgatgactgcgcagcgatcaacctcgcacgctacgaggacaccagtagcgtcgtcggcccagttggggccgccgtcaagcgtggagccgaccgtaagacccggcctggccgggctggtggccgtgaagcgcggaagggaagcagccgcaaggctgccgaacaaccccgagacggggtgcaagtcgcgtga

SEQ ID NO: 28593 - DNA, 897 bp, Mycobacterium tuberculosis
atgagcgcaaccggccccggaatcgtggttatcgacaagcccgcgggaatgaccagccatgacgtggtggggcggtgccgccgcatcttcgccacccggcgggtcggccacgcgggcaccctggacccgatggccaccggggtgttggtgatcggcatcgaacgcgccaccaagatcctcggtctgctgacggcggcccccaagtcgtatgccgccaccatccgcttgggtcagaccacttccaccgaggacgccgaaggtcaagtgctgcagtcggttccggctaagcacctgaccatcgaggcgatcgacgccgcgatggagcggctgcgcggtgagatccggcaggtgccgtcgtcggtcagcgcgatcaaggtcggtggccgacgcgcctatcggttggcccgccaggggcgctccgtgcaattggaagcccggccgatccgcatcgaccggttcgagctgctggccgcacgccggcgcgaccagctcatcgatatcgatgtggagatcgactgctcctcgggaacctacatccgcgcgttggcacgcgacctcggcgacgcgcttggggtgggaggccatgtgacggcgttgcggcgcacccgcgtcggccgcttcgagctggaccaggcgagatcgctcgacgatctcgcggagcgccccgcgctgagcctgagcctcgatgaggcctgcctgctgatgtttgcgcgccgcgacctgaccgccgcggaggccagcgcggccgccaacggccggtccctgccggcggtcggtatcgacggcgtgtacgcggcctgtgacgccgacggccgggttatcgcgctgctgcgtgacgagggttcgcggaccaggtcggtggcggtgctccgcccggcgacgatgcaccccgggtag

SEQ ID NO: 28594 - DNA, 357 bp, Mycobacterium tuberculosis
gtgatgcgccgcggtgagatttggcaggtcgatctcgaccccgctcgaggtagcgaagcgaacaaccagcgccccgccgtcgtcgtcagcaacgaccgggccaacgcgaccgccacgcgtcttgggcgcggcgtcatcaccgtcgtgccggtgacgagcaacatcgccaaggtctatccgtttcaggtgttgttgtcggccaccactactggtctccaggtcgactgcaaggcgcaggccgagcaaatcagatcgattgctaccgagcggttgctccggccaatcggccgagtttcagccgccgaacttgcccagctcgatgaggctttgaaactgcatctcgacttatggtcgtag

SEQ ID NO: 28595 - DNA, 939 bp, Mycobacterium tuberculosis; identical to SEQ ID NO: 28266

SEQ ID NO: 28596 - DNA, 1311 bp, Mycobacterium tuberculosis
atggacccgctgaaccgccgacaattcctcgcgctggccgctgccgccgccggcgtgaccgccggctgcgccgggatgggcggcggcggttcggtgaagtccggttccggcccaatcgacttctggtccagtcatcccggccaatccagcgcggcggaacgggagctgatcggtcgtttccaggaccgattccccactctgtcggtcaagctgatcgacgccggcaaggactacgacgaggtggcacagaaattcaatgcggcgctcatcggaaccgacgtgcccgacgtcgttttgctcgacgaccgatggtggttccatttcgccctcagcggtgttctcactgcccttgacgacctgttcggccaagttggggtggacacaacggattacgtcgattcgctgctggccgactatgagttcaacggccgccattacgctgtgccgtatgctcgctcgacgccgctgttctactacaacaaggcggcgtggcaacaggccggcctacccgaccgcggaccgcaatcctggtcagagttcgacgagtggggtccggagttacagcgcgtggtcggcgccggtcgatcggcgcacggctgggctaacgccgacctcatctcgtggacgtttcagggaccgaactgggcattcggcggtgcctactccgacaagtggacattgacattgaccgagcccgccacgatcgcggccggcaacttctatcggaactccatccatggcaagggttatgcggcggtcgccaacgatattgccaacgagttcgccaccggaatcctggcctcggccgtggcatccaccggctcgctggccggcatcaccgcatctgcccgattcgacttcggcgccgcaccgctgcccacgggcccggacgcagcgcccgcctgtccgacgggcggtgcggggctggcgataccggccaagctctccgaggagcgaaaagtcaacgcgctcaagttcatcgcattcgtcaccaacccgacgaacaccgcctacttcagccagcaaaccggctatctgccggtgcgcaagtccgccgtcgacgatgccagcgaacggcactatctggcggacaatccccgtgcgcgggtggcgctcgaccagctgccacacacccggacacaagactacgcacgggttttcctgcccggtggtgaccggatcatctccgccggcctggaatccatcgggctgcgcggagccgacgtgaccaagaccttcacgaacatccaaaaacggttgcaggtcatcctggatcggcagatcatgcggaagctggcggggcatggctaa

SEQ ID NO: 28597 - DNA, 2703 bp, Mycobacterium tuberculosis
gtggcagcaggtaaggcccgcgtacacgagttggctaaggaactcggtgtaaccagcaaggaagttctcgcccggctgagcgagcagggcgaattcgtcaaatcagcatcgtcgacggtggaagcaccggttgcccgtcggctgcgtgaatcgttcggtggcagcaaacctgccccggcgaaaggcaccgccaagtcccccggcaaaggccccgacaagtcccttgacaaggcgctggacgccgcgatcgacatggccgcaggcaacggcaaggcgactgccgcgcccgccaaggccgccgattccggcggggcggcaatcgtctccccaactacccccgccgcacccgagcctccgaccgcagtgccgcccagccctcaggcaccccaccccggcatggctcccggggcgcggccgggcccggtgccgaagccggggattcgcaccccgcgcgtcggcaacaacccgttctcgtcggcgcaacccgccgaccggcccatcccgcgtccgccggctccccgccccggtaccgcccggcccggggttccacgtccgggcgcctcgcccggcagcatgccgccacgccccggtggagctgtcgggggtgcccgtccaccacgtcctggtgcgccacgacccgggggccggcccggtgcgcccggcgctggccgttccgacgcgggcggcggcaactaccggggtggcggcgtgggtgccgctcccggaacgggcttccgcggccgtcccgggggcggcggcggtggccgtcccgggcagcgtggcggtgccgccggcgcgttcggccgcccgggtggtgcgccccggcgcggccgcaagtccaagcggcagaagcgccaggagtacgactcgatgcaggctccggtcgtcggcggggtgcggttgccgcacggcaacggcgaaacgatccggctcgcacgcggcgcgtcgctcagcgacttcgcggacaaaatcgacgccaaccccgcggcgctggtgcaggcgctgttcaacctcggcgagatggtgacggccacccagtcggtcggcgacgagacgctggagttgctgggcagcgagatgaactacaacgttcaggtcgtcagcccggaggacgaagaccgcgagctgctggaatccttcgacctcagctacggtgaggacgagggcggcgaggaggaccttcaggttcgcccgccggtggtgacggtgatgggtcacgtcgaccacggcaagacccggctgttggacaccatccgcaaggccaacgtccgcgaggccgaggccggcggcatcacccagcacatcggtgcctaccaggtggccgtcgatctggacggcagccagcggctgatcacctttatcgacaccccgggccacgaggcgttcaccgccatgcgtgcccgtggcgccaaggcgaccgatatcgccattttggtggtcgccgctgacgatggagtgatgccgcagacggtcgaggccatcaaccacgcgcaggccgccgacgtgccgatcgtggtggcggtcaacaagatcgacaaggagggtgccgacccggccaagattcgcgggcagcttaccgaatatggtttagtgccagaggaattcggcggtgacacgatgttcgtcgacatctcggccaagcagggcaccaatatcgaggcgctggaggaggccgtgttgctgaccgccgacgccgcgctggacctgcgggcaaaccccgacatggaagcccagggtgtggcgatcgaggcgcacttggaccgtggtcgcggcccagtggctaccgtgctggtgcagcgcggcaccctgcgggtcggtgactcggtggtcgccggcgacgcctatggccgtgttcgccgcatggtcgacgaacacggcgaagacgtcgaggttgcgctgccgtcgcggcctgtgcaggtcattggcttcacgtcggtgcccggcgccggcgacaacttcctcgtcgtcgacgaggaccgtatcgcccgccaaatcgccgaccggcgtagcgctcgcaagcgcaacgccctggcggcgcgctcacgcaagcggatcagcctggaggacctggactcggcgctgaaggaaaccagccagctgaacctgatcctcaagggcgacaacgccggtaccgtcgaggcgctggaagaggccctgatgggtatccaggtggacgacgaggtggtgctgcgggtgatcgaccgcggtgtcggcggcattaccgaaaccaacgtcaacctggcgtcggcttccgatgcggtgatcatcggtttcaatgtgcgcgccgaaggcaaggcgaccgagctggccagccgcgaaggcgtggagatccgctactactcggtcatctaccaggcgatcgacgagatcgagcaggcgctgcgtggcctgctcaagccgatctacgaggaaaaccagctgggtcgggctgagatccgggcgttgttccggtcttcgaaggtcggcctcatcgccggctgcctggtcacctcgggtgtgatgcggcgcaacgccaaggcgcggctgttgcgggacaacatcgtggtcgccgagaacctttcgatcgcttcgctgcgccgggagaaggacgacgtgaccgaggtgcgcgacggcttcgagtgtggcctgacactgggttacgccgacatcaaggagggcgacgtcatcgagtcctacgagctggtccagaaggaacgcgcctga

SEQ ID NO: 28598 - DNA, 1044 bp, Mycobacterium tuberculosis
atgaacatcgacatggctgctctgcatgccatcgaggtggaccggggtatctcggtcaatgaactgctcgaaacgatcaagtccgcgctgttgactgcctaccggcacacccaaggtcaccagaccgatgcgcgcatcgagatcgaccggaaaaccggtgtcgttcgggtgatcgcccgtgagaccgatgaggctggcaatctcatcagcgagtgggacgacactccagagggcttcggccggatcgccgccacgacggcacgccaagtgatgttgcagcgattccgcgacgccgagaacgagcgcacctacggcgagttctccacccgcgagggcgagatcgttgcgggagtgatccagcgcgatagccgggccaacgcccgcggtctggtcgtcgtccggattggcaccgagaccaaggcttccgagggtgtgatcccggccgctgagcaggtaccgggggagagctatgaacatggcaaccggctgcgctgctacgtagttggtgtaacccgaggtgcccgcgagccgctgattacgctgtcgcgcacgcaccccaatctggtgcgcaagctgttctcgctggaagtccccgagatcgccgacggatcggtggagatcgtcgcggtggcccgggaggccggccaccgctccaagatcgctgtgcggtccaacgttgccggcttgaacgccaagggtgcttgcatcggtccgatggggcaacgggtccgcaacgtgatgagcgagctgtccggggagaagatcgacatcatcgactatgacgacgatccggcgcgttttgtcgccaacgcgttgtcgccggccaaggtggtgtcggtgtcggtgatcgaccagaccgcccgggccgcccgcgtggtggtgcccgatttccaattgtcgctggcaatcggaaaggaagggcagaacgcccggctggctgcccggctcaccgggtggcgtatcgatattcgcggcgatgcgccgccgcccccgcccggtcagcccgaacccggagtcagccgcggtatggcgcacgaccgctag

SEQ ID NO: 28599 - DNA, 1749 bp, Mycobacterium tuberculosis
gtgatcacccggatgtccgagttgttcttgcgcaccctgcgcgacgatcccgccgacgccgaagtggccagccacaaactgctgatccgggccggctacatccggcccgtcgcgcccgggctgtacagctggttaccgctcggcctgcgagtgctgcgcaacatagaacgggtcatccgcgacgagatgaacgccatcggtggacaggagatcctatttcctgccctgctgccgcgggcaccgtacgagacgaccaaccggtggacccaatacggcgacagcgtgtttcggctcaaggaccgccgcggcaacgactacctgctgggccccacccacgaagagctgttcaccctgaccgtgaagggcgagtacagctcctacaaggacttcccgctcacgctgtaccaaatccagaccaagtaccgcgacgaggcgcggccgcgggccggcatcctgcgcgctcgggagttcgtcatgaaggactcctactcctttgacatcgacgccgccgggctgaaggcggcctaccacgctcaccgggaggcctaccagcgcatatttgaccgacttcaggtgcgctatgtcatcgtttcggcagtgtccggggcgatgggcggcagtgcgtccgaagagttcttggctgagagtccgtccggggaggacgcatttgtccggtgcctcgagtcgggttatgcggccaacgtcgaggcggttgtcaccgcccgcccggacaccctgcccatcgatgggctgcccgaggcggtggtccacgacaccggcgacaccccaaccatcgccagcctggtggcctgggccaacgaggccgatctcggccgcacggtgaccgccgcggacaccctgaagaacgtcttaatcaaagtccgacagccgggaggggacaccgaactgctggcaatcggcgtgcccggcgaccgtgaggtcgatgacaaaaggttgggcgcagcgctggaaccggctgactacgcgttgctcgacgacgatgatttcgccaagcacccgttcctggttaagggttatatcgggccaaaggcgttgcgggagaacaatgtccgctatctcgtcgacccgcggatagtcgacggcaccagctggatcaccggggcggaccaacccggccgccatgttgtcggtttggtggccggccgcgacttcaccgcagacggcaccattgaggccgccgaggtgcgcgaaggcgatccatctcccgacggcgccggtccgctggtcatggcgcgcggtatcgaaattgggcacatcttccagctggggagcaaatacaccgacgccttcaccgccgacgtgctcggcgaggatggcaagcctgtgcggttgaccatgggttcctacggcatcggtgtgtctcggttggttgccgtcgttgccgagcagcaccacgacgagctgggccttcgctggccgtcgacggtcgcgccgttcgatgttcacctggtgatcgcgaacaaggacgcgcaggctcgcgccggggcgaccgcgctggccgccgatctggatcggctgggggttgaggtgttgctggacgaccgccaggcatcgcccggcgtcaagttcaaagatgccgagctgttgggtatgccctggatcgttgtcgtggggcgcggctgggcggacggcgtggtcgagctgcgcgaccggttcagcggtcagactcgcgagctggttgccggcgcctcgctggccaccgatatcgcagcggccgtcaccgggtag

SEQ ID NO: 28600 - DNA, 1218 bp, Mycobacterium tuberculosis
gtgaccgagaacccctatctggtcgggttacggctggctggcaagaaggtcgtcgtggttggcgggggcacggtcgcccagcgccggttacccctgctgatcgccagtggcgcggacgtgcacgtgatcgcccccagcgtcacccccgccgtcgaggcgatggaccagatcaccttgtcggtgcgtgactaccgcgacggcgaccttgacggcgcctggtatgcgatcgcggccaccgatgacgcgcgggtgaacgtggctgtcgtcgccgaggcggagcgccgacggatcttttgcgtccgggccgatatcgcggtggaggggacggcggtgaccccggcgtcattcagctatgcgggcctgtcggtgggggtgctcgccggtggtgagcaccgccgttcggcggcgatccgctcggcaatccgggaggcgttgcagcagggcgtcatcactgcgcagagttccgacgtcctcagcggcggagtggcgttggtcggcggcggtcccggcgatcccgaactgatcacggttcgcggtcgccggctgcttgcccaggccgatgtcgtggtcgccgaccggctcgccccgcccgaactgctggccgagctgccgccgcacgtagaagtcatcgacgcggccaagatcccttacggccgggccatggcccaggacgcgatcaacgctgtcctgatcgaacgggccagatccggcaactttgtggtccgtctcaaagggggcgaccccttcgtgttcgcccggggctatgaagaagtgctggcatgtgcccacgccggaatcccggtcaccgtggtgccaggtgtgacgagtgccatagccgtgcccgctatggcgggcgttccagtcactcaccgggccatgacccacgaattcgtggtggtcagtggccatcttgcgcccggtcatcccgaatcgttagtgaattgggatgcattggctgcattgacgggcaccatcgttttgctgatggcggtcgaacgcatcgagcttttcgttgacgttctgctaaagggtggccgaactgcggatacgccggtactggtggttcaacacggaacgaccgccgctcaacagacgttgcgggccacccttgccgacacgccggagaaggtccgcgcggcggggatccgacctcccgcgatcatcgtgatcggggctgtagtcggcctgagcggcgttcggggtttaaacaattcttaa

SEQ ID NO: 28601 - DNA, 1482 bp, Mycobacterium tuberculosis
gtgtcagacctagccagaaccgacgtcgtgctgatcggtgcgggcatcatgagcgccacgctgggggtgctgctgcgtcggctcgaaccgaactggtcaatcaccctgatcgaacggctggacgcggtagccgccgaaagcagcggtccctggaacaacgccggcaccgggcactccgcgctgtgcgagatgaactacaccccagaaatgccggacggctcgatcgacatcaccaaagcggtgcgtgtcaacgagcaattccaggtcacccgccagttctgggcatacgcggccgaaaacggcatcctcaccgacgtgcgcagcttcctcaaccctgtgccgcacgtgagtttcgtccatggatcgcggggcgtcgagtatctacggcgccgccaaaaggcgttggccggcaacccgctgttcgccggcaccgagttcatcgagagtcccgacgaattcgcccgccggctgccgttcatggccgctaaacgggccttctccgagccggtggcgctcaactgggccgccgacggcaccgacgtcgacttcggtgccctcgccaaacaactcatcggctattgcgtgcaaaatggcactaccgcgttgttcgggcacgaggttcgcaacctctcgcggcaatccgacggcagctggacggtcaccatgtgcaaccgccggaccggcgaaaagcgcaagttgaacaccaagttcgtctttgtcggggccgggggtgacaccttgccggtgctgcagaaatccgggatcaaagaggtcaaaggcttcgccggcttcccgattggcggtcggttcctgcgcgccgggaacccggcgctcaccgcctcgcatcgggcaaaggtatatggcttcccggcgccgggcgccccgccgttgggcgccttgcatctggatctgcggtttgtcaacggcaagtcgtggctggtgttcgggccatacgccggctggtcgccgaagttcttgaaacacgggcagatcagcgacctgccccggtcgatcaggccggacaatctgttgtccgtgctcggcgtgggcctcaccgagcggagactgctgaactacttgatcagccagctgcgtctctctgaacccgagcgggtcagtgcgctgcgcgaattcgcccctagcgcaatcgattcggactgggagttgacgatagccggtcagcgggtacaggtgatccggcgagatgaacgcaacggcggggtgctcgagttcggcacgacggtcatcggcgatgctgacggtagtattgccggactactgggcggctccccaggggcttcgaccgcggtggcgatcatgctggacgtgctgcagaaatgctttgccaaccgctatcaatcctggctgcccacgctcaaagaaatggtgccgtcgctgggggtgcagctgtcgaatgaacccgcgctgttcgacgaggtgtggtcatggagcaccaaggcgctgaagttaggtgccgcatga

SEQ ID NO: 28602 - DNA, 1848 bp, Mycobacterium tuberculosis
atgttgtatgtagttgcgtcacccgacttgatgaccgcggcggctaccaatctggcggagattggttcggcgatcagcacggcaaatggtgcggcggcactcccgactgttgaggtggtggccgcggccgccgacgaggtgtccacgcagatcgcggctctattcggagcgcatgccaggagctaccaaaccctcagcacccaggcagcggcgtttcatagtcggtttgtgcaggcgttgaccacggccgcggcttcctacgccagcgtagaggccgccaacgcgtcgccacttcaggttgcgctagacgtgattaatgcgcccgcccagacactgctcggacgtccgctaattggtaacggcgccgacggatcgacaccggggcaggccggcgggcccggcgggttgctgtacggcaacggcggtaatggcgccgccggtgggcccaaccaggccggcggcgccggcggcaacgccggcttgatcggcaacggcggggcgggcggcgccgggggtgttggcgcggtcggcggtaaacgcggcacgggcggcctgctattcggcaacggcggggccggcgggcaaggcgggctcggcctcgcaggtatcaacggcggcagcggcgggcagggaggccacggtggcaacgccatcctgttcggccagggcggtgccggcgggccaggtggcaccggcgccatgggcgtcgccggcaccaatcccacccccatcggcaccgcagcgcctggcagcgacggcgtaaatcagattgggaacggtggtaacacggacctcaccggcggcgccggtggcgacggcaatgccggcagcaccaccgtgaacggcggcaacggcggtaccggcggcgcagctaggaactcatctggtggtaccggtaactcctttggtggtgccggcggcgccggaggcgacggcgccaacggcggcgacggtggcgctggcggggaagccctcaccgaaggcggtgccaccgccgttagtggtgctggtggtaagggaggtaacgccgaggcttccggcggcgccggcggcaacggcggcaaaggtggctttgctcaggccaccaccagcgtgaccgggggtaacggcggtaacggtggcaatggccacgacagtaacgcgccgggcggcgctggcggcagcggtggcgtcggcggtgacggcggccgtggcggcctgctggccggcaacggcggcaccggcggtgccggtggcaacggcggtaccggtggcgccggtgcccccggcggtgccggcggcgccggcggcaaagccgacatcgccaacagcctcggcgacaatgccaccgtaaccgggggcaatggcgggacaggcggagacggcggcagcgcgctgggcaccgggggggctgggggtgccggaggtctaggtggtcacgggggtgcaggcgggctgctgattggcaacggcggcgccggtggcgctggcggcctcggcggtgcgggcggcgccggcggtgcgggcggtgagggcggtgccggcggcgccggaggcgaagctattcccggcggggcgtccaccaactccgccggcggtgacggaggggcgggcggtactggcggcaatggcggtgacggcggtgccggcggagcccccggcctcggtggcgcgggcggggccggcggatggttgatcggccagtcgggcagcaccggcggcggtggcgccggcggtgccggtggtgccggaggtgccggtggcgcgggcggcagcggcggtgcgggtggccatggcgacactacctccggcaagaacggttcgtctggcaccgcgggcttcgacggcaaccccgggcagcccggctga

SEQ ID NO: 28603 - DNA, 1380 bp, Mycobacterium tuberculosis
atggaaacgtacgacatcgcgatcatcggaaccggttcgggcaacagcattctcgacgaacgctatgccagcaagcgggcggcgatctgcgagcagggcaccttcggcggcacctgcctcaatgtcgggtgcatccccacaaaaatgttcgtctacgccgccgaggtggccaagaccatccgaggcgcgtcgcgttacggtatcgacgcgcacatcgaccgggtgcgatgggacgacgtcgtctcgcgcgtcttcgggcgcatcgatccgatcgcgctgagcggcgaggactatcgaaggtgtgcgcccaacatcgacgtgtaccgcacacacacccgtttcgggccggttcaggccgatggccgctacctgttgcgcactgacgcgggtgaagagttcaccgccgagcaggtggtgatagccgccggatcgcggccggtgattccgccggccatcctcgcgtccggcgtcgactatcacaccagcgataccgtcatgcggatcgccgagttgccggagcacatcgtgatcgtcggaagcggcttcattgcagcggaattcgcacatgtgttttccgctctgggcgtacgggtcaccctggtgatccggggcagctgcttactacggcattgtgacgacaccatctgcgaacggttcacccgcatcgcatcgaccaaatgggagctgcgcacccatcgcaacgttgtggacggccagcagcgcggctcgggcgtcgcgctgcggctagacgatggttgcaccatcaacgccgacctactgttggtagcgacaggccgggtgtccaacgccgacctgctggatgccgagcaggccggtgtcgatgtcgaggacggccgggtgatagtcgacgagtaccaacggacttcggcgcgtggggtttttgcgctgggcgatgtctcgtcgccgtacttgctcaagcatgtcgccaaccacgaggcccgcgtcgtgcagcacaatctgctctgcgactgggaggacacccagtcgatgatcgtcaccgaccaccgatacgtaccggctgcggtattcaccgatcctcagatcgctgccgtcggactcactgaaaaccaagctgtggcaaagggactcgatatttcggtcaagatacaggactatggtgacgtcgcgtacggctgggcgatggaggacaccagtggaatcgtcaagctcatcaccgagcgcggctctgggcgcttactgggcgcacacatcatgggttaccaggcatcctcgctcatccaaccgttgatccaggcgatgagctttgggctgaccgccgccgaaatggcccgcggccagtactggattcatccggcgctgccggaggtggtggaaaacgcgctgcttggcctgcgttga

SEQ ID NO: 28604 - DNA, 1164 bp, Mycobacterium tuberculosis
gtgactgtaggcttgggcatgccgcagcccccggcacccacgctcgctccccggcgcgccacccgtcagctgatggtcggcaacgtcggcgtgggcagtgaccatccggtctcggtgcaatcgatgtgcaccaccaaaacccacgacgtcaactcgacattgcaacaaatcgccgagctgaccgcggccggatgcgacatcgtgcgggtggcctgcccgcgccaggaggacgccgacgcgctggccgagatcgcccggcacagccagatcccggtagtcgcggacatacatttccagccgcgctacatattcgccgccatcgacgctggatgtgccgcggtgcgggtcaacccgggcaacatcaaggagtttgacggccgggtgggtgaggtcgccaaggcggcgggtgcggccgggatcccgatccgaatcggtgtcaacgccggttcgctggacaaacggttcatggagaagtatggcaaagccacgcccgaggcgctggttgagtcggcgctgtgggaggcttcgcttttcgaggagcatggcttcggtgacatcaagatcagcgtcaagcacaacgacccggtggtgatggtcgccgcctacgagctgcttgctgcacggtgcgactacccactgcacctcggtgtcaccgaggccggccctgctttccagggcaccatcaagtccgcggttgccttcggcgcgttgctgtcgcggggcataggcgacaccatccgggtgtcgttgtcggccccgccggtcgaggaagtcaaggtgggcaatcaggttctcgagtcgttgaacctgcggccgcgttcgctcgagatcgtgtcttgcccgtcgtgcggtcgcgcgcaagtcgacgtctacaccctggccaacgaggtaaccgccggcctggatggtctcgatgtgccgttgcgggtggccgtgatggggtgtgtcgtcaatggtccgggtgaagcacgtgaggccgacctgggcgtggcgtccggcaacggcaaaggtcagatctttgtacggggcgaagtgatcaagaccgtgcccgaagcacagatcgtcgagacgctgatcgaggaggcgatgcggctggccgccgaaatgggcgagcaagatccgggcgcgacaccgagcggttcgcctattgtgaccgtaagctga

SEQ ID NO: 28605 - DNA, 921 bp, Mycobacterium tuberculosis
gtgacaaccaacgatgccggcaccggaaaccccgccgagcagccggcgcgtggtgctaaacagcagccggcgaccgaaacgtcccgcgccggccgtgatttgcgcgcagcgatcgtggtgggcctttccataggcctagtcctcatcgcggtgctggtgttcgttccgcgcgtttgggttgccatcgtggccgtcgccaccttggtcgctacccatgaggtggtgcggaggttgcgggaagcgggctatctcatcccggttatcccgttgctgattggcgggcaggccgcggtgtggctgacctggccgttcggcgcggtcggcgcattggcgggctttggtggcatggtcgttgtctgcatgatttggcgactgttcatgcaggacagcgtgacgcgcccgacgaccggcggtgcaccgtcgccgggaaactacttgtccgacgtctcggccacggtcttcctggccgtgtgggtcccattgttctgctctttcggcgcaatgctggtctacccggaaaatggctcgggatgggtgttctgcatgatgatcgcggtcatcgcttccgatgtcggcggctacgccgtgggggtgctgtttggcaagcatccgatggttccgacgatcagcccgaagaagtcgtgggagggctttgccggttcgctggtgtgcgggatcaccgcaacgatcatcaccgcgactttcctggtcggcaaaacgccgtggattggtgcactgctcggcgtgcttttcgtgctcaccaccgcgctgggcgacctggtggagtcgcaggtcaaacgtgacctcggcatcaaagacatgggccgcctgctacccggccacggcggtctgatggaccggctcgacggcatactgccttccgcggtggcggcctggatagtcctcacactgctgccctga

SEQ ID NO: 28606 - DNA, 558 bp, Mycobacterium tuberculosis
atgattgatgaggctctcttcgacgccgaagagaaaatggagaaggctgtggcggtggcacgtgacgacctgtcaactatccgtaccggccgcgccaaccctggcatgttctctcggatcaccatcgactactacggtgcggccaccccgatcacgcaactggccagcatcaatgtccccgaggcgcggctagtcgtgataaagccgtatgaagccaatcagttgcgcgctatcgagactgcaattcgcaactccgaccttggagtgaatcccaccaacgacggcgcccttattcgcgtggccgtaccgcagctcaccgaagaacgtcggcgagagctggtcaaacaggcaaagcataagggggaggaggccaaggtttcggtgcgtaatatccgtcgcaaagcgatggaggaactccatcgcatccgtaaggaaggcgaggccggcgaggatgaggtcggtcgcgcagaaaaggatctcgacaagaccacgcaccaatacgtcacccaaattgatgagctggttaaacacaaagaaggcgagctgctggaggtctag

SEQ ID NO: 28607 - DNA, 786 bp, Mycobacterium tuberculosis
atgacagagcccgatgtcgccggcgcgccggcttcgaagccggagcctgcgagcactggcgccgcgtcggcggctcagctgtccgggtactcgcgagtgttgctcaagctcggcggggaaatgttcggcggaggccaggtcgggctggatcccgatgtcgtcgcgcaggtggcccgccagatcgccgatgtggtgcgcggcggcgtccagatcgccgtcgtgatcggcggcggcaactttttccggggcgcacagctgcagcagctcggtatggagcgcaccaggtcggactatatgggaatgctcggcactgtcatgaacagccttgcactgcaagacttcctggagaaggaaggcatcgttacccgagtccagaccgcgatcaccatgggccaggtggccgaaccgtacctgccgttgcgggccgtccgccacctggagaagggacgggtggtgatcttcggtgccggcatggggctgccgtacttttcgacggataccaccgcagcgcagcgtgcgctggagatcggtgccgacgtggtcttgatggccaaagcggtcgacggtgtgtttgctgaggatccgcgggtgaaccccgaggccgaactgctcaccgccgtcagtcatcgtgaggtcctcgaccgcgggctgcgagtagccgacgccaccgcgttcagcctttgcatggacaatggcatgccgatcctggtgttcaacctgctgaccgatggcaatatcgcccgtgctgttcggggtgagaagatcggaacgctggtcaccacctaa

SEQ ID NO: 28608 - DNA, 816 bp, Mycobacterium tuberculosis
atggcgaacttcactgccgctgacgtcaagcggctgagggagctgaccggcgccggcatgctcgcctgtaagaacgcgctggccgaaaccgacggggacttcgacaaggccgtcgaggcgctgcggatcaagggcgctaaggatgtcggcaagcgtgccgagcgggctacggccgagggcttggtggcggccaaggacggcgcgctgatcgagctcaactgcgagactgactttgttgccaagaacgcggagttccaaacgctggccgaccaagtggtcgcggcggcggcagcagctaagcccgccgacgtcgacgcgctcaagggtgccagcatcggcgacaagaccgtcgagcaggcgatcgccgagctgtcggccaagatcggcgagaagctcgagctgcgtcgtgtggcgattttcgacgggaccgtggaagcctacctgcatcgacgttccgctgacctgccgccagcggtgggtgtactggtcgagtaccgcggcgacgacgcggccgccgcgcacgccgttgcgttgcaaatcgccgcgctgcgggcgcggtacctgtcccgcgacgacgtgcctgaagacatcgtggccagcgaacgccgcatcgccgaggagacggcaagggccgagggcaagccggagcaggcgctgcccaagattgtcgagggccggctgaacggcttcttcaaggatgcggtgctgcttgagcaggcgtcggtgtccgacaataagaagaccgtcaaggccctgctcgacgtggccggcgtgacggtgacacggttcgtccgcttcgaggtgggccaggcttag

SEQ ID NO: 28609 - DNA, 864 bp, Mycobacterium tuberculosis
atggccgtagtcaccatgaagcagctgcttgacagcggcacccacttcgggcatcagacccgtcgctggaatcccaagatgaagcgtttcatcttcaccgaccgcaacggcatctacatcatcgacctgcagcagacgttgaccttcatcgataaggcgtacgagttcgtgaaagagaccgtcgctcacggtgggtcggtgctcttcgtcggcacaaagaagcaggcgcaggagtcggtggccgccgaagccacccgggtcggcatgccgtatgtgaaccagcgctggctgggaggcatgctcaccaacttctccaccgtgcataagcggctgcaacgcctcaaggagcttgaggcgatggagcagaccggtggcttcgagggccgcaccaagaaggaaatcttgggattgacccgcgagaagaacaagctcgagcgcagcctcggcggcatccgcgacatggccaaggtgccgtcggcgatctgggtcgtcgacacgaacaaagagcacattgccgtcggtgaggcccgcaaactgggcatcccggtcatcgcgatccttgacacgaactgcgaccccgacgaggtcgactacccaatcccaggcaacgacgacgcgatccgctcggccgcgctgctgactagggtgatcgcttccgcggtcgccgagggcctgcaggcccgtgccggactggggcgcgccgacggcaagccggaggccgaagccgccgagccgctggccgaatgggagcaagagctgctggcctcggcgacagcttcggcaacgccatcagcaaccgcgtcaacaactgccctcaccgacgcccccgcaggcgcaaccgaaccaaccacagatgcatcctag

SEQ ID NO: 28610 - DNA, 2340 bp, Mycobacterium tuberculosis
atgtacgttgaggcggtgaggtggcagcggtcggcggcgtctcgcgacgtcctcgccgactatgacgagcaggcggtaacggtggcgccgcgcaaacgcgaggccgcgggcgtgcgggcggtgatggtatcgctgcagcgggggatgcagcagatgggcgcgctgcgcaccgcggcggcgctggctcggttgaatcagcgtaacggcttcgactgcccaggctgcgcgtggccggaggagcccggcggacgcaagctggccgagttctgcgagaacggcgccaaggcagtcgccgaagaggccaccaagcgtaccgtcactgcggagttcttcgctcggcactcggtggcggagctgtccgcgaagcccgaatattggctgtcccagcaaggccggctcgcccacccgatggtcttgcgccccggtgatgaccactaccggcccatcagctgggatgccgcttatcagctgatcgccgagcagctcaacgggttggacagtcccgaccgggccgtgttctacacatcggggcgcaccagcaacgaagcggcgttctgttaccagctgctcgtgcgctctttcggcaccaacaacctgcccgactgctccaacatgtgccacgagtcctcgggtgcggcgctgaccgactcgatcggaatcggaaaaggctcggtgaccatcggtgacgtcgagcacgccgacctgatcgtgatcgccggacaaaaccccggtaccaatcatccccgcatgctgtcggtgctggggaaagcgaaggccaacggcgccaagatcatcgccgtgaacccgctgcccgaggccgggttgattcggttcaaagatccgcagaaggtgaacggggttgtgggacatggtatcccgatcgccgacgagttcgtgcagatccgcctcggcggggacatggcattgttcgccgggttaggcaggttgttgttggaggccgaggagagggtccccggcagcgttgtcgaccggtcgttcgtcgacaaccattgtgccggattcgacgggtaccgccgccggactctgcaggtcggcttggacaccgtgatggacgccaccggcatcgaactcgcgcaacttcagcgggtcgccgcgatgttgatggcgtcgcagcgcacggtcatctgctgggctatgggcttgacccaacacgcccacgccgtggccaccatcggtgaggtcaccaacgtgctgctgctgcggggcatgatcggcaaacccggcgcgggggtgtgcccggtgcgcgggcattccaacgtacaaggggaccgcacgatggggatctgggagaagatgcccgagcagttcctggcggcgctggatcgtgagttcggcattaccagcccccgagcgcacggctttgacaccgtggccgcaatccgggccatgcgcgacggtcgggtcagcgtcttcatgggcatgggcggaaacttcgcgtcggccacccccgacaccgccgtcaccgaggcggccttgcgcaggtgcgcgctgactgtgcaagtctcgaccaagctcaaccgcagccaccttgtccacggcgccaccgcgctgatcctgccgacgctgggtcggaccgatcgcgatacccgcaatggtcgcaaacaattggtgtcggttgaggattcgatgtcgatggtgcatctgtcgcgtggtagcctgcacccgcccagcgatcaggtgcgcagcgaggtgcagatcatctgccagctggcccgcgccttgttcggccccggacatccggtgccatgggaacggttcgcagatgactacgacaccatccgtgacgccatcgccgcggtggtgcccggctgtgacgactacaaccacaaggtgcgtgtgcccgacggattccaattgccgcacccgccgcgcgatgcgcgcgaattccgtaccagcacaggcaaagctaacttcgcggtcaatccgttgcagtgggtgccggtgccgcccggccggctggtgctacagaccctacgcagccatgaccagtacaacaccacgatctacgggctcgacgaccgatatcgcggcgtgaagggcggacgccgggtggtgttcatcaacccggccgacatcgaaacgttcggtttgacggcgggtgaccgtgtcgacctggtgtcggagtggaccgacggccaaggcggtctgcaagaacggcgggcaaaagactttctggtggtggcatattcgacgccggtcggcaatgctgcggcctactacccggagaccaatccgctggttccgctcgaccataccgcggcccaatcgaacaccccggtgtcgaaggcgatcatcgtgcgattggagccaacggcctag

SEQ ID NO: 28611 - DNA, 795 bp, Mycobacterium tuberculosis
atgaccaagacctggccaccgcggacggtgatccgtaaatctgggggtttgcggggaatgcgcaccctggagtccgcgctgcatcgtggtggtctggggccggtggccggggtcgacgaagtgggtcgcggcgcctgcgctggcccgttggtggtcgcggcctgcgtgcttggccccgggcggatagcaagtcttgccgcccttgatgattcgaagaagctcagcgagcaagcgcgggagaagctgttcccgctgatctgccggtatgcggtggcctatcacgtggtgttcatcccgtcggccgaggtcgaccgccgcggcgtgcacgtggccaatatcgaaggtatgcggcgcgcggtggccggtctggcggtgcggcccggttatgtgctcagcgacggctttcgcgtgccaggactgccgatgccgtcgttgccggtgatcggtggcgacgcggcagccgcctgcatcgccgcggctagcgtgctcgccaaggtcagccgggaccgcgtgatggttgcgttggacgccgatcaccccgggtacggtttcgcggagcacaagggttacagcaccccggcgcacagccgggcgctggcccgattgggaccctgcccgcagcaccgttactcgttcatcaatgttcgccgggtggcgagtgggtcgaacaccgcagaggtcgccgacggccaacccgaccctcgggacgggacggcacagacgggtgagggaagatggagcaagagttcccacccagcgacaatgcgggccacgggtcgcgctcagggcacttag

SEQ ID NO: 28612 - DNA, 885 bp, Mycobacterium tuberculosis
gtgaccgaaaccacggactccccatcggagcgccagccgggtccggcagagccggagctctcctcccgggacccggacattgccggccaggtcttcgacgcagccccgttcgacgcagccccggatgcggactccgaaggcgactccaaggcggccaaaacggacgagccgcggcccgcgaagcgatcaacgctgcgggagttcgcggtgctggcggtgattgctgtggtgctctactacgtcatgctgacgtttgtcgcgcgcccttatctgattccgtcggaatcgatggaacccacgttgcacgggtgttcgacgtgcgtcggcgaccgcatcatggtggacaaactcagctaccgcttcggctcaccgcaacctggcgacgtcatcgtcttcaggggaccgccgtcgtggaacgttggttacaagtcgatccgttcgcacaacgtcgccgtgcgctgggtgcagaacgcgttgtcgttcatcggtttcgtgcctcccgacgagaacgacctggtcaagcgtgtcatcgcggtcggcggacagacggttcaatgccggtccgacaccggcctgacggtcaacggcaggccactgaaggagccatacctggatccggccaccatgatggccgacccgtcgatatacccgtgcctgggcagcgagttcgggccggtcaccgtcccgcccgggcgtgtctgggtgatgggcgacaaccgcacccattcggcggattcccgcgctcactgcccgttgctatgtactgacgatccgctaccggggaccgtgccggtggccaacgtcatcggtaaggccaggttgatcgtgtggccgccgtcgcgttggggtgttgtgcgttcggtgaatccccagcaaggtcggtag

SEQ ID NO: 28613 - DNA, 342 bp, Mycobacterium tuberculosis
atgaaccggctggacttcgtcgacaagccgtcgttgcgcgacgacatcccggcgttcaacccgggcgacaccatcaacgtgcatgtcaaggtgatcgagggcgccaaggaacgtctccaggtgttcaagggcgtggtgatccgccggcagggcgggggcatccgcgagacgttcacggtgcgcaaggagagctacggcgtcggcgtcgaacggaccttccccgtgcactcgccgaacatcgaccatatcgaggtggtgacccgtggcgatgttcgccgcgccaagctgtactacctgcgcgaactgcgcggaaagaaggccaagatcaaggagaagcgctga

SEQ ID NO: 28614 - DNA, 693 bp, Mycobacterium tuberculosis
gtgcgcatcgatatcgtgacgatcttccccgcctgcctggacccgttgcgacagtcgttgccgggcaaggcgatcgaatcgggcctggtcgaccttaacgtgcacgacctgcggcgctggacccacgatgtgcatcactcggtggacgacgcaccctacggcggcggcccgggaatggtgatgaaggcgccggtgtggggtgaagcgcttgacgaaatttgttccagcgaaacgttgttgattgttcccacgcccgccggtgtgttgtttacccaggccaccgcccagcgctggaccaccgagagccatctggtgttcgcctgcggccgctacgaaggcatcgaccagcgggtcgtgcaggatgccgcccggcgaatgcgcgtcgaagaagtctcgatcggcgactacgtattgcccggcggggagtcggcggccgtggtgatggtcgaagccgtgctgcgactgttggccggtgttctcggcaatcccgcttcccaccaagatgattcgcactcaacgggcctggacgggctccttgagggtccgagctacacccggccggcgagctggcgtggcctcgatgtacccgaggtcctactctccggcgaccatgcccgaattgccgcctggcgcagagaggtctcgctgcagcgcacccgcgaacgacgccccgacctgtcccaccccgactag

SEQ ID NO: 28615 - DNA, 531 bp, Mycobacterium tuberculosis
atggagctggtagtcgggcgggtggtgaagtcgcacggtgtcaccggcgaggtcgtcgtcgagatccgcaccgacgacccagctgaccggtttgcgccgggtaccaggttgcgcgctaaggggccttttgacggtggtgccgagggcagtgcggtgagttacgtcatcgaaagtgtgcggcagcacggcggccgcctgttggtgcgactcgctggagtggccgatcgagacgcagccgatgcgttgcgcggcagcttgttcgtgatcgacgccgatgacttgcccccgatcgacgagccggacacctattacgatcaccagctggtggggcttatggtccagacggcgacgggggagggtgttggtgtcgtcaccgaagtggtgcacaccgccgctggtgagttgctggcggtcaagcgtgattccgatgaggttttggtgccgtttgtgcgtgccatcgtcacgtcggtgtcattggacgacggcatcgttgagattgatccgccccatggcttgctgaatctggagtaa

SEQ ID NO: 28616 - DNA, 243 bp, Mycobacterium tuberculosis
atgagcgccgtcgtcgttgacgctgttgagcatctggtccgtgggatcgtcgacaatcctgacgatgtccgggtagacctgataaccagtcggcgggggcgcaccgtcgaagtccacgttcatccagacgacctgggcaaggtgatcggtcgtgggggacgcaccgctaccgcattgcgcactctggtagccggtatcggtggccgcggtatccgcgtcgacgtggtggacaccgaccagtag

SEQ ID NO: 28617 - DNA, 489 bp, Mycobacterium tuberculosis
atggctgtgaagatcaagctcactcggcttggcaagatccgcaatcctcagtaccgcgtcgccgtcgccgatgcgcgcacccgccgcgacggccgagcgatcgaggtaatcggccggtaccaccccaaagaagagccgagtctcatcgagatcaactccgagcgtgcccagtactggctctcggtgggtgctcagcccaccgagcccgtcctcaagctgctgaagatcaccggggattggcagaagtttaagggcctacctggcgctcagggccggttgaaggtcgccgcacccaagcccagcaagctcgaggtgttcaacgccgcgttggccgccgccgacggtggtcctaccaccgaggccaccaaaccgaagaagaagtcgccggccaaaaaggctgccaaggctgctgagccagcgccgcagcctgagcagccggacacgccggcgctgggtggcgagcaggccgagctgacggcggaaagctga

SEQ ID NO: 28618 - DNA, 1578 bp, Mycobacterium tuberculosis
gtgtttgaatcgctgtctgaccgtttgaccgccgccctgcaggggctgcgcggcaagggccgactgaccgatgccgatatcgatgccactacccgcgaaattcgtttggcgctgctggaagccgatgtttcgctaccggtggtccgggcattcatccaccggatcaaagaacgcgcccgcggggccgaggtgtcaagtgccctcaacccggctcaacaggtcgtcaagatcgtcaacgaggaactgataagcatcctcggcggcgaaacccgcgagttggcgtttgcgaagaccccgccgaccgtcgtgatgctcgccggcctgcagggctccgggaagacgacactggccggcaaattggccgcccgcctgcgtggacaaggacacacgccactgctggtcgcttgtgacctgcaacggccggccgcggtgaaccagctgcaggtcgtcggcgagcgtgccggagtgccggtgttcgcgccgcatccgggtgcctcgccggagtccggccccggtgacccggttgcggtggcggcggccgggctggccgaggcccgggccaagcacttcgacgtcgtcatcgtcgacaccgccggacgactgggcatcgacgaggagctgatggcccaggccgcggccatccgcgacgccatcaaccccgacgaggtgctgttcgtcctggacgcgatgatcggccaggacgcggtcaccaccgctgcggcgttcggcgagggcgtcgggttcaccggtgtggccttgaccaagctcgacggtgacgcccgcggtggtgccgcgttatcggtgcgcgaagtgaccggtgttccaatccttttcgcctccaccggggagaagctggaggacttcgacgtcttccacccggaccggatggccagtcgcatcttgggcatgggcgatgtgctgagcctgatcgaacaggccgagcaggtcttcgatgcacaacaggccgaggaggccgcagccaagatcggcgccggcgagctgaccctggaggacttcctcgagcagatgctcgcggtacgcaagatgggcccgatcggcaacctgctgggcatgctgcccggcgcggctcagatgaaggacgcgttggccgaggtcgacgacaaacaactcgatcgtgtccaggccatcattcgcggcatgacgccgcaggaacgggcagaccccaagatcatcaatgcctcgcggcggctgcgcatcgccaacggctcgggcgtcacggtgtccgaggtcaaccagctggtcgagcgcttcttcgaagcccgcaagatgatgtcgtccatgctcgggggcatgggcataccgggcatagggcgcaaatccgcgacgcgaaagagcaagggcgcaaaaggcaaatccggcaagaagagtaagaaggggacgcgcggtccgacgccgccgaaggtcaagagcccgttcggcgtgcccgggatgccgggcttggctgggctacctggggggctccctgatctctcacagatgcccaaaggtctcgacgagctgccgcccggcctggccgacttcgacctgtccaagctgaagttcccaggcaagaagtag

SEQ ID NO: 28619 - DNA, 2427 bp, Mycobacterium tuberculosis
atggaggcagaaagtccttgtgccgcaagcgatttagctgtcgcccgacgcgagctgctgtccggcaaccatcgcgagctggatccggtcgggctgcggcagacgtggctggatctgcatgagtcttggctgatcgacaaggccgacgagatcgggatcgccgatgccagtggttttgcaatcgtcggggtcggcgggctcggccgccgcgagctgctgccgtattcggacctggacgtgttgctgttgcacgatggcaagcctgctgacatcttgcggcccgtcgccgacaggttgtggtatccgttgtgggatgccaacattcggctcgatcacagtgtgcgaacggttagtgaggcattgaccatcgccaattccgatctgatggccgctctaggcatgctggaagcccgccacatcgccggcgatcagcagctctcgttcgcgttgatcgacggcgtgcgacgccagtggcgcaacggaattcgttcccgcatgggcgaactcgtcgaaatgacatatgcgcgttggcggcgctgtggccggatcgcgcagcgcgcagagcccgatctcaaattgggtcgcggcggccttcgggacgtccagttgctagacgcgctggctctcgcccagctcatcgaccggcacggtatcggccacacggacctgccggcgggttcgctggacggtgcgtatcgcaccttgctggatgtgcgcaccgaactgcaccgggtgtcgggccgcggacgcgaccacctgctggcccagttcgccgacgagatcagcgccgcgttgggtttcggtgaccgattcgatttggcgcgcacactgtcgagtgctggccgcaccatcggttaccacgccgaagccgggctgcggactgcggcgaatgcattgccgcggcgcggcatctcggccttggtgcggcggccaaagcggcgaccgctcgacgagggtgtcgtcgagtatgccggcgaaatcgtgctcgcccgcgacgccgaacccgaacacgatcccggcctggtgctccgagtggccgccgcgtcggccgacaccggattgcccattggcgccgccaccctgagccggttggccgccagcgtcccggatctgccgactccctggccgcaagaggcattggacgacttactagttgtgctctccgccggccccaccacggtggctaccatcgaagcgctcgaccgaaccgggctctggggccggttgttgccggaatgggagcccattcgcgaccttccgccgcgcgacgtcgcccacaagtggacggttgaccgacacgtggtcgagaccgcggtgcatgcggcgccactggccacccgggtggcacgtcccgacctgcttgcgcttggcgcgctgctgcacgacatcggcaagggacggggcaccgatcacagtgtgctcggggccgaattggtaatcccggtttgcaccaggctggggttgtcgccgccggacgtgcggacgctctccaagctggtccgccaccacctgctgctgccgattacggcaacccgacgtgacttaaacgaccccaaaaccatcgaggcggtgtccgaggcgctgggtggggatccgcaactgctcgaagttttgcacgccctgtcggaggcggactcgaaggccaccggccccggggtgtggagcgattggaaggcgtcactggtcgatgacctggtgcgtcgctgccggatggtgatggccggagagtcgctgcctcaagccgaaccgactgcaccccattatctttcgctggcggccgaccacggggtgcatgtggagattagtccgcgcgacggtgaacgcatcgacgccgtaatagtggcgccggacgagcggggactggtgtcgaaagccgccgcggtgctggcgctgaactcgctgcgcgtacattcggcgtcggtcaacgtccaccagggtgtcgcgataaccgagtttgtggtgtcaccactgtttgggtccccgcccgcggcggagttggtgcgtcagcagtttgtcggtgccctcaacggcgacgtcgacgtgctgggcatgctgcagaagcgggacagcgatgccgccagcttggtatccgctcgggccggggacgtgcaggccggggtgcccgtgactcgtacggccgctccgccccgcatcctgtggctcgacaccgccgcgccggccaagctgatcctcgaagttcgggccatggatcgggcgggtttgctcgcgttgctggccggggcgctggagggcgcgggagccggcattgtctgggcgaaggtcaatacgttcggatcgaccgcggccgatgtgttctgtgtgacggtccccgcggagttggacgcgagagccgcggtcgagcaacacctgctggaggtgttgggcgccagcgtcgacgttgtggtcgacgaacccgtcggcgattag

SEQ ID NO: 28620 - DNA, 1269 bp, Mycobacterium tuberculosis
gtgtgggaaggtttgtggatcgccacggcggtcatcgccgccctggtcgtcatcgctgcgctgaccctggggctggtgctctaccgtcggcggcgcatcagtctgtcgcctcggcccgagcgcggcgttgtcgaccgctcaggcggttacaccgcatcgtctggcatcacgtttagtcagacgccgacgacccagccggccgagcggatcgatacgagcggactgcccgccgtgggcgacgatgcgaccgtccctcgcgacgcgcccaagcgcacgatcgccgacgtacaccttcccgagtttgagccagaaccccaggctccagaggtccccgaggctgacgccatcgcgccgcccgaaggtcgattggaacgactgcgcggacggctcgccagatcgcagaatgccctcgggcgcggcctgttgggactgatcggcggcggcgacctggacgaggactcctggcaagacgtcgaggacaccctgctggtcgccgacctgggaccggcggccaccgcgtcggtggtgtcgcagctgcgcagccgcctggccagcggcaacgtgcgtaccgaggccgacgcccgggcggtattgcgtgacgtcctgatcaacgaactgcaacctggcatggaccgctcgatccgcgcgctaccgcacgccggccatccttcggtgttgctggtcgtcggcgtcaacggcaccggaaaaaccaccacggtcggcaagttggcgcgggtactagtggccgacggccgacgggtcgtactcggtgcggctgacaccttccgtgcggccgccgccgatcagctacagacctgggcggcgcgggttggcgcagcggtggttcgcgggcccgaaggcgccgacccggcatcggtggcgttcgacgccgtcgacaagggcatcgccgccggcgcagacgtcgtgctcatcgatacagccgggcggctgcacaccaaggttggcctgatggacgagctggacaaggtcaagcgcgtggtgactcggcgagcgtccgttgacgaggtgttgctggtgctcgatgccacgatcggacagaacgggttggcgcaggccagagtgttcgccgaggtcgtcgacatcagcggcgcggtgctcaccaaactggacggaacggccaagggcggcattgtgttccgcgttcaacaggaacttggggtgccggtgaagctggtcgggcttggtgaaggccccgatgacctggcgcctttcgaacccgccgcattcgtcgacgccctgctcggctag

SEQ ID NO: 28621 - DNA, 3870 bp, Mycobacterium tuberculosis
gtgggtgcagggagtcggtttccgctggtggacccgctgccgagcgttggagctcggcctgaccggttacgcggccaaccacgccgacggacgcgtgctggtggtcgcccagggtccgcgcgctgcgtgccagaagctgctgcagctgctgcagggcgacacgacaccgggccgcgtcgccaaagtcgtcgccgactggtcgcagtcgacggagcagatcaccgggttcagcgagcggtaatctggcccctcgtgtacctcaagagtctgacgttgaagggcttcaagtccttcgccgcgccgacgactttacgcttcgagccgggcattacggccgtcgttgggcccaacggctccggcaaatccaatgtggtcgatgccctggcgtgggtgatgggggagcagggggcaaagacgctgcgcggcggcaagatggaagacgtcatcttcgccggcacctcgtcgcgtgcgccgctgggccgcgccgaagtcaccgttagcatcgacaactccgacaacgcactgcctatcgaatacaccgaggtgtcgatcacccgaagaatgtttcgcgacggtgccagcgaatacgaaatcaacggcagcagttgccgtttgatggatgtgcaggagttgctgagcgactccggcatcggccgtgagatgcatgtgattgttgggcaagggaagctcgaggagatcttgcagtcgcggcctgaggatcggcgggcgttcatcgaggaagccgccggtgtgctcaagcatcgcaagcgcaaggaaaaagctctgcgcaaactcgacacgatggcggcgaacctggcccggctcaccgatctgaccaccgagctccggcgtcaactcaaaccgctgggccggcaggccgaggcggcccagcgtgccgcggccatccaagccgatctgcgcgacgcccggctgcgcctggcggccgacgacttggtaagccgcagagccgaacgggaagcggtctttcaggccgaggctgcgatgcgccgcgagcatgacgaggccgccgcccggctggcggtggcatccgaggagctggccgcgcatgagtccgcggtcgccgaactctcgacgcgggccgagtcgatccagcacacttggttcgggctgtctgcgctggccgaacgggtggacgctacggtgcgcatcgccagcgaacgcgcccatcatctcgatatcgagccggtagcggtcagcgacaccgaccccagaaagcccgaggagctagaagccgaggcccagcaggtggccgtcgccgagcaacaactgttagcggagctggacgcggcgcgtgcccgactcgatgctgcccgtgcagagctggccgaccgggagcgccgcgccgccgaggccgaccgggcacacctggcggcggtccgggaggaggcggaccgccgtgagggactggcgcggctggctggccaggtggagaccatgcgggcgcgtgtcgaatcgatcgatgagagcgtggcacggttgtccgagcggatcgaggatgccgcaatgcgcgcccagcagacccgagccgagttcgaaaccgtgcagggccgcatcggtgaactggatcaaggcgaggtcggcctggatgagcaccacgagcgtactgtggccgcgttgcggttggccgacgaacgcgtcgccgagctgcaatccgccgaacgcgccgccgaacgccaggtggcatcgctacgggctcgcatcgatgcgctcgcagtggggctacagcgcaaggacggcgcggcgtggctggcgcacaatcgcagtggcgcagggcttttcggttcgatcgcccaattggtgaaggtacgttccggctatgaagcggcactggccgcggcgctcgggccggcggccgacgcacttgcggtggacggcctgactgccgcgggtagtgccgtcagcgcactcaaacaagccgacggcggtcgcgcggtcctcgtgctgagtgactggccggccccgcaagccccccaatccgcctcgggggagatgctgcctagcggcgcccagtgggccctagacctggtcgagtctccaccgcagttggttggcgcgatgatcgccatgctttcgggtgtcgcggtggtcaacgacctgactgaggcaatgggcctggtcgagattcgtccggagctacgcgcggtcaccgttgacggtgatctggtgggcgccggctgggtcagcggcggatcggaccgcaagctgtccaccttggaggtcacctccgagatcgacaaggccaggagtgagctggccgctgccgaggcgctggcggcgcaattgaatgcggccctggccggtgcgctgaccgagcagtccgcccgccaggacgcggccgagcaagccttggccgcgcttaacgaatccgacacggccatctcggcgatgtacgagcagctgggccgcctcgggcaggaggcccgcgcggcggaagaagagtggaaccggttgctgcagcagcgtacggaacaggaagccgtgcgcacacagactctcgacgacgtcatacaacttgagacccagctgcgtaaggcccaggagacccaacgggtgcaggtggcccaaccgatcgaccgccaggcgatcagtgccgctgccgatcgcgcccgcggtgtcgaagtggaagcccggctggcggtgcgcaccgccgaggaacgcgccaacgcggttcgcgggcgggccgattcgctgcgccgtgcggctgcggcggaacgtgaggcgcgggtgcgggctcagcaagcacgcgccgcaagactgcatgcggccgcggtggccgcagcggtcgccgactgcggacggctgctggccgggcggttgcaccgggcggtggacggggcgtcgcaactgcgcgacgcgtcggccgcgcaacgtcagcagcggttagcggcgatggccgcggtgcgcgacgaggtgaacacgctgagcgcccgagtgggggaactcaccgattcgctgcaccgcgacgagctggctaacgcgcaggcggcgctgcgtatcgagcagcttgagcagatggtgctagagcagttcggaatggcgccggccgacttgatcaccgaatacggtccacatgtggcgctaccaccgaccgagctcgagatggctgagttcgagcaagcccgcgaacgcggcgagcaggtgattgcgcccgcccccatgccgttcgaccgggttacccaggagcgccgggccaaacgcgccgagcgtgcgcttgccgagttgggcagggtcaacccgctggcgctcgaagagtttgctgccttggaggagcgctacaatttcctgtccacccaactcgaggatgtcaaggctgcccgcaaggatctgctgggcgtcgtcgccgatgttgacgcccgcatcctgcaggtgttcaatgacgcgttcgtagacgtggaacgcgaatttcgcggcgtgttcaccgcattgttccccggtggtgaaggacggctgcggctgaccgagcccgacgacatgctcaccaccggcatcgaggtcgaagcccgcccgccgggcaagaagattacccgactgtctttgctctccggtggcgagaaggcgctgaccgcggtggcgatgctggtcgcgatctttcgtgcccgtccatcgccgttctacatcatggacgaggtggaggccgccctcgacgacgtgaacctgcgccgactgctcagcctgttcgaacagctgcgagagcagtcgcagatcatcatcatcacccaccagaagccgacgatggaggtcgcggacgcactgtacggcgtaaccatgcagaacgacggcatcaccgcggtcatctcgcagcgcatgcgcggtcagcaggtggatcagctggttaccaattcctcgtag

SEQ ID NO: 28622 - DNA, 870 bp, Mycobacterium tuberculosis
atgcccgagctgcccgaagtcgaggtggtgcggcgcggcttgcaggctcacgtgaccggccggaccatcaccgaggttcgggtgcaccacccccgcgctgtgcgccgccacgatgccgggcccgcggatctgacggcgcggctgcggggagcgcggatcaacggaaccgatcggcgcggcaagtacctgtggttgacactcaatacggctggggtccataggccgacggacaccgcactcgtggtgcacctgggcatgagtgggcagatgctgctcggggcggtgccgtgtgccgctcacgtccggatttccgcgctgctcgacgacgggaccgtgctgagcttcgctgaccaacggaccttcggagggtggctgcttgccgacctggtgacggtggacggcagcgtggtaccggtgccggtcgcccacctggcgcgcgacccgcttgacccgcggttcgattgtgacgctgtagttaaagtgttgcggcgcaagcattccgaactcaagcgccagctgctggatcagcgggtggtgtcgggaatcggcaacatctatgccgatgaggcgctgtggcgggccaaggtgaacggcgcccacgtcgccgccacactaaggtgccggcgtctgggagcggtcctgcatgccgccgccgacgtgatgcgcgaagcgctggcgaaaggtggcacctcgttcgactctttgtatgtcaacgtcaacggcgagtcgggctacttcgagcggtcgctggacgcttatggccgcgaaggcgaaaactgtcggcgctgcggcgcggtgatacgccgggagaggtttatgaaccgctcgtcgttctactgcccgcgatgccagccgcggccccgaaagtag

SEQ ID NO: 28623 - DNA, 4851 bp, Mycobacterium tuberculosis
gtgatttcggcgagatcggctgaggcgttgacggcgcaggcgggtcgacttatggcccacgtgcaggccaacccagggctggatccgatcgatgtggggtgctcgttggccagtcgctcggtgtttgagcaccgagcggtggtggtcggcgcaagccgtgagcaactgattgccgggctggctgggctcgcggcgggcgagccgggtgccggcgtggcggtcggtcagccagggtcggtgggcaagacggtggtcgtgtttcctgggcagggcgcgcagcgcatcgggatgggccgcgagttgtacggcgagttgcccgtgtttgcgcaggcattcgatgcggtggccgacgagttggaccggcatctgcggttgccgctgcgcgacgttatttggggtgccgatgcggatttgcttgacagcaccgaatttgctcagcccgcgttgttcgcggtggaggtggcatcgttcgcggtgttgcgggattggggtgtgcttccggacttcgtcatgggtcactccgttggagagctggcggcggcgcacgcggccggtgtgttgacgttggcggacgcggcgatgctggtggtggcgcggggccggttgatgcaggcgctgccggcaggcggtgcgatggtggcggtggctgccagtgaggacgaggtggagccgctgctgggtgagggtgtggggatcgctgcgatcaacgcgcccgaatcggtggtgatctccggtgcgcaggccgcggcaaatgcgattgcggatcggttcgccgcgcagggtcggcgggtgcaccagttggcggtctcgcatgcgtttcattcgccgttgatggagccgatgctcgaggagttcgcgcgtgtcgcggcccgggtgcaggcacgcgagccccagcttgggctggtgtcgaacgtgacgggcgagttggccggccctgatttcgggtcggcgcagtactgggtggaccacgttcgtcggccggtgcgcttcgcggacagtgcgcgtcatttgcagacccttggggcgacccacttcatcgaggccggcccgggaagtggtttgactggctcgatcgagcagtccttggccccggctgaggcgatggtggtgtcgatgctgggcaaagaccggcccgagctggcctcggcgctcggtgctgccggtcaggtgttcaccaccggtgtgccggtgcagtggtcggcggtgttcgccggctcgggtggacggcgggtgcagctgcccacgtatgcgtttcagcgacggcggttttgggagacgccgggcgcggatgggcccgccgatgcggccgggttgggtctgggcgcgaccgagcatgccttgttgggtgcggtggtcgagcggcccgattctgacgaggtggtgctgaccggccggttgtcgcttgcggatcagccgtggctggccgaccacgtggtgaacggggtggtgctgttccccggggcgggttttgtggagttggtgatccgcgccggtgatgaggtcgggtgcgcgctcatcgaagagttggtgctggccgcaccgttggtgatgcacccgggtgtcggggttcaggtgcaggtggtcgtcggggctgccgatgaatccgggcaccgtgcggtgtcggtgtattcccgcggtgatcaatcccagggttggttgctgaacgccgaaggcatgctgggggtggctgccgctgagacgccgatggatttgtccgtgtggccgcccgagggcgcggagagtgtggatatctcggacggctatgcgcagttggccgagcgcggttatgcctacggccccgcgtttcagggtctggtggcgatctggcggcgggggtcggagctgttcgccgaagttgtagcccccggcgaggccggcgtggccgtcgaccgaatggggatgcatccggcggtgttggacgcggtgctgcatgccctcgggctggccgtcgagaagacccaggcgagcaccgagacgagactgccgttttgctggcgtggggtgtcgctgcatgccggcggcgctggacgggtgcgggcccgcttcgcgtccgcgggcgcggatgcgatttccgtggacgtctgcgacgccactgggctgccggtgttgacggtgcgctcgctggttactcgcccgataaccgcagaacagctgcgcgccgccgtgaccgcggccggcggtgcgtccgatcaggggccgctggaagtggtgtggtcgccgatctcggtggtcagcggcggcgctaacgggtccgccccacctgccccggtgtcttgggcggacttttgcgccggcagtgatggtgacgccagtgtcgtggtgtgggaactcgagtctgccggtggccaagcatcctcggtggtgggctcggtgtatgcggccacccacaccgccctggaggtgttgcagtcctggctcggcgcggatcgggcggccacgttggtggtgttgacccatggtggcgtggggctggctggcgaggacatcagcgacctggccgccgccgcggtgtggggcatggcgcgttccgcgcaggccgaaaatcccggccggatcgtgttgatcgacaccgatgcggcggtggatgcctcggtgctagccggcgtcggggaaccccagctgctggtgcgcggcggcactgtgcacgccccccggctgtccccggccccggcgttgctagcgttaccggcggcagagtcggcgtggcgattggccgccggtggtggcgggaccctggaggatttggtgatccagccctgcccggaggtacaggcaccgctacaggcggggcaggtgcgcgtggcggtggcggccgtcggggtcaacttccgcgatgtggtggccgccctagggatgtatcccggccaggccccaccgctgggtgccgaaggcgccggggtggtgcttgagaccggtcccgaagtgaccgatcttgccgtcggtgacgccgtgatgggattcctgggcggggccggtccgctggcggtggtggatcagcaactggttacccgggtgccgcaaggctggtcgtttgctcaggcagccgctgtgccggtggtgttcttgacggcctggtacgggttggccgatttagccgagatcaaggcgggcgaatcggtgctgatccatgccggtaccggcggtgtgggcatggcggctgtgcagctggctcgccagtggggcgtggaggttttcgtcaccgccagccgtggcaagtgggacacgctgcgcgccatggggtttgacgacgaccatatcggcgattcccgcacatgcgagttcgaggagaagttcctggcggtcaccgagggccgcggggttgatgtggtgctcgactcgctggccggtgagttcgtggatgcgtcgctgcgcttactggtccgcggtgggcgtttcctcgagatgggcaagacggatatccgcgatgcgcaggagatcgccgctaattatcccggcgtgcagtatcgggcgttcgacctgtcggaggccggcccggcacgcatgcaggagatgttggccgaggtgcgggagctgttcgacacccgggagctgcaccggctaccggtcaccacgtgggatgtgcgctgcgccccggcggccttccggttcatgagccaggcccgccatatcggcaaggttgtcttaaccatgccctcggcgttggccgaccggcttgccgacggcacggtggtgatcaccggtgccaccggggcggttggtggggtgttggcccgccacctggttggcgcctatggggtgcgtcatctggtgttggccagtcggcggggcgatcgcgcggagggagcggccgaattggccgccgacttgacggaggccggcgccaaggtgcaggtggtggcctgtgacgtggccgatcgcgctgcggtagcggggttgtttgcccagctgtcgcgggagtacccgccggtgcgcggggtgattcatgccgccggcgtgctcgatgacgcagtgatcacctcgttgacaccggaccgcatcgatacggtgttgcgggccaaggtggacgcggcgtggaacctgcaccaggccaccagtgacctggatttgtcgatgtttgcgctgtgctcatcgatcgcggccacggtcggctcgccggggcagggcaactactcggcggcaaacgcgtttctggacgggttggccgctcaccggcaggccgcagggttggccgggatatcactggcgtggggtttgtgggaacagcctggcggcatgaccgcgcatttgagcagccgagatctggcccgcatgagccgcagcgggctggctccgatgagccctgccgaagcggtggaattgtttgacgctgcgctggccatcgatcaccctctggcggtggccacgctcttggaccgggctgcactagacgcccgggcccaggccggtgcgttgccggcgctgttcagcgggctcgcgcgccgcccacgccgacgccaaatcgacgacaccggtgacgccacctcgtcgaagtcggcgctggctcaacgcctacacgggctggccgcggacgaacaactcgagctgctagtggggctggtgtgtctgcaggcagcggcagtgctgggtaggccctccgccgaggacgtcgaccccgacaccgaattcggcgacctcggtttcgactcattaacggctgtggagttacgcaaccgcctcaaaaccgccaccggactgacgctgccacctaccgtgattttcgatcatcccactcccactgcggtcgccgagtatgtcgcccagcaaatgtctggcagccgcccaacggaatccggtgatccgacgtcgcaggttgtcgaacccgccgccgcggaagtatcggtccatgcctag

SEQ ID NO: 28624 - DNA, 828 bp, Mycobacterium tuberculosis
atggtgcagacgaaacgatacgccggcttgaccgcagctaacacaaagaaagtcgccatggccgcaccaatgttttcgatcatcatccccaccttgaacgtggctgcggtattgcctgcctgcctcgacagcatcgcccgtcagacctgcggtgacttcgagctggtactggtcgacggcggctcgacggacgaaaccctcgacatcgccaacattttcgcccccaacctcggcgagcggttgatcattcatcgcgacaccgaccagggcgtctacgacgccatgaaccgcggcgtggacctggccaccggaacgtggttgctctttctgggcgcggacgacagcctgtacgaggctgacaccctggcgcgggtggccgccttcattggcgaacacgagcccagcgatctggtatatggcgacgtgatcatgcgctcaaccaatttccgctggggtggcgccttcgacctcgaccgtctgttgttcaagcgcaacatctgccatcaggcgatcttctaccgccgcggactcttcggcaccatcggtccctacaacctccgctaccgggtcctggccgactgggacttcaatattcgctgcttttccaacccagcgctcgtcacccgctacatgcacgtggtcgttgcaagctacaacgaattcggcgggctcagcaatacgatcgtcgacaaggagtttttgaagcggctgccgatgtccacgagactcggcataaggctggtcatagttctggtgcgcaggtggccaaaggtgatcagcagggccatggtaatgcgcaccgtcatttcttggcggcgccgacgttag

SEQ ID NO: 28625 - DNA, 933 bp, Mycobacterium tuberculosis
atgggcaaagggagcatgaccgcgcacgcaacgccgaacgagccggattatccgccaccgcctggcggtccaccgccgccggccgatattggccggttactgcttcggtgccacgaccgccctggaatcatcgccgcggtgagcaccttcctggcccgggccggcgccaacatcatttctctggaccagcactccaccgcgccggagggcggaacgttcttgcagcgcgcaatctttcacctgcccggtctcacggccgccgtcgacgaactgcagcgcgacttcggcagcactgtggcggacaagttcggcatcgactaccgatttgccgaagcagccaagcctaagcgggtcgcaatcatggcatcgacagaggaccactgcttgctggacttgttgtggcgcaaccgtcgcggcgagctagaaatgtcggttgtcatggtgattgccaatcatcctgacctggccgcgcacgtacgcccgttcggtgtgccattcatacatattcccgccactcgcgacactcgtacggaagccgaacagcgtcagcttcagttgctaagcggcaatgtggatttagtagtgctggcacgctacatgcagatactcagcccggggttcttggaggcgatcggctgcccgctgatcaacattcaccattcgttccttccagccttcaccggcgcggccccgtaccagcgcgcacgagaacgcggcgtcaaactgatcggcgcgaccgcccactacgtgaccgaagttctcgacgaggggcccatcatcgaacaagacgtcgttcgtgtcgaccacacccacaccgtcgatgatctggtgcgtgtcggcgccgacgtcgaacgcgcagtgctttcccgcgccgtgctctggcactgccaagaccgcgtcatcgtgcatcacaaccagaccatcgtcttctga

SEQ ID NO: 28626 - DNA, 3384 bp, Mycobacterium tuberculosis
gtgttttccaaggtgctcgtcgccaatcgcggggagatcgcgatccgggcctttcgtgccgcctacgaactgggcgtcggaaccgtggccgtttatccgtacgaggaccgcaattcgcagcaccgtctcaaggcggacgagtcttaccagatcggcgacatcggtcacccggtgcatgcatacctgtcggtcgacgagatcgtcgcgacggcccgtcgggcgggtgccgacgctatctaccctggctacgggtttctatcggagaatccggatctggctgcggcatgcgcggcggcgggcatcagcttcgtcggtcccagcgccgaagtgcttgagctggctgggaataagtctcgcgccatcgcggcggcccgcgaagccggcttgcccgtgctgatgtcctcggcgccgtcggcctcggtcgacgaactgctgtcggttgcggccggcatgccgtttccgttgttcgtcaaggcagttgccggtggcgggggccggggtatgcgtcgtgtcggcgatatcgcggcgcttccggaggcgatcgaagccgccagccgggaagccgagtcggcgttcggggacccgacggtctatctcgagcaggcagtgatcaatccacgccacatcgaggtgcagattctggcggacaacctcggcgacgtgatccatctctatgagcgtgactgcagtgtgcagcgtcgccatcagaaggtcatcgagctggcgcccgcgccgcacctggacgccgagttgcgttacaagatgtgcgtcgatgcggtcgccttcgcccgccatatcgggtacagctgcgcgggcaccgtcgagttcctgctggacgagcgaggggagtatgtcttcatcgagatgaatccgcgggttcaggtggagcacacggtgaccgaggagattaccgacgtcgacctggtcgccagccagctgcgcattgccgccggggagacgctcgaacaattgggcctgcggcaggaggacatcgcaccgcatggcgccgcactacagtgccggatcaccaccgaggatccggccaacggcttccggccggacacgggccggatcagcgcgttgcgcaccgccggcggtgccggtgtccgcctggacggcagcaccaacctgggcgcagaaatcagcccgtacttcgactccatgctggtcaagctgacctgtcggggccgtgacctccctaccgcagtgagccgtgcgcgccgggcgatcgcggagttccggatccgcggggtatcgacgaatattccgttcctgcaagcggtcctggatgacccggacttccgagcgggccgggtcaccacgtccttcattgatgagcggccgcagctgctgaccgcgcgcgcctcggccgaccgcggcaccaagatccttaacttcctggccgatgtcaccgtcaacaacccgtatggctcgcgtccgtcaacgatctacccggacgacaagctgcccgatcttgatctgcgggccgcaccaccggccgggtccaagcagcgactagtcaagttggggccggaaggatttgctcgttggctgcgggagtcggccgcggtcggggtcaccgataccacattccgggatgctcaccagtcgttactggctacccgagtacgcaccagcggactgtcgcgggtggcaccgtatctcgcgcggaccatgccgcagctgttgtccgtggagtgttggggcggtgcgacttacgatgtggcgctgcgctttctcaaggaggatccctgggaacggctggccacactgcgtgcagcaatgcccaatatctgcttgcagatgctattgcggggccgcaataccgtgggctacacgccgtacccggaaatcgtgacgtcggcgtttgtgcaagaagcaacagccaccggtatcgacatctttcgtatcttcgacgcgctcaacaacatcgagtcgatgcgtccggcgatcgacgcagtacgcgaaacaggttctgcgatagcagaagtcgcgatgtgctacacgggcgaccttaccgatccgggtgaacagctgtacacgctggactactacctgaaactggctgagcagatcgtggacgccggcgcccatgtgctggcgatcaaggatatggctggactgttgcgcccgccggccgctcaaaggttggtcagcgccctgcgcagtcgcttcgacctgcccgttcacctgcacacccacgacacaccgggtggccagctcgccagctatgtggccgcttggcacgccggggccgatgccgtcgacggcgccgccgcgccgctggcgggaacgaccagccagcccgcgctgagctcgatcgttgctgccgctgcccacaccgagtacgacaccggcctgtcgctttcggcggtgtgcgccctggagccgtactgggaggcgttacgaaaagtgtatgcgccgttcgagtctgggttgccggggccgacggggcgggtttatcaccacgagattccgggcggccaactgtccaatctgcgccagcaagcaattgctcttggtctgggagatcgattcgaagagatcgaagaggcctacgcgggcgccgaccgagtgttgggcaggctggttaaggtcacgccaacgtccaaggtggtcggcgatctggcgctggcactggtcggcgccggtgtcagtgcagacgaattcgcctccgatccagcgcgatttggcatcccggaatcggtactcggatttctgcggggcgagctgggtgatccgcccggcgggtggcccgaaccgctgcgcactgcggcgctggccggtcgcggggcggccaggcccactgcgcaattggcggcggacgacgagattgccctatcgtcggtcggagccaagcgtcaggccaccctgaacaggctgttatttcccagtccaacaaaggaattcaatgagcaccgggaagcctacggcgacacgtcgcaattgtcggccaaccagttcttctatggtctgcgccaaggtgaagagcatcgggtgaagctggagcgtggggtggagctgttgatcgggctggaggccatttccgaacccgacgaacgcggcatgcgaacggtgatgtgcatcctcaacgggcagctgcggccggtgctagtgcgcgaccgcagcattgccagtgccgttccggccgccgagaaggccgaccgcggcaatcccggacacatcgccgcgccatttgccggagtcgtcacggtcggggtgtgcgtcggcgagcgggtcggcgccggccaaaccatcgccaccatcgaggcgatgaagatggaagccccgatcaccgccccggttgccggcaccgtggagcgggtggcggtgtcggacaccgcccaggtggagggcggagacctgttggtggtggtgagctga

SEQ ID NO: 28627 - DNA, 849 bp, Mycobacterium tuberculosis
gtgactggcgagtcgggcgccgccgccgcaccctcgattaccctcaacgacgagcatacgatgccggtgcttggcctcggcgtcgcggaattgtcggacgacgagaccgaacgtgcggtgtccgcggcgctggaaattggctgccggctgatcgacaccgcctacgcctatggcaacgaggccgcggtcggccgcgcaattgcagcctccggcgttgcccgcgaagagctgttcgtcaccaccaagctagccacccccgaccagggtttcacccgttcccaggaagcatgtagagccagtttggaccgcctcggcctcgactacgtcgacctttacctaattcactggccggccccgccggtgggcaagtatgtggacgcctggggaggcatgattcaatcccgcggagagggccatgcccgatcgatcggcgtgtccaacttcaccgcggagaacatcgaaaaccttatcgacctcacattcgtcacgccggcggtcaaccagatcgagctgcacccgctgctcaaccaggacgaactgcgcaaagctaacgcccagcacaccgtcgtcacacagtcctactgccccctggcactcggcaggctgctggacaacccaaccgtcacatcaatcgccagcgaatacgtcaagacgcccgcacaagtgctgctgcggtggaacctgcaattgggcaatgcggtggtcgtccgctcggccagacccgagcgcatcgccagcaacttcgacgtcttcgacttcgagttggcggccgaacacatggatgcattgggcgggctcaatgacggcacccgggtgcgcgaggatccactgacctacgccggcacctga

SEQ ID NO: 28628 - DNA, 714 bp, Mycobacterium tuberculosis
atgaaccgcagaacgctactgtggctgtcggcgatcgcggcgctggcgctggtggtcgcgtatcagacgctgggatcatcggcgggcaggcacgctgacgagttcgccgcccgcgctggcgtgccaaccgtgcaacccggtgccgacgtgctcgccggcatcgccgtgctacccaaacggatccaccgctacgactaccgcaggtccgcattcggtcacccctgggacgatcgcaatgacgcgccgggagggcacaacgggtgcgacacccgcgacgacatcctcgaccgggatctggtcgacaagacatatgtgtcgatcaagcggtgtccgaatgcggtggccaccggcaccctgcgcgatccgtacaccaacaccaccgttgccttccaacgcggcgccagtgttggccaatcggtccagatcgaccacatcgttccgctctcgtatgcctgggacatgggcgcctatcggtggccgaactccgagcgaatgcgcttcgccaacgatccggccaacctgctggccgtgcaggggcaggcaaatcaggacaagggcgattcgccaccggcccaatggatgccacccaacaaggccttcgcctgtcagtacgcgatgcaattcatcgccgtgctgcgcggctattcactgccagtggatcagccatcgtccgacgtactgcgtcaggccgcggccacctgcccgacgggctag

SEQ ID NO: 28629 - DNA, 1002 bp, Mycobacterium tuberculosis
gtgaccactaaagatcactcacttgcaacggagtccccgacgctgcagcagctcggcgagttcgccgtgatcgaccggctggtgcgggggcgccgacaacccgccacggtactgctcgggcccggcgacgatgccgcgctggtgtctgccggcgatggtcgcactgtggtgtcgacggacatgctggtgcaagatagtcacttccggctggactggtcgacaccgcaggacgtcggccgcaaggcgatcgcccagaatgccgccgacatcgaggcgatgggggcgcgggccaccgcgttcgtggtcggctttggagcacccgctgagacgccggcggcgcaggcgagcgcgttggtcgacggaatgtgggaggaggcggggcgcattggtgccggcatcgtcggcggcgatctggtcagctgccggcagtgggtggtgtcggtcaccgcgattggtgaccttgacggtcgtgccccggtgctgcgctccggggcgaaggccggctcggtgctggccgtcgtcggtgagctgggccgctcggctgctggctatgcgctgtggtgcaacgggattgaagacttcgccgaactgcgccgccgccatttggtgccgcagccgccctacggccacggcgcggcggccgcggctgtcggggctcaagcgatgatcgatgtctccgacgggctgctcgccgatctgcggcacatcgccgaggcatccggcgtgcgcatcgacctgtccgccgcggcgttggccgctgaccgcgacgctttgactgcggccgcaaccgctctgggcaccgacccctggccgtgggtgctaagcgggggtgaagatcatgccctggtcgcctgtttcgtcggtccggtgccggccgggtggcgcaccattggccgggttctcgacgggccggctagggtgctggtcgacggcgaggagtggactggatacgcgggctggcaatcgtttggggagccagacaatcaaggttcgctagggtga

SEQ ID NO: 28630 - DNA, 546 bp, Mycobacterium tuberculosis
gtgacaggcgagtccgacgggccgccgcgcgccgtgctgatcgccgcggcggcgctggcggcggcggtgatcggggtaatcctggttgtcgcggcgaaccgccagccgccggagcgaccggttgtcattccggccgtgcccgctccgcaggccaccggtcccggctgcaaagcactgctggcggcgctgcctcaacgactcggcgagtatcggcgcgcgcccgtcgcggagccgaccactgcgggtgccacggcctggcgaacggggccaaacagcacaccggtgattttgcgctgtggactcgaccgcccggccgagttcgtggtgggttcggccatccaagtcgtcgatcgggtgcagtggtttcaggtggccgcgcaaaacccggacgagccaggccggtccacctggtacaccgtggaccggccggtgtatgtggcgctgacactcccctcgggatcggggcccaccgcgatccaggaattgtcagacgttatcgaccacaccatccccgcggtacccatcgacccggcgccggctcgctag

SEQ ID NO: 28631 - DNA, 1122 bp, Mycobacterium tuberculosis
gtgagtgctaacgaccggcgtgatcggcgtgtccgcgttgccgtcgtgttcggcgggcgcagcaacgagcacgccatctcgtgtgtgtccgccggcagcatcctgcgcaacctggactcgcggcggttcgacgtgatcgcggtgggtatcaccccggcaggttcgtgggtgctcaccgacgccaaccccgacgccctgacgatcaccaaccgggagcttcctcaggtcaaatcaggatcgggcaccgagctggcgctgccggccgatccgcggcgtggtggccagttggtgtcgctgccgcccggggccggcgaggttctggagtcggtcgacgtggtgttcccggtactgcacggcccgtacggcgaggacggcacgatccagggactgctcgaactcgccggggtgccctacgtgggcgccggtgtgctggccagtgccgtcggcatggacaaggagttcaccaagaagctgctcgccgccgatggacttccggtgggtgcgtacgcggtgctgcgtccgccgcggtcgacactgcaccgccaggagtgcgaacggctgggcttaccggtgttcgtcaaacccgcccgaggcggctcgtcgatcggtgttagccgggtgtcgagttgggatcaactgcccgccgcggtcgcgcgggcccgccggcatgaccctaaggtcatcgtcgaggccgcgatcagcggccgcgagctggaatgcggtgtgctcgaaatgccggacggcacactggaagccagcacgctgggggagatccgggtggccggggtgcggggacgcgaggactctttctacgacttcgcaaccaagtatctcgacgacgcagccgaattggacgtgcccgccaaggtcgatgaccaggtcgcagaggcgattcgtcagctggcgatccgggcgttcgcggctatcgactgccggggtctggccagggtggacttcttcctcaccgacgacggtccggtgatcaacgagatcaacacgatgccgggattcaccacgatctcgatgtacccgcggatgtgggcggccagcggtgtcgactatccgaccctgctggcgacgatgatcgagacgacattggcccgcggcgtgggcctgcactag

SEQ ID NO: 28632 - DNA, 1005 bp, Mycobacterium tuberculosis
atggccggaatagcaagcaccgtcgcggtgatgggcgccggtgcatggggcacggccctggctaaggtgctggccgacgcgggcggagaggtcacgctgtgggcgcggcgagctgaggtggccgatcagatcaataccacccgatataaccccgactatctgcccggtgcgctgttaccaccgagcattcatgccaccgcagatgccgaggaggcacttgggggcgcatccacggtgctgttgggagtgcccgcgcagaccatgcgggccaatctcgagcggtgggctcccctgttgcccgagggtgcgaccttggtcagtctggccaagggcatcgagttgggcaccctgatgcggatgagccaggtcatcatctcggtgaccggtgccgagccgccgcaggtcgcggtgatctctggacccaacctggccagcgagatcgccgaatgccagcccgccgctaccgtcgtcgcgtgcagcgactccggccgcgcggttgccttgcagcgcgcgctgaacagcgggtacttccgcccctacaccaacgccgatgtcgtcggcaccgagatcggcggggcgtgcaagaacatcatcgcgcttgcgtgcggaatggcggtgggcatcgggctgggcgaaaacaccgcggccgcgatcatcacccggggcctggcggagatcatccggctcgggacggcgctcggcgccaacggcgcgacgttggccggtctggcaggggtcggtgatctggtggccacctgcacctcaccgcgttcgcgcaaccgatcgtttggcgaacgcctgggccggggcgaaacgttgcagtcggcgggcaaggcttgtcatgtcgtcgaaggcgtgacgtcgtgcgaatccgtgctcgcgctggcgtccagctacgacgtcgaaatgccactcaccgacgcggtgcatcgggtctgtcataaagggctgtcggtggacgaggcgataacgctgctgctgggtcgccgcaccaagcccgaatga

SEQ ID NO: 28633 - DNA, 645 bp, Mycobacterium tuberculosis
atgaacaaagcagagctcattgacgtgctcacacagaaattgggctcggaccgtcggcaggcgaccgccgccgtcgagaatgtcgttgacacgattgtgcgtgcggtacacaaaggcgacagcgtcaccattaccgggttcggtgtgttcgaacagcgtcgccgcgcggctcgagtggcccgcaatccgcgtaccggcgagacagtaaaggtgaagccgacgtcggtgccggcgttccgcccgggcgcgcaattcaaagcggttgtgtctggcgcgcagcgtctcccggcagaaggacccgctgttaagcgtggtgtgggggccagtgcagccaagaaggtagcgaagaaggcacctgccaagaaggcgacaaaggccgccaagaaggcggcgaccaaggcgcccgccaggaaggcggcgaccaaggcgcccgccaagaaagcggcgaccaaggcgcccgccaagaaagctgtcaaggccacgaagtcacccgccaagaaggtgaccaaggcggtgaagaagaccgcggtcaaggcatcggtgcgtaaggcggcgaccaaggcgccggcaaagaaggcagcggccaagcggccggctaccaaggctcccgccaagaaggcaaccgctcggcggggtcgcaaatag

SEQ ID NO: 28634 - DNA, 1422 bp, Mycobacterium tuberculosis
atggccttgcagaccggcgagccacgcacactggccgagaagatttgggacgaccacattgtggtatcaggcgggggctgtgcgcccgacttgatctacatcgatctgcatctggtgcatgaggtcaccagcccgcaggcgttcgacggcctgcgcctggccgggcgccgggtgcggcggcccgagctcaccctcgccaccgaggatcacaacgtgcccaccgtcgacatcgaccagccgatcgccgacccggtgtcacgcacccaggtggagacgttgcgccgaaactgcgccgaattcggaatccggctgcattcaatgggcgatatcgagcagggcatcgtgcacgtcgtcggaccgcaattgggtctcacccagccgggaatgacgatcgtctgtggcgatagccacacctcaacccacggcgcattcggcgcgttggcgatgggcatcggtacgtcggaggtcgagcacgtgctggccacccagacgctgccgctgcggccgttcaagaccatggcggtcaacgtcgatgggcggctgcccgacggtgtgtcggccaaggacatcatcctggcgttgatcgccaagatcggcaccggcggcggccaggggcatgtcatcgaataccggggcagcgccatcgaatcgctgtccatggaaggccggatgacgatctgcaacatgagcatcgaagccggcgctcgtgcgggcatggtggctccggacgaaaccacctacgcgttcttgcgtggtcgtccgcacgcacccaccggtgcccagtgggacaccgcactcgtctactggcaacggcttcgcaccgacgtcggcgccgttttcgacaccgaggtgtatctcgacgccgcgtcgttgagcccgtttgtcacctggggcaccaacccaggccaaggggtaccgctggcggccgcggtgccagatccgcaactgatgaccgacgacgccgagcggcaggccgccgagaaagcattggcgtacatggaccttcgacccggaaccgcgatgcgcgacatcgcggtcgacgccgtgttcgtcgggtcgtgtaccaacggtcgcattgaagatctgcgggtggtcgccgaagtgctgcgtggccgcaaggtggccgacggcgtgcggatgctgatcgttccgggctcaatgcgggtacgcgcgcaggccgaggccgaagggctcggtgagatcttcaccgacgcgggcgcgcaatggcggcaggcgggatgctcgatgtgtctgggcatgaatcccgatcagctggcgtccggggagcgctgcgccgcgacgtccaaccgcaacttcgaagggcggcagggcgcgggcggccgcacacatttggtgtccccagcagtggcggccgccaccgcggttcgcggcacactgtccagcccggccgatttgaattga

SEQ ID NO: 28635 - DNA, 1473 bp, Mycobacterium tuberculosis
gtgaccgccacggaaacagtccgggtccgattctgcccttcacccaccggaactccgcacgtcggtctggtccgcaccgcgctgttcaactgggcctacgcccggcacaccggtggcaccttcgtgttccgcatcgaggacaccgacgcccaacgcgacagcgaggaaagctatctggcgctgctggacgcgctgcgctggcttggcctggattgggatgaggggcccgaggtgggtgggccgtacgggccgtaccggcagtcgcagcgcgccgaaatctaccgtgacgtgctcgcccgactgctcgccgcgggcgaggcctaccacgctttctccacacccgaggaagtggaggcccgtcatgtcgcggccgggcgcaatcccaagctgggttacgacaatttcgatcgtcacttgaccgacgcgcagcgtgcggcgtacctggcggagggccgccagccggtggtgcggctgcggatgcccgatgacgacctcgcttggaatgacctggtgcgcgggcccgtgacgttcgcggctggctccgtacccgacttcgcgttgacccgagccagcggtgatccgttatacaccttggtcaacccgtgcgacgacgcgctgatgaagatcacccatgtgttgcgtggcgaggacctgctgccgtcgacgccgcgccagctggcgctacatcaggcgttgatcaggatcggggtagctgagcggattccgaaattcgcgcacctcccaacggtcttgggggagggcaccaagaagctctcgaagcgcgatccgcagtcgaacctgtttgcccaccgcgaccgcgggttcatccccgaaggcctgctgaactacctcgcgttgctcggctggtccatagccgacgaccacgacctgttcggtctcgacgagatggtggccgcgttcgacgttgccgacgtcaactccagcccggcccggttcgaccagaagaaggccgacgcgctgaacgccgagcacatccggatgctcgacgtgggcgacttcacggtcaggctgcgcgaccatctggatacccacggccatcacatcgcgttggatgaggcggcattcgccgccgccgccgagttggtgcagacccgcatcgtggtgctcggtgacgcgtgggagctgttgaagttcttcaacgacgatcagtatgtgatcgatcccaaggccgcggccaaggagctaggcccagacggggccgcggtgctcgacgcggccctggccgcgctgacaagtgtgacggactggacggcacccctgatcgaggcggcccttaaggacgccttgatcgaaggtttggcgctcaaaccccgcaaggcgttcagccccatccgggtggccgccaccggcacgaccgtcagcccgccgttgtttgaatcgctggagctgctcggtcgtgaccgcagcatgcagcggctgcgcgcggcgcgccagctggtcgggcacgcgtga

SEQ ID NO: 28636 - DNA, 720 bp, Mycobacterium tuberculosis
atgacggcccgcgagatcgccgagcacccgttcggtacgccgaccttcaccggacgctcctggccgctggccgacgttcgcctgctggctccgatactggcgagcaaggtggtctgtgtcgggaagaactatgccgatcacatcgccgaaatgggtggccggccgccggcagacccggtgatattcctcaagcccaacaccgcgatcatcggtccgaatacgccaattcgattgcccgccaacgcatcaccggtgcacttcgagggtgagctggcgatcgtgatcggccgggcgtgcaaggatgtcccggccgcccaggccgtcgacaatatcctcggctacaccatcggcaatgacgtgtcggcccgcgatcagcagcaatccgacggtcagtggacgcgagccaaggggcacgacaccttctgcccggtcgggccgtggatcgtcaccgacctcgctccctttgacccggccgatctcgagctgcgcaccgtcgtcaacggcgacgtcaaacagcacgcccgcacctcgctgatgatccatgacatcggcgccatcgtggaatggatctcggcgataatgaccttgctgccaggtgatctcatcctcaccggcacacccgcgggagtcggtcccatcgaggacggcgacaccgtctcgatcaccatcgagggaatcggcaccctcaccaatcccgtagtccgcaaaggaaagccgtga

SEQ ID NO: 28637 - DNA, 1002 bp, Mycobacterium tuberculosis
atgttctacgacgacgacgcagacctgtcgatcattcagggccgcaaggttggtgtgatcggctacggcagccaggggcacgcgcactcgctaagcctgcgcgactcgggtgtgcaggtgcgcgtcgggctgaagcagggttcgcggtcgcggcccaaggtagaagagcagggcctggacgtcgacactcccgccgaggtcgccaaatgggccgatgtggtcatggtgttggcccccgacaccgcccaggccgagatcttcgcaggagacatcgaacccaacctcaagcccggtgacgcgctgttcttcggtcacggactcaacgttcacttcggcttgatcaagccgcccgccgacgtcgccgtcgcgatggtcgccccgaagggaccgggtcatttggtgcgccgccagttcgtcgacggcaagggtgtgccgtgtttggttgcggtagagcaggatccgcgaggcgacggcttggcgctggcgctgtcgtatgccaaagcgatcggcggcacccgggccggcgtcatcaagacgacgttcaaagacgagaccgaaaccgacctgttcggtgagcaaacggtgttgtgcggcggcaccgaggaattggtcaaggccgggttcgaggtcatggtcgaagccggctaccccgcggaattggcctacttcgaggtgctgcacgagctgaagctgatcgtcgacttgatgtacgagggtggcctggcgcggatgtactactcggtgtcggacaccgcggaattcggcggctacctctcaggcccgcgcgtcatcgatgccggcaccaaggagcggatgcgcgacatcctgcgggagatccaggacggtagctttgtccacaagctggtcgccgacgtcgagggcggcaacaaacagctcgaagagttgcgccggcaaaacgccgagcaccccatcgaggtcgtcggcaagaaactccgcgacctgatgagctgggtggaccgcccgatcaccgagacggcctag

SEQ ID NO: 28638 - DNA, 507 bp, Mycobacterium tuberculosis
atgagcccgaagacgcacacgttgtcggtgttggtcgaagacaagcccggcgtgctggcgcgggtggcggcgctgttctcccggcgcggtttcaacatcgagtcgttggcggtgggtgccaccgagtgcaaggacaggtcacggatgaccatcgtggtctccgccgaggacactccgctcgagcagatcaccaagcagctcaacaagctgatcaacgtcatcaagatcgtcgagcaggacgacgagcactcggtgtcacgggaattggcgctcatcaaggtccaagccgacgccggcagccgcagccaagtgatcgaagcggtgaatctgtttcgcgccaacgtgattgacgtatccccggagtcattgaccgtcgaggccaccggtaaccgcggcaagttagaggccctgctgcgggtgttggagccgttcggtattcgcgaaatcgcccaatccggaatggtgtcgctgtcccgcggtccgcgcggcatcggcaccgccaagtag

SEQ ID NO: 28639 - DNA, 1857 bp, Mycobacterium tuberculosis
gtgagcgcaccaaccaagccacactcaccgacattcaagccagagccacacagcgcggcgaatgagccaaagcacccggcggctcgtccgaaacatgttgcactgcagcagcttaccggtgcacaggcggtcatccggtcgctggaggaactcggcgtcgacgtcattttcgggattccgggcggtgcggtgctgccggtgtatgacccgctgttcgactcgaaaaagctgcgccacgtgctggtccgccacgaacagggcgccgggcatgccgccagcggctacgcgcacgtcaccggccgggtgggcgtgtgcatggcaacgtcgggtcccggagcgaccaacctggtgaccccgctggccgacgcgcagatggactcgatcccggtggtcgctatcaccggtcaggtcgggcgggggctgatcggcaccgacgccttccaggaggccgacatctcgggcatcacgatgccgatcaccaagcacaactttctggtccgctccggtgacgacattccgcgggtgctggccgaggccttccacatcgcggcctccggccgtccgggcgcggtgctggtcgacatccccaaggacgtgctgcagggccagtgcacgttcagctggccgccgcggatggagctgcccggctacaagcccaacaccaaaccgcacagccggcaggtccgcgaggccgccaagctgatcgcggccgcgcgcaagccggtgctgtatgtcggcggcggcgtcatccgcggtgaggccaccgagcagctccgggagctggccgagctgaccggcatcccggtggtcaccacgctgatggcccgcggcgcgtttcccgacagccaccggcaaaacctcggcatgcccggcatgcacggcacggtggccgccgtggcggcgctgcagcgcagcgacctgctgatcgcgctgggtacccgcttcgacgaccgggtgaccggcaagctcgactcgttcgcgccggaagccaaggtcatccacgccgacatcgacccggccgagatcggcaagaaccgccacgccgacgtgcccatcgtcggtgacgtcaaggccgtcatcaccgaactgatcgcgatgctgcgccaccaccacattcccggcaccatcgagatggccgactggtgggcatacctgaacggtgtgcgcaagacctatccgctgagctatgggccgcagagcgacggcagcctgagcccggaatacgtgatcgaaaagctcggcgagatcgccgggccggacgccgtcttcgtcgccggcgtcggccagcaccagatgtgggccgcgcagttcatcagatacgaaaagccgcgcagctggctgaactccggcggtctgggcaccatggggtttgccatcccggcggccatgggcgccaagatcgccctccccggcaccgaggtctgggcgatcgacggcgacggttgcttccagatgaccaaccaggagctggccacctgcgcggtcgagggcataccggtcaaggtggcgctgatcaacaacggcaacctgggcatggtgcggcagtggcagagcctgttctatgccgagcggtactcgcagaccgacctggccactcattcgcaccgcatccccgacttcgtgaaactggccgaggccttggggtgtgtggggttgcggtgcgagcgggaagaggacgtcgtcgacgtcatcaaccaggcgcgggcgatcaacgactgcccggtggtgatcgacttcatcgtcggtgccgacgcgcaagtgtggccgatggtggccgcgggcaccagcaatgacgagatccaggccgcccgcggcattcgccccctgttcgacgacatcaccgaaggccacgcctga

SEQ ID NO: 28640 - DNA, 1530 bp, Mycobacterium tuberculosis
atgactgttgctgccggggcagccaaggccgcaggggctgaactgctcgattacgacgaggtcgtcgcgcgcttccagccggtactcggcctcgaggtgcacgtcgagctgtccactgcgaccaagatgttctgtggctgcaccaccacattcggcggcgagccaaacacccaggtgtgtccggtgtgtctgggcttgcccggttcgctgccggtgctcaaccgggccgccgtggagtcggcgatccgcatcgggctggcgctgaactgcgagatcgtaccctggtgtcgcttcgcccggaagaactacttctaccccgacatgcccaagaactaccagatctcacagtacgacgagccgatcgccatcaacggctacctggacgcgcctttggaagacggcaccacttggcgggtggagattgagcgagctcacatggaagaagacaccggcaagctcacccacatcggcagcgagacgggccggatccacggtgccaccggttcgctgatcgactacaaccgtgccggcgtgccgctcatcgagatcgtcaccaaacccatcgtgggcgccggtgcccgggcgccgcagatcgcccggtcctatgtgacggcgttgcgggatctgctgcgcgcattagatgtatctgatgtccggatggaccagggttcgatgcgctgtgacgccaacgtgtcgctgaagccggccgggacgaccgaattcggcacccggaccgagaccaagaacgtcaactcgctgaagagcgtcgaagtcgccgtccgctacgaaatgcagcgccagggcgctattttggcgtctggtggtcggatcacccaggaaaccagacactttcacgaggccggttacaccagcgcgggccgcaccaaggagaccgccgaggactatcggtacttcccggagccggatttggagcctgtcgcgcccagtcgcgagctggtcgagcgactacgccagacgatccccgaattgccgtggttgagccgcaggaggattcagcaggagtggggcgtttccgacgaggtgatgcgcgatctggtcaacgccggcgccgtcgaattggttgctgccaccgtcgagcacggcgcgtccagcgaggcggcgcgcgcctggtggggaaacttcctggcgcaaaaggccaacgaggccggcatcgggctggacgaactggccatcactcctgcccaggtcgcagccgtggtggcattggtcgatgagggcaagctgtccaacagcttggcccgccaagtcgtggagggtgtgctggccggtgaaggtgagcccgaacaggtgatgactgcgagagggttggcgttggtccgcgacgactcgttgacccaggccgcggtcgacgaggccctggccgcaaatcctgatgtggcggacaagattcgcggcggcaaggtggccgcggccggcgcgattgtcggtgcggtgatgaaggcgacccgcggacaggccgacgcggcccgagtgcgcgaactcgttctagaggcctgcgggcagggttag

SEQ ID NO: 28641 - DNA, 1032 bp, Mycobacterium tuberculosis
atgcggattggagttcttaccggaggcggcgactgtcccggccttaacgccgtcatccgtgcggtggtgcgtacctgccacgcccgatacggctcgtcggtggtcggatttcagaacggctttcgcgggctgctggagaaccgccgtgttcaactgcacaacgacgaccgcaatgaccggctgctggccaagggcggcacgatgctgggcacggcccgggtgcaccccgacaaactgcgggcggggctgccccaaatcatgcagaccttggacgacaacgggatcgacgtcctgatcccgatcggcggtgagggtacgctgaccgccgcgagttggctctccgaagagaatgtgccggtggtcggggtgccaaagacgatcgacaacgacatcgactgcaccgatgtgaccttcggccacgacaccgcgttgaccgtggccaccgaggccatcgaccggctgcacagcaccgccgaatcccacgagcgggtgatgctggtggaggtgatgggtaggcatgccggctggatcgcgctgaacgccgggctggcctccggtgctcacatgaccctgattcctgagcagccgttcgacatcgaagaggtgtgccgactggtcaaaggccgtttccagcgcggggactcgcatttcatctgcgtggtcgccgaaggcgccaaaccggctccggggacgatcatgctgcgcgagggtggtctcgacgagttcgggcacgagcgtttcacaggtgtagcggcgcagctggcggtcgaggtcgagaagcgcatcaacaaggatgtccgggtgacggtgttgggccacatccagcggggtggtactccgaccgcctacgaccgagtgctggccacccgattcggggtgaacgccgccgacgccgcgcatgcgggcgagtacggccagatggtgacgttgcgcggccaggacatcggtcgggttccgctggcggatgcggttcgcaaactcaaactggtgccgcagagccgttacgacgacgccgccgccttcttcggttga

SEQ ID NO: 28642 - DNA, 1485 bp, Mycobacterium tuberculosis
gtgacggacatcatccgatccgacgccgcgacgctggccgccaagatcgccatcaaggaggtgtcgtcggccgagatcacccgggcctgcctggatcagatcgaggcgaccgacgagacgtaccacgccttcctgcatgtggcggccgatgaggcgctggcggcggcggccgccatcgacaagcaggtggccgctggagaacccttgccgtcggcgctggccggggtgccgctggcgctcaaggacgtcttcaccaccagcgacatgcccaccacctgcgggtcaaaaatcctggagggatggcgatctccctacgacgccacgctgaccgcgcggttgcgcgccgcggggatcccgatcctgggcaagaccaacatggacgagttcgcgatgggctcgtcgacggagaactccgcttacggtcccacccgcaacccgtggaatctcgaccgggtacccggcggttccggtggcggcagcgcggcggcgctggccgcgttccaggcgccgctggccatcggatccgacaccggggggtcgatccgccagccggccgcgctgaccgcgaccgtcggcgtcaaacccacctacggcacggtgtcgcgctatgggctggtggcctgcgcgtcctcgctggatcagggcggcccgtgtgcgcgcaccgtcttggacaccgcgctgttgcatcaggtgatcgccggccacgacccgcgcgactccacgtcggtcgacgccgaggtgcccgacgtggtgggcgccgctagggccggcgcggtcggggatctgcgtggcgtgcgggtcggcgtggttcgacagctgcacggcggcgagggctaccagccgggcgtgctggcctccttcgaggctgccgtggagcagctaaccgcgctgggcgctgaggtcagcgaggtcgactgcccgcacttcgaccatgccctggccgcctattacctgattctgccctcggaggtgtcgagcaatctggcgcgcttcgacgcgatgcgctacgggctgcgggtcggcgacgacggcacccgcagcgccgaggaggtgatggcgatgacccgggccgccggtttcgggcccgaggtcaagcggcgcatcatgatcggcacctacgcgttgtcggccggctactacgacgcctattacaaccaggcgcagaaggtgcgcacgctgatcgcccgcgacctcgacgcggcgtatcggtccgtcgacgtgctggtgtcgcccacgaccccgaccaccgcgttccggatgggtgagaaggtggacgatccgctggcgatgtacttgttcgacctgtgcacgctgccgctgaacttggccggccactgcggcatgtctgtgccgtcggggctctccccggacgacgggttgccggttggcctacagatcatggcgccggcattggccgacgaccggctctaccgggtgggggcggcttatgaggccgcccgcggcccgctactgagcgccatttag

SEQ ID NO: 28643 - DNA, 300 bp, Mycobacterium tuberculosis
gtgtcccagatctcccgcgacgaggttgcccacctcgccaggcttgcccggctggcattgaccgaaaccgagctggacagtttcgccggccaactcgacgccatcctgacccacgtcagccagatccaggccgtcgacgtcaccggtgtgcaggccaccgacaatccgctcaaggacgtcaacgtcacccgcccggacgagaccgtgccgtgcctgacccagcgtcaggtgctcgaccaggcgcccgatgccgtcgacggccgcttcgccgtcccgcagatcctgggggatgaacagtga

SEQ ID NO: 28644 - DNA, 2076 bp, Mycobacterium tuberculosis
gtgagctccccagacgccgatcagaccgctcccgaggtgttgcggcagtggcaggcactggccgaggaggtgcgtgagcaccagttccgttattacgtgcgggacgcgccgatcatcagcgacgcggaattcgacgagctgctgcgccgtctggaagccctcgaggagcagcatcccgagctgcgcacgcccgattcgccgacccagctggtcggcggtgccggcttcgccacggatttcgagcccgtcgaccatctcgaacgaatgctcagcctcgacaacgcgttcaccgccgacgaactcgccgcctgggccggccgcatccatgccgaggtcggagacgccgcacattacctgtgtgagctcaagatcgacggcgtcgcgctgtctttggtctaccgcgagggacggctgacccgggcctccacccgcggcgacgggcgcaccggcgaggacgtcaccctgaacgcccggaccatcgccgacgttcccgaacggctcacccccggcgacgactacccggtgcccgaggtcctcgaggtccgcggcgaggtcttcttccggctggacgacttccaggcgctcaacgccagcctcgtcgaggagggcaaggcgccgttcgccaacccccgcaacagcgcggcgggatcgctgcgccagaaagacccggcggtcaccgcgcgccgccggctgcggatgatctgccacgggctgggccacgtggagggctttcgcccggccaccctgcatcaggcatacctggcgttgcgggcatggggactgccggtttccgaacacaccaccctggcaaccgacctggccggtgtgcgcgagcgcatcgactactggggcgagcaccgccacgaggtggaccacgaaatcgacggcgtggtggtcaaagtcgacgaggtggcgttgcagcgcaggctgggttccacgtcgcgggcgccgcgctgggccatcgcctacaagtacccgcccgaggaagcgcagaccaagctgctcgacatccgggtgaacgtcggccgcaccgggcggatcacgccgtttgcgttcatgacgccggtgaaggtggccgggtcgacggtgggacaggccaccctgcacaacgcctcggagatcaagcgcaagggcgtgctgatcggcgacaccgtggtgatccgcaaggccggcgacgtgatccccgaggtgctgggacccgtcgtcgaactgcgcgatggctccgaacgcgaattcatcatgcccaccacctgcccggagtgcggttcgccgttggcgccggagaaggaaggcgacgccgacatccgttgccccaacgcccgcggctgcccggggcaactgcgggagcgggttttccacgtcgccagccgcaacggcctagacatcgaggtgctcggttacgaggcgggtgtggcgctcttgcaggcgaaggtgatcgccgacgagggcgagctgttcgcgctgaccgagcgggacttgctgcgcaccgacctgttccgaaccaaggcaggcgaactgtcggccaacggcaaacggctgctggtcaacctcgacaaggccaaggcggcaccgctgtggcgggtgctggtggcgctgtccatccgccatgtcgggccgacggcggcccgcgccctggccaccgagttcggcagccttgacgccatcgccgcggcgtccaccgaccagctggccgccgtcgagggggtggggccgaccattgccgccgcggtcaccgagtggttcgccgtcgactggcaccgcgagatcgtcgacaagtggcgggccgccggggtgcgaatggtcgacgagcgtgacgagagtgtgccacgcacgctggccgggctgaccatcgtggtcaccggctcgctgaccggtttctcccgcgacgacgccaaggaggcgatcgtggcccgcggcggcaaggccgccggctcggtgtcgaagaagaccaactatgtcgtcgccggagactcgccgggatccaaatacgacaaggcggtggagttgggggtgccgattctggacgaggatgggttccggagactgctggccgacggacccgcgtcacgaacgtaa

SEQ ID NO: 28645 - DNA, 1305 bp, Mycobacterium tuberculosis
gtgacggcgccggtgtggttggcgtcgccgccggaggtgcattcggcgctgctaagtgctggtccggggccgggttcgttgcaggcggccgcggcggggtggagcgcgttaagcgccgagtacgccgctgtggcgcaagagttgagcgtggtggtggccgcggtgggggccggggtgtggcagggtcccagtgctgagttgtttgtggccgcctatgtgccgtatgtggcgtggttggtgcaggccagtgcggatagcgcggcggcggccggtgagcatgaggccgcggcggctggctatgtttgtgcgttggcggagatgccgacgttgccggagttggcggccaaccacctcacgcatgcggtgttggtggcgacgaatttctttgggatcaacacgatcccgatcgcgctcaacgaggccgactatgtgcggatgtgggtccaggcggccaccgtgatgagcgcctatgaggcggtggtgggtgccgcgctggtggccacaccacacaccggcccggcaccggtcatcgtcaaacccggcgccaatgaagccagcaacgccgtggccgccgcaaccataaccccattcccatggcacgaaattgtacagtttttagaagaaacgttcgcagcatatgaccagtatctgtccgctttgctttccgaactccctgcggtggcttgggtttggttccagctctttgtggatatcctgggtttcaacattattgggttcattattacgttggcatccaatgctcaactattgacagagttcgctatcaatgcttcttatgttgcggtcggattattgtatgccattgcgggcgttatagacatagttgtcgagtgggttattgggaatctgtttggtgttgttccccttttgggggggccgttgttgggggcgttggccgctgctgtggttccgggtgtagctgggttggccggggtggcgggattggccgctctgccggcggtgggtgcggctgctggcgcgccggcggcgttggtgggcagtgtggcgccggtgtcgggtggtgtggtgtcgccgcaggcgcggttggtgtcggcggtggagccggctcccgcgagcacgtcggtgtcggtgctggcttctgatcggggtgctggggcgttggggtttgttgggacggctggcaaggagtcggttgggcagccggcggggttgacggtgttggccgatgagtttggtgatggtgcgccggtgccgatgctgccgggcagctgggggccggatttggtcggtgtggccggtgatggggggttggtgtcagtttga

SEQ ID NO: 28646 - DNA, 1104 bp, Mycobacterium tuberculosis
atgaaagttctcgccgcgatgagcggtggcgtcgactcgtctgttgctgccgcccgcatggtcgatgccggacacgaggtggtcggagtgcacatggcgctatcgaccgcgcccggcacgctgcgcaccggctcgcggggctgttgttccaaagaggacgctgcagacgcgcgccgcgtcgccgatgtgctcggaatcccgttttatgtttgggatttcgcagagaagttcaaagaggacgtgatcaacgacttcgtgtcgtcgtatgcccgcggggaaactccgaacccttgcgtgcggtgcaatcagcagatcaagttcgctgctctgtccgccagggctgtggcgttgggtttcgatacggtggccaccggccactacgcccggctgtcgggtgggcggctgcgccgcgccgtcgaccgggacaaggatcagtcttatgtgcttgccgtgctcactgcgcagcagctgcgccacgccgcgttcccgatcggcgacacgccgaagcggcagatccgtgccgaggcggcccgccgcggcctggcggtcgccaacaagccggatagccacgacatctgcttcataccgtccgggaacaccaaggcttttttgggtgagcgcatcggggttcgccgtggtgtggtggttgacgcggatggtgtggtgctggcttcccatgatggggtgcacgggttcaccatcgggcagcgtagaggcctgggcatcgccgggccgggcccgaatggtcgtccgcgctatgtcacggcgatcgacgccgacaccgccaccgttcacgtaggtgacgtgaccgaccttgatgtgcaaacgctgactgggcgcgctcccgtcttcaccgccggagccgcgccgtcaggacccgttgactgcgtggtccaagtgcgtgcgcacggtgaaaccgtcagtgcggtagcggaattgatcggcgatgcgcttttcgtgcagttgcatgccccgctgcgcggcgtggcgcgcggccagacgctggtgctctaccgacctgacccagccggtgacgaggtgctcggcagcgcgaccatcgccggcgcttcagggttgtcgactggcggcaaccccggggcttga

SEQ ID NO: 28647 - DNA, 903 bp, Mycobacterium tuberculosis
gtgaacgtcctcagtttgggctcgtcatcgggtgtggtgtggggccgggtgccgatcaccgcccccgcgggggcggccaccggcgtcacctcgcgcgccgatgcgcattctcagatgcgccgatacgcccaaacaggtccgacagctaagctaagctctgcgccaatgacaaccatgtggggtgctccgcttcaccgcaggtggcgaggatcgcggctgcgcgacccacgtcaggccaagttcctcacgctggcatcgctgaaatgggtgcttgccaaccgcgcctacactccgtggtacctggtgcgctactggcggctgttgaggttcaagctggccaacccgcacatcatcacccgcggcatggtgtttctcggcaagggtgtggagatccacgcgacaccggaactagcgcaactggagatcggccgctgggtgcacatcggggacaagaacacgatccgtgcccacgagggctcgctgcggttcggcgacaaggtggtgctgggccgggacaacgtcatcaacacctatctcgacatcgagatcggggactcggtgctaatggccgactggtgctatatctgcgatttcgaccaccggatggacgacatcacgctgccgatcaaagaccagggcatcatcaagagtccggtgcggatcgggcccgacacctggatcggcgtgaaggtgagcgtgctgcgcggcaccaccatcggacggggctgcgtgctcggctcgcacgcggtggtccgcggcgcaattcccgactattcgatcgcggtcggggcgccggccaaggtggtcaagaaccgccagctgtcctgggaggcatcggccgcgcagcgcgctgagctagccgctgccttggccgacatcgaacgcaagaaggcggcccgctag

SEQ ID NO: 28648 - DNA, 1722 bp, Mycobacterium tuberculosis
ttgacagccgaagcgcccccgctgggagaactcgaagccattcgtccttacccggcccgcaccggtcccaaggggagcctggtctacaagctgatcaccaccaccgatcacaagatgatcggcatcatgtactgcgtcgcgtgcataagctttttcttcatcggtggcctgctggcgttgttgatgcggaccgagctggccgcacccggtctgcagttcttgtcgaatgagcagttcaaccagttgttcaccatgcacggcacgatcatgctgctgttctatgccacgccgattgtgtttggtttcgccaacctggtgctgccgctgcagatcggcgcacccgacgtggccttcccccggctgaacgccttttcgttctggctgttcgtatttggcgccaccatcggggcagccggcttcatcactccgggcggggccgcggacttcgggtggaccgcctacacgccgctgaccgacgccattcactcgcccggcgccgggggcgacctgtggatcatgggtttgatcgttgcgggtctgggcacgatcctgggcgcggtcaacatgatcaccaccgtggtgtgcatgcgcgcacccgggatgacgatgttccggatgccgatcttcacctggaacatcatggtgacgtccatcctgatattgattgcgttcccgctgctcacggcggcattgttcgggctggccgccgaccggcatctgggagctcacatctatgacgccgccaatggcggagtcctgctgtggcagcacctgttttggttcttcggccaccccgaggtctacatcatcgcgctgccgtttttcgggatcgtctcggagatcttcccggtgttttcccgcaagccgatcttcggttacaccacgctggtttatgcgacgctgtcgatcgccgcgttgtcggtcgcggtatgggcgcaccacatgttcgcgaccggagccgtcctgcttcccttcttctctttcatgacgtatctgatcgcggtgccgaccgggatcaagtttttcaactggatcggcaccatgtggaaggggcaattgacctttgaaaccccgatgttgttttcggtgggcttcatggtcaccttcttgctgggcggactcaccggtgtgctgctggccagcccgccgctggacttccacgtcaccgatagctatttcgtggttgcacactttcactacgtgctgttcggcacgatcgtgttcgccaccttcgccggcatctatttctggttccccaagatgaccggccggctgctcgacgagcggttgggcaaactgcacttctggttgacgttcatcggttttcacaccacgttcctggtgcagcactggttgggcgacgagggtatgccgcgtcgctacgccgactacctacccaccgacggcttccagggtctcaacgtcgtctcgacgatcggggccttcatcctgggtgcgtcgatgttcccgttcgtgtggaacgtcttcaagagctggcgctacggcgaggtggtcaccgtcgacgacccgtgggggtacgggaattcgctggagtgggcgacaagttgtccgccgccgcggcacaacttcaccgagctgcctcgcatccgctccgagcgtcccgcgttcgaactgcactacccgcatatggtggaacgccttcgcgccgaggcccacgtcgggcgtcatcatgacgagcccgccatggtgacttcgagctga

SEQ ID NO: 28649 - DNA, 1041 bp, Mycobacterium tuberculosis
atgagcactgttgccgcctacgccgccatgtcggcgaccgaacccctgaccaagaccacgatcacccgtcgcgacccgggcccgcacgacgtggcgatcgacatcaagttcgccggaatctgtcactcggacatccataccgtcaaagccgagtggggccaaccgaattaccctgtggtccctggccacgagatcgccggcgtggtgaccgccgtgggctcggaggtgaccaagtaccggcagggcgaccgcgttggggttggctgtttcgtggactcgtgccgcgagtgcaacagttgcacgcgcggcatcgaacagtactgcaagccgggcgcaaacttcacctacaactcgatcggcaaagacggccagccaacccagggcggctacagcgaagcgatcgtcgtcgacgaaaactacgtgttgcgcatacccgacgtgctgcccctggatgtggcggcgccgctgttgtgcgcgggcatcacgctgtactcgccactgcgccactggaatgccggggcgaacacgcgggtggcgatcatcggcctaggcggactgggtcacatgggcgtcaagctgggcgccgcgatgggcgccgacgtgacggtgctgtcccaatcgctgaagaaaatggaggacggtctgcgcttgggggccaagagctactacgcgaccgccgacccggacaccttccgcaagctgcgcggcggcttcgacctgatcctgaacaccgtctcggctaacttggacctcggccagtacctgaacctgctggacgtcgacggcacactcgtggaactgggtatccccgagcaccccatggccgtgccggcgttcgcgctagcgctcatgcgacgcagcctggccgggtccaacatcggcgggatcgccgagacccaggagatgctcaatttctgtgccgagcacggcgtgacacccgaaatcgagctgattgaaccggactacatcaacgacgcctacgagcgcgtgctggccagcgacgtgcgctaccgcttcgtcatcgacatctcagccctgtga

SEQ ID NO: 28650 - DNA, 2082 bp, Mycobacterium tuberculosis
atgctgaacctgtacgacgcggacggcaagatccagttcgacaaggatcgggaagcagcccaccagtactttttgcagcatgtcaatcagaacacggtcttcttccataatcaggacgagaagctcgactacctgatccgcgagaattactacgagcgtgaggttctcgaccagtactcgcgcaacttcgtcaagacgctgctagaccgcgcctacgccaaaaagttccggtttccgacgtttttgggtgcgttcaagtactacacctcctacacgctgaaaacctttgacgggaagcgctatctggagcgcttcgaggaccgcgtggtcatggtggcgctaacgttggccgccggcgataccgcacttgccgagctgctggtcgacgagatcatcgacggccgcttccagcccgccacaccgacgtttttgaattctggcaagaagcagcgcggggagcccgtgagctgttttttgcttcgcgtcgaagacaacatggagtcgatcggacggtcgatcaactccgcgctgcagctatccaagcgtggcgggggagtggcgttgctgctgaccaacattcgcgagcacggcgcgccgatcaagaacatcgagaaccagtcctcgggcgtcatccccatcatgaagttgctggaggatgcgttctcctacgccaaccagctgggcgctcgtcaaggtgccggcgcggtgtacctgcacgcccatcaccccgacatctaccgattcctggacaccaagcgtgagaacgccgacgagaagatccggatcaagacgctgagtctgggggtggtgatccccgacatcaccttcgagttggccaagcgcaacgatgacatgtacctgttctcgccctacgatgtcgagcgggtctacggtgtgccgttcgctgacatctcggtcaccgagaagtactacgaaatggtcgatgacgcgcgcatccgcaagaccaagatcaaggcacgggagttcttccagacgctggccgagctgcagttcgagtccggctacccctatatcatgttcgaagacaccgtcaatcgcgctaatccaattgatggcaagatcacgcacagcaacctgtgctcggagatcctgcaagtgtctacgccgtcattgttcaacgaggacttgtcgtatgccaaagtgggcaaagacatttcgtgcaacctggggtcgctgaacatcgccaagacgatggactcgccggacttcgcgcagacgatcgaggtggcgatccgcgcgttgaccgcggtgagcgaccaaacccatatcaagtcggtgccctcaatcgagcagggcaacaacgactcccacgcgatcgggctaggacagatgaacctgcacggctacctggcccgggaacgcatcttctacggatccgacgaaggcatcgacttcaccaacatctacttctatacggtgctgtatcacgcgttgcgggcatccaaccgcatcgcgatcgaacgcggcacgcacttcaagggtttcgagcggtccaagtacgcgtccggggaattcttcgacaagtacaccgaccagatttgggagccgaagacccagaaggtacgccagctgttcgccgacgccggcatccgcatcccaacgcaggacgactggcgtcggctcaaggagtcggtgcaagcgcacggcatctacaaccagaacctgcaggcggtgccgccgaccgggtcgatttcctacatcaaccattcgacgtcgtcgattcacccgatcgtgtcgaaggtcgagatccgcaaggaaggcaagatcgggcgggtctactacccggcgccgtatatgaccaacgacaacctggagtactacgaagacgcctacgagatcggttacgagaagatcatcgacacctacgcggcggccacccagcatgtggatcaagggctttcgctgacgttgttcttcaaagacaccgccaccacccgcgacgtgaacaaggcgcagatttacgcctggcgcaaggggatcaagacgctgtactacatccggctgcggcagatggcgttggagggcaccgaggtcgagggttgcgtgtcctgcatgctgtag

SEQ ID NO: 28651 - DNA, 453 bp, Mycobacterium tuberculosis
atggatatcgcggggcgcagcctggtctatttctccagcgtgtcggagaacacccaccgctttgtgcagaaactgggtattcccgccacgcggataccgctgcatggccggatcgaggtcgacgagccgtacgtgctgatactgcccacctacggtggcggccgggccaacccgggtctcgatgccggcggatacgtccccaaacaggtcattgccttcttgaacaacgaccacaatcgagcgcagctgcgcggggtcatcgctgccggcaataccaacttcggtgccgagttctgctacgccggcgacgtcgtctcccgaaaatgtagcgttccctacctataccgcttcgaactgatgggcaccgaggacgacgtcgccgccgtccgcaccggtctcgctgaattctggaaggaacagacgtgccaccaaccgtcattgcagagcctgtag

SEQ ID NO: 28652 - DNA, 1023 bp, Mycobacterium tuberculosis
atggagctgggcagcctcatccgcgccaccaacctgtgggggtacaccgacctgatgcgcgagctcggcgcggacccgctgccgtttctgcggcgcttcgacatcccgccgggcatcgaacaccaagaggacgcgttcatgtcgctggccgggttcgtgcgcatgctggaggccagcgccgccgagctcgattgcccggacttcggactacgccttgcacgctggcagggcctgggcattctcggcccggtagcggtgatcgcgcgcaacgctgccaccttgttcggcgggctggaggcgatcggtcgctacctctacgtccattcgcccgccctgacgctgacggtttcatcaactaccgcacggtccaacgtccggttcggctatgaggtgaccgaaccggggattccctatccgctgcagggatacgagctgagcatggccaacgccgcccggatgatccgcctgctgggcggaccgcaggcgcgggcgcgcgttttctcgttccgacatgcgcaactgggcaccgacgccgcctaccgcgaagcgttgggttgtaccgttcggttcggccggacatggtgcgggttcgaggtggaccaccggctcgccggtaggcccatcgaccatgcggatccggaaaccaagcgcatcgccacgaaatatttggaatcccaataccttccgagcgatgccacgctctccgagcgggtcgtcgggttggcccgccgcctgctgccgaccggccaatgcagcgccgaggccatcgccgaccaactcgacatgcacccacgaacgctgcagcggcgcttggctgccgagggcctccggtgccatgacctcatcgagcgcgaacgccgtgcgcaagcggcaaggtacctcgcccaaccggggttgtatctgagccaaatcgcggtgctgctcggctattccgagcagagcgcgctcaaccggtcgtgccggcgctggtttgggatgacaccccggcagtatcgagcctatggtggggtcagcggtcggtga

SEQ ID NO: 28653 - DNA, 483 bp, Mycobacterium tuberculosis
gtgtccaagtcgtcgcgtggcggccggcagatcgttgccagcaatcgcaaagcccggcacaactattcgatcatcgaggtgttcgaggccggggttgcgctgcaaggcacggaggtgaagagcctgcgggaagggcaggcgtcgctggccgattcgttcgccaccatcgacgacggcgaagtgtggctgcgcaacgcgcacatcccggaataccggcacggcagctggaccaaccacgagccgcgacgcaaccgcaaactgctgttgcatcgccgccagatcgacaccttggtcggcaagatccgcgaaggcaacttcgccctggtgccgttgtcgctgtatttcgccgaaggcaaggtcaaggttgagcttgcgctggcccgaggcaagcaagcccgcgacaaacgccaggacatggcccgtcgtgatgcccagcgtgaagtgctccgcgagttgggtcggcgcgctaagggcatgacctga

SEQ ID NO: 28654 - DNA, 927 bp, Mycobacterium tuberculosis
atgacgactagcggcacagttctggccacctcgatagcacagcactggcataacttctggcgcggtgaaatcggcgactggatcctcaaccggggcctgcgcatcgtcatgctgctgatcgcagcggtgctggcggcccgcttcgtgacttggcttgccaaccgggtgacccggcgcctcgacctggggtttaccgaaagcgacgcgttggtgcgctcggaggcaaccaagcaccgccaggccgtagcgtcggtgatctcgtgggtgtcgatcgtcctcatctatgtcgtcgttgtgtacgaggtcatcgatgtgttgccggttccggtcggtgcgttggtggggccggcggcggtgctcggcgccgcgctgggcttcggtgcccaacgcctggtgcaggacctactcgccgggttcttcatcatcgtggagaagcagtacgggttcggcgatttggtcgaactcagcatggtggggtcaccggagaacgcggccggcacggtggaggacgtcacgctgcgggtgaccaagctgcgttccagcgagggtgaggtgttcaccgttcccaacgggaacatcgtcaagtcggtcaacctgtccaaggactgggcccgcgcggtcgtggacatccccgtcccgaccagcgccgatctcggccgcgtgaacgaggtcttgcatcaggagtgtgagcacgcgcgccacgactcgctgctgggagagctgttgttggatgagcccacggtcatgggcgtggagcgcatcgaagtggacaccgtcaccctgcgactggtggcccgcaccctacccggcaagcagttcgaggcgggccggcagttgcgggtgctggtgatccgcgcgctcacccgcgccgggatagtcaccgcggccgatgcgcgggccgcggtggcagaaagtccggagcagtag

SEQ ID NO: 28655 - DNA, 1137 bp, Mycobacterium tuberculosis
atgccggtaaccttggctgctgtggaccccgaccgtcaagccgacatcgccgccttggactgcaccctgaccacggtggagcgggtgctcgacgtcgagggtctgcgcagccgcatcgagaagctcgagcatgaggcatctgatccgcacttgtgggacgaccagacccgggcgcagcgggtgaccagcgagttgtcgcacacccagggagagctgcggcgcgtcgaggagctaaggcgccgcctggacgacctgccggtgctctacgagctggccgccgaggaagcgggcgcggccgccgccgatgccgtcgccgaggccgacgcggagctcaagtcgttgcgcgccgacatcgaggccaccgaggtgcgcaccctgctgtcgggggaatacgacgagcgtgaggcgctggtcaccatccggtccggcgcgggtggggtggacgccgcagactgggccgagatgctgatgcggatgtatatccgctgggccgagcagcacaaataccccgtcgaggtgttcgacacctcctatgccgaagaagccggcatcaaaagcgccacgttcgccgtgcacgcaccgttcgcctacggcacgttgtcggtcgaacagggcacccaccggctggtgcggatcagcccgttcgacaaccagagccggcgacagacgtcgttcgccgaagtcgaagtgctgccggtggtggagaccaccgaccacattgacatccccgagggcgatgtccgcgtcgacgtctatcgctccagcgggcccggcgggcaatcggtgaacacgacagactcagcggtgcggctcacccacattcccagcggtatcgtggtcacctgccagaacgagaagtcccaactgcagaacaagatcgcggcgatgcgggttctgcaagcaaagttgttggaacgcaagcgcttagaagaacgcgccgagctcgacgcgttgaaggccgacggcggcagctcctggggtaaccagatgcgttcctatgtgctgcacccatatcagatggtcaaggatctgcgcaccgagtacgaggtcggcaatccggcggccgttctggatggagacctcgacggattcctggaagccgggatccggtggcgcaatcgacgtaatgacgactag

SEQ ID NO: 28656 - DNA, 1080 bp, Mycobacterium tuberculosis
atgagtacgcctacgctgcctgatatggtagctccatccccgagagtgcgagtaaaagaccgttgtcgccggatgatgggggacctacgcctttccgttatcgatcagtgcaatttgcgatgccgttattgtatgcccgaagagcactacacatggttgccgcggcaagatttgctatccgtcaaagaaatcagcgccattgtagatgttttcctttccgttggggtaagtaaagttcgaatcaccggtggcgaaccgctgatccgcccagatttgccggaaatagtgaggacattgagcgcaaaggtcggcgaagattcaggtctgagagacttagcgatcacgacgaacggcgtccttctcgccgaccgcgttgacggcctgaaggctgcgggtatgaaacgcatcactgtcagtcttgatacgttgcaacccgagcgcttcaaggcgataagtcagcgtaatagccacgataaggtcatcgcgggtatcaaggctgtcgcagccgcgggatttacggacacaaaaatagacacaacggtgatgcgtggtgccaatcacgatgagctggctgatctgatcgaattcgctcggactgttaacgcggaagtcaggttcattgagtacatggacgtcggcggcgcaactcactgggcatgggagaaggtctttaccaaagcgaacatgctcgagtcccttgagaaacggtatggacgtattgagcctttgcccaaacatgatacggcgcccgccaatcgatatgcgcttccggacggaactaccttcggaattatcgcgtcgacaacggagccattctgcgcaacctgtgaccgttcacggttgaccgccgatggcttatggctgcattgcttgtacgcaatatcgggtatcaacctaagggagccgctgcgtgcaggcgcgactcacgatgacttggtggaaaccgtgacaaccggatggcggcgacgaacggatcgcggagcagagcagcgtcttgcccaacgcgagcgcggagtgttcctgccattaagcacgttaaaggccgacccgcatctggagatgcacaccaggggcgggtaa

SEQ ID NO: 28657 - DNA, 1170 bp, Mycobacterium tuberculosis
atgactgaagccttgatcccggcaccgtcgcagatatcgctgacccgcgatgaggtgcgcaggtacagcaggcacctcatcatcccggatatcggcgtcaacggccaacagcggctgaaggatgcgcgcgtattgtgtatcggcgccggaggattgggttcgcctgctctcctgtatcttgcggccgccggagtcggtaccatcggcatcatcgatggagaccacgtggatgagtcgaatctgcaacgccaaatcattcatggcacatccgacgtgggtaggccgaaagtagaatcagcagccgaggcggtggcggaaatcaacccgcacgtccgggtgacgcaatatcgcgaaatgctcacccacgacaacgcactggaaatttttggcgatcacgacctcattgttgacggcacagacaacttcacgacgcgctacctgatcaatgatgccgcggtcttggccggcaaaccatatgtttgggggtcgatctaccgattcaacggccagaccagtgtgttttggcccggccgggggccgtgttatcgatgccttcatccagctccgcccccgcccggattggtgccgtcgtgcgctgaaggcggtgtactcggtgccatctgcgccacgattgcgtcgatccaggtaactgaagtgctgaagctccttaccggagtcggaactcccctcgtcggtcgcctgctcatgtatgaagctctcgacgcgacataccatcaaatccggatcgcgaagaatcctgactgcgccatttgcggcgatgcgcccacgatcaccgaattggtagatgacagcgtcagctgcgcatcgacacaatcggtggatcccgaactagtgatcagttgtgatgagttgcgaaccaaacagcagtcggaccagaacttcctcttggtcgacgtgcgagagcccgccgagttcgacatcgcgcacattccgggcagcatcttgatacccaaaggcgaaatcggctcggcggcgggcctagcccagctaccgctggacaaggaaattgtcctgtactgcaagagtggaatccgatcggcccaggcgctaaccacgttgaaagcagccggactgcacaacgtgaagcatctcgacggcggtatcgcggagtggacacgaaccatcgactcctccttgttggtgtactag

SEQ ID NO: 28658 - DNA, 759 bp, Mycobacterium tuberculosis
gtgacacagccacccggtcagccggtgttcatccggctcggaccgccaccggacgaacccaaccagtttgtcgtcgagggcgctccgcggtcgtatccgccggacgtactggcgcggctggaggtcgacgccaaggagatcatcggccgctatcccgacaggcgctcggcgctgttgccgttgctgcacctggtgcagggcgaggattcctacctgacgccggcgggtttgcggttctgcgccgatcaactcgggctgaccggggccgaggtgtcggcggtggccagcttctacaccatgtaccgccggcgccccaccggcgagtacctggtgggtgtgtgcacgaacacgctgtgcgccgtcatgggcggcgacgccatcttcgaccgcctcaaagagcatctcggcgtcggccacgacgaaaccacctccgacggtgtggtcaccttgcaacacatcgaatgcaacgccgcctgcgattacgcaccggtggtgatggtcaactgggaattcttcgacaaccagacgccggagtccgcgcgcgaactcgtcgactcgctgcgctccgacacaccgaaggcgcccacccgcggcgcgccgctgtgcggcttccggcaaacatcgcgcatcctggcgggtctacccgaccagcgtcccgacgaaggccagggcggtcccggcgcgcccaccctggccgggctgcaggtggcaaggaagaacgacatgcaggcgccaccaacccccggagcggacgaatga

SEQ ID NO: 28659 - DNA, 1338 bp, Mycobacterium tuberculosis
atgaccacgcaggccaccccgttgaccccggtgatcagccgccactgggacgacccggagtcgtggaccctggccacttatcaacgccacgatcgctatcggggctatcaggcgttgcagaaagccctgacgatgccgcccgacgacgtgatcagcatcgtcaaggattccgggttacgcggacgcggcggcgcgggctttgccaccgggaccaagtggtcgttcatcccgcagggcgacaccggcgccgcggccaagccgcactacctggtggtcaacgccgacgagtccgaacccggtacgtgcaaagacattccgttgatgctggcgacgccacatgtgctcatcgaaggcgtcatcatcgccgcctacgcgatccgcgcccatcacgcgttcgtctacgtacgcggtgaggtggtgccggtattgcgccggctgcacaacgcggtggccgaggcctatgccgccggcttcctaggccgcaacatcggaggttccggattcgatctggagctggtggtacacgccggcgcgggcgcctacatctgcggcgaggagaccgccctgctcgactcgctggaaggccggcgcggccagccgcggctgcggccccccttccccgcggtggccggtctgtatggctgcccgaccgtgatcaacaacgtcgaaacgatcgccagtgtcccatcgatcatcctgggcggcatcgactggttccggtcgatgggcagcgagaaatcgcctggcttcaccctgtattcgctgtccggccacgtcacccgccccggccagtacgaggcgccgctgggcattacgctgcgcgagttgctcgactacgcaggcggggtgcgcgccgggcaccggctgaagttctggacaccgggcggctcgtcgaccccgctgctcaccgacgagcatctggatgtgccgctggactacgagggtgtgggtgcggccggctcgatgctggggaccaaggcgctggagatcttcgacgagaccacctgcgtggtgcgcgcggtgcgccgctggaccgagttctacaagcacgaatcgtgtgggaaatgcacgccgtgccgggagggcaccttctggctggataagatctacgagcggctggaaaccggccggggtagccatgaagacattgacaaactgttggacatttccgattccatcttgggaaagtcgttctgcgcgttgggcgacggtgccgcgagtccggtgatgtcgtcgatcaagcacttccgcgacgagtacctggcccacgtcgaaggaggcggttgcccattcgacccccgagactccatgctcgtcgcgaacggagtggacgcgtga

SEQ ID NO: 28660 - DNA, 1902 bp, Mycobacterium tuberculosis
gtgacaacttccttggggactcactacacctggctgctggtggcactgccactggcgggtgccgcaatcttgctgttcggcggcagacgcaccgatgcgtggggccacctgctgggctgtgccgcagcgctggcggcattcggggtgggcgcgatgctgctggccgacatgctcggtcgcgatgggctcgagcgcgcgatccatcagcaggtgttcacctggatacccgccggcggactccaagtcgacttcgggctgcagatcgatcagttgtccatgtgcttcgtgctgctgatctccggggtcggatcgctgattcacatctattcggtcggctacatggccgaggacccggaccggcgcaggtttttcggctatctcaacctgtttctggcctcgatgctgctgctggtggtcgccgacaactatgtgttgctgtacgtcggctgggagggtgtgggcctggcgtcgtatctgttgatcggtttctggtaccacaagccgtcggcggccaccgcggccaaaaaggcattcgtgatgaaccgggttggggacgccggcctagcggtgggtatgttcttgacgtttagcactttcggcaccctgtcgtatgccggcgtgttcgccggcgtacccgccgcaagtcgcgcagtgctgaccgcgatcgggttgttgatgctgttgggggcgtgcgccaagtccgcgcaggttccgctgcaagcctggcttggcgacgcgatggagggccccaccccggtgtccgcgctgatccacgccgccaccatggtgaccgccggagtgtatttgattgtgcggtcgggcccgctgtacaacctggcgcccaccgcccaactggcggtcgtcatcgtcggcgcggtgacgctgctgtttggggcgatcatcggctgcgccaaggacgacatcaaacgtgcgctggcagcctcgaccattagccagatcggctacatggtgctggccgcgggcctgggtccggccggctacgcgtttgcgatcatgcatctgctcactcacggtttcttcaaggccggcctattccttgggtccggcgcggtgattcacgcgatgcacgaagagcaggacatgcgccgttacggtggtctgcgcgccgccctgccggtcacgttcgcaaccttcggcctggcgtatctggcgattatcggggtaccgccgttcgcgggcttcttctccaaggatgcgatcatcgaggccgcattgggcgccggcggcatccggggctcgctgctgggcggtgccgcgctgctgggtgcgggcgtcaccgcgttctacatgacgcgagtgatgctgatgaccttcttcggcgaaaagcgttggacgccaggcgcccatccgcacgaggcaccggccgtgatgacctggccgatgatcttgctcgccgtcggctcggtgttctccggtggcctgctcgcggtgggtggcacgttgcggcattggctgcagccagttgtcggatctcatgaagaggccacccatgcgctgccgacctgggtcgccaccaccctggcgctcggtgtggtcgccgtcggtatcgcggtggcctaccggatgtacggcaccgcgccgatcccgagggttgccccggttcgggtgtcggcgctgaccgcggccgcacgtgcggacctgtacggcgatgccttcaacgaggaggtgttcatgcgccctggtgcgcaattgaccaacgcggtggtcgcggtggacgacgcgggtgtggacggctcggttaacgcgctggcgacgctcgtgagccagacttcgaatcgcctgcggcaaatgcaaaccggcttcgcccgtaactacgcgttatcgatgctggtaggagcggtgttagtggcggcggcgctgctggtggtgcagctgtggtga

SEQ ID NO: 28661 - DNA, 939 bp, Mycobacterium tuberculosis; identical to SEQ ID NO: 28266

SEQ ID NO: 28662 - DNA, 939 bp, Mycobacterium tuberculosis; identical to SEQ ID NO: 28266

SEQ ID NO: 28663 - DNA, 942 bp, Mycobacterium tuberculosis
gtgacgaacgtaagcggcgtggattttcagctgagaagcgttccgttgctttcgcgcgtcggcgccgaccgggccgaccggctgaggaccgacatggaggcggccgccgcgggatggccaggcgcggcattgctgcgggtggattcccgcaatcgcgtgctggtcgccaacggccgggtgttgcttggcgcggccatcgagctggccgacaagccaccgccagaggcggtattcctgggtcgcgtcgagggcggccgccacgtctgggcggtgcgggcagcgctgcagccgatcgctgatcccgacataccagccgaggcggtggaccttcgtgggctcggccgaatcatggacgacaccagcagccaactggtgtcgtcggcatcggcgctgttgaactggcatgacaacgcacgattcagcgccctagacggcgcgccgacgaaaccggccagggccggctggtcacgggtcaacccgatcaccggtcatgaggagttcccccgtatcgacccggcggtgatctgcctggttcacgacggcgctgatcgtgccgtgttggctcgccaggcggcgtggccggaacggatgttctcgctgttggctggctttgtcgaggccggagagtcgttcgaagtctgcgtcgcccgggagatccgcgaggaaatcggcctgaccgttcgcgatgtgcgctatctgggcagccagcagtggccgttcccgcggtcgttaatggttggctttcatgccttgggtgacccggatgaggagttctcgttcagcgacggcgaaatcgccgaagccgcgtggttcacccgcgatgaggtgcgcgcagcgcttgccgccggcgattggtccagtgcgtcggagtcgaaactgctactgcccgggtcgatctcgatcgcccgcgtgatcatcgaatcgtgggcagcgtgcgaatga

SEQ ID NO: 28664 - DNA, 696 bp, Mycobacterium tuberculosis
atgccatcgccctcatccgccgatcaggtggccgattcacccaggccacggctgccggcggatcatcccggcgtcaacgaattgttcgcgttgctggcctacggcgaagttgccgccttctaccgattgaccgatgaggcgcgcatggccccggatctgcggggaaggatctcgatggcatccatggccgccgccgagatggggcactacgagctgctgcgcaatgcgttggaacgtcgcggcgtcgacgtggtgtcggcgatgtcgaagtacacctcagcgttagaaaactaccaccggctgacgacgccgagcacatggctggaagccctggtgaagacctatgttgccgatgcgttggccgccgatttgtatctggagatcgccgacgggctgcctgacgaggttgctgacgtggtgcgggcggcgttgtcggagaccgggcactctcagttcgtcgtcgccgaagtgcgcgcagcggtgacggccagcggcaaacagcgcagccgactggcgctgtggtcgcgtcgtctgctcggcgaggcgataacgcaggcccagctggtgttggccgaccacgacgagctggtcgacctggtggtgtccggtagtggtggactgagccagcttggtgccttcttcgaccggttgcagcagacccacgaccaacgcatgcgggaactgggtctcagctag

SEQ ID NO: 28665 - DNA, 1284 bp, Mycobacterium tuberculosis
atggcgatcactgacgtcgacgtattcgcgcatctgacggacgccgacattgaaaacctggccgccgagctagatgccatccgccgagacgttgaagaatcgcgcggcgaacgcgatgcccgctacatccgccgcaccatcgccgcacagcgggcgctcgaggtgtccggtcggctactgctggctggcagctcacgacgcctcgcctggtggacaggtgccctgacccttggcgtggccaagatcatcgaaaacatggagatcggccacaacgtcatgcacggccagtgggactggatgaacgacccggagattcactcctcgacgtgggagtgggacatgagcggatcgtccaagcactggcgctacacccacaacttcgtgcaccacaaatacaccaacatcctcggtatggatgacgacgtcggatacggcatgctgcgcgtcacccgtgaccagcgctggaagcgctacaacatcttcaacgtggtgtggaacaccatccttgcgatcggcttcgagtggggagttgcgctgcagcacttggagatcggcaagatcttcaagggtcgggccgaccgcgaggccgctaaaacccggttgcgtgaattctcagccaaagcgggccgccaggtgttcaaggactatgtcgcgttcccggcgctgacctcgttgtccccgggggcgacgtatcggtccactttgaccgccaacgtggtggccaacgtgatccgcaacgtgtggtccaacgcggtgatcttctgcggccatttcccggatggcgcagagaaattcaccaagacggacatgatcggtgagccgaagggccagtggtacctacggcagatgctgggcagcgcaaacttcaacgctgggccggcgctgcggttcatgagcggcaatctgtgccaccaaatcgagcatcacctctatccggacctgccgagcaaccggcttcacgagatttcggtgcgggtgcgtgaggtctgcgacagatacgacttgccatacaccacgggctcgttcttggtgcagtacggcaagacctggcgcacccttgccaagctgtcgttgccggataagtacttacgtgacaacgctgacgatgcacccgagacccgcagtgagcggatgttcgctggtctggggccgggtttcgcgggcgccgatccggtgaccggacgtcgtcgggggttaaagaccgcgattgccgccgtgcggggtcggcggcgcagcaagcgtatggctaagtcggtcaccgaacccgacgatctggcagcctaa

SEQ ID NO: 28666 - DNA, 1143 bp, Mycobacterium tuberculosis
atgagcaagaaacacacgacgcttaacgccagcatcatcgacaccaggcgccccaccgtcgccggagccgaccggcatccgggctggcatgcgctgcgcaagattgccgcgcgcatcacgacgccattgttgcccgacgactaccttcacctggcaaatccgctgtggtccgcgcgggaattgcgggggcgcatcctaggggtccgccgagagacggaagactccgcgaccctgttcatcaaaccgggctggggcttcagtttcgactaccagccgggccaatacatcgggatcgggctgctggtcgacgggcgctggcgctggcggtcgtattcgctgacgtcgagtccggcggcatccgggtccgcgcgcatggtgaccgtcacggtgaaggcgatgcccgagggcttcctgtccacccacttggtggccggggtaaagccagggaccattgtgcggctggctgcgccccagggcaatttcgtattaccggatccggcgcccccgttgattctgtttttgactgccgggtcggggattacgccggtaatgtcgatgcttcgaacgttggtgcgccgcaaccaaatcaccgacgtagtgcacctgcattcggcgcccaccgcagctgacgtgatgttcggtgccgagctggctgccctggcggccgaccatcccggttatcggttgtcggtgcgcgagacgcgcgcccagggccggctggacctgacccggatcggtcagcaggtgccggactggcgtgaacgccagacctgggcgtgcgggccggagggcgtgctcaaccaggccgacaaggtctggtcatcggcgggtgccagcgaccgactgcacctggagcggttcgcagtgtccaaaacggcgcccgctggagcgggcgggaccgtcacgttcgcccgaagtggcaagagcgtagccgccgatgctgccacgtcgttgatggacgccggtgagggcgccggcgtgcagctacccttcggctgccggatgggcatctgccagtcgtgtgtggtcgacctggtggaaggccatgttcgggatctgcgcacgggccagcggcatgagcccggaacccgggtccagacctgcgtgtcggccgcctcgggtgattgcgtgctggacatctag

SEQ ID NO: 28667 - DNA, 1158 bp, Mycobacterium tuberculosis
gtggaggtttcgagggcgctgttgtttgagctcggcgtcctgttggcggtgcttgcggtgctgggtgcagtggcacgacgattcgcgttgtcgccgattccggtgtatttgttggcgggtttgtcgttaggcaatggcggcatcttgggggtggccgccgccggtgagttcatcgctaccggtgcgcccatcggtgtcgtgttgttgcttttggccctgggtctggagttttctgcgaccgagttcgccagcagtctgcgccaccacctgccgtcggcgggtgtcgatatcgtcctcaacgccacgcccggtgcggtggcgggctggcttttggggttggacggtgttgccatcctcggtctggccggggtcacctacatttcctcctcgggtgtgatcgcgcggctgttggaggacctgcgtcggctcggcaaccgggaaacgccggctgtgctgtcggtgctggtgctcgaagacttcgcgatggcggcctacttgccgctgttcgcggttctcgcgacagacggcagctggctcgaggcggtcgtgggcatgacggtggcgatcgccgctttgcttggggcgttcgcggcgtcgtatcgttggggtcatcatgtcggccggttggtgactcatcctgattccgaacaattgttgttgcgggtgctgggcatcaccttgatcgtggcggcggtggccgagtcgctgcacgcgtcggcggctgtgggtgcgtttctggtaggcctcacgcttaccggggagaccgcagaccgggcacgcatggtgctgactccgctgcgtgacttgttcgccacgatcttcttcctgggaatcggcctgtcggttgacccgggaaagctcgtttcaatgcttccggtagcgctggccctggccgctgtcaccgcagcgaccaaggtggccaccgggatgttcgctgcccggcgggagggagtggcacggcgtgggcagctgcgtgctggcaccgcgctcgttgcccggggggagttttctttgatcatcatcgggctggccggtgcctcgatcccgggggttgccgccttggccacggcgtatgtgttcgtcatggcgatcgtcggtccgatactggcccgctacaccggcggtgggctgccggccgccgcagtagcttcgaactag

SEQ ID NO: 28668 - DNA, 3147 bp, Mycobacterium tuberculosis
atgcacatttcgttgcacggcggcaaggggttcgctaatctcacccgtcgtcgccgaccttcgtcggcgtcggttctgctggtagcggggttcggcgctttcctggcgtttctcgactcgacaatcgtcaacatcgcgttcccggatatccagcgttccttcccgtcctacgacatcgggagcctgtcctggattctgaacggctataacatcgtcttcgccgccttcatggttgcggccggcaggttggccgatttgctgggccgcagacggacattcctgtccggtgtgctggtgttcaccattgcgtccgggctgtgcgccgtcgccggcagtgtcgagcagttggtggcgttccgggtgctgcagggcatcggggctgcgatactcgtgcctgcttcgctcgcactggtcgttgagggcttcgacgcggcgcgccgcgcgcacgctatcggcctgtggggtgcggcggcagcgatcgcggctggcctgggcccgccgatcggcgggctcctcgtggagtgggccggctggcggtgggtgttactggtcaatgttccgctgggcatcgtcgcggcgatcgccaccaagcgcatgctcgtcgagagccgcgcctcgggccggcgccgcatgcctgacttgcgcggtgcgctgctgcttgcggtaacgctcgggttggttaccctcggtttggtcaaggggccggactggggttggttgagcgtggccaccgtcggttcgttcctggccagcgtcctgacctcggttgggttcgtgcacagctcgcggtcgcaccccgcgccgctggtcgagccggcgctgttgcgtagccggtcgttcgtggcgggcaacctgctcacgctggtcgccgcagcgggtttttactgctatggccttacccatgtgctttacctcaactatgtgtggcactactcgctgctgaaggcgggtttcgcgatcgcgcccgctgcggtggtggctgccgtggtggcggcggcgctgggtcgggttgccggtcggcatgggcatcgcgtcatcgtcctcgttggtgcgctggtctgggccggcagcctggtgtggtatttgcagcgtgtcgggtccgagccggatttcctccgcgtgtggctgccgggccaactgctgcagggcatcggtgtcggcgcgacgttgccggtgttgagcagtgcagcgctggccgaggtcgccaagggcggcagctatgccacctcgtcggcggtcgttagcaccactcgccagctcggtgcggtgctcggtgtcgcggtgatggtgatcttgatcggtaagccggagcacggtactgccgaggaggcgttgcggcgcggatgggctatggctgccatctgtttcatcgcggtggctgtcgcggccgcggtgctgggtagaaccaaccgcaaccccgtccagatgccggcgccggagcccgcgatcgcgccgcggttggagccaccgattccccagccggcggccgcgccgattgagcattgggcggccggtgacgccgatccgctggggaatctgccgctatttgccggcctggacgcggccaccttggcacagctcggggagcacgttgaggacgtcgagttggaggcgggttgctatctcttccacgaaggtgacccgtccgattcgctttacgtgatccgcacgggtcgcgtgcaggtgctgcaggacagcatcgttctcaaagaactgggtcgcggggaggttctcggggagcttgggctacttattgacgcgccccggtccgcgacggtccgggcgttgcgcgacaccaagctagtgcggctcaccaaggcacagttcgacgagatcgccgaccatggtgcgctggcggcgttggtaaaggtgctggcaacgcggctgcgggaggcaccgccaccggcgactgactcgacgtcgcctgaggtggtcgtttcggtgatcggagtgagcggcgacgcgcccgtgccggcagtggccgctggcctgcttaccgcgctgtcggcgcggttgcgtgccgttgaccccggccgggtcgaccgcgacggccttgatcgcgcggagcgagtcgccgacaaggtagtgctacatgccgcggtcgaggatgccggctggcgggacttctgcctgcgcgtcgccgaccggatagtgctggtcgcgggagatcccaacccacaagccgcgcggctgccggcgcgtgcgcggggtgccgacctcgtgctggccggtccggccgccagccgggagcaccggcgtcagtgggaggaattgatcacgccgcgatcggttcatgtggttcattaccgacgcatcttggaaaacgtacgcccgctcgccgcacgcatcgccggccgctcgatcggtctagtcctcggcggcggtggcgcgcgcggctttgcgcacctcggggttcttgacgagctagagcgggtcggggtcaccatcgaccggttcgccggcaccagcatgggggcggttattgcggtgttcggagcgtgcggtatggacgcggcaacagcggacgcctacgcatacgagtacttcattcggcacaatccgctcagtgactacgcgtttccggtcagggggctagtccgtggtcgacggacgctgaccctattagaagcagcgttcggggaccgactggtcgaggagctgccaaaggagttccgttgcgttagcgtcgatttgcttgcccgccgaccggtcgtacaccgccgaggccgactcgtcgatgtcattgggtgttcccttcggctgccgggcatctatccgccccaggtctacaacggtcgactgcatgtggatggcggtgtgttagacaaccttccggtctcgacccgggcaagtcctgatggcccattgatcgcggtgagcatcggcttaggtggtggcgggccgggctcggctcgacaggacggctcgccaaaagtgccaggaatcggcgacaccttgatgcgcacgatgacaatcggcagccagcgtggggcggatgccgcactcagtcttgcgcaggtcgttatcagacccgacaccggtgctgttgggctgctggagtttcaccagatcgacgccgcccgcgaggcgggacgcgttgcggcccgcgaggccatgccgcacatcatggcactgttgaatcgctga

SEQ ID NO: 28669 - DNA, 2850 bp, Mycobacterium tuberculosis
gtgctgtcgaagttgctgcgccttggcgaaggtcgcatggtcaagcgcctcaagaaggtggccgactatgtcggcactttgtccgacgatgtcgagaaactcaccgacgccgagctgagggcgaaaaccgacgagttcaagcggcggctggccgaccagaaaaacccagaaaccctcgacgacctgttgcccgaggccttcgccgtggcccgcgaggccgcctggcgggtgctggaccagcggccgttcgacgtgcaggtgatgggtgcggccgccctgcacctgggcaacgttgccgagatgaagaccggtgaaggcaagaccctgacctgtgtgttgcccgcttacctcaatgcgctggccggcaacggcgtgcacatcgtcaccgtcaacgactacctggctaaacgcgacagtgagtggatgggccgcgtgcaccgcttcctcgggcttcaggtcggggtgattttggccaccatgacacccgatgaacgccgggtggcctataacgccgacatcacctacggcaccaataacgagtttgggttcgactacctgcgcgacaacatggcgcactcactggatgatctggtgcagcgcgggcaccattacgccattgtcgacgaggtcgattccatcctgatcgacgaggcccgcaccccgctgatcatctccggtcccgccgacggcgcctccaactggtacaccgagttcgcccggttggcgccgctgatggaaaaggacgtccactacgaggtcgatctacgcaaacgcaccgtcggcgtgcacgagaagggtgtggaattcgtcgaagaccagctcggcatcgacaacctgtacgaggccgccaactcgccgttggtcagctatctcaacaacgctctgaaggccaaagagctgttcagccgcgacaaggactacatcgtccgcgatggtgaggtgctcatcgtcgacgagttcaccggccgggtgctgatcggccgccgctacaacgagggcatgcaccaggccatcgaggccaaggagcacgtcgagatcaaggccgagaaccagacgctggccaccatcacgctgcagaactacttccggctctacgacaagctcgccggcatgaccggcaccgcccagacggaggcggccgagctgcacgagatctacaagctgggcgtggtcagcatcccgaccaacatgccgatgatccgtgaagaccagtccgacctgatctacaagaccgaggaggccaagtacatcgcggtggtcgacgacgtcgccgagcgctacgcgaagggacagccggtgctgatcggcaccaccagcgtggagcgctcggagtatctgtcgcggcagttcaccaagcggcgcatcccgcacaatgtgctcaacgccaagtaccacgagcaagaggcgaccatcatcgcggtggcgggccgccgcggcggcgtcaccgtcgccaccaacatggccggtcgcggcaccgacattgtgctgggcggcaacgtcgactttctcaccgatcagcggctgcgcgaacgcggcctggatccggtggagacgcccgaggagtacgaggcggcctggcactccgaactgcccatcgtcaaagaggaagccagcaaggaggccaaggaagtaatcgaggccggcggcctgtacgtgctgggcaccgagcgccacgagtcgcggcggatcgacaaccagttgcgtggccggtccggccgccagggggaccccggggagtcgcgcttctatttgtcgctgggtgacgagctgatgcgccgcttcaatggcgcggccttggagaccttgttgaccaggctgaacctgcccgacgacgtgccgatcgaagccaagatggtcacccgggccatcaagagcgcccagacccaggtcgagcagcagaactttgaggtccgcaagaacgtcctcaaatacgacgaggtgatgaaccagcagcgcaaggtcatctacgccgagcgccggcgcatcctcgaaggcgaaaacctcaaggaccaggcgctggacatggtccgcgatgtcatcaccgcctacgtcgacggcgcgaccggcgaaggctatgccgaagattgggatctggacgcgttgtggacggcactcaaaaccctctatccggtggggatcaccgccgactcgctgacccgcaaggaccacgaattcgagcgcgacgatctcacccgcgaggagttgctggaggcactactcaaggacgccgaacgtgcctatgccgcacgggaagccgaactcgaggaaatcgccggcgagggtgcgatgcgccagctggaacgcaacgtgctgctcaacgtcatagaccgtaagtggcgtgaacacctctacgagatggactacctcaaggagggtatcgggctgcgcgcgatggcgcagcgcgatccgttggtcgagtaccagcgtgagggctacgacatgttcatggccatgctcgacggcatgaaagaggaatcggtcggcttcctgttcaacgtcaccgtggaggcggtccccgccccgccggttgccccggctgccgaacccgcagagcttgccgaattcgccgccgcggccgcagccgccgcgcagcaacgcagcgcggtcgatggtggcgcgcgcgaaagagctccaagtgcattacgcgccaagggtgttgccagcgagtcgcccgctttgacctattccggtcccgcggaggatggctcggctcaggtgcagcgcaacggcggtggagcccacaagacgccggccggagtgccggccggtgctagccggcgcgagcggcgcgaagccgcccgccgacaaggccgcggcgccaagccgccgaaatcggtcaagaagcgttag

SEQ ID NO: 28670 - DNA, 645 bp, Mycobacterium tuberculosis
gtgctaatcgcgattgagggcgttgacggcgctggcaagcggacgttggtggaaaagctgtccggggcctttcgagcagccgggagatcggtggccacactggcgttcccgcgctacggacagtcggtggccgccgacatcgcagcggaggcgctgcacggcgagcacggtgacctcgcatcgtcggtgtatgcgatggcgacgctgttcgcgctcgaccgcgctggcgcggtccacacgatccaggggctgtgtcgcggctacgacgtggtgatcctggatcgctacgtcgcctccaacgcggcctacagcgcggcgcgcctacatgaaaacgcggccgggaaggcagcggcctgggttcagcggatcgaatttgcaagactcgggttgcccaagcccgactggcaggtgctccttgcggtctctgccgagctcgccggggaacgatcccgcggccgtgcccagcgtgaccccggtcgggcgcgcgacaattacgaacgcgacgctgaacttcagcagcgcaccggtgcggtctacgccgagttggcggcccaagggtggggcggccggtggctggttgtcggcgccgatgttgatccgggccgactagcggcgactttggcgcctccagacgtgccaagttga

SEQ ID NO: 28671 - DNA, 1488 bp, Mycobacterium tuberculosis
atggccggtcgacggcgcatgaagtcggtagaacagtcaatcgccgacaccgacgagcccaccactcggctgcgcaaggacctcacctggtgggacctggttgttttcggcgtctcggtggtgattggcgccggaatattcacggttaccgcgtcgaccgctggcgatatcaccggcccggccatctggatatcgtttctgatcgcggcggcgacctgtgcgctggccgcgctgtgctacgccgagttcgcctcgacgctgccggtggccggcagcgcctataccttctcttatgccaccttcggggagttcttggcctgggtgatcggctggaatctggtgctggaactggcgatgggtgcggccgtggtcgccaaaggctggtccagctacttgggcaccgtgttcggattcggtaatggcacaggccatctcggatcgctgcagctcgactggggtgcgctcgtgatcgtcacgttggtggcgaccctgatcgcgttgggcaccaaattgtcgtcgagattttccgcggtggtcaccgcaatcaaggtgtcggtggtcgtcttggtggtggtcgtcggtgccttctacatcagggccgccaactactcgccgttcattcccgagcccgaagtccagcaccacggcggcgggctcgatcaatccgtcttctcgttgctgaccggagcccaaggcagccactacggatggtacggcgtgctggccggggcatcgatcgtgttcttcgcgtttatcgggtttgacatcgtggccaccatggccgaggagaccaagcgtcctcaacgagacgtccctcgagggattctcgcgtcgctgggggtcgtgacccttctctacgtcgcggtatcggtggtgctgtcgggcatggttccatacacccaactgcggaccgtaccgggccgcgggccggcaaatctggccaccgcgttccaggccaacggggtgtactgggccagcggcatcatctccgtcggcgcgctggccgggcttaccacggtggtgatggtgttgatgctcgggcaatgccgcgtgctgttcgccatggcgcgcgacggcttggtgccgcggcaattggccaagaccggttcgcgcggcaccccggtccgggtcacggtgctggtcgcggtgttggtggccacgacggcgtcggtgtttccgatcaccaagcttgaggagatggtcaacgtcgggacactgttcgcgttcatcctcgtctcggccggagtggtcgtgctgcgccggacccgacccgaccttcagcgggggttcacagctccgtgggtgccgttacttccgatcgccgcagtgtgcgcgtgcctgtggctgatgctgaacctcaccgcgttgacttggatccggttcgggatctggctggtggccggaaccgcgatttatgtcggctacgggcgccggcactcggcgcagggccttcggcaagctcgagagagcgcgacccggaggtgttga

SEQ ID NO: 28672 - DNA, 1227 bp, Mycobacterium tuberculosis
gtggaactgctacgtggcgcgttacgcacctacgcttggggatcgcgcaccgctatcgccgaattcaccgggcgtccggtgccggccgctcaccccgaggccgaactatggttcggtgcacacccgggtgatccggcttggctgcagacgccgcatggccaaacctcgttgctcgaagcgttggtcgcggatccggaggggcagctcggctccgcgtcgcgcgcgcgattcggcgatgtgttgccgttcttggtcaaggtgttggcggccgacgagccactatcgttgcaggcccatccgagcgccgagcaggcggttgagggctacctgcgggaagagcgaatgggcattccggtgtcctcacccgtccgcaactaccgcgacaccagtcacaagccagagttattggtggcgctgcagccgttcgaggcgctggccggattccgggaggcggctcgcaccaccgagctgctgcgggcgctggccgtatccgacctcgacccgttcatcgacttgctgagcgaggggtccgatgccgatggtttgcgtgcgctgttcaccacctggattaccgcaccccagcccgacatcgacgtgctggtgcctgccgtgctggacggcgctatccagtacgtcagctccggcgcaacggaatttggcgccgaagccaagacagtgctggaactcggcgaacgttatcccggcgacgccggtgtgctggcggcgttgttgctcaaccgcatcagcttggctcctggggaggcgatcttcctgccggccggcaacctgcacgcctatgtgcgtggtttcggtgtggaagtgatggccaactccgacaacgtgttacgcggtggacttacccctaagcacgtcgatgtgcccgagttgttgcgggtgctggacttcgcccccacgccgaaggctcggctgcggcccccgatccggcgcgaggggctggggctggtctttgagacgcccaccgatgagttcgcggccacgctactggtgctcgacggcgatcacctcggccacgaggtcgacgcgtcgtccggccatgacggtccacagatcttgttatgcaccgagggttcggcgacggtgcacgggaagtgcgggtcgctcacgctacagcgcggcacggccgcctgggtggcggccgacgacggcccgatccggctgaccgccggccaacccgccaagctgttcagggcgaccgtcgggttgtga

SEQ ID NO: 28673 - DNA, 1347 bp, Mycobacterium tuberculosis
ttgaccggccccgaacatggctccgcctcgaccatcgagatcctgcccgtcatcgggctgcccgaattccgtcccggcgacgatctgagcgccgccgtcgccgcggcggcaccgtggctacgcgacggtgacgtcgtggtggttaccagcaaggtggtgtccaaatgcgagggccggctggttccggctcccgaagaccccgagcaaagagaccgattgcgccgcaagctgatcgaggatgaggcagtgcgcgtgttggcgcgcaaggaccgcacgttgatcaccgagaatcgactcgggctggttcaggcggccgccggcgtggacggatccaacgtcggccggtccgagttagcgctgctgccggtcgatcctgacgccagtgccgcaaccttgcgcgccgggctgcgcgagcggctcggcgtcaccgtcgccgtggtcatcaccgacaccatgggacgcgcctggcgcaacggccagaccgatgccgcagtcggcgctgccggtctggcggtgctgcgcaactatgccggtgtccgcgacccatacggcaatgagttggtggtcaccgaggtcgcagtcgccgacgagatcgccgcggccgccgacttggtcaaaggcaaactgaccgcgacgccggtggcggtggtgcgtgggttcggcgtgtccgacgacggctcgacagcccggcaactgctgcggccgggcgccaacgacctgttctggctcgggaccgccgaagcgctcgagctgggtcgccagcaagcccaactgttgcgcaggtccgttcgccggtttagcaccgatccggtgccgggcgacctcgtcgaggctgcggtcgccgaggccctcaccgcgccagccccacatcacacccggccgacccgattcgtgtggctgcagacaccggccatccgcgcgcggctgctagatcggatgaaagacaagtggcggtctgatctcaccagtgacggcttgcccgccgacgcgatagaacgccgggtggcacgcggccagatcctctatgacgcacccgaagtcgtcataccgatgctggtgcccgacggagcacacagctaccccgatgccgcccgcaccgacgccgagcacaccatgttcacggtcgccgtcggagcggccgtacaagccttgctggtcgcgctggccgtgcgcgggctgggcagttgctggatcggctcgacgatctttgccgctgacctggtccgcgacgagctggacctgccagtcgactgggagccgttgggcgccatcgcgatcggatatgccgacgagccgtccgggttgcgcgacccggtgcctgccgccgatttgctgatcctgaagtga

SEQ ID NO: 28674 - DNA, 4542 bp, Mycobacterium tuberculosis
gtgaggttcgcgcagccttcagcactgagccgattcagcgcgctcacccgagactggttcaccagcactttcgccgcgcccaccgccgcccaggccagcgcctgggcggccatcgcagacggcgacaacacgctggtcatcgctcccaccggatccgggaagaccctggcggcgttcctgtgggccctggatagcttggccggttcggaacctatgtccgagcggccggcggccacccgcgtgctgtatgtgtcgccgctcaaagcgttggccgtcgacgtcgagcgcaacctgcgcactccgctggccggactgacccgactcgccgaacgccagggtctgcccgcgccccagatcagggtgggcgtccgttcgggcgacaccccgcccgcacttcgccgccagctcgtcagccagccgcccgacgtgctgatcaccaccccggagtcattgtttttgatgctcacttcggccgcacgccaaactctgaccggtgtgcagaccgtcatcatcgacgaaattcatgccatcgccgccaccaagcgcggcgcacacctggcactatccctagaacggctcgacgacctgtctagccggcgacgggcgcagcgcatcgggctgtcggcgaccgtacgtcctcccgaggaactcgcaaggttcctgtccggacagtccccgacgaccattgtggcgcccccggccgccaagaccgttgagctgtccgtgcaggtgccggtgcccgacatggccaacttgaccgacaacaccatctggccggatgtggaggctcggctggtcgacctgatcgaatcacacaactcgaccatcgtgttcgccaattcgcgacgattggccgagcgacttaccgcacggctcaacgaaattcacgccgcgcgctgcgggattgagctcgcgccagacaccaaccagcaggttgccggcggcgccccggcgcacatcatgggctcgggccagacgttcggagcgccgccggtgctggcccgcgcccaccatggctcgatcagcaaggagcagcgcgccgttgtcgaagaggacctcaaacgcgggcaactcaaagcggtggtggcgacgtccagcctggagctgggcatcgacatgggcgcggtcgatctggtgatccaagtacaggcaccaccatcggtggccagcgggctgcagcgcattggccgggccggtcatcaggtcggcgagatttcgcggggggtgctgtttcccaagcatcgcaccgacctactcggctgcgcggtcagcgtgcagcgcatgcttgccggtgagatcgagaccatgcgggtgccggccaacccactcgacattctggcccagcacacggtggcggcggctgcgctggaaccgttggatgccgacgcgtggttcgacaccgtgcggcgggccgccccgttcgcgaccctgccgcgtagcctgttcgaggccaccctggacctgctgtccggcaagtacccatccaccgagttcgctgagctgcggccgcggctggtgtatgaccgcgataccggcacgctgaccgcgcgacccggagcccagcgactggccgtcacctccggcggcgccattcccgatcgcgggttgttcgccgtctacctcgctaccgagcggccgtcgcgggtaggcgaactcgacgaggaaatggtttacgagtcccgccccggtgacgtgatctcgctgggtgccaccagctggcgaatcaccgagatcacccacgaccgggtgctggtgatccccgcgccgggccagccggcccgattgccgttctggcgcggagacgatgccggccgccccgccgagctcggcgccgcactcggcgccctcaccggcgagctggccgccctggaccgtacggcattcggcacacgttgtgcgggtttgggtttcgacgactatgccaccgacaacctgtggcgactgctggacgaccaacgcaccgctaccgcagtggtacccaccgacagcacattgttggtcgagcggtttcgtgacgagctgggcgattggcgggtgatcttgcattcgccgtatgggctgcgggtgcacggaccgctcgcgctcgcagtcggccggcggctgcgcgaccgctatggcatcgacgagaagccgaccgcctccgacaacggcatagtggtgcgcctaccggacaccgtgtccgctggcgaagacagcccgccgggtgccgaactgttcgttttcgacgccgacgagatcgacccgatcgtcaccaccgaagtggccggttcggcgctgttcgcgtcacggttccgggaatcggcggcccgcgctctgctgctgccccgccggcaccccggccgccgctcgccgctgtggcagcagcggcagcgcgccgcccggctgttggaagtggcccgcaaataccccgacttcccgattgtgctggagacggtccgcgagtgcctgcaggacgtctatgacgtcccgatcttggtcgagctgatggcgcggatcgcccagcggcgggtgcgtgtcgccgaagccgagaccgccaaaccttcgccatttgcggcatcgctgttgttcggctacgtcggcgccttcatgtacgagggcgatacgccgctggccgaacggcgcgccgccgcgctcgcgctggacggcacgttgctggccgagctgctaggccgggtggagctgcgcgagctgctcgatcctgacgtcatcgccgctaccagccgccagctccagcatctggcggccgaccgggtagcccgtgacgccgaaggggttgccgatctgctgcggctgctgggtccgctcaccgaagacgagatcgctgcccgggcgggcgcgcccgaggtcagcggctggctggacggcttacgcgccgccaaacgcgcgctcgtggtgtccttcgccggccgcagctggtgggttgccgtcgaggacatgggccggctgcgcgacggcgttggcgcggcggttccggtggggctgccggccagcttcaccgaggcggtagccgacccgctgggcgaactactgggccgctacgcacgcacccacacaccgttcaccaccgctgcggccgcagcccggttcggtcttgggctgcgggtgaccgccgacgtgctgggccggctggccagcgatggccggctggtgcgcggcgaattcgtggccgcggccaaaggatccgccggcggcgagcagtggtgtgacgccgaggtgttgcgaattctgcggcgccgctcgctggccgcactgagggcgcaggcagagccggtcagcaccgccgcctacggacgcttcctgccggcctggcagcacgtttccgcgggcaactcgggcatcgacgggctggccgcggtcatcgatcagctcgccggcgtccggataccggcctcggcgatcgaaccgctggtgcttgccccacggatccgcgattactcgccggcgatgctcgacgagctgctcgcgagcggggacgtcacctggtcgggcgccgggtcgatctcaggcagtgacggctggatcgccctgcaccccgccgactcggcgcccatgacgctggcggagccggccgagatcgacttcaccgacgcccaccgggcgatcttagccagcctgggcactggcggcgcgtacttcttccgccagttgacccacgacggcctgaccgaggcggaactcaaagccgctctgtgggaattgatttgggccggacgagtgaccggcgacacgttcgcaccggtacgcgcggtactcggcggggcgggcacccggaagcgtgctgctcccgcacacggcgggcatcgaccgccgcgcctgagccgataccgcctcacgcacgcccaggcccgcaacgctgacccgaccgtcgccgggcggtggtccgcgctgccgcttcccgaaccggactccacgctgcgcgcccattaccaagccgagctgctgttgaaccgccacggcgtgttgaccaaagacgcagttgctgccgagggtgtggcgggcgggttcgcgacgctctacaaggtgctcagtgcgttcgaggatgccggcaggtgccagcgtggctacttcatcgagtcgttggggggcgctcagttcgccgtcgcctcgaccgtagaccggctgcgtagctacctcgacggtgtcgaccccgaacagccggactaccacgcggtggtgctggccgctgccgacccggccaacccgtatggggcggcgttgccctggccagcgtcgagcgctgacggtaccgcccggccgggccgcaaagccggcgcactggtcgttctggtggacggcgagttggcctggttcctcgagcgcggcgggcggtcgttgctgacgttcaccgatgatcccgaggccaaccacgcggcggccatcgggctggccgacctggtcaccgccgggcgcgtcgcgtcgattctggtcgagcgggccgacggcatgccggtgctgcagcccggcgggcgggcgtcggcggcactgacggcgctgctggcagccggcttcgtccgcacacctcgcggtctgcggcggcggtaa

SEQ ID NO: 28675 - DNA, 1185 bp, Mycobacterium tuberculosis
atgccagcagccagcgcatccgaccgcgtcgaggaattggtgcggcgccgtggtggcgagctggtcgagctgtcccatgccatccacgccgagcccgagctggcgttcgccgagcatcgcagctgcgccaaggctcaggcgctggtcgccgaacgcggtttcgagatcaccacggccgccggtgggttggacacggcgtttcgcgccgactacggcagcggaccgttggttgtcggagtgtgcgccgagtacgacgcgcttcccgggatcggacacgcctgcgggcacaacattattgcggcctccgctgtgggcaccgcgctggcactggctgaggtggcggacgacctgggcttgaccgtggctctgctggggacccctgccgaggagtccggcggcggtaaggcgctgatgctgcaggccgggacgttcgatgacgttgcggtggccgtgatggtccatcccgggccgaccgatatcgccggcgcacgatcactggccctgtccgaggtcaccgtgcgctatcggggtaaggaatcgcacgcggccgtcgcgccgcacctaggggttaacgccgccgacgccgtgaccgtggcgcaggtcgctattggggtacttcgacagcaattggcgcccgggcaaatggtgcacggcattgtgaccgacggcgggcaggcggtcaatgtcatccccgggcaggcgaggctgcagtatgcgatgcgtgcggtcgaatcggattcgctgcgcgagctgcagaccagaatgttcgcctgctttgcggccggcgcgctggccgccgggtgcgaatacgaaatcgacgaggctgcaccggcatacgcggagctcaaacccgacccgtggctggctgacgtgtgccgggaggagatgcagcggctggggcgcgagccgttgctgccagccttggaggcagagctgccgctgggtagcaccgacatgggcaacgtgacgcaggtgctgcccgggatccatccggtgatcggcctggacgccggcgcggcgacggtgcaccaacgggccttcaccgtcgcttccgctggtgccagcgccgaccgcgcggtggttgacggcgcgatcatgttggcacgcacggttgtccgtctcgcgcagactcctgatgagcgtgaccgggtgctggccgcgcagcagcgcagggcggcgcgatga

SEQ ID NO: 28676 - DNA, 1605 bp, Mycobacterium tuberculosis
gtgacgccagagaattggatcgcccacgacccggacccgcagacggccgccgagctcgccgcctgcggccccgacgagctgaaagcgcggttcagccgcccactggcgttcggcaccgcggggttgcgcgggcacctgcggggcgggccggacgcgatgaacctggcggtggtgttgcgcgccacctgggcggtggcacgggtgctcacggatcgaggtctggctggttcgccggtgatcgtggggcgcgacgctcggcacggctcaccggcgtttgccgctgcggccgccgaagtgcttgccgccgcaggtttttccgtgctgcttctgcccgatcccgcacccaccccggtggtggcgttcgcggtgcggcacaccggcgccgccgctgggatacagatcacggcgtcacacaacccggcgaccgacaacggctacaaggtctatgtcgacggcggccttcagctcctcgcccctaccgaccggcagatcgaagccgcgatggccaccgcgcccccggccgatcagatcgccaggaagaccgtcaaccccagtgaaaaccgcgcctccgatctgatcgaccgttatatccagcgtgcggccggggtccgaaggtgcgccggttcggtccgggtggccctgacgccgctgcacggggttggcggggcgatggccgtcgagacccttcggcgagccggtttcaccgaggtgcataccgtggcgacgcaattcgcgccgaatcccgacttccccaccgtgacattgccgaaccccgaggagcccggagccaccgacgcactgctcaccctggctaccgacgtggacgccgacgtcgcgatcgcgctggatcccgatgcggatcgctgcgcggtcgggatacccacggtgtcgggatggcggatgctgtccggtgacgaaaccggttggctactaggtgattacatcttgtcgcaaaccgacgaccgggcgtcgccgccggaaaccagggtggtggccagcaccgtggtgtcgtcgcggatgctggcggcgatcgccgcgcatcacgctgccgtgcacgtggagaccctcaccggctttaagtggctggcgcgcgccgatgcgaacctgcccggcaccctggtgtacgcctacgaggaagcgatcgggcactgcgtcgaccccaccgcggtgcgtgacaaagacggcatcagcgccgcggtgttggtgtgcgatctggtggccgcgctcaaaggccagggtcgttcggtgaccgacgcgctcgacgagctcgcccgatgctacggcgtgcatgaggttgccgccctgtcacgccccgtgagcggcgccgtcgagaccaccgacctgatgcgacggctccgcgaggacccgccgcgtcggctggccggtttccccgccacggtcaccgatatcggcgacacgctgatcctcaccggcggcgacgacaacatgttggtcagggtggcggtgcggccttctggaacagaaccgaagctgaagtgctacttggagattcgctgcgcggtgaccggtgacctaccagctgcccgacagctggtgcgggcgaggatcgatgagctgtcggctagcgtgcggcggtggtggtga

SEQ ID NO: 28677 - DNA, 624 bp, Mycobacterium tuberculosis
gtgcaggtccatgtcgttgaccacccactggccgcggcccgactgaccacgctgcgtgacgaacgcaccgacaacgccggcttccgggcagcgctgcgcgagctcacgctgctgttgatctatgaggccacccgcgatgcgccctgcgagccagtcccgatccgtacgccgctggccgagacggtcgggtcgcggctaaccaagccacccctgctggttcctgtgttgcgggcggggttggggatggtcgacgaggcgcatgccgccttgccggaggcgcacgttggctttgtcggtgtcgcccgcgacgagcaaacccaccagccggtgccgtatctggactcgctgcccgacgacctgacggatgtaccggtcatggtgcttgacccgatggtggccaccggcgggtcgatgacgcacaccctcggtctgctgatctcgcgcggtgcagcggatatcacggtgctgtgtgtggttgcggcgccagaaggaatcgcggcgctgcagaaggctgcgccaaacgtgcggttgttcactgcggccatcgacgaagggcttaacgaggtcgcctacattgtgcccggtctcggcgatgccggcgatcgccagttcggcccgcgctga

SEQ ID NO: 28678 - DNA, 1773 bp, Mycobacterium tuberculosis
ttgatctgccaacaccgatacgacgtggtgatcgtcggcgcgggcggtgccgggatgcgcgccgcggtcgaggcgggtccgcgggtgcgtaccgcggtgctgaccaagctgtatcccacccgcagccacaccggcgcggcccagggcggcatgtgcgccgcgctggccaacgtcgaggacgacaactgggagtggcacacgttcgacaccgtcaagggcggcgactatctcgccgaccaggacgccgtggagatcatgtgcaaggaagccatcgacgcggtgctcgacctggagaagatggggatgccgttcaaccgcacccccgagggccgcatcgaccagcgccgcttcggcgggcacacccgcgaccacggcaaggccccggtgcgccgggcctgctacgcggccgatcgcaccggccacatgattctgcagacgctgtatcagaactgcgtcaagcacgacgtcgagttcttcaacgagttttacgcgctggatttggctttgactcaaacgccgtcgggcccggtggccaccggggtgatcgcctacgagctagcgaccggtgacatccatgtctttcacgccaaggccgtcgtgatcgcgaccggcggctcgggccgcatgtataagaccacgtccaacgcacacaccctgaccggcgacggcatcggcatcgtgttccgcaagggacttcccttggaggacatggagtttcaccagtttcaccctaccggcctggccggtctgggcatcttaatctccgaagcggtgcgcggcgaaggcggccggctgctcaacggggaaggtgagcgtttcatggagcgctacgccccgacgatcgtcgacctagcgccccgcgacatcgtcgcccgctcgatggtgctggaagtgctggagggacgcggcgccggaccgctcaaggactacgtctacatcgacgtccgccacctgggcgaggaagtgctcgaggccaagctgcccgacatcaccgagttcgcccgcacctacctgggcgtggatccggtcaccgagctggtgccggtctacccgacgtgccactacctgatgggcggcatcccgaccacagtcaccgggcaggtgctgcgggacaacaccagcgttgtcccgggcctgtatgcggccggcgagtgcgcgtgcgtgtcggtgcatggcgccaaccggctgggcaccaactcgctgttggatatcaacgtcttcggtcgtcgggccggcatcgccgccgccagttatgcgcagggtcacgactttgtcgacatgccgcccaacccggaggccatggtggtgggctgggtcagcgacatcctgtccgaacacggaaacgagcgggtcgccgacattcgcggggcgctgcagcagtcgatggacaacaacgccgcggtgttccgcaccgaggagaccctgaagcaggcgctcaccgacatccacgcgctcaaggagcgctactcccgaatcacggtgcacgacaaggggaaacgcttcaacaccgacctgctggaagccatcgagctgggatttttactggagctggccgaggtcacggtggtcggcgctttgaatcgcaaggagtcccgcggcggtcacgcccgcgaggactatcccaaccgcgacgacgtcaactacatgcgacacaccatggcctacaaggaaattggggccgataaggagggccccgagctgcgcagcgatgtccgccttgatttcaaacccgtcgtgcagacccgttacgaacccaaggaacggaagtactaa

SEQ ID NO: 28679 - DNA, 939 bp, Mycobacterium tuberculosis; identical to SEQ ID NO: 28266

SEQ ID NO: 28680 - DNA, 1509 bp, Mycobacterium tuberculosis
gtgacgacgctgtggcagcctcatcgaaatgactacagccctataccaggacgcggggttcacgcccgccggggcgcccgacgaccccgaccgcgtggtggacgtgctgagcgccccggtaccggtcaactgaccagatcggggcgccgggcgctcctcgtcgggctcaccgccgccagcgtcggcgtcctctacgggtacgacctttccgccatcgcgggtgcgttgctgtctctcagcgaggaattcgaactcaccactcgagaacaggagttgctgaccaccacggcggtgctcggccagatcgccggggcgcttggcggcggcatcctcgccaacgcgatcggacgcaagaaatcggtggtgctcatcgtcgccggctacgcagtgttcgccctgctcggcgcgacctcggtgtccgtaccgatgctggtggtggcgcgtctgctgctgggtgtgacaatcggcctgtcggtggtggtggtgccggtgtatgtggccgagtcggcgccggcggcggtgcgtgggtcgttggtgaccgcgtatcagctggcgacgcttagcggcatcgtcgtcggttacctggtcggctacctgttggccggatcgcacggctggcgcgcgatgttcgggctggccgccgcgccggccacgctgctgttgccgttgttgtggcgcatgcccgataccgcccgctggtatctgctcaagggccggatcgccgacgcgcgtagcgcgctgcggcggatccagccggaggccgacatcgatgccgagctggccgatatggcggccgcggtcgacgaacgcggcggcggtatcggcgaaatggtgcggcggccgtatctgcgggccacgctgttcgtcatcgcgctcggcttcctcgtccagatcaccgggatcaacgcgatcatctactacagtccgcgacttttcgccgccatgggcttcgcgggctatttcgcgatgcttgccctgcccgcgatggtgcaagtcgccggcttggcggcggtgtgtgcctcgctgtttctggtcgatcggctgggccgtcgcccgatcctgttgtccggcatcgcgacgatgatcaccgcagatgccgtgctgatcaccgtattcgccaacgactccgatggtggcacggggctggtgttggggttcgccggcgtgctgctgttcatcatcgggttcaacttcggattcggctcgctggtctgggtgtacgccgcggagagcttcccgtcccggctgcggtcgatgggatcgagcccgatgctcacctcgacactgacggccaacgcgatcgttgccgccttctcgctcaccatgctgcgtgtgctcggcggcgcaggcgttttcgcggtcttcggcacgttcgccgtcgtcgcgttcgtggtcgtgtaccgctttgcgccggagaccaagggccgcaaactcgaggagatccggcacttctgggagaacggcggccgctggcccgccgagcggtcaccggcggcggacgaaccgtga

SEQ ID NO: 28681 - DNA, 1152 bp, Mycobacterium tuberculosis
gtgaccgtgctcggcgccgacgccgtcgtcatcgacggccggatatgccggccagggtgggtgcacaccgccgatggtcggattctctccggtggcgctggggcaccgcccatgccggccgacgcggaattccccgatgcgatcgtggtgcccggctttgtcgatatgcatgtgcacggcgggggcggcgcgtcgttcgccgacggcaacgccgcagacatcgcccgtgcggccgagtttcacctgcggcacggcaccactaccacgctggccagtctggtcaccgcgggccccgccgagttgctctccgccgtgggcgctttggccgaggcaactcgggacggcgtcgtcgcgggcatccatctggaggggccgtggctgagcccagcgcggtgcggagcgcacgaccacacccggatgcgtgccccggatcccgccgagatcgagtcggtgctcgccgccgccgacggcgccgtccggatggtcacgttggcacccgagttgcccggaagcgatgcggcgatccggcgcttccgtgacgccgaagtggttgtcgccgtggggcatacggatgcgacctacacacagacccgacacgccatcgacctgggcgcgacagtcggcacccacctgttcaacgcgatgccgccgctggaccatcgggcgcccggacccgtgctggcgttgctgtgcgacccgcgggtgaccgtcgaaatcatcgccgacggcgtgcacgtgcaccccgcggtggtgcacgcggtgatcgaagccgtcggtcccgatcgggtcgccgtggtcaccgacgcgatcgccgcggccggatgcggcgatggcgcgttccggctcggcacaatgccgatcgaggtcgagtcgagcgtggcacgggtggctggtgcgtcgacgctggcgggcagcaccaccaccatggatcagctcttccggacggtggctgggctcggctcgaagtcggactcagccggcgatgtggcgctggccgccgcggtgcaggtgacctcggcgacgccggcccgcgctctcgggctcaccggggtgggccggctggcggcgggctatgccgccaatcttgttgtgctggaccgtgatctgcgggtgacggccgtcatggtcaacgatgactggcgggtgggctga

SEQ ID NO: 28682 - DNA, 1011 bp, Mycobacterium tuberculosis
atgagcacccctaccgggtcccgccggatcttctccggcgtgcagcccacgtctgactcgcttcacctcggtaatgccttgggcgccgtcgcccaatgggttggcttgcaggatgaccacgatgcgttcttctgcgtggtcgacctgcatgcgatcaccatccctcaggatcccgaggcactgcggcgccggaccctgattaccgccgcgcaatacctggcgttgggaatcgatcccggccgcgccaccatcttcgtgcaaagtcaggtgccggctcacacccagctggcgtgggtgctgggttgtttcaccggctttggccaggcgtcgcggatgacccagttcaaagacaagtcggcgcgtcagggcagcgaggccaccaccgtcggcctgttcacctacccggtactgcaggccgcggacgtgttggcctacgacaccgagctggtgcccgtcggggaggatcagcggcagcacctcgagctggcccgcgacgtcgcgcaacggttcaacagccgattccccggcaccctggtggttcccgacgtgctcatccccaagatgaccgccaaaatctacgatctacaagacccgacgtcaaagatgagcaaatcggcgggcaccgatgccggtttgatcaacctgctcgacgatccggcattgtccgccaagaagattcgctccgccgtgaccgacagcgaacgtgacatccgctatgacccggacgtcaagccaggggtgtctaacctgttgaacatccagtcggcggtcaccgggaccgacatcgacgttctcgtcgacggctatgccggacacggctacggcgatttgaagaaagacaccgccgaggccgtcgtcgaattcgtcaacccgatccaagccagagttgacgaattgaccgcagatcccgcggagctggaggccgtgctcgccgccggggcgcagcgcgcccacgatgtggccagcaaaacggttcagcgagtctacgatcggctcgggttccttctataa

SEQ ID NO: 28683 - DNA, 1455 bp, Mycobacterium tuberculosis
gcacaggccagtccggcggcccacggcggcagcggtggtgccggtggcaacggcggcgctggctcggccggcaacggcggcgccggtggtgccggtggcaacggcggtgccggcggcaacggtggcggtggcgatgccggcaacgccggctcaggcggcaatggcggcaagggcggcgacggtgtcggccctggctccaccggcggcgcgggcggcaagggcggcgctggcgccaacggcggttccagcaacggcaacgctcgcggtggcaacgccggtaacggcggccacggcggcgccggcggcagcggcgacacgggcggcgccggcggcgcaggtggccagggtgggttcggtggcaccgggggcagcggcagcggcattggcggcggcgccggcggcaacggcggcaacggcggcgccggcggcaccggcgtcgtgcttggcggcaagggcggcgacgggggcaacggtgaccacggtgggcctgccaccaacccgggcagcggcagccgcggcggcgccggcggctccggcggcaacggtggcgccgggggtaacgccaccggctcaggcggcaagggcggcgccggtggcaatggcggtgatgggagcttcggcgctaccagcggccccgcctccatcggggtcacgggcgcccccggcggcaacggcggcaagggcggcgccggtggcagcaaccccaacggctcaggtggcgacggcggcaagggcggcaacggcggtgccggcggcaacgggggctcgatcggcgccaacagcggcatcgtcggcggttccggtggggccggtggcgctggcggcgccggcggaaacggcagccttagctccggcgagggcggcaagggcggcgacggtggccacggcggtgacggcgtcggcggcaacagctccgtcacccaaggcggcagcggcggtggcggcggcgccggcggcgccggcggcagcggctttttcggcggcaagggcggcttcggcggcgacggcggtcagggcggccccaacggcggcggtaccgtcggcaccgtggccggtggcggcggcaacggcggtgtcggcggccggggcggcgacggcgtctttgccggtgccggcggccagggcggcctcggtgggcagggcggcaatggcggcggctccaccggcggcaacggcggccttggcggcgcgggcggtggcggaggcaacgccccggacggcggcttcggtggcaacggcggtaagggtggccagggcggcattggcggcggcactcagagcgcgaccggcctcggcggtgacggcggtgacggcggtgacggcggcaacggcggcaacagcggcgccaaggccggcggcgccggcggcaaagggcaggccggccagcccaactcaggcacggagccagggttcggcggcgacggcggcctcggcggcgccggcgcaacaccctga

SEQ ID NO: 28684 - DNA, 465 bp, Mycobacterium tuberculosis
atgttccggctgctgttcgtatctccgcgtatcgcccccaacaccggcaacgccatccggacgtgcgccgcaaccggctgtgaactgcatctggtcgagccgctcggcttcgacctgtccgaacccaagctgcgacgggccgggctggactaccacgacctggcctcggtcaccgttcatgcctcgctcgcgcacgcctgggaggcgctgtcgccagcgcgggtgttcgccttcacggcgcaggcgacgacgttgttcaccaacgtcggctaccgggccggtgacgtgttgatgttcgggcccgaacccaccggcctggacgaggccaccctggctgatacgcacatcaccgggcaggtgcgcattccgatgctggcgggccggcgctcgttgaacctgtccaacgccgcagccgtcgcggtctacgaggcctggcgtcagcacggctttgccggggcggtctag

SEQ ID NO: 28685 - DNA, 1767 bp, Mycobacterium tuberculosis
atgtcgtttgtcgtagcagtcccggaggcattggcggcggccgcgtcggatgtggcgaacatcggttctgcgctaagtgccgcgaatgcagcggcagccgccggcacaacggggctactggcagccggtgccgacgaggtctcggccgccctggcgtcgctgttttccgggcacgctgtgagctaccaacaggtcgcggcccaggcgacggcgttacacgatcagtttgtccaggccttgaccggtgccggcggatcgtacgccctcaccgaggccgccaacgtccagcagaatctgctgaacgcaattaacgcgcccactcaggcgctgttggggcgcccgttaattggcgacggggctgtcggcaccgccagcagccccgacgggcaagatggcggtctgctgttcggcaacgggggcgccggctacaacagcgccgccacgcccggaatggccggcggcaacggcggcaacgccggattgatcggcaacggcggtactggcgggtcgggcggtgccggcgcggccggtggcgccggcggcagcggcggctggttgtacggcaacggcggaaacggcggcatcggcgggaatgcgatcgtcgcgggcggtgccggcggcaatgggggcgctggcggcgccgccggattgtggggcagtggcggcagcggcggccaaggcggcaacggtctgaccggcaacgacggcgtgaatccggcccccgtcacaaaccccgcgctaaatggcgccgccggcgacagcaatatcgagccgcaaaccagcgtcctgatcggcacccaaggcggtgacggcacgcccgggggtgctggcgtcaacggcggcaacggtggcgcgggcggagacgccaatggcaaccccgcaaacacctcgatcgccaacgcaggcgccggcgggaacggcgccgccggcggtgacggcggtgccaatggcggtgcgggcggcgccggcgggcaggccgcgtccgccggtagttccgtcggcggtgacggcggcaacggcggtgccggcggtacgggcacgaacgggcacgccggcggtgcgggcggcgccggcggtgccggtggtcgcggcgggtggctggtcggcaacggtggcaacggtggcaacggtgccgccggcggcaacggcgccatcggcggtaccggtggtgccggcggcgtccccgccaaccagggcggtaacagcgccctaggcacccagccggtcggcggcgacggcggcgacggcggcaacgggggcaccggaggcaccggcgggcgtggcggcgacggcggatccggcggcgcgggcggcgcgagcggttggttgatgggcaacggcggcaacggcggcaacggcggcaccggcggctcaggcggtgtcggcggcaatggcggcatcggcggtgacggcgccggcggcggaaacgccacgagcacgtcgagcatccccttcgacgcccacgggggtaacggcggcgctggtggcgacgctggtcacggcggaacgggcggcgacggcggtgacggggggcatgccggcaccggtggacgtggcgggttactggccggccagcacgccaactccggcaatggcggtggcggcggtaccggcggtgccgggggcacccatggcacccccggcagcggcaacgcaggcggcaccggcaccggtaacgctgacagcacaaacggcgggccaggcagcgacggcctcggcggggacgcgtttaacggcagtcgcggcaccgacggcaaccccggctaa

SEQ ID NO: 28686 - DNA, 885 bp, Mycobacterium tuberculosis; identical to SEQ ID NO: 28359

SEQ ID NO: 28687 - DNA, 1053 bp, Mycobacterium tuberculosis
atgggaggcgtattgactctggatgcggcttttctggggagtgtccctgctgaccttgggaaagcattgttagaacgggctcgagcggattgtggccctgtgctgcatcgggccattgagtcgatgcgcgagccgttggcgacgatggcgggatatcaccttggctggtggaacgccgatcgatccacagcggcaggatcgtcgggcaagtattttcgcgccgcccttgtctacgcggcggccgcggcttgcggtggtgatgtcggtgatgctactccggtgtcggcggctgtggagttggtgcacaacttcacgttgttgcatgacgatgtgatggatggggatgcgactcgcaggggacggccgacggtatggagtgtgtggggtgtgggcgtcgcgatcctgttgggagatgcgttgcacgccacggccgttcggatactgaccggcctgaccgacgagtgtgtggcggtcagggcgataaggcgattgcagatgtcgtgcctggacttgtgtatcggccagtttgaggattgtttattggagggacagcccgaagttacagtcgatgactatctgcggatggccgcgggcaagacggccgccctgaccggttgttgttgcgctctgggagctttagtggccaatgcagacgacgcgacgattgctgcgttggagcgttttggccatgagttgggtcttgcgtttcaatgcgtcgacgatctgatcggcatctggggtgaccctggtgtgacgggaaagccggtcggcaacgaccttgcccgacgtaaggcgacactgccagttgttgccgccctgaactcgcgatccgaagcggcgaccgaattggcggccctctatcaagcacctgccgcaatgacagcaagcgatgtcgagcgggctaccgcgcttgtcaaggtggccgggggtggtcatgtggcgcagcgatgcgccgatgaacgcatccaggctgctattgcggcactgcccgatgcggtgcgatccccagacctgatcgcgttgtcgcaactgatatgtcgccgggagtgctga

SEQ ID NO: 28688 - DNA, 705 bp, Mycobacterium tuberculosis
gtgtttcgtactgtaggcgatcaggcatcgttgtgggaatccgtgctgcccgaggagttgcggcggctgcccgaagagctggcccgggtggatgcgctgctcgatgattcggcgttcttctgcccgtttgtgccgttcttcgacccgcggatgggtcggccgtccataccgatggagacctatttgcggttgatgttcttgaagttccgttaccggttgggctatgagtcgctgtgtcgggaggtcaccgattcgatcacctggcggcggttctgccgtattccgttggagggatcggtgccgcacccaaccacgttgatgaagctgaccacgcgctgcggtgaggatgcggtggccgggctcaatgaggcgctgctggccaaggcggccagcgaaaagctgttgcgcaccaacaaggtccgtgccgacaccaccgtggtggagggcgatgtgggctatcccaccgacactggactgctcgccaaggcggtcggctcgatggcgcgcaccgtggcgcggatcaaagccgcggacgcgggatcggcgccgctcggtgggtcgtcgggcccgcgcgatcgcctccaagctgcggttacgcggcgcgcagcaacgcgatcaggcgcaggccttcgtgcgccggatcaccggggagctagccgggatcgccgagcaggcgctgaccgaggctgccgcggtggtacgtaa

SEQ ID NO: 28689 - DNA, 927 bp, Mycobacterium tuberculosis
gtgagcgtcgtattcgccgacgtcgacaccggcatcgacgacgcgctggccgtgatctatctgctggccagtcccgacgccgatctggtcggcatcgcctcgaccggcggaaacatcgcggtaggtcaagtgtgcgcgaacaacctgagcttgctcgaattgtgcggtgccgcagacatccccgtgtccaaaggcgccgatgagccgctcggcggccggtggcccgatcacccaaagtttcacggccccaaggggataggctatgccgagctgccggccagcaatcgccggctcaccgattatgacgccacgacggcctggatcgcggcggcgcactcccacgccggcgacctgatcggtctggtcaccggcccgctgaccaacctggcgctggcgctgcgcgccgaacccgcgctgccgaggctgctgcgccggctggtgatcatgggcggcatgttcgacggccagccgatcaccgaatggaacatccgggtggatcccgaggcggccagcgaggtgttcaccgcgtgggccggacaacgacaactgccgatcgtgtgcggtttggatctcacccggcgggtcgcgatgacaccggacattctcgcccggctggcgtccgtctgcggctcgtctccggtgatgcgggtgatcgaggacgcgctgcggttctacttcgagtctcatgaggcgcgcggacatgggtacctggcatatatgcacgacccgctggccgccgcggtcgcaatggacccggaactcctgacgacccggaccgcgacggtggatgtcgacccgacgggggcgacggtcaccgactggtccgggaagcgaaatcccaacgcgcggatcggcatgagcgtcgatccggcggtgttcttcgaccggttcgtcgaacggatcggacgattcgcgcgccgaacgtga

SEQ ID NO: 28690 - DNA, 1578 bp, Mycobacterium tuberculosis
gtggtgcagcctgctgacatcgacgtgcctgagacaccggctcgaccggtgttggtggtcgacttcggtgcccaatatgcccagttgattgcccgtcgggttcgagaagcacgggttttctccgaggtgattccgcacaccgcctcgatcgaggagatcagggcccgtcagccggtggcgctcgtgctttccggtggaccggccagtgtctacgccgacggcgctccgaaactcgatccggcgctactggacctcggtgtaccggttcttggcatctgctacgggtttcaggccatggcgcaggcgctcggggggatcgtcgcccacaccggcactcgcgaatacggtcggactgaactgaaagtccttggtggcaaactgcattcggatcttcccgaggttcagccggtatggatgagtcacggtgacgcggtcacggccgcgccggacggattcgacgtggtggctagcagcgccggtgccccggtggccgccttcgaggccttcgaccggcgcctggccggggtgcagtatcacccggaggtgatgcacaccccacacgggcaacaggtgctcagccggtttttgcacgacttcgccgggctcggcgcccagtggacgcccgccaacatcgccaacgcgctgatcgagcaggtgcgcacccagatcggcgacggccacgccatctgcgggctatccggcggcgtggattccgcggtggccgcggccctggtgcagcgggccatcggcgaccggttgacctgtgtcttcgtcgaccacgggctgttgcgcgccggtgagcgggcgcaggtgcaacgcgatttcgtggccgccaccggcgccaacctggtcaccgtcgacgcggccgagaccttcctcgaggcgctgtcgggcgtgagcgcccccgagggcaaacgcaagatcatcggccgtcagttcatccgcgcgttcgagggcgcggtgcgggatgtgctggacggtaagactgctgagttcctggtgcagggcacgctgtatccggatgtggtggagtccggcgggggcagcggcaccgcgaacatcaagagccaccacaatgtcggcggcctgcccgacgacctgaagttcaccctcgttgagccgctgcggctgctgttcaaagacgaggtgcgcgcggtcgggcgggagttgggtctgccggaggagatcgtggcgcgccagccgtttccgggaccggggttgggtattcggatcgtcggggaggtcaccgccaagcggttggatacgctgcggcacgccgattcgatcgtgcgtgaggagctgaccgcggcgggcctggacaaccagatctggcagtgtccggtggtgctgttggccgatgtccgctcggtgggtgtgcagggtgacggtcgcacctatggccacccgattgtgctgcgtccggtgtcgagtgaagacgcgatgaccgccgactggacccgggtgccctacgaggtgctcgagcgcatctcgacccggatcaccaacgaggtcgccgaggtcaaccgcgtggtgctggacatcaccagcaagccgcccgccaccatcgagtgggagtag

SEQ ID NO: 28691 - DNA, 1035 bp, Mycobacterium tuberculosis
atgacgacagtcttgggcatcgaaacctcctgcgatgaaaccggtgtcggcatcgcgcggctcgatcccgatggcaccgtgacattgttggccgacgaggtggcttccagtgtcgacgagcatgttcggttcggcggcgtggtccccgagattgcctcccgtgcgcacctggaggcactgggtcccgcgatgcgccgcgcgctggcggccgccggcttgaaacagccagacattgtcgcggccaccatcggtcccgggctcgcgggcgccctgttggtgggagtggctgcggccaaggcatattcggctgcttggggggtgccgttctatgcggtgaatcatctgggcgggcacttggccgccgacgtctacgaacacgggccgctgcccgagtgtgtggcgttgttggtgtccggaggacatacccacctgttgcacgttcgctcgctcggtgagccgatcatcgagctgggcagcaccgtcgacgacgccgccggcgaggcctacgacaaggtggcccggttgctgggattgggctatccgggtggcaaggcgctcgacgacctggcgcgcaccggtgatcgggacgccatcgttttcccgcgcggcatgagtggcccggccgatgaccgctatgcgttcagcttctccgggctcaagacggccgtcgcgcggtatgtggaaagccacgcggctgacccgggcttccgtaccgccgacattgccgccggattccaggaggccgtcgcggacgtgttgaccatgaaggcggtacgggccgccactgcgctaggcgtctcaacgctgctgatcgcggggggagtggcggcgaactcccggctgcgagagctggccacacagcgctgcggcgaggcgggccggacgttgcggatccccagtccccggctatgcaccgacaacggggcgatgatcgcggcgttcgccgcgcagctggtggccgcgggagcgccgccgtcgccgctggacgtgcccagtgacccgggtctgcccgtgatgcaggggcaggtgcggtga

SEQ ID NO: 28692 - DNA, 1227 bp, Mycobacterium tuberculosis
gtgaaacggttctgggagaatgtcggaaagccaaacgacacgacagatgggcggggcacgacttcgttggccatgacaccgatatcccagacacctggcctcctcgccgaggccatggtggatctgggcgctattgaacacaacgtgcgggtgctgcgtgagcacgccggccacgcgcagctgatggcggtggtcaaggccgacggctacggtcacggtgctacgcgcgtcgcccaaaccgccctgggagccggtgcggccgaactcggcgtcgccaccgtcgacgaggcgctagcgctgcgcgctgatggcattaccgcaccggtgctggcctggctgcatccgcccggcatcgacttcgggcccgcgctgctggccgacgtgcaggtcgcggtgtcctcgctgcgccaactcgacgaactgttgcacgcggtgcgccggaccggccggacggcgacggtgaccgtcaaggtggataccgggctgaaccgcaatggcgtgggaccggcacaattcccggccatgctgaccgcgttacgccaagccatggccgaggacgccgtccggctgcgggggctgatgtcgcatatggtttacgccgacaagcctgacgattccatcaacgatgttcaggcccaacggtttaccgcctttctggcgcaggcccgcgaacaaggggtgcggttcgaggtggcgcatctatcgaactcatcagcaactatggcgcgccccgacctgacgttcgacctggtgcggccgggcatcgcggtgtatgggctaagcccggtacccgccctcggtgacatggggctggtgccggcgatgaccgtgaaatgtgctgttgcgctggtgaaatcgattcgtgcgggggagggcgtgtcgtatgggcacacatggatcgcgccacgcgacaccaatctggcgctgctgccgatcggttacgcagacggcgtgttccggtcgctgggcgggcggctggaggtgctgatcaacggcagacgatgccccggtgtggggcggatctgcatggaccagttcatggtcgacctgggccccgggccgcttgatgtggccgaaggcgacgaggcgattttgttcgggccgggcatccggggtgagcccacggctcaggactgggccgatcttgtcggcaccatccactacgaagtggtcaccagcccgcgaggacgtatcaccaggacctatcgcgaggctgaaaaccgttga

SEQ ID NO: 28693 - DNA, 1875 bp, Mycobacterium tuberculosis
gtgtgcggaattgtcggttacgtcgggcggcgccccgcctacgtcgtcgtcatggacgcgctgcgccggatggagtaccgcggctacgactcgtcgggcatcgcgctggtcgacggtggcacactcaccgtgcgccggcgtgcgggccggctggccaacctcgaggaagccgtggcggaaatgccgtccacggcgctgtccggtactaccggcctgggccacacccgctgggccacccacggtcgtcccaccgaccgcaacgcgcacccgcaccgcgacgctgccggcaagatcgccgtcgtccacaacggcatcatcgagaacttcgccgtcttgcgccgggagctggagactgccggtgtcgagtttgccagcgacaccgataccgaggtcgcggcgcacctggtggcgcgggcgtatcggcacggcgagacggccgatgacttcgtcggctccgtacttgccgtgctgcgccggcttgaggggcatttcacgctcgtgttcgccaatgccgacgaccccggcaccctcgtggcggcccgccgttccacgcccctggtgctgggcatcggcgacaacgagatgttcgtcggttccgacgtggccgcgtttatcgagcacacccgggaagcggtcgagctcggccaggaccaggcggtggtgatcaccgccgacggctaccggatcagcgatttcgacggcaacgatggcctacaagctgggcgcgatttccgccccttccacatcgactgggatctggctgccgccgaaaagggcggctacgagtacttcatgctcaaggagatcgccgagcagcccgccgcggtggccgacaccttgctcggacacttcgtgggtggccggatcgtgctcgacgagcagcggttgagcgaccaggaactgcgcgagatcgacaaggtgttcgtggtggcctgcggtaccgcatatcactccgggctgctggccaagtacgcgatcgagcactggacgcggctgcccgtggaagtggaactcgccagcgagtttcggtatcgggatccggtgttggaccgtagcaccttggtggtggcgatctcgcagtccggggaaaccgccgacacgctggaagcggtccgacacgccaaggagcagaaagccaaggtgctggcgatctgcaacaccaacggctcgcagatcccgcgcgagtgcgacgcggtgctctacacccgcgccggcccggagatcggtgtggcgtccacaaaaacgtttctggcgcagattgctgccaactatctgctcggccttgccttggcgcaggcccgcggcaccaaataccccgacgaggtcgagcgcgagtaccacgaactggaagcgatgccggacctggtggcccgggtgatcgcggcgaccggaccggtggccgagctggcccaccggttcgcccagtcgtcgaccgtgctgttcctgggtcgccatgtcggctatccggtggcgctggagggtgcactcaaactcaaggagttggcctacatgcacgccgagggtttcgcggccggcgagctcaagcacggcccgatcgcgctgatcgaagacggcctaccggtcatcgtcgtcatgccctcacccaaggggtcggccacgctgcacgccaagctgctgtccaacatccgtgaaatccagacccgcggtgcggtgaccatcgtgatcgccgaggagggcgacgaaacggtgcgcccctacgccgatcacctgatcgaaatcccagcggtgtcaacgctattgcagccgctgctatcaaccattccgcttcaggtgttcgcggcttcggtggcgcgcgcccgcggctacgatgtcgacaagccgcggaatctggccaagtccgtcaccgtcgaatag

SEQ ID NO: 28694 - DNA, 1347 bp, Mycobacterium tuberculosis
atgggtcgactgtttggcaccgatggtgtgcgcggtgtcgccaatcgcgagttgaccgcggaactggccctggcactgggcgccgcggcggcgcgacgattgtcgaggtcgggcgcaccgggtcggcgagtcgcggtgcttggccgcgatccgcgggccagcggcgagatgctggaggccgccgtgatcgccggcctgaccagtgagggcgtcgacgcgctgcgggtcggggtgttgccgacccccgcggtggcctatctgaccggcgcctacgacgccgacttcggggtgatgatctcggcgtcgcataacccgatgcccgataacggcatcaaaatcttcgggcccggcggccacaaattagatgacgacaccgaggatcagatcgaggatctggtcctcggcgtctcccgcggacccgggttgcggccggccggcgcggggattggccgcgttatcgacgccgaggatgcgaccgaacgctacctgcgccacgtggccaaggccgccaccgcccggctcgatgacctggccgtggtggtcgactgcgctcatggggccgcgtcgtcggcggctccgcgcgcctaccgagcggccggtgcccgggttatcgcgatcaacgccgaacccaacggacgcaacatcaacgacggctgtggatcgactcaccttgacccgctgcgggcagcggtgctcgcccatcgggccgacctgggcctggcccatgatggagacgccgatcggtgcctggccgtcgacgccaacggtgacctcgtcgacggtgacgccatcatggtggtgctggcgctggcaatgaaagaggccggtgagttggcctgcaacacattggtggccaccgtgatgagtaacctcgggctgcacctagccatgcgctcggccggcgtcaccgtgcgtacaaccgccgtcggtgaccgctacgtcctcgaagagctgcgggccggtgactacagcctcggaggcgaacaatccggccacatcgtcatgccggcgctgggctccaccggtgacggcatcgtcaccgggctgcggttgatgacccgcatggtgcagaccggctcgtcgttgtccgacctggcgtcggcgatgcggacgttgccgcaggtgctgatcaacgtcgaggttgtcgacaaggccaccgccgccgcggcgccctcggtccgaacggcggtcgagcaggccgcggccgagctgggtgacacgggtcgaatcctcttgcgcccgtccggaactgagccgatgattcgggtgatggtggaggcagccgacgagggcgtcgcccagcggctggcggccacggtcgccgacgcggtgagcaccgcgcgctga

SEQ ID NO: 28695 - DNA, 456 bp, Mycobacterium tuberculosis
atgaccgaaaccaccccagccccgcaaaccccggcggccccggccgggcccgcacaatcgttcgtgttggagcggcccatccagaccgttgggcgccgtaaggaggccgtggtacgagtgcggctggtgcccggcaccggcaagttcgacctcaacggccgcagcttggaggactacttcccaaacaaggtgcaccagcagttgatcaaggcacccctggtcaccgtggatcgggtggaaagtttcgacatctttgcccacctgggcggcggcggcccgtcgggtcaggccggcgcgctgcgcctgggtatcgcccgggcattgattctggtatcgccggaggaccggcccgcgctgaagaaggccggcttcttgacccgtgatccacgcgccaccgagcgcaagaagtacggcctgaagaaggcccgcaaggcgccccagtacagcaagcgctga

SEQ ID NO: 28696 - DNA, 444 bp, Mycobacterium tuberculosis
gtgcccacgtacgcgcccaaggcgggtgacaccacgcgatcgtggtacgtcatcgacgccacggacgtggtgcttggccgccttgccgtcgcggcggccaacctgctgcgcggcaagcacaagccgacgttcgcccccaatgtcgatggcggtgacttcgtcatcgtgatcaacgccgacaaggtcgccatcagcggcgacaaactgcagcacaagatggtttaccggcactcggggtatcccggcggcctgcacaagcgcaccatcggtgagctaatgcaacgccaccccgaccgcgtggtggaaaaggcgatcctcggcatgttgcccaagaacaggctcagccgccagatccagcgcaagcttcgcgtctacgccggcccggagcatccgcacagcgctcagcagccggttccgtacgagctcaagcaggtggcgcaatga

SEQ ID NO: 28697 - DNA, 1404 bp, Mycobacterium tuberculosis
atgcctacgtctgatccgggactgcgccgggtcaccgtacatgccggcgcccaggccgtcgacctgaccttgcccgccgcggtgcccgtcgcgactctgatcccgtcgatcgtcgacatcctgggtgaccgtggcgccagcccggcgacggcggcgcgctaccagctgtctgccctgggggcgccagctctgccaaacgcaacgacattggcgcaatgcggtatccgcgacggcgccgtcctggtcttgcataagtccagcgcccagccgcccaccccccgctgtgacgatgtggccgaagcggtggcggcggcgcttgacaccacagcccggccccaatgccagcgcacgacccggctcagcggtgcgctggcggcaagctgcatcaccgccggcggcggcctgatgctggttcgaaacgccctcggcaccaacgtaacccgctactccgacgccacggccggagttgtagcggcggccggcttggctgccttgctgtttgcggtgattgcatgccggacatatcgggacccgatcgccggcctcacgttgagcgttatcgccaccatattcggtgctgttgccggcctactggcggtgcccggggtccccggtgtccatagcgtgctagttgccgcgatggcggcggccgccacgtcggtgctggcaatgcgcataacgggttgtgggggtatcacgttgaccgcggtggcgtgctgcgcggtagtcgtcgcggccgctacgctggtcggcgcgatcactgcggccccggtgcctgccatcggttcgctggccacgctggcatcctttggtctgttagaggtatccgcgcggatggcagtcctgttggcggggttgtcgccacgattgccgcccgcgctgaaccccgacgacgccgatgccctgcccaccacggatcggctgaccacccgagcgaaccgtgcagatgcttggttgacgagcctgctggcggccttcgcggcctcggcgaccatcggtgccatcggaaccgccgtcgcaacccacggcatccacaggtccagcatgggcggtatcgcgttggccgccgtcaccggtgcgctgctgctgctacgagcacgttcagcagacaccagaaggtcactggtgtttgccatctgtggaatcaccaccgttgcaacggcatttaccgtcgccgcggatcgggctctggaacacgggccgtggattgccgcgctgaccgccatgctggccgccgtggcaatgtttttgggcttcgtcgctcccgcgttgtcgctctcgcccgtcacgtaccgcaccatcgaattgctggagtgtctggcgctgatcgcaatggttccattgaccgcttggctatgcggcgcctacagcgccgttcgccacctcgacctgacatggacatga

SEQ ID NO: 28698 - DNA, 1269 bp, Mycobacterium tuberculosis
atggctcagggccttaagctaggcctgcacattccgctgtgggcgggttacgcgtgctcgaccctgatcatcttcccgctggtggtctacgggatgaaagttttgtcacagctgcaactttggaccaccccgctctggctgatcctgatggcggccccatttggctacctggtagtcagccatcccgattcgattggacagtttttctcctacgccggcaaggatggtcatggcggccttagcttcggttctgtcctgttggcagcgggagtgtgcctgtcactcatcgctcagatcgccgagcagatcgactacctgcgcttcatgccgccacggacgccggagaacgcgaacaggtggtggacgtggacgctgctggccggtcccggctgggttgcatttggggcgaccaaacagatcatcggcctgttcctggcggtctatctgatggccaacatccccggctcgtcgacaatcgccaaccagccggtgcaccaattcatgcagatataccgcaccttcgtaccgggctggctggcgttgacactcgccgtcatcctggtggtcttgagccagatcaagatcaacgtcacgaacgcgtattcgggctcgctggcgtggaccaattcattcacacggctcaccaagcactatcccgggcgggtcgtgtttcttggggttaacctcgcgattgcgttgattctcatggaagccaacatgtttgacttcctgaacacaatcctgggttgctacgccaattgcggtatggcctgggtggtggcggtggcgtcggacatcggcttcaacaagtatctgctcggcctgtcgccgaagactcccgaattccgccgcggcatgctatacgccatcaacccggtcggcttcgggtcgttgctgctggccgcggggctgtcgatcgtcaccttcttcggcggtctgggtgcggcactgcagccttattcaccattggtggcaatcgtcaccgcgttggtaatgccgcccattctggcagccgcgaccaaaggcaagtactaccttcgccgcacgcacgacggtatcgatctgcccatgtacgacgagcacggcaatccctcggccgcggtgttgacttgccatgtctgccaccaggatttcgagcggcccgacatgctggcctgccagacccatggtgcgcatgtctgttcgctgtgcttgtccacggacaagcaggccgagcatgtgcttcctgggttagcccgagcgcacatcccgggtgaccaagttccgtga

SEQ ID NO: 28699 - DNA, 543 bp, Mycobacterium tuberculosis
atgcccaagcctaccaagggccctcgcctcggcgggtcgtcttcacatcagaaggcgatcttggccaacctcgccacgtccctgttcgagcatgggcggatcacgacgaccgagccgaaggcccgggcgctgcgtccgtacgcggagaagctgatcacgcatgccaaaaaaggcgcgttgcacaaccggcgcgaggtgctcaagaagctccgtgacaaggatgtggtgcataccttgttcgccgagatcggaccgttcttcgccgaccgcgatggtggctacacccgtatcatcaaaatcgaggcacgtaagggcgacaacgctccgatggccgtgatcgaactggtccgggagaagacggtgacctcggaggccaatcgagcacgccgggtagctgccgcgcaggcgaaggccaagaaggcggcggccatgccgaccgaggagtccgaggccaagcctgctgaggagggtgacgtggtcggcgccagtgagcctgacgcgaaggcccccgaagagccccccgcagaggcccccgagaattag

SEQ ID NO: 28700 - DNA, 1044 bp, Mycobacterium tuberculosis
atgctgatctcacagcgccccaccctgtccgaggacgtcctcaccgacaaccgatcccagttcgtgatcgaaccgctggagccgggattcggctacaccctgggcaattcgctgcgtcgcaccctgctgtcgtcgattcccggagcggccgtcaccagcattcgcatcgatggtgtactgcacgaattcaccacggtgcccggggtcaaagaagatgtcaccgagatcatcctgaatctcaagagcctggtggtgtcctcggaggaggacgagccggtcaccatgtacctacgcaagcagggtccgggtgaggttaccgccggcgacatcgtgccgccggccggcgtcaccgtgcacaaccccggcatgcacatcgccacgctgaacgataagggcaagctggaagtcgagctcgtcgtcgagcgtggccgcggctatgtcccggcggtgcaaaaccgggcttcgggtgccgaaattgggcgcattccagtcgattccatctactcaccggtgctcaaagtgacctacaaggtggacgccacccgggtcgagcagcgcaccgacttcgacaagctgatcctggacgtggagaccaagaattcaatcagcccgcgcgacgcgctggcgtcggctggcaagacgctggtcgagttgttcggcctggcacgggaactcaacgtcgaggccgaaggcatcgagatcgggccgtcgccggccgaggccgatcacattgcgtcattcgccctgccgatcgacgacctggatctgacggtgcggtcctacaactgcctcaagcgcgagggggtgcacaccgtgggcgaactggtggcgcgcaccgaatccgacctgcttgacatccgcaacttcggtcagaagtccatcgacgaggtgaagatcaagctgcaccagctgggcctgtcactcaaggacagcccgccgagcttcgacccctcggaggtcgcgggctacgacgtcgccaccggcacctggtcgaccgagggcgcgtacgacgagcaggactacgccgaaaccgaacagctttag

SEQ ID NO: 28701 - DNA, 606 bp, Mycobacterium tuberculosis
atggctcgttacaccggacccgtcacccgcaaatcacggcggttgcgcaccgacctcgtcggtggcgaccaggccttcgagaagcgtccctacccgcccggccaacacggtcgcgcgcggatcaaggaaagcgaatatctgcttcagctgcaggagaagcagaaggcccgtttcacatacggcgtaatggaaaagcagttccgccgctactacgaagaggccgtgcggcagcccggcaagacgggtgaagaactgctgaagatcctcgaaagccggctggacaacgtcatctaccgtgccgggctggcgcgcacccggcggatggctcgccagctggtcagccacgggcatttcaacgtcaacggcgtgcacgtcaacgtccccagttaccgggtgtcgcagtacgacatcgtcgacgtgcgggacaagtccctgaacacggtgccgttccagattgcccgggagacggcgggcgagcgtccgatcccgagctggctgcaagtggtgggggagcggcaacgcgtcctgatccaccagctacccgagcgcgcgcagatcgacgtcccactcaccgagcagctgatcgtcgagtactactcaaagtaa

SEQ ID NO: 28702 - DNA, 420 bp, Mycobacterium tuberculosis
atgccaccagcaaaaaaagggccggcaacgtcggctaggaagggccagaagacccgccggcgggagaagaagaacgtcccgcacggcgccgcccacatcaagagcacgttcaacaacacgatcgtgaccatcaccgacccgcaaggcaacgtcattgcctgggcatcgtcggggcacgtcggcttcaagggttcccggaaatcgaccccgtttgcggcccagctggccgcggagaacgccgctcgcaaggcccaagaccacggggtgcgcaaggtcgacgtgttcgtcaagggcccgggctcgggccgcgagaccgcgatccggtcgctgcaggccgccggcctggaggtgggcgcgatctcggatgtcaccccccagccgcataacggtgtccggccccccaagcgccggcgcgtctag

SEQ ID NO: 28703 - DNA, 375 bp, Mycobacterium tuberculosis
atggctcgactcgtcggcgtcgacctgccgcgcgataagcggatggaggtcgccctgacctacatctttggcatcggccgtacccgctcgaacgaaatcctggcggccaccggcattgaccgggatctgcgcaccagagatctcaccgaagaacagctgatccacctgcgcgactacatcgaagcgaacctgaaggtggagggtgacctgcgccgcgaggtacaggccgacatccgtcgcaagatcgagattggctgctatcaggggttgcggcaccgccgcggtatgccggtacgcggccagcggacaaaaaccaacgcgcggacccgcaaaggccccaagcgcaccatcgcaggcaagaagaaggctaggtaa

SEQ ID NO: 28704 - DNA, 114 bp, Mycobacterium tuberculosis
gtgaaggtaaacccgagcgtcaagccgatctgtgacaagtgcaggctgatccgtcggcacgggcgggttatggtgatctgttccgatccgcgtcacaaacaaaggcagggctag

SEQ ID NO: 28705 - DNA, 222 bp, Mycobacterium tuberculosis
atggccaagaaggacggtgccatagaggtcgagggtcgcgtggtcgagcccctgcccaatgccatgttccgcattgagctggagaacggccacaaggtgctcgcccacatcagcggcaagatgcgtcagcactacattcgcatcctgcccgaggaccgggtggtggtggaattgtcgccctacgacctgtcccggggccgcatcgtgtaccggtacaagtag

SEQ ID NO: 28706 - DNA, 1095 bp, Mycobacterium tuberculosis
gtgggaacacatgcagccaccatgagagtccgcgccggcgtgcggtccagtccgctgttgttgcacgcgggcacgcctccgacggctgccgccgccgagagcgggatgcgtaccctggttaccggcagctccggtcacctgggcgaggcgctggtgcgcactctgcgtgcacggggcgccgacatcgtcagcctcgacagcagaccgtcgcggtacacgaatatcgttggctgcgtgagtgatcgagcactgctgcgagacgtgatggccggcgttgaggtggtgttccacgcggccgcccatcacaagccgcaactggccttcctgccgcgtcaggcgtttctggacacgaacatcatcggtacccagaccgtgctggatgctgcggtcgccgccaacgtccgcgccttcgtcatgacatcatcgacgaccgttttcggcgacgccctgacaccgccggcagaccagcccgcggcgtggatcgacgaatccgtcacgcccattcccaagaacatctacggcgtgaccaaagctagctccgaggacctctgccagttggcacatcgcaacgacggtttggcctgcgtcgtgctgcgtgttgcccgattcttcgtcgagggcgatgacatgcctgacctgtatgacgggcgcagccaggacaacatcaaagccaacgaatatgcctgccggcgggtcgcgctcgaagacgcggtagatgcgcacctcaacgccgcgcagcgagctccccagctggggttcgggcgctatctggtgtcggcgaccacaccgtttacccgtgatgacctgacgcagctgcgcaccgacgcggcatcggtgttcgcccggcgggtaccgctggccgcggctgtgtggacccagcgtggttggcgcttccccgaccgcctcgaccgcgtgtacgttaactcccgcgctcgccgtgacttgaactggcgtccgcggttcgacctaaacgcggtcgccgccagactcgcacgcgggcagtcggtgcacacgccgttgtcacaactggtgggctccaaggcatatgcccacagctcctaccaccgtggcgtgtttgctccggccaggccctga

SEQ ID NO: 28707 - DNA, 1041 bp, Mycobacterium tuberculosis; identical to SEQ ID NO: 28478

SEQ ID NO: 28708 - DNA, 1182 bp, Mycobacterium tuberculosis
gtggtggatttcggggcgttaccaccggagatcaactccgcgaggatgtacgccggcccgggttcggcctcgctggtggccgccgcgaagatgtgggacagcgtggcgagtgacctgttttcggccgcgtcggcgtttcagtcggtggtctggggtctgacggtggggtcgtggataggttcgtcggcgggtctgatggcggcggcggcctcgccgtatgtggcgtggatgagcgtcaccgcggggcaggcccagctgaccgccgcccaggtccgggttgctgcggcggcctacgagacagcgtataggctgacggtgcccccgccggtgatcgccgagaaccgtaccgaactgatgacgctgaccgcgaccaacctcttggggcaaaacacgccggcgatcgaggccaatcaggccgcatacagccagatgtggggccaagacgcggaggcgatgtatggctacgccgccacggcggcgacggcgaccgaggcgttgctgccgttcgaggacgccccactgatcaccaaccccggcgggctccttgagcaggccgtcgcggtcgaggaggccatcgacaccgccgcggcgaaccagttgatgaacaatgtgccccaagcgctgcaacagctggcccagccagcgcagggcgtcgtaccttcttccaagctgggtgggctgtggacggcggtctcgccgcatctgtcgccgctcagcaacgtcagttcgatagccaacaaccacatgtcgatgatgggcacgggtgtgtcgatgaccaacaccttgcactcgatgttgaagggcttagctccggcggcggctcaggccgtggaaaccgcggcggaaaacggggtctgggcgatgagctcgctgggcagccagctgggttcgtcgctgggttcttcgggtctgggcgctggggtggccgccaacttgggtcgggcggcctcggtcggttcgttgtcggtgccgccagcatgggccgcggccaaccaggcggtcaccccggcggcgcgggcgctgccgctgaccagcctgaccagcgccgcccaaaccgcccccggacacatgctgggcgggctaccgctggggcactcggtcaacgccggcagcggtatcaacaatgcgctgcgggtgccggcacgggcctacgcgataccccgcacaccggccgccggatag

SEQ ID NO: 28709 - DNA, 1203 bp, Mycobacterium tuberculosis
atgtccggcggcggatctcgacgcaccagtgtcagggtggcagcggcgctgctggccgggctgatggtgggatccgcagtgctgacttatctttcgtatacggcggctttcacgtctacggacaccgtcacggtatcgtcgccgagggccggcctggttatggagaagggcgccaaggtcaaataccgtggcatccaggtaggcaaggtcacggatatcagctacagcggcaaccaagcacggctcaagctggccatcgacagcggcgagatgggttttatcccctccaacgcgacggtgcgcatcgccggaaacaccatcttcggcgccaaatcggtggaattcattccgccaaagacgccgtcgcccaagccgctaagtccgaatgcgcacgtggcggcgtctcaggtacagcttgaggtcaacacgttgttccaatcgctcatcgacctgctacacaagatcgatccgcttgaaacgaacgcgacgctgagcgcgctgtccgaaggcctgcgcggccacggcgatgacctgggtgcgctgttgtcgggactgaacacgctgacccgccaagcgaacccaaagttacccgcccttcaggaggatttccgcaaggcggcggtggtggccaacgtctatgctgacgccgccggggacctgaacaccgtgttcgataacctgccgacgatcaacaagacgatcgtcgaccagaaggacaacctcaacgacacgctgctagccaccatcggtctgtctaataacgcctatgagacgttggcgcccgccgaacagaatttcatcgacgccatcaaccggctccgagccccgctcaaagtgacctccgactactccccggtattcggctgccttttcaagggcatcgcgcgcggtgtcaaggagtttgccccgctaatcggtgtccgtaaggctgggctgttcacctcgtcgagcttcgtgttgggtgcgccgtcgtacacctatccggagagcctgccgatcgtcaacgcctccggcggtccgaactgccgagggttgcccgatatcccgaccaagcagacgggcgggtcgttctaccgcgcgccgttcctggtcaccgacaacgctttgatcccataccagccgttcaccgagttacaggttgacgcgccgtcgacgctgcagttcctgttcaacggtgcgttcgcggaacgggacgacttctga

SEQ ID NO: 28710 - DNA, 192 bp, Mycobacterium tuberculosis
gtgcgggtgatcgtggaccgagaccgatgtgaaggcaacgcggtgtgcttgggaatcgcaccggatatcttcgacctggacgacgaggactatgccgtggtcaagaccgatccgatcccggttgatcaggaggatctggccgagcaggccatcgcggaatgcccgcgtgcggcgttgtcgcgtggtgagtag

SEQ ID NO: 28711 - DNA, 4146 bp, Mycobacterium tuberculosis
atgtcgtttgtgttggtttcgccggagaccgtggcggcggtggccacggatctcaagcgcatcggcgcctcgctggcccacgaaaacgcgtcggcggccgcttcgacgacggcggtggtctccgcggccgccgacgaggtatcgacggcggtcgccgctctgttctcccaacacgcccagggctaccaagcggcggccgctcaggtagcagcgtttcatagccggtttgtgcaagccctgacggccggtgccggggcgtacgcatttgccgaggcggccaacgcgtcgccgctacagtcagccatgggtgcggtaagcgcgtctgcgcagacgctgttgtcgcgcccgttgatcggcaatggcgccaatgcgacgacgccgggcggtaacggcggcgacggcggatggctattcggcagcggcggcaacggcgcgcccggcgcggcgggccagtccggcggtaacggcgggtcagccggactgtggggtaacggcggcgcgggtggcgccggcggcagcggcggcgccgccggcggcaacggcggtaacggcgggtggctgttcggcgccggcggcaccggcggtatcggcggcaccggtgctcccggcgccatgggcggcaccggcggcaacggcggcaacggcgcgctgctgatcggcggcggcggcctcggcggcgccggcggcatgggtggcaccggcggcggcaccggcggcaccggcggcaacggcggcaacggcgcgctgctgatcggcgctggtggtgtcggaggtgctggcgggatcggtggccagggtaccggcgccggcggtgccgccggcgccggcggcaccgggggcaacggcggcgccggggggttgttcatgaacggcggcgacggcggcgccggcggtcaaggcggcgacggtgcggccggcgacgcggctgccagcgccggcggcaccggcggcaaaggcggccaaggcggcgacggcggcaccggaggggccggcggcgcaggcccagtgctgttcggccacggcggcgccggcggcatgggcggccaaggcggcaccggtggaatgggcggcgccggcggagacggcaccaccgtcatcgcggccggtaccgggggggagggcggcaccggcggcgcggccggcgccggcggagccgcaggcgctcgcggggctctcaccagcggcggcctagccggcggcgtcggggccggcggcaccggcggcaccggcggtaccggcggcaacggcgctgacgccgctgctgtggtgggcttcggcgcgaacggcgaccctggcttcgctggcggcaaaggcggtaacggcggaataggtggggccgcggtgacaggcggggtcgccggcgacggcggcaccggcggcaaaggtggcaccggcggtgccggcggcgccggcaacgacgccggcagcaccggcaatcccggcggtaagggcggcgacggcgggatcggcggtgccggcggggccggcggcgcggccggcaccggcaacggcggccatgccggcaacacaggtgacggcggcgacggcgggaccggcggtaacggcggcaacggcaccggaggcgtgaacggcgccgacaacaccctcaaccccgacacccccggcggcgccggggagcccggcggggccggcggggccggcggggccggcggggccgccggcggcccgggcggtaccggcggtaccggcggtaacggcggcaacggcggcaacggcggcaacggcggcaacggcggcaacggcggcaacggcggcaatgccggcaacaacagcaccaatgccccagtcggtggcgaaggcggcgccggcggcgacggcggcgccggcggcgcaggcggggccgccaacggcggcaccgcgggcagccagggcactgggggcgtcggcggcgacggcggcgcgggcggcaacggcggcggcggcaaggctggcaccggcaacagcggcaactttggggtggacggcgaagccggcttcagcggcggcgccggtggcaacggcggcgtaggcggggccgccggcgccaatggcggaaccggcggcagcggtggtaatggcggtgacggcggtgcgggaggcattggcggggccggcggcaacggcataccgggcactggcacagagcctgccgggggcaccggcgccaaaggtggagacggcggcgacggtggcgccggcggcgcaggcggcaatgccggcggggccggcggccagggcggcaatgccggccagggtggcgccggcggtgcgggcggcaacgccgtgattcccggcgacggcgtcgggaaggcgccgcacggcgacgcgggcggcagcggcggagacggcggcaaaggcggccagggcggtagtggcggcaccggcggatccggtgccccgatcggtggcggcgccggaggcaccggagggtccggcggacacgccggcaagggtggcgccggcggcatcggcgcacagggcaccaccatcaccgtgcccgggaacggcggcaacgccggcgacggcggcaacggcggcaacgccggcgccggtggaaacggcggctccggcgacttcggtggcaataccaccagcggcgcctccggcagcggcggcaacggcggcaacgccggcaccgcgggtagcggcggtgcgggcggaaccggcggcaccggccttagcggcggcaacggtggcaacggcggcaacggcggcaacggcggtgacggcggtaacggcgcccacggcaccgtcggcgcccagttcgtcccggccaccagcttgcccacacccaacggcggggccggtggcaacggtggcaccggaagcaacggcggcgcgcccggccccgccggggcgcccggccccactaccggcggtaacgctggcagccagggcatcggcggcgacgggggcaacggcggcgacggcggtaaaggcggtgacggcgccgacgctgtcaacgtcgtattcatgccgactgagccacaggccgcgaccggcactgccggcagcgccggtgaccccaccggcggtaacggagggcccggcactcccggcagccccatggttgccccgcccccgccaacgccaatcactcaagtccaacagggcggtgacggtggcgccgggggcaccggatccaccaacgccaacgacggcacagccaccggcggaaagggcggagaaggcggagtcggcagcattctcggcgggcccggcggcaacggcggaactggcggcaacgcctcggcaaccggcaccaacggggtggccaacgccgggaatggcggcaagggtggcgacggcggccagtttggggccggcggcaacggtggtgccggcggcagcgtaaccgacggatccgccggcagcaccgcaggcaacggcggcaacggcggcaacgcaaccaacggcaccatcgcaggccaacccgccggcggcaacggctcggccggcgggaaaggcggcgacggcggcaacatcgccgccggtgccaccggcaccgccggcaacggcgggaacggcggcaacggcaacgacggcgccgtcaacgccggcaccggcggctccggcgggaacggcggtaacgccggtggcggcggcgccaatggcggcgacggcggcgccggcggcgccggcggggccggcgggcgtggcggcaagggcatcgacggcgggttcggcggtgacggcggcaacggcggcagcaacaacggcaccggcgccggtggcaacggcggcaacggcggcaccggcggggtcggctcggttggcgcggctggtggcgatggcggcaacggcggcaccggcggcttcgccggtttcggcggcaccgcaggcaatggcggttccggcggcacgggcggggccggcggcgacggcggcaccggcggggacggcggcaacggcgttatcgccggcggcggggggaccggcggcaacggcggcgccagcggggccggcggcgccggcggcacgggcgggttcgccggcaacggcaatgccggcggcaatggcggcaccggcggcgcgagcgaggacggcgacaacggcaacgctggcagcggcgccaccggcggtaccggcggcaacggcggcaccggcggcgacggcggcgctgccgggctgggcggcgtcgcgtga

SEQ ID NO: 28712 - DNA, 837 bp, Mycobacterium tuberculosis
atgaccatcgatgtgtggatgcagcatccgacgcaacggttcctacacggcgatatgttcgcctcgctgcgccggtggaccggtgggtctatcccggagaccgacatcccgatcgaagcgaccgtctcctcgatggacgccggcggcgtcaccctgggtttgctcagcgcctggcgtggccccaacggccaggacctcatctctaatgacgctgttgcggaatgggtccggttgtaccccaaccgttttgccggtctggcggcggtcgacctggatcgcccgatggcggccgtccgggagttgaggcgccgagtcggtgaggggttcgtcggcctgcgggtggtgccttggctatggggcgccccgccgaccgaccgccgctactatccgttgttcgccgaatgcgtgcagtccgcggtgccgttctgcacccaggttggtcacaccggcccgctgcggccgtcggagaccggacgccccattccctacatcgaccaggtggcgttggactttccggaactggtgatcgtgtgcggacatgtcggctatccgtggaccgaggagatggtcgcggtcgcccgcaaacacgagaatgtctacatcgacacctcggcctacaccatcaagcggctgcccgggaagctggtgcggttcatgaaaaccgacacgggacagcgcaaggtgctgtttggtaccaattacccgatgatcgcccacacgcacgccctgaccggtcttgacgaactggggctaagcgacgaagctcgtcgcgactttctgcacggcaacgctgtgcgggtattcaagctggacccacgaggaaaggtgcagacgtga

SEQ ID NO: 28713 - DNA, 1161 bp, Mycobacterium tuberculosis
gtgagtaccgacacgagtggggtcggtgttcgggagatcgatgccggcgccttgccgaccaggtatgcgcgtggctggcattgcctgggcgtcgcgaaggactatttggaagggaagccacacggggtagaggcgttcggcaccaagctggttgtgttcgctgattcccacggggacctgaaagtcctcgacggctactgccggcacatgggcggcgacctgtccgagggcaccgtcaaaggcgacgaggtcgcttgcccgttccacgactggcgctggggtggcgacggccgctgcaaattggtgccgtatgccaggcgcacacccagaatggcgcgcactcggtcgtggacgaccgatgtgcgcagcgggctgctgtttgtctggcacgaccatgagggcaatccacccgaccccgcggtccggatccccgagattcccgaggcggccagcgacgagtggaccgactggcggtggaaccgcatcctcatcgaagggtccaactgccgcgacatcatcgacaacgtcaccgatatggcgcacttcttctacatccacttcggtttgccgacgtacttcaagaacgtcttcgagggccacatcgcctcgcagtatctgcacaacgtgggccggcccgatgtcgacgatctggggacgtcttacggtgaggcgcatctggattcggaggcgtcttacttcgggccgtcgttcatgatcaactggctgcacaaccgctacggcaactacaagtccgagtcgatcctgatcaactgccactacccggtgacccagaactcgttcgtcctgcaatggggcgtcatcgtcgaaaagcccaagggtatgagcgaagagatgaccgacaagttgtcgcgggtgttcaccgagggcgtcagcaagggcttcttgcaggatgtcgagatctggaagcacaagacccgcatcgacaacccgctgctggttgaagaggacggcgccgtgtatcagctgcgccgctggtatgaacagttttatgtcgacgtagccgacataaaaccagagatggtggagcgcttcgagatcgaggtcgacaccaagcgcgccaacgagttctggaatgccgaggtagagaagaacttgaaatcgagagaagtttccgacgacgtgcccgccgagcaacactga

SEQ ID NO: 28714 - DNA, 1080 bp, Mycobacterium tuberculosis
gtgagtcccacaccgcggaggcgggcgactctggcgtcgttagcagccgagctcaaggtgtcccgcaccactgtctcgaatgcttttaaccgaccggatcagctctccgccgatctacgtgaacgagtgcttgccacggccaagcgactgggctatgccggaccggatccggtggcgcgatcgttgcggacccgcaaagccggtgcggtcggtttggtgatggccgaaccgctgacctatttcttcagcgacccggccgcgcgggattttgttgcgggagtggcgcagtcgtgcgaagagctggggcagggcctgcagctggtttccgtcggctccagtcggagccttgcggacggcacagctgccgtgctcggcgctggggtggacggcttcgtggtgtattcggtaggcgacgacgatccctacctgcaggtcgtgctgcagcggcggctgccggtggtggtggtcgaccagcccaaagacctctccggagtgtcccgggtcggcatcgacgaccgggcggcgatgcgtgagcttgccggctacgtactcgggttggggcatcgcgagctcggcctgctgaccatgcggctgggacgggatcggcggcaagacttggtggacgccgagcggctgcggtcgccgaccttcgacgtacagcgcgaacgcatcgtcggcgtatgggaggcgatgacggccgccggcgtcgacccggactcgctgaccgtggtggaaagctacgagcatttgccgacgtccggcggcactgccgccaaggtggctctgcaggccaatccgcggctgaccgcgctgatgtgcacagcggacatcttggcgctctcagctatggattaccttcgggcgcacgggatttacgtgcccgggcagatgaccgtcacagggtttgacggagtgccagaggcgctgagccgggggctgaccacggtcgcgcagccgagtctgcacaaggggcaccgggcgggcgagctattgctgaagccgccgcggtccggactgcccgtcatcgaggtgctcgataccgagctggtccggggccgcaccgcgggtccgccggcgtaa

SEQ ID NO: 28715 - DNA, 1410 bp, Mycobacterium tuberculosis
gtgaccgatcgggctcgcttgcggctacacgacactgccgccggtgtcgtgcgggatttcgtcccgttgcgacctggacacgtctcgatctacctgtgcggtgccacggtgcagggcctaccgcatatcgggcatgtccgcagcggggtcgccttcgacatcctgcgccgatggttgctcgcgcgtggctacgacgtcgcgtttatccgcaacgtgaccgacatcgaagacaagatcctggccaaggccgccgcggcgggccggccgtggtgggagtgggcggctacccacgagcgtgccttcaccgcggcctacgacgctctggacgtcttgccgccgtccgcggagccgcgcgccaccgggcatatcacccagatgatcgagatgatcgagcgcctgatccaggccggccacgcgtataccggtggcggtgacgtttacttcgacgttctgagctacccggagtacggccagttatccggtcacaagatcgatgacgtccatcagggcgaaggtgtggctgccggcaagcgggaccagcgcgacttcactttgtggaagggcgaaaagccgggtgaaccgtcgtggccgacgccgtggggccgcgggcgtccgggctggcatctggaatgctcggcaatggctcgcagctatctcgggccggaattcgatatccattgcggtggaatggatttagtcttcccgcatcatgagaacgaaatcgcccagagccgcgccgccggtgatgggttcgcccgctactggctgcacaatggctgggtgacgatgggcggggagaagatgagcaagtcgctgggcaacgtgttgtccatgccggcgatgttgcagcgggtgcggccggctgagctgcgttattacctgggcagcgcgcactaccggtcgatgctcgagttctccgagaccgctatgcaggatgcggtgaaagcctatgtcgggctagaggacttcctgcaccgcgttcgcacccgggtgggcgccgtctgccccggcgatccgaccccacggttcgccgaagcgctcgacgacgacctgtccgttccgatcgcgctcgccgagattcaccacgtgcgggcggaaggcaaccgggcactcgatgccggcgaccacgacggggccttgcgaagcgctagcgcgattcgggcgatgatgggcatcctgggctgtgacccgctcgaccagcgctgggaatcccgagacgaaacctcggcagcgctggccgccgtcgatgtgctggtccaggctgaactacagaatcgggaaaaggcccgcgagcagcgcaactgggcgctcgccgacgagatccggggtcggctgaagagagccggcatcgaggtcaccgacaccgccgacgggccacagtggtcgctgctgggtggtgacaccaagtag

SEQ ID NO: 28716 - DNA, 480 bp, Mycobacterium tuberculosis
gtgaatcagctgccccgcgttggtttggggaccgatgtgcatccgatcgaacccggacgtccgtgctggctggtagggttgttgttcccgagcgccgacggttgcgcgggccactccgacggtgacgtggccgttcatgcgctgtgcgacgcggtgctgtcggccgcggggctaggcgacattggcgaggtgttcggcgtcgacgatccccgttggcagggtgtcagtggtgccgacatgttgcgccatgtcgtcgtcctgatcacccagcatggctatcgggtcggcaacgctgtggtgcaggtgatcggcaaccgaccgaagatcggttggcgccggctcgaggcgcaggcggtgctgtcacgtctgctcaacgcgccggtgtcggtgtcggctaccaccaccgacgggctgggcctcactggccgcggcgagggcttggccgcaatcgctacggcattggtggtttcgttgcggtag

SEQ ID NO: 28717 - DNA, 696 bp, Mycobacterium tuberculosis
gtggtcagggaagcgggcgaagtagttgcgatcgtcccggctgcggggtcgggggagcggttggccgtcggtgtgcccaaggcgttttaccagctcgacgggcagactctcattgagcgggccgtcgatggcctgctggattcgggggtagttgacaccgttgttgtggccgtgcccgccgaccgtacggacgaggcgaggcagatcctcggccacagggcgatgattgtggcgggtgggtcgaatcgcactgacaccgtgaacctggcgctgacagtgctgtccgggaccgcggagccggagtttgtgcttgtgcatgatgccgcgcgggcactgacaccaccggccctggtcgcccgggtggtcgaggcgttgcgggacggttatgccgccgtcgttcccgtactgccgctttctgacaccatcaaggccgtggatgccaacggggtggtcctgggcacgccggaacgagccgggctgcgggccgtgcagaccccacaagggttcactaccgacctgctgctgcggtcatatcagcgcggctccctagaccttccagccgccgagtacaccgatgacgcgtcgctggtcgagcatatcggcggccaggtgcaggtggtcgacggcgatccgctggcgttcaagatcaccaccaaactggatctgttgctggcccaagctatagtgcgcgggtga

SEQ ID NO: 28718 - DNA, 1443 bp, Mycobacterium tuberculosis
gtggccaacgctcgttcgcagtaccgctgttcggaatgccgccatgtcagcgcgaagtgggtgggacgctgcctggagtgcggccgctggggcaccgtagacgaggtggcggtgctcagtgccgtcggtggcaccaggcgccgttcggtggcgccggcgtcgggcgccgttccgatcagtgccgtcgacgcgcatcggacccgaccctgcccaaccggcatcgacgaactggaccgggtgctaggtggcggtatcgttcccggttcggtgacactgctggccggcgatcccggagtgggtaagtcgacgctgttgctcgaggtcgcgcaccgctgggcccagtccggacggcgcgcgctctatgtctctggtgaggaatccgccggtcagatccggctgcgtgccgaccggatcggctgcggcacggaggtcgaggagatctacctcgccgcacagtccgacgtgcacaccgtgctcgaccagatcgagacggtgcagccggcactggtcatcgtcgactcggtgcagaccatgtccaccagcgaggccgacggcgtcaccggcggggtcacgcaggtccgtgcggttacggctgccctgaccgctgccgccaaggccaacgaggtcgcattgattctcgtcggccacgtcacgaaggacggggccatagccggaccgcgttcgctagagcacctcgtcgacgttgtgctgcattttgaaggggaccgcaacggtgcgctgcggatggtccgcggggtcaagaaccgattcggcgccgccgatgaagtcggatgtttcctcctgcacgacaacggaattgacggtatcgtcgacccgtcgaacctgttcctggaccagcggccgacacccgtcgccggtaccgcgatcaccgtgacgctggacggaaaacggccgctcgtcggggaagtccaggcattgctggccacaccgtgcggcggctcgccgaggcgggccgtcagcgggatccaccaggcccgcgctgcgatgatcgctgctgtgctggaaaagcacgcacggctggcgatcgccgttaacgacatctacctgtccaccgtgggcggcatgcggttgaccgagccgtcggcggatctggcggtcgccatcgcgctcgcctcggcctatgcaaatctgccgctgcccaccactgccgtcatgatcggcgaggtaggtctggccggcgacatccggcgggtcaacgggatggcgcggcgccttagcgaagccgcccgccaagggttcaccatcgccttggtcccgcccagtgacgatccggtgccgcccggtatgcacgcgctgcgcgcatccaccatcgtcgcggcgctgcagtacatggtcgacattgccgaccaccgcggcaccaccctcgcaaccccgccctcacattccgggactggacacgtcccactagggcgcggtacatag

SEQ ID NO: 28719 - DNA, 1755 bp, Mycobacterium tuberculosis
atgtcgtttgtgatcgtggcgccggaagcgctgatgtcggtggcttcagaggtggccggtatcggttcggcgctcaatgccgccaacgccgccgcggccgccccgaccacgggtgtgctagcggccgccgcggacgaggtgtcggcggcgatggcggcgctgttcggcgcgcacgcccaggagtaccagaggctcagcgcccaggcggcggggtttcatgcccagttcgtgcaggcgttaaacgcgggagtgaactcctatgccagcgccgaggccgccaacgcgtcgccgctgcaagccgtggagcagcaggtgctcggcttgatcaacgggcccgcgcagacgctactggggcgcccgttgatcggcaacggtgccgacggggcgccgggaaccgggcagccgggcgggcccggcgggctgctgtggggtaatggcggcaacggcgggtcgggtgtggccggtgtgggcgggcccggtggtagcggcggcgccgccgggctgttcgggcacggcggcaatggcggggccggcgggagcaacgccgccggcgccggcggtgtgggcggagccggtggggcgggctggctggtcggcaacggcggtgccggcgggttcggcggggtgggaacgaccgtcagtggcaacggaggagccggcggcgccgccggcgcgttcggcaatggcggtgtgggcggggcgggcggggccgcggtcatcggcgggttgcccggcaatgggggtgccggcggcaacgcggggctgatcggcgccggcggcgacggcggcgtcggcggggtgggtgcccccggaaccaacgggatgaacccgccgccgaaccagaccagccaggcggcaaacggaagccccggcgccaacaacggcgccggtagcggtggcgcagggctgcccggcaacccgggtgccgtaccagggcgggctggcggcgctggcggtttaggcggcagcggcagcgatacgagtgaaggccctgtgacggggggcaacggaggcaatggcggcgacggcggtcccggcgcgcccggcggcaacggcgcacccggcggcatcggtgtcaataccggtactggctgggcctacgggggaaacgggggcaatggcggtgacggtggcgccggcgcccggggcggcgacgggggcaacgggggcaacggcctagcgctaaacggtggcaacgggatcggcggcaacggtggcgccgggggccggggcggcaccggggctgcgggcggcaatggtggcattggcggcggcgccaccggcacgctgaccttttttggtagcggaggcgacggcggccccggcggggctggcgccaacaccgccggcaccgggggtgtcggcggtgtcgggggtgcgggcggtcagggcgggctgctgttcggcgacggcggtaacgggggcgccggcggtgccggcggcatcggcggcacgggtgcctcgggcggcgccggaggcaagggcggctctggcctggtcggcggtgacggcggcaacggtggtgccggcggcgccggcggcaacggcggcaagggcggtgccggaggtgccggcggaggtgccggaatgttcagccagccaggtgtccacggtgcgggcggtaccgggggccagggaggtgccggcggcgctggcggcgcgggtggcgccgcgggagctgggacagtcgtcgcgggcaaccccggtgatcccggcggtttcggcgccgccggtgcggacggcctacccggctaa

SEQ ID NO: 28720 - DNA, 318 bp, Mycobacterium tuberculosis
atgccagtggtgaagatcaacgcaatcgaggtgcccgccggcgctggccccgagctggagaagcggttcgctcaccgcgcgcacgcggtcgagaactccccgggtttcctcggctttcagctgttacgtccggtcaagggtgaagaacgctacttcgtggtgacacactgggagtccgatgaagcattccaggcgtgggcaaacgggcccgccatcgcagcccatgccggacaccgggccaaccccgtggcgaccggtgcttcgctgctggaattcgaggtcgtgcttgacgtcggtgggaccggcaagactgcataa

SEQ ID NO: 28721 - DNA, 1320 bp, Mycobacterium tuberculosis
atgtcgtttgtgattgccgttccggagttcctgtcggcggcggccacggatttggccaatctcggttcgacgatcagcgcggctaacgcggctgccagcatcccgaccaccggcgtgctggccgcgggcgcagatgacgtatcggcggcgattgcggcgctcttcggcgcgcacgcccaggcgtatcagacgatcagcgcgcaggcggcgacgtttcatgcccagttcgtgcagaccttgagtgcgggtgcgggggcgtatgccaacgccgaggccgccaacgttcagcagagtttgctgaacgcgatcaatgcgcccacccaggcactgttgggacgtccgttgatcggtgatggtgccgacgggacggcgcccgggcaaaacggcggggcgggcgggctgctgtatggcaatggcggtaatggcgcggccggggtgaacgcggggattgccggcggcagcggcggggcggccgggttgatcggcaacggcggatccggtggtgccggcggagccggtgcggccggcgggtccggcggacaaggcgggctgctgtacggcaacggcggcgcgggcggcaacggcggggcggcgactatccccggcggcaacggcggcgccggtggtgccggcggcaacgcgtggctattcggcaacggtggggccggggggctcggcgcggccggcgcggcgggtgccgccggggtcaaccccctgaccgtcccggcgggccagggcagcatgggtaacaacggtgaaccgggcggacccggccagccaggcaccgagttcgggcaaaccggtggcaccggtggcactggcggtactggcctgtccgttggcgggaccggcgggaccggcggcaccggggggaccggcggggccggcggctctggcggtcggggtgggctcctggtcggcgacggcggcgcaggtggcatcgggggcacagggggcgaaggcggcatcggcgcccggggcggcaccggcggtcagggcggaatgggcggcgccgggcaaccaggcgttgggggtgacgctggtgacgggggtaacggcgggatcggcggtgacggcggcgccggcggagacggcggcgcgggcggcgcgggcggcgcgggcggcctgttcggcgtctccggtagctccgggctgggcggtgccgccggtagcgggggtaatggcgggggcggtggtgagcccggtgtggccggctccccgggcgttgggcctgcgggccgtggcggcgacggcaacctcggccagttcggccctgaaggtgcacccggccagcccggccagccgggccagcccggttga

SEQ ID NO: 28722 - DNA, 2547 bp, Mycobacterium tuberculosis
atgttcgaacgatttaccgaccgtgcccgcagggtcgtcgtcctggctcaggaagaggccaggatgctcaaccacaactacatcggcaccgagcacattcttttaggcctgatccatgaaggggaaggcgttgccgccaagtcactggagtcgttggggatctcgctggaaggtgtgcgcagtcaggtcgaggagatcatcggccagggccagcaggcgccgtctgggcacattccgtttaccccccgcgccaaaaaggtcctcgagctgagcttgcgtgaagcgctgcagcttggccacaactacatcgggaccgaacacattttgctgggcctcatccgagagggtgaaggcgtggccgcccaggtgctggtcaagctgggcgccgagctgacccgggtgcgccagcaggtgatccagctgctctccggttaccaaggcaaggaggccgccgaagccggcaccggcggccgcgggggagagtccggctctccgtctacgtccttggtgctcgaccagttcggccgcaacctcacggcggcggcgatggaaggcaaactggacccggtcatcggccgcgagaaggaaatcgagcgggtcatgcaggtgctctctcggcgcaccaagaacaacccggtgctgatcggcgagcccggcgtcggcaagaccgcggtcgtcgaaggactggcgcaggccatcgtgcacggcgaggtgcccgagacgctcaaggacaagcagctctacacgctggatctgggatcgctggtggcgggtagccgctaccgcggtgacttcgaggaacgcctcaagaaggtgctcaaggagatcaacacccgcggtgacatcatcctgtttatcgacgagctgcacaccttggtcggtgctggagccgccgagggcgcgatcgacgccgcctcgatcctgaaaccgaagctcgctcgcggtgaactgcaaacgatcggcgccaccacgctcgacgaataccgcaagtacatcgagaaggacgccgcgctggagcgccgcttccagccggtgcaggtgggtgagccgacggtggagcacaccatcgagatcctcaagggcctgcgggaccggtacgaggcgcaccaccgggtgtcgatcaccgatgcggcgatggtggccgccgcgaccctggccgaccgctacatcaacgaccggttcctgcccgacaaggcgatcgacctgatcgacgaggcgggtgctcggatgcggattcgtcgcatgaccgcaccgccagacctacgcgagttcgatgagaagatcgccgaggctcgtcgggagaaggaatcggctatcgacgcccaggacttcgagaaggccgccagcctgcgcgaccgggagaagacactggtcgcacagcgtgctgagcgcgaaaagcagtggcgttcaggcgatcttgacgtggtcgcggaggtcgacgacgagcagatcgccgaggtgctgggcaactggaccggtatcccggtgttcaagctcaccgaggccgagaccacccggctgttgcggatggaagaagagctgcacaagcggatcatcgggcaagaggacgccgtcaaggccgtttccaaggccatccggcgtacccgggccgggctgaaagaccccaagcgcccgtcgggctcgttcatcttcgccggcccgtccggtgtcggtaagaccgaactgtccaaggcgctggccaacttcttgttcggtgacgacgacgcgcttattcagattgacatgggtgaattccacgaccggttcaccgcgtcgcggctattcggcgcgccgcccggatacgtcggctacgaggagggcggccaactcaccgagaaggtgcggcgcaagccgttctcggtggtgctgttcgacgagatcgagaaggcgcatcaggagatctacaacagcctgctgcaggtgctcgaggatggccggctcaccgacgggcagggccgcacggtggacttcaagaacaccgtgctgatctttacgtccaatctgggcacctccgacatctctaagccggtcggtctgggcttttccaagggcggcggtgagaacgactacgagcggatgaaacagaaggtcaacgacgagctgaagaaacacttccgcccggagttcctcaaccgcatcgacgacatcatcgtcttccaccagctgacccgcgaggagatcatccggatggtcgacctgatgatcagccgggtcgccggccagctcaagagcaaggacatggcgctggtgctgaccgatgcggccaaggcgctgctggccaagcgtggcttcgacccggtgttgggggcccgcccgttgcggcgcaccatccagcgtgagatcgaagatcagctctcggagaagatcctcttcgaggaggtcgggccgggtcaggtggtcaccgtcgacgtggacaactgggacggtgaaggtcccggcgaggacgcggtgttcaccttcaccggtacccgcaagccgccggccgagccggatctggccaaggctggagcgcacagcgcgggcggcccggagccggccgcgcggtag

SEQ ID NO: 28723 - DNA, 1518 bp, Mycobacterium tuberculosis
gtgagtgccgctgacacagcagaagaccttcctgagcagttccggattcgccgggacaagcgcgctcgcttgctggcccaggggcgcgatccctatcccgtcgcggtgccgcgcactcacacgttggccgaggttcgcgccgcccaccctgacttgccgatcgataccgcgaccgaagacatcgtcggcgtcgcgggccgagtgatctttgcgcgcaactcgggaaagctatgctttgcgacacttcaggacggcgatggtacccagctgcaagtgatgatcagcctcgacaaggtcggccaggctgctctcgacgcatggaaagccgatgtcgacctgggcgacatcgtctacgtgcatggcgcggtgatcagttcgcgccgcggcgagctgtccgtcctggcggattgctggcggatcgccgccaagtcgctgcggccgcttcccgtcgcgcacaaagagatgagtgaagagtcgcgggttcgtcagcgctatgttgacctcatagttcgaccggaagcgcgcgcggtggctcgactacggatcgccgtcgtccgcgcgatccggacggcgcttcaacgtcgtgggttcctggaagtcgagacgcccgtcttgcagacgttagccggtggtgcggcggcccgtccgttcgccactcattccaatgccctagacatcgatctgtacctgcggatcgcgccggaactgttcctcaagcgctgcatcgtgggtggtttcgacaaggtcttcgaacttaatcgagtgttccgaaacgaaggagccgattccacgcattctccggaattctccatgctggagacctaccagacctacggaacctatgacgattcggcagtcgtcacccgggagcttattcaagaggtggccgatgaggcgatcggaaccagacaactgccgttgcccgacggcagtgtctatgacatcgacggagaatgggcgactatacaaatgtacccgtcgctgtctgtggcgctcggtgaagagatcacaccgcagacgacggtcgatcgcttacgtgggatcgccgatagccttggcctggagaaagacccagcgattcatgacaaccgtggcttcggccacggcaaactcatcgaggaactctgggagcgcacagtgggcaagagcttgagcgcacccacatttgtcaaggattttccggttcagacaacgcctttgacccgtcagcaccgcagtatccccggcgtaaccgagaagtgggacctctatctgcgcggaatcgaacttgccaccggctactcggaattaagcgacccggtagtccagcgggagagattcgccgaccaggcccgtgccgcggccgctggcgatgacgaagcgatggtgcttgacgaggattttctggccgctctggagtacggcatgccaccgtgcaccggaaccggaatgggtatcgatcggttgttgatgtctttgactgggttgtcaattagggagacagttttgttcccgattgttcgaccacactccaactga

SEQ ID NO: 28724 - DNA, 567 bp, Mycobacterium tuberculosis
atgacgcgggtagtgctctcggttggctccaacctgggtgaccgcctggcacgattgcggtcggtcgccgacggtctcggcgatgcgttgattgcggcttccccgatatatgaggccgacccctggggtggggtggagcaggggcagttcctcaatgcggtgctgatcgccgacgatcctacctgcgaaccgcgggagtggctgcggcgggcgcaggagttcgagcgcgctgcgggcagggtgcgtggccagcgctggggtccacgaaatctcgacgtcgacctgatcgcctgctaccagacctcggccaccgaggctctggtcgaagtgaccgcgcgggagaaccacctcacgctgccgcacccactggcgcatctgcgggcctttgtgttgatcccgtggattgccgtcgacccaacggcgcagctgacggttgccgggtgcccgcggcccgtcacgcgactgctggccgagctggagcccgccgaccgcgacagtgtgcggttgtttaggccgtcgttcgatctgaatagcagacaccccgtcagtcgggcaccggaaagctga

SEQ ID NO: 28725 - DNA, 843 bp, Mycobacterium tuberculosis
gtgagtccggcgcccgtgcaggtgatgggggttctaaacgtcacggacgactctttctcggacggcgggtgttatctcgatctcgacgatgcggtgaagcacggtctggcgatggcagccgcaggtgcgggcatcgtcgacgtcggtggtgagtcgagccggcccggtgccactcgggttgacccggcggtggagacgtctcgtgtcatacccgtcgtcaaagagcttgcagcacaaggcatcaccgtcagcatcgataccatgcgcgcggatgtcgctcgggcggcgttgcagaacggtgcccagatggtcaacgacgtgtcgggtgggcgggccgatccggcgatggggccgctgttggccgaggccgatgtgccgtgggtgttgatgcactggcgggcggtatcggccgataccccgcatgtgcctgtgcgctacggcaacgtggtggccgaggtccgtgccgacctgctggccagcgtcgccgacgcggtggccgcaggcgtcgacccggcaaggctggtgctcgatcccgggcttggattcgccaagacggcgcaacataattgggcgatcttgcatgcccttccggaactggtcgcgaccggaatcccagtgctggtgggtgcttcgcgcaagcgcttcctcggtgcgttgttggccgggcccgacggcgtgatgcggccaaccgatgggcgtgacaccgcgacggcggtgatttccgcgctggccgcactgcacggggcctggggtgtgcgggtgcatgatgtgcgggcctcggtcgatgccatcaaggtggtcgaagcgtggatgggagcggaaaggatagaacgcgatggctga

SEQ ID NO: 28726 - DNA, 2283 bp, Mycobacterium tuberculosis
atgaaccggaaaaacgtgactcgcaccataacagcgatcgccgtcgtggtgctgctcggctggtcgttcttttacttcagcgacgacacccgcggctacaagcccgttgatacctcggtggcgataacacagatcaacggcgacaacgtcaagagcgcacagatcgacgatcgcgagcaacagctgcggctgatcctgaagaagggtaacaacgagaccgacgggtccgagaaggtcatcaccaagtaccccaccgggtacgccgtcgacctgttcaacgcgctcagcgccaaaaacgcgaaggtcagcacggtcgtcaaccagggcagcatcctgggcgagctgctggtctacgtgctgccgctgctgttgctggtggggctgttcgtgatgttctcccgcatgcaaggcggcgcccggatgggcttcgggttcggcaagtcacgcgccaagcaactgagcaaggacatgcccaagaccaccttcgccgacgtcgcaggtgtcgacgaggcggtcgaggagctctacgagatcaaggacttcctgcagaaccccagcaggtaccaagcgctgggcgccaagatccccaaaggcgtgctgctctacgggccgccgggaaccggtaagacgttgctggctcgtgcggtggccggcgaagccggagtgccgttcttcaccatctccggctccgacttcgtcgaaatgttcgtcggcgtcggcgcatcccgtgtcagagacctgttcgagcaggccaagcagaacagcccgtgcatcatcttcgtcgacgagatcgacgccgtcggccgacaaagaggcgccgggctgggcggcggtcacgacgagcgtgagcagaccctcaaccagttgctagtcgaaatggacggttttggcgatcgcgccggcgtcatcctgatcgcggccaccaaccggcccgacatcctggacccggcgctgttgcggccgggccgcttcgaccgccagatcccggtatccaaccccgatctggcgggtcggcgggcggtgctgcgcgtgcactccaagggcaagccgatggccgcggacgccgacctcgacggactggccaagcggaccgtcggcatgaccggagccgacctggccaacgtcatcaacgaggcggcgctgctgaccgcccgggagaacggcaccgtcatcaccggtcccgccctcgaggaagcggtggaccgggtgatcggcggcccgcgccgcaaaggccggatcatcagcgagcaggagaagaagatcaccgcctatcacgagggcgggcacaccctggccgcttgggcgatgcccgatatcgagccgatttataaggtgacgatcctggcgcgcgggcgtaccggcgggcacgcggtggcggtgccggaagaagacaagggcctgcggacccgctcggaaatgatcgcgcaactggtgttcgcgatgggtgggcgcgccgccgaagaactggtgtttcgtgagccgaccaccggcgcggtgtccgacatcgagcaggccaccaagatagcgcgctcaatggtcaccgaatttggaatgagctccaagctgggcgcggtcaaatacggctccgaacacggcgacccgttcctcggacgtaccatgggcacccagccggactactcccacgaggtcgcccgcgagatcgacgaagaggtccgcaagcttatcgaggcggcgcataccgaagcgtgggaaatcctgaccgaataccgcgacgtgctggacactttggccggcgagctgctggaaaaggagaccctgcaccgacccgagctggaaagcatcttcgctgacgtcgaaaagcggccgcggctcaccatgttcgacgacttcggtggccggatcccgtcggacaaaccgcccatcaagacacccggcgagctcgcgatcgaacgcggcgaaccttggccccagccggtccccgagccggcgttcaaggcggcgattgcgcaggctacccaagccgctgaggccgcccggtccgacgccggccaaaccgggcacggcgccaacggttcgcccgccggcacccaccggtccggtgaccgccagtacggctccacccagcctgactacggtgccccggcgggctggcatgcgccgggatggcccccaaggtcatctcatcggcccagctatagcggtgaaccggcaccgacgtatccgggtcagccctacccgaccggtcaagccgatccgggttccgatgagtcctcggcggagcaggatgacgaggtcagtcggaccaagccggcccacggctga

SEQ ID NO: 28727 - DNA, 1188 bp, Mycobacterium tuberculosis
atgaaggcaccgttgcgttttggcgttttcatcacgccattccatccgaccggtcaatccccgaccgtggcgttgcaatacgacatggagcgcgtcgttgcgctggaccggctcggctacgacgaggcgtggtttggcgaacaccactccggtggctacgagctgatcgcttgcccggaggtgtttatcgcggccgcagcggaacggaccacccacatccggctaggtaccggagtggtttcgctgccctaccatcatccgctaatggtggccgaccgttgggtgctgctggatcacctgacccgtgggcgggtcatgttcggcaccggccccggcgcgctgccgtcggacgcctacatgatgggcatcgatccggtcgagcagcgacgaatgatgcaggagtccctcgaggcgattctcgcgctgttccgtgccgcacctgacgagcgaatcgaccgccactccgactggttcaccctgcgtgaagcgcaattgcacatccgcccctacacctggccgtaccccgaaatcgctaccgcagccatgatttcgccatcgggtccgcgactggccggtgcgctgggcacgtcgctgttatcactgtcgatgtcagtgcccggcggctacgctgcgctggaaacagcgtggggcgtggtgcgggagcaggccgccaaagctgggcggggcgagccggatcgcgccgattggcgggtgttgagcatcatgcacttgtcggacagccgcgaccaggcgatcgacgactgcacttacgggttacccgacttctcgaggtacttcggcgcggcagggtttgtcccgttggcgaacaccgtggaaggcacccagtcgtctcgggaattcgtcgagcaatacgcggccaagggaaattgctgcatcggcacgcccgatgacgcgatcgcccacattgaagacttgctgcaccggtcgggtggcttcggaacgttgctactgctcggccacgactgggccccgccaccggcaacctttcactcctatgagctgttcgcccgtgctgtgattccttatttcaagggacaactcgcggcgccgcgggcgtcgcacgaatgggctagaggcaagcgcgaccaattgattggccgcgccggcgaagcggtcgtcaaagccatcaccgagcacgtcgccgaacaaggggaagcgggcagctga

SEQ ID NO: 28728 - DNA, 723 bp, Mycobacterium tuberculosis
atgatccgattggtccgtcattcgatcgccctggtggccgccggccttgccgccgcattgtcggggtgcgattcccacaactcgggatcgctcggtgccgatccgcggcaggtgaccgtgttcggatccgggcaagtgcagggtgtgccggacacgttgatcgctgacgtcggcattcaggtcaccgcggccgacgtcaccagcgcgatgaaccagaccaatgatcgccagcaagcggtgatcgatgcactggtgggtgccggcctggaccgcaaggacatccgcaccaccagggtcaccgtggcaccgcagtacagcaatccggagccggccggaaccgccaccatcaccgggtatcgggcagacaacgacatcgaggtgaagatccacccgaccgacgccgcgtcgcggctgctggccctcgtcgtcagcaccggcggtgacgccacccggatcagctcggtcagctactcgattggcgacgactcgcagctggtgaaggatgcccgggcgcgcgccttccaagacgccaagaaccgtgcggaccagtacgcacaactgtcggggctgcggctaggcaaggtgatctcgatctccgaggcatctggcgccgcgcccacgcacgaggcgccggcgccgccgcgcggcctatccgcggtgccgctggaacccggccagcagacggtgggcttctcggtcacggtggtctgggaactgacctag

SEQ ID NO: 28729 - DNA, 972 bp, Mycobacterium tuberculosis
atggatcgacagagtgctgtagcgcagctgcgtgcggctgcggagcagttcgctcgggtccatctcgacgcctgcgaccgttggagcgtggggctctccggcggcccggactcgttggcgctcaccgctgtagccgcacggctgtggcccaccaccgcactgatcgtggaccacggtctgcagcccggctcggccacggtcgcggaaacagctcgcatacaagcgatttcgctgggatgtgtggacgcgcgggtgctttgcgttcaggtgggcgcggccggcggccgggaggcggcggcgcgcagcgcccgctactcggcattggaggagcaccgcgatggcccggtgctgttggcccatacgctcgatgatcaggccgagacagtgttgttggggcttggccgtggttcgggggcccggtcgatcgccggcatgcgtccgtacgatccgccctggtgccggccgctgctgggggtgcgccgcagcgtgacacatgcggcctgccgggagctgggcctgaccgcctggcaggatccgcacaacaccgaccgccgcttcacccgaacccgattgcgcaccgaagtgctgccactgctggaggacgtgctgggcggaggtgtggccgaagcgctggctcgcaccgcgacagcgttgcgcgaggacactgacctcatcgacacgatcgctgcgcaggcgctgcccggagccgctgttgctggctcacggggacaggagttgagtaccagcgccttgaccgcgctgccggatgcggtgcggcgccgggtgattcggggctggctgctggccggcggcgcgaccggactgaccgacaggcagatccgcggagtggaccggctggtcaccgcgtggcgcggtcagggcggggtagcggttgggtccacgttgcgcggtcagcgactggtcgccgggcggcgcgacggcgtacttgtgttgcggcgcgagcccgtttga

SEQ ID NO: 28730 - DNA, 1386 bp, Mycobacterium tuberculosis
atgggtcccacacgctggcggaaatccacgcacgtggtcgtcggcgcggccgtgctggcgtttgtcgccgttgtggtggcggccgcagcgctggtcactactggtggtcaccgggctggcgtgcgcgcacctgcgcctccaccgcggccacccacagtcaaggcgggagtggtccctgtggcggacaccgctgcgacaccgagtgccgctggcgtgaccgcggcgcttgcggtggtggcggccgatcctgatctgggcaagttagcaggtcggatcaccgatgccctgaccggacaagaactttggcagcggctagacgacgtgcccttggtgccggcttcgaccaacaaaatcctgacggcggcggcggctctgctgacactggaccgacaggcccggatcagcacgcgggtggtggccggcggccagaacccccagggacctgtcgtgttggtgggcgcgggcgatccgacgctgtcggcagcgccgcccggtcaggacacctggtatcacggcgcggctcgcatcggtgacctcgtcgaacaaattcgccgcagcggtgtgacgcccaccgccgtgcaggtggacgcttcggcgtttagcggtccgacgatggcgccgggttgggatccggccgatatcgacaacggtgacatcgcgccgatcgaagcggcgatgatcgacgccgggcgtatccagccgaccaccgtcaattcgagacggtcccgcaccccggcgctggatgccggtcgggagttggccaaagcccttggcctggaccccgcggcggtgacgatcgcatcggctccggccggcgcgcggcagctggccgtggtgcagtcggcgccgttgatccagcgactgtctcagatgatgaacgcctccgacaatgtgatggccgagtgcatcggccgcgaggtagcggtcgcgatcaaccggccgcagagctttagtggcgcggtcgacgcggtgaccagccgattgaacaccgcacacatcgacaccgccggcgctgcgctggtggattctagtggattgtcgctcgacaaccgcctgaccgctcggacgctcgatgcaacgatgcaggccgcggctggacccgaccagcccgcgttgcggccgctgctggatctgctaccgatcgccggtggcagtggcacgctgggcgagcgcttcctcgacgcggccaccgaccagggtccggccgggtggttgcgggccaagaccggctcgctgaccgcgatcaactcgctagtcggggtgctcaccgaccgtagcggccgagtgctcaccttcgcgttcatctccaacgaagccggtcccaacggtcgcaacgcgatggacgctctggccactaagttgtggttctgcgggtgcacgacgtga

SEQ ID NO: 28731 - DNA, 636 bp, Mycobacterium tuberculosis
gtgccgcatccatgggacaccggcgatcacgaacggaattggcagggctacttcatccccgctatgtccgtcttgaggaaccgggtcggcgctcgaacgcatgccgaactgcgtgatgccgagaacgacctcgttgaggcccgggtgatcgaactccgcgaggatcccaatctgctgggcgaccgcacagatctcgcatacctgcgggcgattcaccgccagctgttccaggacatttacgtctgggcgggagatctgcggacagtcggcatcgagaaggaggacgagtctttctgcgcgccgggcggcatcagtcggcccatggagcatgtggctgcggagatctaccagctcgaccggctcagagcggtcggcgaaggtgatctcgctggccaggtcgcataccggtacgactacgtgaactatgcccacccgttccgcgagggcaacggccgctcgacccgcgagttcttcgatctcctgttgtccgaacgcggttctggcctcgactgggggaagaccgacctggaagagttgcacggcgcttgtcacgtggcgcgcgccaactctgatctcacgggcctggtcgcgatgttcaaggggatcctcgacgccgagcccacttacgacttctga

SEQ ID NO: 28732 - DNA, 2805 bp, Mycobacterium tuberculosis
ttggctgacccgaaaacgaagggccgtggcagcggcggcaatggcagcggccggcgactggtcatcgtcgagtcgcccaccaaggcgcgcaagctggcctcctacctgggctctggctacatcgtcgagtcctcccgggggcacatccgtgacttgccgcgggccgcgtcggatgtacccgcaaagtacaagtcgcagccgtgggcgcggctcggggtcaacgtcgacgccgacttcgaaccgctctacatcatcagcccggagaaacggagcaccgtcagcgagctcaggggcctgctcaaagacgtggacgagctgtatctggccacggatggggaccgtgagggcgaagctattgcctggcatctgctggaaaccctcaaaccgcgcataccggtaaagcggatggtcttccacgagatcaccgaaccggcgatccgcgccgccgccgagcacccccgcgacctagacatcgacctggtcgacgcgcaggagacccggcgcatcctggaccggctgtacggctacgaagtcagcccagtgctgtggaagaaggtcgcccccaagttgtcggcgggccgggtgcagtcggtggccacccgcatcatcgtggcgcgcgaacgcgaccgcatggcgttccgcagcgcggcctactgggacatccttgccaagctggatgccagcgtgtccgacccggacgccgcgccgcccaccttcagcgcccggctgacggccgtggctggccggcgggtggccactggccgcgatttcgactcgctgggcacgctgcgcaaaggcgacgaagtcattgtgctcgacgaggggagcgcgaccgcgttggccgcgggcctggatggcacgcagctgaccgtggcctcggccgaggagaagccctacgcccggcgcccgtacccgccgttcatgacctccacgctgcagcaagaggccagccgcaagctgcggttctccgccgagcggacgatgagcatcgcccagcggctgtacgaaaacggctacatcacctatatgcgtaccgactccaccacgctgtcggagtcggcgatcaacgccgcacgtacccaggcgcgccagctctacggcgacgagtacgtcgcgccggcgccgcgccaatacacccgcaaggtgaagaacgcccaggaagcgcacgaggctatccggcccgccggtgaaacgtttgccaccccggacgcggtgcgtcgcgaactcgacggtcccaacattgatgatttccggctctatgagctgatttggcaacgcaccgtagcctcgcagatggccgatgcgcggggcatgacgctgagcctgcggatcactggcatgtcggggcaccaggaggtggtgttctccgcgaccggacgcaccttgacgttcccgggcttcctcaaggcctacgtggagaccgtggacgagctggtcggcggcgaggctgacgatgccgagcggcgactgccccatctgaccccgggtcaacggttggacatcgtcgagttgaccccagacggccatgccaccaacccgccggcccgctacaccgaggcgtcgctggtcaaagcgctcgaggagctgggcatcggccgcccgtcgacctactcgtcgatcatcaagaccatccaggatcgcggctacgtgcacaagaagggcagtgcactggtgccgtcatgggtggcgttcgcggtaaccggtctgctcgagcagcatttcggtcggctcgtcgactacgacttcaccgcggcgatggaagacgagctcgacgagatcgccgccggcaacgagcgccgcaccaactggctcaacaacttctactttggtggcgatcacggtgtgcccgattcggtagcccgatcgggtggcctcaagaagcttgtcgggatcaatctcgagggcatcgacgcacgagaagtaaactctatcaagctttttgacgacacccacggacgccccatatatgttcgggtgggcaagaacggtccctacctggaacgtttggtggccggcgacaccggtgagcccacgccgcagcgggccaacctcagcgactcgattaccccggacgagctgactctacaggtggccgaagagctctttgccacaccgcaacagggacggactttgggcttggacccagaaaccggccacgagatcgtggccagggaaggccggtttgggccgtatgtgaccgagatcctgccggagcctgcggctgatgcggccgcggccgctcagggagtcaagaaacgccagaaggccgccgggcccaaaccgcgcaccggttcgttgctgcggagcatggacctacagacggtcaccctcgaagacgcgctgaggctgctgtcactgccgcgcgtggtcggagtggaccccgcctcgggtgaggagatcaccgcgcagaacgggcgctacggaccgtatctaaagcgcggcaacgattctcgatcactggtcaccgaagaccagatattcaccatcacgctcgacgaagccctgaagatctacgcagagccgaaacgtcgtggccggcaaagcgcttcggctccgccgctgcgcgagctgggaacagatccggcgtcgggcaagccaatggtcatcaaggacggccgattcgggccgtacgtcaccgacggtgagaccaatgccagcctgcgtaagggcgacgacgtggcttccataaccgacgagcgcgccgccgagctgttggccgatcgccgagcccggggtccggcaaaacggccagccaggaaagctgcccggaaggtgccggcgaagaaggcagccaagcgcgactag

SEQ ID NO: 28733 - DNA, 1059 bp, Mycobacterium tuberculosis
atgctcggcgacaccgaagtgctggcgaatcttcgtgtgctgcagacagaactgaccggcgctggcatcctcgaaccgctgctatccgcagacggcaccaccgacgttctggtcaccgcgcccgactcggtgtgggtggacgacggaaacggattgcgacgcagccagattcggtttgctgacgagtcagcggtgcgaaggttggcacaacggctggctttggcggccggccgtcggctcgacgacgcgcaaccctgggtggacggtcaactaaccgggatcggcgtcggagggttcgcggtgcggctgcatgcggtgttgccgcccgtggcgacccagggcacttgcttgtcgttgcgggtgttgcgtcccgcgactcaggatctggccgcgttggctgcggcgggcgcgatcgaccccgcggccgccgcgctggtcgccgacatcgtcaccgcccggctggcattcctcgtgtgcggcggaaccggtgccgggaagacaacgttgctggcagcgatgttgggcgccgtgtcgcccgatgagcggatcgtgtgcgtcgaggatgccgccgagctggcccctcggcatccacatctggtcaagctggttgcgcggcgtgcgaacgtcgaaggaatcggtgaggtaaccgtgcgtcaactcgtccgacaggcgctgcggatgcggcccgaccgcatcgtggtcggtgaggttaggggagccgaggtggtggatctgttggcggcgctcaataccggtcacgagggcggcgcgggcaccgtacacgccaacaacccgggtgaggtccctgcacgcatggaagcgttgggggcgctcggcggccttgaccgcgctgctctgcacagccagctcgccgcggcagtccaagtcctgctgcacgtcgcgcgcgatcgggcaggccgtcgccggctcgccgagatcgccgtgctgcgccaagctgaagggcgggtccaggcggtgacggtgtggcacgcggaccgtgggatgagtgacgacgcggccgccctgcacgatttgctgagaagccgggcatcggcatga

SEQ ID NO: 28734 - DNA, 1647 bp, Mycobacterium tuberculosis
atgagcgtcccagcagcgccgctgttgtcggtggagggcctggaagttacgttcggcaccgatgctcccgccgtgtgtggggtggatctggccgtccggagcggtcaaaccgtcgccgtggtgggtgagtccgggtcgggcaaatccacgacggccgcggcgattcttgggttgcttccggctggtggacggatcaccgctggacgcgttgtgttcgacgggcgcgacatcaccggggccgatgccaagcggctacggtcgataaggggacgggagatcggctatgttccccaggatccgatgaccaacctcaatccggtttggaaggtcggctttcaggtcacagaagcgttgcgggccaataccgacggtcgcgcagcacgacgacgggcggtggagctactcgctgaggcgggcctgccggatccggcgaagcaagccggacgctacccgcatcagctgtccggcggcatgtgccagcgggcgttgattgcgatcggcttggcgggcaggccgcggctgctgatcgccgatgagccgacgtccgcgttggatgtcaccgtgcagcggcaggtgctcgatcatcttcagggactcaccgacgaactaggcaccgcgctgctactgatcacccacgatctggcgttggccgcgcagcgggccgaggctgtcgtcgtcgtccgtcgtggagtggtggtggaatccggtgcggcgcagtcaatcctgcaaagccctcagcacgagtacacccggcgcctggtggccgcggctccatcgctgacggcgcgcagcagacgtccgccggaatcccggtcacgggcaaccacgcaggccggcgacattctcgtcgtctcggagctgaccaagatttaccgggagtcccgcggcgcaccgtggcggcgggtggagtctcgcgccgtcgacggagtgtcattccggctaccgcgggcgagcaccctggcaatcgtcggcgaatccgggtcaggcaagtcgacgctagcgcggatggtgcttgggctgctccaacctacctcgggcacggtcgttttcgacggcacctacgacgtcggcgcgctggcccgggaccaggtgctggcctttcgccgccgggtccagccggtgttccaaaacccatacagcagcctggatcccatgtactcggtgtttcgcgccatcgaggaaccgttacgcgtccatcacgtcggtgaccgccggcagcggcaaagggcggtgcgtgagctggtcgatcaggtggcgctgccgtcgtcgatactgggccggcggccccgtgagctgtcgggtggtcagcggcagcgggtagcgatcgcgcgtgcgctggcgctgcgcccggaggtattggtgtgcgacgaagcggtgtcggcgctcgacgtattggtgcaggcacagatcctggatctgctggccgatctgcaggccgacctgggtttgacgtatttgttcatcagccatgatctggcggtgatccggcagattgccgacgacgtcctggtcatgcgggccggccgggtggtggagcacgcctctaccgaggaggtgttcagccggccccgccacgagtacacccgccagttgcttcaggccattcccggtgccccctcagctccccgaaaggttggcaacctgtga

SEQ ID NO: 28735 - DNA, 801 bp, Mycobacterium tuberculosis
gtgatcgccgcggcgctgatcctgctgattcttgtcgtggcggcgtttccgtcgttgtttaccgcagccgatcccacctatgccgatcccagccaaagcatgcttgcgccatcggccgcgcactggttcggcaccgacctgcagggccacgacatctattcgcgcacggtgtatggtgcgcgggcttcggtcacggtcgggttgggggcaacgctggccgtgttcgtcgtgggcggggcgttaggcgcattggccggtttttacgggagctggatcgatgcggtggtttcgcgggtcaccgatgtgtttctcggcttgccgttgctgttggccgccatcgtgctcatgcaagtcatgcatcaccgcacggtgtggacggtgatcgccatcttggcattgttcggctggccgcaagtggccaggatcgcgcgcggtgcggtgctcgaggtgcgtgccagcgattacgtccttgcagctaaggcattggggttgaataggtttcagattctgcttcggcacgcgctgcccaacgccgtgggcccggtgatcgcggtggctaccgtcgctctggggatcttcatcgtcaccgaggccacgctgtcctacctcggggtcggattgccgacgtcggtggtgtcctggggtggcgacatcaatgtcgcgcagacccggctacggtcgggctcgccaattttgttctatcctgcgggcgcgctggcgattacggtgctggcgttcatgatgatgggcgacgctttgcgcgacgcgctggatccggcttcgcgggcatggcgggcatga

SEQ ID NO: 28736 - DNA, 927 bp, Mycobacterium tuberculosis
atgggctggtatgttgcgcgccgagtcgccgtgatggtgccggttttcctgggcgcgacactgctgatctacggcatggtctttctgctgcccggtgacccagttgccgcgctggcgggcgaccgtccgttgactcccgcggtggccgcgcagctgcgttcgcattaccacctcgacgatccgttcctcgtgcaatacttgcgctatctgggcggaattctgcacggtgacttgggtcgtgcgtattctgggctgccggtcagtgccgttctggcgcatgcgtttccggtcaccatcaggctggccttgatcgccctggcggtggaggcagtgctcggaatcggattcggcgtgatcgccggcctacgtcagggtggaatcttcgattccgcggtgctggttaccggacttgtcattattgcgatccccatcttcgtgctgggctttctggcgcagttcttattcggggtccagctcgaaatcgcgccggtcacggtgggcgaacgggcgagcgtcggccgcctgctgctacccgggatcgtgctgggcgccatgtcattcgcctacgtggtgcgattgacccgctcggcggtggcggccaacgcacacgctgactatgtccgcaccgccaccgccaaggggttgtcgcggccccgggtggtgacggtgcacattctgcgcaattcgctgattccggtggtgaccttcctgggcgcggatctgggcgcgctgatgggcggagcgattgtgaccgaaggaatcttcaacatccacggcgtcgggggcgtgctgtatcaagcggtcacgcgtcaggagacgccgacggtggtgtcgatcgtgacggtgctggtgctgatctacctgatcaccaatctgttggtggatctgctgtatgcggccctggacccgcggatccgctatggctga

SEQ ID NO: 28737 - DNA, 1956 bp, Mycobacterium tuberculosis
gtgagtgagtccacccccgaagtctcctcgtcatacccgccgccagcgcacttcgccgagcacgcgaacgcccgcgccgagctttaccgcgaggccgaggaagaccggctggctttttgggccaagcaggccaaccgactgtcctggacgacgccgttcaccgaggtgttggactggtcgggggcgccgttcgccaagtggttcgtgggcggcgagctcaacgtcgcctacaactgtgtggatcgtcacgtcgaggccggccatggagatcgggtcgccatccactgggaaggcgagccggtcggcgaccggcgcacgctgacctattccgatctgcttgccgaggtatccaaagccgcgaacgcgctcaccgacctcggtctggtggccggtgaccgcgtcgccatctacctgccgttgatccctgaggccgtgatcgccatgctggcctgtgcccggctaggcatcatgcatagcgttgttttcggcgggttcaccgctgcggccttgcaggcccggatcgtcgacgcccaagccaagctgctgatcaccgcggacgggcagtttcggcgcggcaagccatcgcccctcaaggcggccgctgacgaggcccttgcagcgatccccgactgctcggtcgagcacgttctggtggtgcggcgcacgggaattgagatggcctggagcgagggccgcgacctgtggtggcaccatgtcgtcggctcagcttcaccggcacacaccccggagcctttcgattccgagcacccgctgttcctgctgtacacgtcaggcaccaccggcaagcccaaaggcattatgcacaccagcggcggctatctcactcagtgttgctacacgatgcgcaccattttcgatgtcaagccggacagcgacgtgttctggtgcaccgccgacatcggctgggtcaccggccacacctacggcgtctacggcccgctgtgcaacggagtcaccgaggttctctacgagggcacgccggatacccccgaccgacaccggcatttccagatcatcgaaaaatacggcgtgacaatctattacaccgcccccaccctcatccggatgtttatgaagtggggccgtgagatccccgacagccacgacctgtccagcctgcggctgctggggtcggtcggcgaaccgatcaaccccgaggcttggcgttggtaccgcgatgtcatcggcggcggacgcaccccgctggtagacacctggtggcagaccgagaccggctccgcgatgatctccccgctgcccggaatcgctgcggccaaaccgggttcagcgatgacgccgctgcccgggatctcggccaagatcgtcgacgatcacggtgatccgttgccaccgcacaccgagggcgcccagcatgttaccgggtacctcgtcctagaccagccgtggccgtcgatgttgcgcggcatctggggcgaccccgcgcggtattggcactcttactggtccaaattttccgacaagggctactacttcgccggggacggcgctcgcatagaccccgacggcgcgatctgggtactaggccgcatcgacgacgtgatgaacgtgtccgggcaccggatctcgaccgccgaggtggaatcggcgctggtcgctcactctggcgtggccgaggcggcggtggtcggggttaccgacgagaccacgacccaggccatctgtgcgttcgtcgtgctacgcgccaactacgccccccatgaccgcacagccgaagagttgcgcaccgaagtggctcgagtgatctcgcccatcgcacggccacgcgacgtccacgtagtgcccgaactacccaagactcgtagcggcaaaatcatgcgtcgactgctgcgcgacgtcgcggaaaaccgtgagcttggcgacacgtcgacgctgctcgatcccaccgtattcgacgcgatccgggccgccaagtag

SEQ ID NO: 28738 - DNA, 822 bp, Mycobacterium tuberculosis
atgagtgctgggggtacccccctgcaagcgggagcgacccccaccggttcacgggggacggttgccctgcggcctgatgccggcccgtcctggctgcgtccactggtcgacaacgttggccagatacccgacgcctaccggcgtcggttgcccgccgatgtgctagcgatggtgacggccgccggggctgtgtcggcaatgacatcgtcgcgccgggatcaccgcgaggcggccgttctggtgctgttttctggcccggaggccgggccaggcgacggtggtgtcccagacgacgccgacctactgctgaccgtgcgggcctcgacattgcgccaccatgccggccaggcggcttttcccggcggtgtggtcgaccccgccgacgacgggccggtggccaccgccttgcgtgaggcgaacgaagaaaccgggattgacccgtccaggctgcatccgctggccaccatggagcggacgttcattgcgccgtcgcggttccatgttgtcccggtgctggcgtactcgccggatcccgggccggtggccgtcgtcaacgaggccgaaacggcgatcgtcgcgcgggtaccggtgcgcgccttcatcaatccggccaatcggctcatggtgtaccgccgcccgcacactcgtcgctgggccgggccggcgttcctgttaaaccagatgctggtatggggcttcactggccaggtgatttccgcggtgctcgatgtcgcgggctgggcacaaccctgggacaccggtgacatccgcgagttggacgcggcaatggtgctgatcgacgacgagagtgacccgcgatga

SEQ ID NO: 28739 - DNA, 465 bp, Mycobacterium tuberculosis
atggcggaacttaaatcccagcttcggtcagacctgacccaagcgatgaagacgcaggacaagctgcggaccgcgaccatacgcatgctgctggccgcgatccagaccgaggaggtctctggcaagcaggcaagagagctctccgacgacgaggtgatcaaggtgttggccagggaatcgcgcaagcgtggtgaggcggcggagatctacacccaaaacggccgcggtgagctcgccgccaccgagcatgccgaggcacggatcattgacgagtacctcccgacgccgctcaccgagggggaactggccgatgtcgccgacaccgccatagccgaggtggccgaagaactcgggcatcggcccagcatgaaacagatgggtctggtaatgaaggcggccaccgtgatcgccgccgggaaagccgacggcgcacgcttgtcggcggcggtcaaggaacgcctatag

SEQ ID NO: 28740 - DNA, 1554 bp, Mycobacterium tuberculosis
gtgtccgacgccatcctaggagagcaattggccgagtcctcggatttcatagccgccatcgaccagggcaccaccagcacccgctgcatgatcttcgatcaccacggtgccgaggtggcccgccaccagctcgagcacgagcagatcctgccccgggccggctgggtggagcacaacccggtcgagatctgggagcgcaccgcgtcggtgttgatctcggtgctcaacgccaccaacctatcgccgaaagatattgccgcgttggggattaccaaccaacgtgagacgacgctggtatggaatcggcacaccggacggccctactacaacgcgattgtatggcaggatacccgcaccgaccgcatcgcgtcggcgctggatcgagacggtcgtggaaacctgatccgccgcaaggcgggcctgccgccggcaacttatttctctggcggcaagctgcagtggatcctggaaaatgtcgatggagtccgcgcggccgccgagaacggcgacgcattgttcggcacaccggacacctgggtgttgtggaatctgaccggcgggccgcgggggggtgtgcatgtcaccgatgtaaccaacgccagccggaccatgttgatggatctagagacgctggactgggacgacgagctgttgtcgttgttttcgatacctcgggccatgctgcccgagatcgcatcgtcggcgccgtcggagccttacggtgtcacgctggcgaccgggcctgtcggcggtgaggtgccgatcaccggagttctcggtgatcagcatgcggccatggtcggtcaagtctgtctggccccaggggaggcgaaaaacacctatgggaccggcaattttctgctgctgaacaccggtgaaacgatcgtgcgatcgaataacggcctgctaaccacggtgtgctaccaattcgggaacgctaaacccgtgtacgcgcttgaaggttcgatcgcggtgaccggctcggcggtgcagtggctacgcgatcagctgggcatcatcagcggcgccgcacagagtgaggcgctggcccgccaggtccccgacaacggcggcatgtatttcgtgccggcgttttccgggctgttcgcgccatactggcggtccgatgcgcgcggcgcgatcgtcgggttgtcgcggttcaacaccaacgcgcacctggcgcgcgcaacgctggaggcgatctgctaccagagccgcgatgtggtggacgccatggaagcagactccggtgttcgcctgcaggtgttgaaggtggatggcgggatcaccggcaacgacctgtgtatgcagatccaggccgacgtgttgggtgtggatgtggtgcggccggtggtcgccgagaccaccgcactaggtgtggcctacgcggcgggcttggcggtcgggttctgggcggctccgtccgatctgcgggccaactggcgagaggacaagcggtggacaccgacgtgggacgacgacgagcgtgccgcgggttatgccggctggcgcaaggcggtgcagcggaccctggattgggttgacgtgtcctag

SEQ ID NO: 28741 - DNA, 1038 bp, Mycobacterium tuberculosis
atgggcctgtcaatagggatcgtgggggccaccggtcaggtgggtcaggtcatgcgcacgttgctcgacgagcgggatttcccggcgagcgcggtgcggttcttcgcgtcggcccgatcgcagggccgcaagctggccttccgcggccaggagatcgaagtggaagacgccgagacggccgacccgagcgggctggatatcgcgttgttctccgccggctcggccatgtcgaaggtgcaggcgccccgctttgcggcggccggagtcacggtgatcgacaactcgtcggcgtggcgtaaggaccccgacgtgccgttggtggtgtccgaggtgaactttgaacgcgacgcgcaccgccggcctaagggcatcatcgccaacccgaactgcaccaccatggccgcgatgccggtgctcaaggtgctgcacgacgaagcccgactggtgcggttggtggtctcgtcgtatcaggcggtgtccggtagcggcctggccggggtggccgagctggccgagcaggcgcgtgcggtcatcggtggggccgagcagctggtgtatgacggcggcgcgctcgagttcccgccgccgaacacctacgtcgccccgatcgcgttcaacgtggtgccgctggccggatccctggtggacgacggctccggcgagacagacgaggatcaaaagttgcgcttcgagagccgcaagatccttggcatccccgacctgttggtcagcggcacctgtgtgcgggttccggtgttcaccggacactctttgtcgatcaacgccgagttcgcgcagccgctctcgccggagcgggcgcgcgagctgctcgacggtgctacgggcgtgcagctggtcgacgtgccgacgccgctggccgccgccggtgtcgacgaatctctggtcggccggatccggcgcgacccgggggtgcccgacgggcgtggtctggcgctgttcgtgtcgggggataacctgcgcaagggggcggcgctgaacaccatccagatcgccgagctgctgaccgccgacttgtga

SEQ ID NO: 28742 - DNA, 1266 bp, Mycobacterium tuberculosis
gtggcgctcgtcgtgcagaagtacggcggatcctcggtggccgacgccgaacggattcgccgcgtcgccgaacgcatcgtcgccaccaagaagcaaggcaatgacgtcgtcgtcgtcgtctctgccatgggggataccaccgacgacctgctggatctggctcagcaggtgtgcccggcgccgccgcctcgggagctggacatgctgcttaccgccggtgaacgcatctcgaatgcgttggtggccatggccatcgagtcgctcggcgcgcatgcccggtcgttcaccggttcgcaggccggggtgatcaccaccggcacccacggcaacgccaagatcatcgacgtcacgccggggcggctgcaaaccgcccttgaggaggggcgggtcgttttggtggccggattccaaggggtcagccaggacaccaaggatgtcacgacgttgggccgcggcggctcggacaccaccgccgtcgccatggccgccgcgctgggtgccgatgtctgtgagatctacaccgacgtggacggcatcttcagcgccgacccgcgcatcgtgcgcaacgcccgaaagctcgacaccgtgaccttcgaggaaatgctcgagatggcggcctgcggcgccaaggtgctgatgctgcgctgcgtggaatacgctcgccgccataatattccggtgcacgtccggtcgtcgtactcggacagaccgggcaccgtcgttgtcggatcgatcaaggacgtacccatggaagaccccatcctgaccggagtcgcgcacgaccgcagcgaggccaaggtgaccatcgtcgggctgcccgacatccccgggtatgcggccaaggtgtttagggcggtggccgacgccgacgtcaacatcgacatggtgctgcagaacgtctccaaggtcgaggacggcaagaccgacatcaccttcacctgctcccgcgacgtcgggcccgccgccgtggaaaaactggactcgctcagaaacgagatcggcttctcacagctgctgtacgacgaccacatcggcaaggtatcgctgatcggtgccggcatgcgcagccaccccggggtcaccgcgacgttctgtgaggcgctggcggcggtgggggtcaacatcgagctgatctccacctcggagatcaggatctcggtgttgtgccgcgacaccgaactggacaaggccgtggtcgcgctgcatgaagcgttcgggctcggcggcgacgaggaggccacggtgtacgcggggacgggacggtag

SEQ ID NO: 28743 - DNA, 1242 bp, Mycobacterium tuberculosis
gtggtaaccacccgggcacgcctggccctagccgccggcgcgggcgcacgctgggcgtcgcgggtcaccggtcgcggcgccggagcgatgatcggcggtctggtcgccatgaccctggaccgctcgatcctgcgccaactcgggatgggccggcgcaccgtcgtcgtcaccggcaccaacggcaagtcgaccaccacacggatgaccgcggccgcgctgggcacgttgggagccgtggccaccaacgccgagggcgccaacatggacgccggcctggtggccgcgctcgccgctcaccgcgacgccgagctggcggtgctggaagtcgacgagatgcacgtaccgcacatctccgatgccgtcgatcccgccgtcgtcgtcttgctcaacctctcccgagaccagctggaccgggtcggcgagatcaacgtcatcgaacgcacactgcgggccgggctggcccggcaccccgacgctgtcgtggtcgccaactgcgacgacgtgctgatgacctcggccgcctacgacagccccaacgtcgtttgggtggctgccggcggcgcgtggtcaaacgattcggtcagctgcccgcgcagcggcgaggtcatcgttcgcaaggccccctctcaggaagaccactggtactccaccggcgccgacttcaagcggcccgccccgcactggtggttcgacgacgccacgctgtatgggcccgacgggctggcgctgccgatgcggctggcactgccaggctcggtgaatcgcggcaacgccgcccaagccgtggccgccgcagtcgccctcggcgccgatccggctgtggccgtcgccgccgtctgccaggtcgacgaggtcgccggacgctaccggaccgttcgtatcggcgcgcaccaagcccggatcctgctggccaaaaacccggccggctggcaggaagcgctggcgatggtcgacaagcatgcagacggggtggtcatcgcggtcaacgggcgggttcctgacggcgaggacctgtcctggttgtgggacgtgcgcttcgagcacttcgagaagacccgagtggtagccgctggggagcgcggcaccgatttggcggttcgcctcggatatgcaggcgtcgagcacaccctggtgcacgacaccgtggccgccatcgcctcatgcccacccgggcgggtggaggtcgtcgccaactacaccgcgttcctgcagctgcaacgagcattggcgcgtcgtggctga

SEQ ID NO: 28744 - DNA, 696 bp, Mycobacterium tuberculosis
gtggtgcggatcgggctcgtgctgcccgacgtgatgggcacctacggcgacggcggcaacgccgtggtgctacgacagcggctgctgctgcgcggcatcgccgccgagatcgtcgagatcacgctggccgatccagtgccggattcgctggacctctacacgctgggcggagcggaggactacgcgcagcggctggccacccggcacctacgtcgatatccgggcctgcaacgcgcggcgggccggggtgctccagtattggcgatctgcgcggccatccaggtgcttgggcactggtacgagacgtcgtcgggagaccgggtcgacggcgtggggttgctggatgtgaccacgtcaccgcaggatgcgcgcaccatcggcgagttggtcagcaagccgttgctggccggtttgacccaacccttgaccggttttgagaaccaccgcggcggcaccgtcctcgggcccggaacgtcgcccttgggcgcggtggtcaagggagccggcaaccgggccggcgacggttttgatggcgcggttgcgggcagcgtggtcgcgacctacatgcacgggccgtgcctggcccgcaacccggagcttgccgacctgctgctgagcaaggtggttggtgagctggcgccgctggatttgcccgaggtggacctgctgcgccgcgaacggctatccgcgcgttag

SEQ ID NO: 28745 - DNA, 612 bp, Mycobacterium tuberculosis
atgtttgagggacccgtccaggacctgattgacgaactcggcaagttgccggggatcggacccaagagtgcgcagcgaatcgccttccacctgttgtcggtagaaccgtcggacatcgaccggctgaccggtgtgctggcgaaggttcgggacggcgtgcgattctgcgcggtgtgtgggaatgtctctgacaacgagcgttgcagaatctgctctgatatccgtcgcgatgcgtccgtggtgtgcattgtcgaggaacccaaagacatccaggccgtcgagcgcacccgcgagttccggggtcgctatcacgtcctgggcggggcgcttgacccgctgtccggaattgggccggatcagctgcggatccgcgaactgctgagccgcatcggggaacgggtcgacgacgtcgacgtcaccgaggtcatcatcgccaccgaccccaacaccgagggcgaggcgacggccacctacctggtgcgaatgctgcgcgacatccccggcctgaccgtcacacggatcgcgtccgggctgccgatgggcggtgacctggaattcgccgacgagctcaccctgggccgagcgctcgccggccgccgcgtgctcgcctga

SEQ ID NO: 28746 - DNA, 402 bp, Mycobacterium tuberculosis
atgcaacccggaggcgacatgtcggcgctgctcgctcaggcgcagcagatgcagcaaaagctcctggaggcccagcaacagctggcgaactctgaggtgcacggtcaagccggtgggggcctggtcaaggtcgtcgtcaaaggcagcggggaggtgatcggcgtgacgatcgaccccaaggtcgtcgatcccgacgacatcgagaccttgcaggacctgatcgtcggtgcgatgcgcgacgcgtcccagcaggtgacgaagatggcgcaggaacggctgggtgcattggccggcgcgatgcgcccgccggcaccaccggctgcgccgccgggagcgccaggtatgccgggtatgccgggtatgccgggtgcgccgggcgcaccacctgtaccagggatctga

SEQ ID NO: 28747 - DNA, 1737 bp, Mycobacterium tuberculosis
gtggctctctaccgcaagtaccgaccggcaagcttcgcggaggtggtggggcaggagcacgtcaccgcgccgctgtcggtggcgctggatgccggccggatcaaccacgcgtacctgttctctgggccgcgtggctgcggaaagacgtcgtcagcgcgtatcctggcgcggtcgttgaactgtgcgcagggccctaccgccaacccgtgcggggtctgcgaatcctgcgtttcgttggcgcccaacgcccccggcagcatcgacgtggtagagctggatgccgccagccacggcggcgtggacgacacccgcgagctgcgggaccgcgcgttctatgcgccggtccagtcacggtaccgggtatttatcgtcgacgaggcgcacatggtgaccaccgcgggattcaacgcgctgctcaagatcgtggaggaaccgcccgaacacctgatcttcatattcgccaccaccgaaccggagaaggtactgccgacgattcggtcgcgcactcatcactacccgttccggctgctgccgccgcgcactatgcgggcgttgctcgcgcggatctgcgagcaggagggcgtcgtcgtcgacgatgcggtgtacccgttggtgatccgggccggcggaggttccccacgggatacgctctcggtgctggaccaattgctggctggggccgcggacacccacgtgacctacacccgggcgctggggctgctgggtgtcaccgacgtcgccctgatcgacgacgcggtcgacgcactggccgcttgcgatgcggccgcattgttcggggcgatcgaatcggtgatcgatggcggacatgaccctcggcgtttcgctaccgatctgctggagcgattccgcgacctgattgtgctgcaatcggttcccgacgcggcatctcgcggggtggtggatgcgcccgaagacgcgctggatcggatgcgcgagcaagccgcccggatcgggcgggcgaccctgacccgatatgccgaggtggtgcaggccgggctaggcgagatgcgcggtgcgaccgcgccgcgtctgctgctggaagtggtttgcgcgcgactgctgctgccctcggcgagcgacgccgaatcggcactgttgcagcgggtcgaacggatcgagacccggttggacatgtcgatcccggcgccgcaagccgtaccacgcccgtcggctgcggctgccgagccgaaacaccagcccgcgcgtgaaccgagaccggtgctggcccccacaccggcctcgagcgaacccaccgtggccgcggttcggtccatgtggccgacggtgcgcgacaaggtgcgcctgcgcagccgtaccaccgaggtgatgctggcgggtgccaccgtccgtgcgctagaggacaacacgctggtgctgacccacgaatcggcgccgctggcgcggcggctgtccgaacagcgcaacgccgatgtcctcgccgaggcgcttaaagacgcgctgggagtcaactggcgggtgcggtgtgagaccggtgaaccggctgcggcggcatcacccgtcggcgggggagcgaacgtggcgaccgccaaggccgtaaaccctgcccccacagcgaattccactcagcgcgacgaagaggagcacatgctcgccgaagccggccgtggcgacccgtcgccgcgtcgcgacccggaagaggttgcactcgagctgctgcagaacgagctgggcgcgcgccggatagacaacgcctag

SEQ ID NO: 28748 - DNA, 3198 bp, Mycobacterium tuberculosis
gtgcacaccgtcgccaccaacaatgctgcgcccgtcatagccgccggtcccgtcggccctagcagacgacgccgtcgcgtgcacgccccacttacgcgacgccgccaaccctcctcctcggcggtgctgctggtggcggctttcggcgccttcctcgctttccttgactccacgatcgtcaacgtcgcgttccccgatatccagcggcacttccacagcgacatcagtgacctgtcctggatgctcaacgcctacaacattgttttcgcggcgttcctggtggccgccggcaggctggccgacctgatggggcgcaagcgggtgttcatcttgggggtggcgttgttcaccgtcgcgtccgggctgtgcgcgatcgccgaaagcgtcggggaactggttgcgttccgtgtgctgcaaggcatcggcgcagcggttctggtaccggcttcgctggggctggtcgtcgaggccttcccggccgagcggcgcgcgcacggggtcaacctgtggggtgcggcgggggccatcgccgcgggcctcggcccgccgatcggtggcgccctcatcgaggcggatggctggcggtgggtgttcctggtgaaccttccgctgggggtattcgctgtgctggccgctcggcgggcactggtggagaaccgggccgccggacgtcggcgtgtgcccgacgtgcgcggcgcggtgctgctggctttcgcgctgggccttttgacgctgggattgatcaagggcccggattggggttgggccagcctgccgaccagcgggtcattgctggccgcggcggtcgcgatggttgggtttgtgatgagctcacgacaccacccggcaccgatggtcgagcccacgctgttgcgcatccagtcgttcgtggccggcaccgggctgaccgccgtggccagcgccggcttctacgcctatctgctgacgcacgtgctgttcctcaactacgtctggggttacacgctgctggaggctggcatggccgtcgcccccgccgcgctggtcgccgccgtcgtcgcggcggtgcttggccgcgtcgccgaccggcacggttaccgcttcatcgtcggcatcggcgcgttgatctgggctgccagcctgctgtggtatctcaaggttgtcgggtcccagcccgatttcctcggtgaatggctgcccggccagatactgcagggaatcggggtgggcgctaccttcccgctgctcggcagtgccgccttggcccggctggccaagggcggcagctacgccaccgcttcggcggtgaccggcaccatccgccaggttggcgccgtcatcggcgtcgcggtgctggtgatcctggtcggcacaccggcaccgggcgcagccgaagaggcgttgcgtcacgggtgggcgttggccgcgatctgtttcgtggcggtggggatcggggcgctgtcgctgggtcgcatccgcccagtcccagctgcggttgaacccccgccggggccgccggtggctccgttgggagcgcggcggccgccgagacccgcaccggtggcctcacccgccgcggcagtggccccgacccccaagacttcccgcgaagtcaacctgctggaggctctgcggtttgccaggccggacacgcaacagattgagctgcaagcaggctcgtatttgttccacgcgggcgatgtgtccgatgcgctctacgtggtgcgcagcggccgcctgcaagtcctcgccggcgacggcgcaaaggacgaagtggtggccgagctgggccgtggtcaggtggtcggggagctcggggtgctgctcgatgcgccgcggtccgcgtcggttcgtgcggtacgcgactcgtccctgatgcgagtgaccaaggccgaattcgcgaagatcgccgatgccggggtgcttggggcgctggcgggggtactggccaaacgacagcaccagacacgcgtggcctctcagcggacaacgccggaggtcgttgtcgcggtcgtcggtgtcgacgccaatgcaccggtcgcaatggtggccaccgaattgtgcagggcactgtcgacacggctacgtgctgtcgcccccggccgggtcgactgcgacgggttggaacgtgccgagcagaccgccgaccgggtggtgctgcatgcggccgtcggcgacgcgcggtggcgggaattctgtttgcgtgtcgccgatcgcgtggtgctggtggccagcaacccggccgtgcctgtggccccgctgccgacccgagcgaccggcgccgacctggtgctggccggacggcccgccggccgggagcaccgacgtgcctgggagcagttgatcacgccgcggtcgatgcatgtggtccgacgcgaatttgtcgccgacgacctgcgggtgctcgccacgcgtatcgcgggccgttccgtggggctagtcctcagcggtggggcagcgagggcgtgtgcccacttgggcgtgctggaggaactggaggccgccggggtcaccgtcgaccgctttgccggcaccagcatgggcgcaatcatcgcggctctggcggccagcggtttggatgctgccggggtggatgcgcaaatctacgagcacttcgtgcgcaagagccacggcgactacaccctgccgagcaaggggctgatccgcgggaaacgcacccagtccacgctacgcacgatcttcggagaccatttggtggaggagctgccgaaacatttccgctgcgtcagtgtcgacctattggcccggcgtcccgtcgtgcaccgccaaggcccgctcgccgacgtcgtcggctgctcgatgcggctgccttttctgtatgcgccactgccctacggcggcaccctgcacgtcgacggcggtgtgctggacaacgtgcccgtcaccacgctggtgggcaaggacggcccactgattgcggtaaacgtggcctctggcggaaatccaagccccgcgtccggcggccatcgccgcggcaaaccacgggtgcccggcctaaccgacaccctgctgcgcaccatgacaatcagcagcgcgatggcatcggaaaaagtgttggcccaggccgacctggtgatcaagcccaacccgatcggcgtcggactcatggagtaccaccagatcgaccgcgcccgtgaagcgggccggatcgcggcccgtgaagcgttgccacaaatcatggagctggtgcacggctga

SEQ ID NO: 28749 - DNA, 1131 bp, Mycobacterium tuberculosis
ttgatctgctttgacgatgtcagcaaggtgtacgcacacggtgccaccgccgtagaccggctgacgctggaagtccctaacggcatgctgaccgtcttcgtcggcccctccggctgcggcaagacgacggcgctgcgaatgatcaaccgaatggtggatccgacctcgggcaccatcactgtcgacggtaccgacgtgtcgacggtcaatgcggtgaagctgcgcctgggaattggctatgtcatccagaacgcggggctgatgcctcatcaacgggtcatcgacaacgtcgcaacggtgccggtgctgaagggtcagccgcgccgggcagcccgcaaagccggttatgaggtgcttgagcgtgtcgggctggaccccaaggtcgccacccgctacccggcccagctctcgggcggcgaacagcaacgggtcggcgtggcacgggcactcgcggccgatccgccgatcttgttgatggacgagccgttctcggccgtcgacccggtggttcgccacgagctacagaacgaaatacttcgtctgcaagccgagttgcacaagaccattgtcttcgtgacgcacgacatcgacgaggcgttgaagctcgccgatctggtggcggtgttcgccccgggcggcgcgcttgcgcagtacgacgaaactgcccggctgttatccagtccggcgaatgacttcgtgtcgaagttcatcggtctcggtcgcggctatcggtggctgcagctgttcgacgcggccggactacctgtgcgcgacatcgagcaagtctcggtgaacggcctttccgatgcccgggacaggcaagttcgtgacggctgggtgctggtggtcgacggtgcgggtgcgccgttgggctggatcgacgccgatggccggcggcgtcaccgcggcggcgcggcattgtcggatgccatgaccgtcggcggttcggtgttccgcccgaacggtaacctcagccaggcgctggacgccgccttgtcctcgccgtcgggggtcggtgtcgccgttgacggcggtggcaaggtcatcggcgggatactggccgccgacgtgctggccgagttccaaaaaggcaagaaggccggcggcggagctaagccatgcactacctga

SEQ ID NO: 28750 - DNA, 822 bp, Mycobacterium tuberculosis
gtgtcggatccgcaccatccccatatccagacgcacaacgcgtgggtggagttccctatcttcgacgccaagtcacgttcgctgaagaaggcggtcctgggtaaagcgggcggcaccatcgggcgcaacaactccaacgtcgtcgtcatcgaagcgttgcgcgacatcaccatggagctgaacctgggtgaccgggtcggtctggtcggacacaacggagccggcaaatcgacgctgctacgcctgctttcgggcatctacgagcccacccgcggctgggcgaaggtcaccggaagggtggcgccggtcttcgatctgggcatcggcatggaccccgagatctccggctacgagaacatcatcattcgtgggctgtttctgggacagacccgcaaacagatgcaggcgaaagtggatgagatcgccgaattcaccgaattgggcgagtacctttcgatgccgctgcgcacctattccaccgggatgcgagtccgcctggcgatgggcgtggtcaccagcatcgacccagagatcctgttgctcgacgaaggcatcggcgccgtggacgccgacttcctgaggaaggcccagtcccggctgcagaatttggtcgaacgttccgggatcctggttttcgcaagccattccaacgagtttttggctcgactatgcaagaccgcgatatggattgaccatggcgtcatcaggctcgccggtggtatcgaagaggtggtacgggcctacgagggtgaggacgccgcccggcacgtgcgcgaagtactggccgagacccaggccgacagacagaacgtccagggatga

SEQ ID NO: 28751 - DNA, 1200 bp, Mycobacterium tuberculosis
atgcaaccgatgaccgctcgttttgaccttttcgtcgtcggctcaggattcttcggcctgacgattgccgagcgcgtggccacccaactcgacaagcgcgtgctcgtcctcgagcggcgcccgcacatcgggggcaatgcctattccgaagccgagccacagaccggcatcgaggtccacaagtacggtgcgcacctgtttcacacctctaataagagagtgtgggactacgtgcggcagttcaccgacttcaccgactaccggcaccgggtcttcgcgatgcacaacgggcaggcatatcagtttccgatggggctcggcctggtatcgcagttcttcggcaagtacttcacgcccgagcaagcccgccagctgatcgccgagcaggccgccgagatcgacaccgccgacgcgcagaacctcgaggagaaggccatctcgctgatcggccggccgctctacgaagcgttcgtcaaggggtacacggccaagcaatggcagactgaccccaaagaacttccggccgccaacatcacgcggcttcccgtgcgctacaccttcgacaaccggtatttcagcgatacttacgagggtttgccgaccgacgggtacacggcgtggttgcaaaacatggccgctgaccaccgcatcgaggtcaggctgaacaccgactggttcgacgtgcgcggccagctgcgccccggcagcccggcggccccggtcgtttacaccggcccgctggaccgctacttcgactacgccgaaggccgattgggctggcgcaccttggacttcgaggtggaagtgctaccgatcggggactttcagggcaccgcggtgatgaactacaacgatctcgacgtcccctacacgcgcatccacgagttccgccacttccaccccgagcgtgactacccaacggacaaaacggtgatcatgcgggaatactcccggttcgccgaggacgacgacgagccatactatccgatcaacaccgaggctgaccgcgccctgttggccacctatcgggccagggcgaagtccgagaccgcgtcatcgaaggtactgttcggcggccggttgggcacctaccaatatctggatatgcatatggccattgccagcgccttgaacatgtacgacaacgtcctcgcgccgcatctgcgcgacggcgtcccactgcttcaggacggcgcatga

SEQ ID NO: 28752 - DNA, 822 bp, Mycobacterium tuberculosis
ttgaaaccgactgtgccggcgctcgtcgcgtgtgacgtcgacggaaccctgctcgatgacggagaaaccgtcaccaaacgcactcgcgacgcggtgcatgccgcggtagacgccggcacgcacttcatcctggccaccggccggccgccgcgctgggtgcgacccatcgtcgatgccctcggcttcgcgccgatggcggtgtgcgccaacggcgccgtcatctacgaccccgggaccgatcgggtgatgtcggtgcgcaccctgcccgtcgacgccctggcaacgttggccgaagttgcgacccgcgtcataccgggtgcgggactggcggtcgagcggatcggcgagcgcgcacacgacacggcgaccccccagttcgtcagctcgccgggctacgagcatgcgtggctgaatccggacaacaccgaagtgtcgatcgaccacctgctcagcgcgccggcgatcaaactgctgatccgtaaagccggtgctgccagtgccgacatggccgccgaactggctaagcatgtcggtttcgagggcgatatcacctactcgaccaataacgggctggtggagatcgtgccgctcggtatcagcaaggccaccggtgtcgacgagattgcccggccgcttggaatttccgacgcggaggtggtggcgttcggcgacatgcccaacgacgtgccgatgctgctgcgggccggtttgggtgtggcgatgggtaacgcgcatcccgacgcgctggccgtcgccgacgaggtcactgcacccaatagcgaggacggcgtcgcgcgggtgctggagcgctggtggtcctag

SEQ ID NO: 28753 - DNA, 780 bp, Mycobacterium tuberculosis
gtggaaccggtatacggcaccgtcattcggcttgctcgcttgtcctggcgcatacagggtctgaagatcaccgtcacgggtgtggataacctaccgaccagcggcggcgccgtcgtcgcgatcaaccacaccagctacctcgacttcacctttgcgggtttgcccgcctaccaacagggcctcgggcgcaaggtgcggttcatggccaagcaggaggtgttcgatcacaagatcaccggtcccattatgcgcagcctgcgccacatcccggtggatcggcaggacgggtccgcgtcctacgacgccgccgtcaggatgctgaaggccggcgaactcgtcggcgtgtaccccgaggcgaccatcagccgcagcttcgagatcaaggaattcaagacgggggcggcccgaatggcgatcgaggccggggtgccgatcgttccgcatattgtttggggtgcgcagcggatctggactaaggaccgtcccaaaaagctgtttcgcccgaaggtgccggtcacgattgtcgtcggtgaacggatcgaaccgacgctgcccaccgctgaactgaacggcctgctgcactcccggatgcaacatttgctggagcgggcccaagaactgtacggaccgcatccggccggcgagttctgggtgccgcaccggctgggcggcggcgccccgtcgcttgccgaggcggcccggttggacgcgcaggaggcggcggttagggctgcgcgccgcgctcagcgagcccatcccgccggggcgccggagcagtga

SEQ ID NO: 28754 - DNA, 1227 bp, Mycobacterium tuberculosis
ttgatggccagattcgaggtgccagaaggctggtgtgtgcaggcgttccggttcacgctggacccaaccgaggaccaggcccgcgcgctggcgcggcatttcggcgctcgccgcaaggcctacaactgggcggtcgctactttgaaagccgatatcgaggcgtggcgcgttactggtatcgggactgtcaagccgtcgctgcgggtgcttcgtaaacggtggaacaccgtcaaggacgaggtgtgtgtcaacgccgagaccggggcggtgtggtggccggagtgctcgaaagaggcttacgccgacggcattggcggcgctgtcgatgcgtactggaactggcagaactcccgatccggtaaacgtgagggcaagacaatgggcttcccccggttcaagaagaaaggccgcgatcaggaccgcgtgacattcacgaccggagcgatgcgcgtcgaacctgatcgccgtcatctcacacttccggtcgtcgggaccgtccgtacgcacgagaacacacgccggattgaacggctcatcgccacaggccgggcgcgggtgctggcaatctcggtgcgccgtaacggcacccggctcgacgccagtgtgcgggtcctcgtgcaacgcccgcagcagcccaacgtggcacagcccggttcacgggttggcgttgacgtcggggtgcgccggctggccacggtcgccaacgaggcgggcgcagtgctcgaagaagtgcccaatccacggccactcgacacggcactcaaagagctacggtacgccagccgtgcgcggtcgcggtgcacgaaaggctcacggcgctaccgcgagcgcaccaccgagatttcccggctgcatcgccgggtcaacgatgtccgcactcatcacctgcatgtcctgacaacacgattggctcaaacccacggccacatcgttgttgaaggtttggacgctgcggggatgctgcggcaaaaggggcttcccggcgcccgcgcccgccggcgcggactgtcggactcggccctgggcactccgcgccggcacttgtcctacaagacgggctggtacgggtcggcgctggtggtcgccgaccgctggttcccgtcgttaagcgtggagccgaccgtaagaccgggccttgcccggctggtggctgtgaagcgcggaagggaggcagccgcatggctgccgaacaaccccgagacggggtgcaagtcgcgtgaccactaa

SEQ ID NO: 28755 - DNA, 792 bp, Mycobacterium tuberculosis
atgtcggaaaacagccaccacaggctggccacaacctcgttgacgctcccgccgggagcgcggatcgaacgccaccgccatccgtcacaccagatcgtctatccgtccgcaggggcggtctcggtcaccactcacgcgggaacctggattacgccggtaaatcgggcaatctggataccggcgggctgttggcaccaacacaagttccacggccacacgcaatttcacggcgtagcgctggatccgcagcgctatcgcggcggcccggcaaccccgacggtgctcgcggtcaatccgttgatgcgcgaactcgtcatcgcgtgttcgcaggccgaccgaaccgacaccgacgagcaccaccggatgttggccgtactgcaggatcaactgccaacaacgagcatccgcgagccactgtgggttccctcaccaaccgatcgccggttgcggcacgcgtgcgcgttgatcgccgacaacctgacccagcccttgacgctgcagcagatcggcggccggatcggtgtcagccagcgcacgctgagccgtctgttcagcgacgagctgggtatgacgttcccgcaatggcgcacccagctgcgcctgcaacatgcgctcgtgttgctcgccgagcgccacgacgtcacgtccgtggcgtccgaatgcggttgggccacaccaagcgcgttcattgacacctaccgacaagccttcggacacactcccggccaagccgctaagccaatggcggcgacccgcctcacccggctccgccgcgctcgcgatcgccgctaa

SEQ ID NO: 28756 - DNA, 1260 bp, Mycobacterium tuberculosis
gtgatcgacctgaagctgcttcgtgaaaaccccgacgcggtacgccgctcacaactcagccgcggcgaggacccggcgctggtagatgccctgctgacggccgacgccgcccgccgggccgtgatctcgaccgccgattcgttacgggccgagcagaaagccgccagcaaaagcgtgggtggcgcgtctcccgaagagcgcccgccgctgctgcggcgcgcgaaggaactcgccgagcaggtcaaagccgctgaggccgacgaggtcgaagcggaggcggcgttcaccgcggcgcacctggcgatctcgaatgtcatcgtggacggggtacccgccggcggggaggacgactacgcggtgctcgacgtcgtcggcgagcccagctacctcgagaaccccaaggaccacctggagctcggcgagtcgctgggcctgatcgacatgcagcgcggcgccaaggtgtcgggttcacggttctacttcctgaccggtcggggtgccctactgcagcttggattgctgcagctggcgctgaagctagccgtcgacaacggctttgtccctacgatcccgccggtgctggtgcgcccggaagtgatggtaggcacgggatttctaggcgcccacgccgaggaggtgtaccgggtagagggcgacggcctctaccttgtgggcacctccgaggtaccgctggcggggtatcactccggcgagattctggacctttcccgcgggccgctgcggtatgcgggctggtcgtcgtgtttccgacgtgaggccggcagccatggcaaggacacgcgcggcatcatccgggtgcaccagttcgacaaagtcgagggcttcgtctactgcacaccggccgacgcggagcacgaacatgagcggctgctgggctggcagcgccagatgctggcacgcatcgaggtgccgtatcgggtcatcgacgtggccgcgggtgatctcggctcgtcggccgcccgcaagttcgactgcgaggcgtggattccgacgcagggggcctatcgcgagctgacgtcgacgtcgaactgcaccacctttcaggcgcgccggttggcgacccgctaccgggatgccagcggcaagccgcagatcgcggccaccctcaacggaacgctggccaccacccggtggctggttgcgatcctggagaaccaccagcggcccgacggcagcgttagagtcccggacgcactggttccgttcgtgggtgtcgaagtgctggagccggtcgcttag

SEQ ID NO: 28757 - DNA, 825 bp, Mycobacterium tuberculosis
atgacatgggccgacgaggtgctcgccggacatccctttgtggttgctcaccgtggtgcgtcggcggctcggccggagcatacccttgccgcctacgacctggcgctcaaagagggcgccgacggcgtggaatgtgatgtgcggttgacccgggacgggcatctggtctgtgtgcatgaccgccgcctggaccgaacctcgacgggagccggcttggtcagcacgatgacgctggcccagctacgcgagctggagtacggcgcgtggcacgacagctggcgccccgacggttcgcacggcgacaccagtctgctgaccctggacgcgcttgtttcgctggttttggactggcaccggccggtgaagatcttcgtcgagaccaagcatcccgtccgatacggctcgctggtggaaaacaagctgctggcgctgctacaccggttcggtattgccgcacccgcctccgcagatcgatcccgtgcggtggtgatgtcgttttcggccgccgcggtctggcggatccggcgggctgcaccgctgctgccgacggtgttgctcggcaagaccccccgatacctgaccagcagtgcggccacggcggtcggggcaaccgccgtgggaccctcactgcctgcgttaaaggaatatccgcaactcgttgaccgctcggcagctcagggccgggcggtgtactgctggaacgtcgatgagtacgaggacatcgacttttgccgggaggtcggggtggcctggattggtactcaccaccccggccgcaccaaggcctggctggaagacgggcgggcgaacgggaccactcgctga

SEQ ID NO: 28758 - DNA, 1467 bp, Mycobacterium tuberculosis
atggctgatccgggcggcttcctcaaatacacccaccggaaattgccgaagcgacggccggtcccgctgcggctgcgagactggcgggaagtctacgaggaattcgacaacgagagcctgcgccaacaggcgacccgctgcatggattgcggcattccgttctgtcacaacggatgtccgctgggtaacttgatcccggaatggaacgatctggtccgccggggccgctggcgcgacgcaatcgaacggctgcacgccaccaacaacttccccgacttcaccggccggttgtgcccggctccgtgcgagccggcgtgtgtgctgggcatcaaccaggatccggtgacgatcaagcagatcgagctggagatcatcgacaaggccttcgacgaaggatgggtgcaaccacgtccgccgcggaagctgaccgggcaaacggttgctgtggtgggttcggggccggcgggtttggccgccgcccagcaactcacccgggcgggtcacaccgtcaccgttttcgagcgcgaagaccgcatcggcgggctgctgcgttacggcatcccggaattcaagatggaaaagcggcatcttgatcggcgtttggaccaaatgcgctccgaaggaaccgaattccggccgggcgtcaacgtcggggtcgacattagcgccgaaaagctgcgcgctgatttcgatgcggtcgtattggccggtggcgcaaccgcttggcgcgagctgccgattcccggccgcgagctggagggcgtccatcaggcgatggagtttctgccgtgggccaaccgggtgcaagaaggagatgacgtcctcgatgaggacgggcagccgccgatcaccgcaaagggcaagaaggtcgtcatcatcggtggcggcgacaccggggcggactgcctgggtaccgtgcaccgccagggcgcgatcgccgtgcaccagttcgagatcatgccgcgtccaccggacgcccgcgccgaatccaccccatggccgacttacccgctgatgtatcgggtatcggccgcgcatgaggagggtggcgagcgggtgttctcggtcaacaccgaggcgttcgtcggcacggacgggcgcgtgagcgcgctgcgggcacacgaagtgaccatgctggatggcaagttcgtcaaggttgagggctccgacttcgagctcgaagccgacctggtgttgctggcgatgggtttcgtcggcccggaacgggcgggcctgttgaccgacctcggagtgaagttcaccgagcgtgggaacgtggcccgtggcgacgacttcgacacctcggttcctggtgtgttcgtagccggtgacatgggccggggccagtcattgatcgtctgggcgattgccgagggccgggccgctgccgcggccgtagaccggtacttgatgggttccagtgccctgccggcgcctgttaagccgaccgctgcaccgcttcaataa

SEQ ID NO: 28759 - DNA, 4584 bp, Mycobacterium tuberculosis
atgacgcctaagcgcgtcgggttgtataaccccgcgttcgaacacgattcgtgcggggttgccatggttgtggacatgcacggccgtcgtagccgcgacatcgtggacaaggcgatcaccgccctgctcaacctcgagcatcggggcgcgcaaggcgccgaaccccgcagcggtgacggcgcgggcatcctgattcaggttccggacgaattccttcgcgaagccgtggatttcgagttgcctgccccaggcagctatgccacgggtatcgcgttcttgccgcagtcatctaaagacgccgccgcggcctgcgccgccgtacagaaaatcgccgaggccgaggggctgcaagtcctgggttggcgcagcgtccccaccgacgactcatcgctgggcgcgctgtcccgtgatgccatgcccaccttccggcaggtgttcttggctggcgcgtccggcatggcgttggagcggcgctgctatgtggtccgcaagcgggccgagcatgaactcggcaccaagggtccgggtcaagacgggccgggccgggaaaccgtgtacttcccgagcctgtccggccagacgctcgtctacaagggcatgctgaccaccccgcagctcaaggccttctacctcgatttgcaggacgagcgactgaccagcgcgctaggcatcgtgcactcgcggttctccacgaacactttcccgtcctggccgctggcgcatccattccggcggatcgcgcacaacggggagatcaacaccgtcaccggtaacgagaactggatgcgggcccgcgaggcgctgatcaagaccgacatctttgggtcggcggccgatgtcgaaaagctgttcccgatctgtaccccgggtgcctcggacaccgcgcgcttcgacgaggtgctcgaactgctgcacctgggcggacgcagcctggcccacgcggtgctgatgatgatccctgaggcctgggagcgccacgagtcgatggaccccgcgcggcgggcgttttaccagtatcacgcctcgttgatggagccgtgggacggcccggcgtcgatgacgttcaccgacggcaccgtcgtgggcgccgtgctggaccgcaatggcctacgcccgtcgcgaatctgggtcaccgacgacggtttggtggtgatggcttccgaggccggtgtgttggacctgcatccgtcgacggtggtgcgccggatgcggctgcagccgggccggatgttcttggtggacaccgcgcagggccgcatcgtctccgatgaggagatcaaggccgacctggcggccgagcatccgtatcaggagtggcttgacaacggactagttccgctcgacgaattgccggagggcaaagacgtgcggatgccccaccatcgaatcgtcatgcggcagttggcattcggctatacctacgaggagctcaacctgctggtagcgccgatggctcggctcggtgccgagccaatcgggtcgatgggcaccgacactccagttgcggtgttgtcgcagcgtccgcgcatgctctacgactacttccatcagctgttcgcccaggtgaccaacccgccgttggacgccatccgcgaggaggtggtgaccagcctgcagggcaccaccggcggcgaacgtgacttgctcaacccggaccagaactcctgccaccagatcgtgctgccccagccgattctgcgtaaccacgagctcgccaagctggtcagcctcgatcccaacgacaaggtcaatgggcgcccacacggattgcggtccaaggtgattcgctgtctgtaccgggtctccgagggaggtgctgggctggctgccgcgctggaagaggtacgtggcgcggcggcggcggcaatcgccgacggcgctcggatcatcatcttgtccgaccgcgagtccgacgaggaaatggctccgataccgtcgctgctcgccgttgcgggagtgcaccaccacctggttcgggaacggacccgcacccaagtgggtctggtggtcgagtccggtgatgcccgcgaggtgcaccacatggccgcgctggtcggattcggcgcggccgcgatcaacccctacctggtgttcgagtcgatcgaggacatgctcgaccgcggtgttatcgagggcatcgaccgtacggcggcgctgaacaactacatcaaagccgcaggtaagggtgtgctgaaagtgatgtcgaagatgggcatctcgacgctggcctcctacaccggtgcgcaactgttccaggctgtcggcatctccgagcaagtgctcgacgaatacttcaccgggcttacctgccccaccggcgggatcaccctggatgacatcgcggccgatgtcgcagcccggcaccggctggcctatctggaccggccggacgaacgcgctcaccgcgaactcgaggtgggtggggaataccagtggcgccgcgagggcgagtaccacctgttcaacccggagactgtgttcaagctgcagcactccacgcgaaccggccagtacaagatcttcaaggagtacacccgtctggtcgacgaccagagcgagcggatggcatcgctgcgtggtctgctcaagttccgtaccggggttcgtcctccagtcccgctggacgaggtcgagccggccagcgaaatcgtcaagcgcttctcaacgggggcgatgagctacggctcgatttccgctgaagcgcacgagacgctggccatcgcaatgaaccggcttggtgcccggtcaaactgtggtgaaggcggcgaggacgtcaagcgatttgaccgcgaccccaacggggattggcgccgaagcgccattaagcaggtagcctccgcccggtttggcgtcacctcgcattacctgaccaactgcaccgacctccagatcaagatggcgcagggcgcgaaacctggtgagggaggtcagcttccggggcacaaggtgtacccttgggtggccgaggtccggcactccacgcccggtgtcggtctgatctcaccgccgccccaccacgacatctactccattgaggatctggcgcagctgatccacgacctaaagaacgccaatccatccgcgcgggtacacgtcaagctggtctccgaaaacggggtagggacggttgcggctggcgtttccaaagcccacgccgacgtggtcttgatctcagggcacgatggtggcaccggcgcgaccccgctgacatcgatgaagcacgccggagcaccctgggagttgggtctggctgagacacagcagacgttgctgctcaacgggttacgtgatcgaattgtggtccaggtggacggtcagctcaagacgggtcgcgatgtgatgatcgctacgctgctcggggcagaagagttcggattcgcgaccgcgccgttggtagtggccggctgcatcatgatgcgggtgtgccacctggacacgtgcccggttggtgtggccacccagaatccgttgctccgggagcggttcaccgggaagcccgagttcgtggagaacttcttcatgttcatcgccgaggaagtccgggaatatttggcgcagttgggcttccgcactgtgaacgaggcggttggacaggcaggtgcgctggacaccacgctggcacgcgcgcactggaaggcgcataagctggatctggcgccggtgctccacgagccggagtcggccttcatgaatcaggatctgtactgcagttcgcgccaggatcacggtctagacaaggcgctcgatcagcagctgatcgtgatgagcagggaagcactggattccggcaagccggtccgcttctccaccaccataggcaatgtcaaccgcacggtgggcaccatgctcggccacgagctgacgaaggcctatggcggccaaggcttgccggacggaaccatcgatatcacgttcgacggatccgcgggaaacagcttcggagccttcgtgcccaagggaattaccttgcgggtgtatggcgacgccaatgactacgtcggcaaagggctatccggtggccggattgtggtgcggccgtcggatgacgcgccgcaggattatgtcgccgaggacaacatcatcgggggcaatgtgattctgttcggcgcaaccagtggcgaggtttacctgcgcggtgtggtaggcgaacggttcgcggtgcgcaattccggggcccacgccgtggtagagggtgtcggcgatcacggctgcgagtacatgaccggcggcagggttgtcattctgggccgcaccggccgtaactttgcggcgggtatgtccggcggtgtggcctatgtttacgatcccgacggtgaactgccggccaacctcaactcggagatggtcgaactcgagaccctcgacgaggatgacgcggactggctgcacggcaccatacaagtgcacgtcgacgctaccgattccgctgtcggccagcggattctgtccgactggtcgggacagcagcgccacttcgtcaaggtgatgccgcgtgactacaaacgggtcctgcaggcgatcgccctggctgaacgtgacggcgttgatgtcgacaaggcgatcatggcggctgcgcatggctga

SEQ ID NO: 28760 - DNA, 2001 bp, Mycobacterium tuberculosis
atggcggccgactacgacaagctcttccggccgcacgaaggtatggaagctccggacgatatggcagcgcagccgttcttcgaccccagtgcttcgtttccgccggcgcccgcatcggcaaacctaccgaagcccaacggccagactccgcccccgacgtccgacgacctgtcggagcggttcgtgtcggccccgccgccgccacccccacccccacctccgcctccgccaactccgatgccgatcgccgcaggagagccgccctcgccggaaccggccgcatctaaaccacccacaccccccatgcccatcgccggacccgaaccggccccacccaaaccacccacaccccccatgcccatcgccggacccgaaccggccccacccaaaccacccacacctccgatgcccatcgccggacctgcacccaccccaaccgaatcccagttggcgccccccagaccaccgacaccacaaacgccaaccggagcgccgcagcaaccggaatcaccggcgccccacgtaccctcgcacgggccacatcaaccccggcgcaccgcaccagcaccgccctgggcaaagatgccaatcggcgaacccccgcccgctccgtccagaccgtctgcgtccccggccgaaccaccgacccggcctgccccccaacactcccgacgtgcgcgccggggtcaccgctatcgcacagacaccgaacgaaacgtcgggaaggtagcaactggtccatccatccaggcgcggctgcgggcagaggaagcatccggcgcgcagctcgcccccggaacggagccctcgccagcgccgttgggccaaccgagatcgtatctggctccgcccacccgccccgcgccgacagaacctccccccagcccctcgccgcagcgcaactccggtcggcgtgccgagcgacgcgtccaccccgatttagccgcccaacatgccgcggcgcaacctgattcaattacggccgcaaccactggcggtcgtcgccgcaagcgtgcagcgccggatctcgacgcgacacagaaatccttaaggccggcggccaaggggccgaaggtgaagaaggtgaagccccagaaaccgaaggccacgaagccgcccaaagtggtgtcgcagcgcggctggcgacattgggtgcatgcgttgacgcgaatcaacctgggcctgtcacccgacgagaagtacgagctggacctgcacgctcgagtccgccgcaatccccgcgggtcgtatcagatcgccgtcgtcggtctcaaaggtggggctggcaaaaccacgctgacagcagcgttggggtcgacgttggctcaggtgcgggccgaccggatcctggctctagacgcggatccaggcgccggaaacctcgccgatcgggtagggcgacaatcgggcgcgaccatcgctgatgtgcttgcagaaaaagagctgtcgcactacaacgacatccgcgcacacactagcgtcaatgcggtcaatctggaagtgctgccggcaccggaatacagctcggcgcagcgcgcgctcagcgacgccgactggcatttcatcgccgatcctgcgtcgaggttttacaacctcgtcttggctgattgtggggccggcttcttcgacccgctgacccgcggcgtgctgtccacggtgtccggtgtcgtggtcgtggcaagtgtctcaatcgacggcgcacaacaggcgtcggtcgcgttggactggttgcgcaacaacggttaccaagatttggcgagccgcgcatgcgtggtcatcaatcacatcatgccgggagaacccaatgtcgcagttaaagacctggtgcggcatttcgaacagcaagttcaacccggccgggtcgtggtcatgccgtgggacaggcacattgcggccggaaccgagatttcactcgacttgctcgaccctatctacaagcgcaaggtcctcgaattggccgcagcgctatccgacgatttcgagagggctggacgtcgttga

SEQ ID NO: 28761 - DNA, 2190 bp, Mycobacterium tuberculosis
atgagtattaccaggccgacgggcagctatgccagacagatgctggatccgggcggctgggtggaagccgatgaagacactttctatgaccgggcccaggaatatagccaggttttgcaaagggtcaccgatgtattggacacctgccgccagcagaaaggccacgtcttcgaaggcggcctatggtccggcggcgccgccaatgctgccaacggcgccctgggtgcaaacatcaatcaattgatgacgctgcaggattatctcgccacggtgattacctggcacaggcatattgccgggttgattgagcaagctaaatccgatatcggcaataatgtggatggcgctcaacgggagatcgatatcctggagaatgaccctagcctggatgctgatgagcgccataccgccatcaattcattggtcacggcgacgcatggggccaatgtcagtctggtcgccgagaccgctgagcgggtgctggaatccaagaattggaaacctccgaagaacgcactcgaggatttgcttcagcagaagtcgccgccacccccagacgtgcctaccctggtcgtgccatccccgggcacaccgggcacaccgggaaccccgatcaccccgggaaccccgatcaccccgggaaccccaatcacacccatcccgggagcgccggtaactccgatcacaccaacgcccggcactcccgtcacgccggtgaccccgggcaagccggtcaccccggtgaccccggtcaaaccgggcacaccaggcgagccaaccccgatcacgccggtcacccccccggtcgccccggccacaccggcaaccccggccacgcccgttaccccagctcccgctccacacccgcagccggctccggcaccggcgccatcgcctgggccccagccggttacaccggccactcccggtccgtctggtccagcaacaccgggcaccccagggggcgagccggcgccgcacgtcaaacccgcggcgttggcggagcaacctggtgtgccgggccagcatgcgggcggggggacgcagtcggggcctgcccatgcggacgaatccgccgcgtcggtgacgccggctgcggcgtccggtgtcccgggcgcacgggcggcggccgccgcgccgagcggtaccgccgtgggagcgggcgcgcgttcgagcgtgggtacggccgcggcctcgggcgcggggtcgcatgctgccactgggcgggcgccggtggctacctcggacaaggcggcggcaccgagcacgcgggcggcctcggcgcggacggcacctcctgcccgcccgccgtcgaccgatcacatcgacaaacccgatcgcagcgagtctgcagatgacggtacgccggtgtcgatgatcccggtgtcggcggctcgggcggcacgcgacgccgccactgcagctgccagcgcccgccagcgtggccgcggtgatgcgctgcggttggcgcgacgcatcgcggcggcgctcaacgcgtccgacaacaacgcgggcgactacgggttcttctggatcaccgcggtgaccaccgacggttccatcgtcgtggccaacagctatgggctggcctacatacccgacgggatggaattgccgaataaggtgtacttggccagcgcggatcacgcaatcccggttgacgaaattgcacgctgtgccacctacccggttttggccgtgcaagcctgggcggctttccacgacatgacgctgcgggcggtgatcggtaccgcggagcagttggccagttcggatcccggtgtggccaagattgtgctggagccagatgacattccggagagcggcaaaatgacgggccggtcgcggctggaggtcgtcgacccctcggcggcggctcagctggccgacactaccgatcagcgtttgctcgacttgttgccgccggcgccggtggatgtcaatccaccgggcgatgagcggcacatgctgtggttcgagctgatgaagcccatgaccagcaccgctaccggccgcgaggccgctcatctgcgggcgttccgggcctacgctgcccactcacaggagattgccctgcaccaagcgcacactgcgactgacgcggccgtccagcgtgtggccgtcgcggactggctgtactggcaatacgtcaccgggttgctcgaccgggccctggccgccgcatgctga

SEQ ID NO: 28762 - DNA, 1443 bp, Mycobacterium tuberculosis
gtgccggaagccgtccaggaagccgatctgctaaccgccgctgcggttgccttgaacaggcatgctgccttattgcgggaactcgggtcggtgttcgccgccgcgggacacgagttgtatctggtcggcggttcggtgcgagatgcactgttgggccggttgagccccgacctggacttcaccaccgacgcccgtcccgagcgggtgcaggagatcgtgcggccgtgggccgatgcggtgtgggataccggaatcgaattcggcaccgtcggcgtgggtaagagcgaccaccgcatggagatcaccacattccgtgccgacagctacgaccgggtttcgcgtcatccagaggtacgtttcggcgattgcctcgagggcgatctggtccgccgcgacttcaccacgaacgcaatggctgtgcgcgtcaccgccactgggccgggcgaattcctggatccgcttggtggcttggcggcgctgcgggccaaggtgttagacaccccggcggcgccgtcggggtcctttggcgacgatccgttgcggatgctgcgcgccgcgcggttcgtctcgcaacttggattcgcggtggcgccgcgggtgcgcgcggcgatcgaagagatggcgccgcagttggcccgaatcagcgccgaacgggtggccgccgagctggacaagctgctggtcggtgaggatccggccgcgggtatcgacctgatggtgcagagcggtatgggtgctgtggtcttgcctgaaatcggtgggatgcggatggcgatcgacgaacatcaccagcacaaggacgtctatcagcattccttgaccgtgctgcggcaggcgatcgcgctggaggacgacggcccggatctggtgttgcgctgggcggcgctgctgcacgacatcggcaagcccgccacccgccgtcacgaacccgacggtggggtgagcttccatcaccacgaagtggtcggcgccaagatggtgcgcaagcggatgcgggcgctgaagtattccaagcagatgatcgacgacatctcgcagctggtctacctgcatctgcggtttcacggctacggcgatgggaaatggaccgactctgcggtgcgccgctatgtcaccgacgccggggccctactgccacggctgcacaagctggtgcgcgccgactgcacgacccgcaacaagcgccgggccgcgcggttgcaggccagttacgaccggctggaagagcggatcgcggagctggccgcccaggaggatctggatcgggtgcgccccgacctggacggcaaccagatcatggcggtgctcgacattccggcgggcccgcaagtcggcgaggcgtggcgctacttgaaggagctgcggctagagcgcggcccgttgtccaccgaggaggcgacaaccgagctgctgtcctggtggaaatcacgggggaaccgctag

SEQ ID NO: 28763 - DNA, 3555 bp, Mycobacterium tuberculosis
atgagaccctcccctggagaggtgcccacggcatcgcagaggcagcccgagctgtccgacgcggcgctggtatcgcactcctgggcaatggcattcgcgacgctgatcagccggatcaccggctttgcccggatcgtgctgctggccgcgatcttaggtgcggcgctggccagctcgttctcggtggccaaccagctgccgaacctggtcgccgcactcgtgctggaggccaccttcaccgccatcttcgtaccggtgctggcccgcgccgagcaggacgacccggacggcggcgcggcgttcgtgcgccgtttggtcacgttggcaaccaccctgctgctgggcgccaccacgctgtcggtgctggccgcgccactgcttgtgcggttgatgctgggcacaaacccacaggttaacgagccgctgaccacggcgttcgcttacctgctgctaccgcaagtcctcgtctacggcctctcgtcggtattcatggcgatcctgaacacccgcaatgtgttcgggccgccggcctgggcgcccgtcgtcaacaatgtcgtcgccatcgcgaccctagcggtgtatctggcggtccccggcgagctttcagtcgatccggttcggatgggcaacgccaagctgctggtgctcggcatcggcaccaccgcaggcgtgtttgcacagaccgcggtgctgctggtggccatccggcgcgagcacatcagcctgcgccccctgtggggaatcgatcagcggctcaagcgctttggcgcgatggccgccgcgatggtgctctatgtgctgatcagccagctcggcctggtggtcggtaaccggatcgccagcacggcagcggcttccggccccgcgatctacaactacacctggctagtgctgatgttgccattcggcatgatcggcgtgacggtgctgaccgtggtgatgccgcggctgagccgcaatgccgcggccgacgataccccggccgtgctcgccgacctgtcgctagccaccaggctgaccatgatcacgctgatcccaacggtggcgttcatgacggtcggcggtccggcgatcggtagcgcgctttttgcatacggcaacttcggcgacgttgatgccgggtacctgggggcggcgatcgcattgtcggcgttcacgttgatcccctatgcgttagtgctgttgcagctacgcgtgttctacgcccgcgagcagccgtggacaccaatcacgatcatcgtggtcatcaccggcgtcaagatcctcggctcgctgctggcgccgcatattaccggtgatccccagctggtcgcggcctatctcgggctggctaacggactcggatttctcgccggcacgatcgtcggctactacatactgcgtcgggccctgcggcccgacggcggccagctgatcggcgtcggcgaggcgcgaaccgtcctggtgaccgtcgccgcgtcgttgcttgccggactgctggcacacgtggccgatcggttactagggctaagcgagctgacggcccacgcgggcagcgtcggttcgctgctgcggctgtcggtgctggctctcatcatgctgccaattctggctgcggtcaccctctgcgcacgggtgcccgaggcgcgggcggcgctggatgccgtgcgagcccgaatcaggagccggcgcttgaagaccgggcctcagacccagaatgtcttggatcaatcgtctcgccccggaccggtcacgtaccctgagcggaggcgtttggccccgccgcgggggaaaagtgtggtccacgagccgatccggcgcaggcctccggagcaggtagccagagccgggagagcgaaaggaccggaggtgatcgaccgcccatcggagaacgcctcgtttggtgccgcgtcgggtgccgagctgccgcggcccgtcgccgacgagcttcagctcgacgcgccagccggccgtgaccccggccccgtttcccggccgcacccatccgacctgcaaaacggcgatctgcccgccgatgcggcccgtgggccgattgcgttcgacgcgctccgcgaaccggaccgagaatcgtcggcccccccagatgatgtgcagctggttcccggcgcccgcatcgctaacggccgctaccgcctgctgatcttccacgggggtgtaccacccctgcagttctggcaggcgcttgacacagcgctggaccgccaggtggcgctgaccttcgtcgacccgcagggcgtcctgcccgacgacgtcctccaggagaccttgtcccgtacgttgcggctcagccggatcgacaagcccggtgtcgcccgagtgcttgacgtcgtgcacacccgggccggtggtctggtagtcgcggagtggatccgcggcggttcgttacaggaagtcgccgacacctcaccgtcgccggttggcgccatccgggcgatgcagtccctggccgcggccgcagatgctgcccaccgcgccggtgttgcgctgtcgatcgaccatcccagccgggtgcgcgtgagcatcgacggcgacgtcgtgctggcctacccggcgaccatgccggacgccaacccgcaagacgacatccgcggcatcggcgcctccctgtacgccctgctggtcaaccggtggccgctgccggaggccggcgtgcgcagcgggttggcacccgccgagcgcgacaccgctggccagcccatcgaacccgccgacatcgaccgtgacatccccttccagatttccgcggtggcggcccggtcggttcaaggagacggcgggatacgcagcgcgtcaacgctgttgaatctaatgcagcaggcgaccgcggtggccgatcgcaccgaggtgctgggaccgatcgacgaagcaccggtctccgcggccccgcgcacatccgcgcccaacagcgaaacctacacccgccgccgtcgcaacctgctgatcggcatcggcgcgggtgctgccgtcctcatggtggccctgctggtcttggcttcggtgttgagccggatattcggcgatgtcagcggcggcctcaacaaggacgaactgggcctcaacgcacccaccgcgtcgacctcggcggccagttcggcgccgcccggcagcgtcgtcaaacccaccaaggtcacggtcttctcccccgacggcggcgccgacaaccccggggaggctgatttggccatcgacggcaatccggccacttcctggaagaccgacatctataccgaccccgtcccgttccctagcttcaagaacggagtcggtttgatgttgcagctgccccaggccacggtggtcggcaccgtcgccatcgacgtggccagcaccggcaccaaggtggagatccgctcggcatccacgccgacgccggcaacgctggaggataccgccgtgttgacttcggccaccgcgctgcggcccggccacaacaccatctcggtcgaggcggccgcgcccacctcgaatctgctggtgtggatctctaccttgggaaccaccgacggaaagagtcaagccgacatctcggagatcacgatttacgccgcgtcctga

SEQ ID NO: 28764 - DNA, 1221 bp, Mycobacterium tuberculosis
atgccgagtccgcgccgcgaagacggcgatgcgctgcgctgtggcgaccgcagtgcggccgtcaccgagatccgggctgcgctgaccgcgttagggatgctggatcatcaggaagaagacctgacgacgggccgtaacgtcgcccttgagttgttcgacgcgcagctcgaccaggcggtccgtgccttccaacagcatcgcggcctgctggtggacggcatcgtcggtgaggccacctaccgcgcgttgaaagaagcctcctaccggctcggggcccgcacgctgtaccaccaattcggcgccccgctctacggggacgacgtcgctacactgcaggcccggctgcaggatcttggtttctacaccgggctggtcgacggtcatttcgggttgcagacccacaatgcgttgatgtcctatcagcgtgagtacggacttgccgcagacggtatctgcggcccagaaacgttgcgctccttgtactttctaagttcgcgagtcagcggtggctcgccacatgcgattcgcgaagaagagctggtccgcagctcggggccgaagctgtctggcaaacggatcatcattgatcccggtcgcggcggcgtggaccacggacttatcgcgcaaggtccggctgggcccatcagcgaagcagacttgttgtgggacttggcaagtcggctcgaaggacggatggcagctatcggtatggagacccacctgtcccgtccgaccaaccgtagtccgtccgacgcagagcgtgccgccaccgccaacgccgttggcgcagacctgatgatcagcctgcgctgcgagacccagaccagtctcgcggccaacggcgtggcttcctttcacttcggcaactcgcacggctcggtgtctaccatcggccgcaatcttgccgatttcattcaacgagaagtggtggcgcgcaccggtttacgggattgccgtgtgcatggtcgaacgtgggatctgttgcggctgaccaggatgccgaccgttcaggtcgatatcggctacatcaccaacccccacgatcgtgggatgctggtctcaacgcagacgcgcgatgccatcgccgaaggcattctcgccgcggtcaaacggctgtatctgttaggcaagaacgatcggcccaccggcacattcactttcgccgagttgctggcccacgaactgtctgtcgagcgagcgggtagactcggcggttcttaa

SEQ ID NO: 28765 - DNA, 1044 bp, Mycobacterium tuberculosis
gtgagtgctccgtggggcccggtggccgctggaccgtccgcgctcgtaaggtcgggccaggcttcaactatcgaaccattccagcgggaaatgacaccaccgacaccgacgcctgaggccgcgcacaatccgacgatgaatgtttcacgtgaaacatcgacagaattcgacacccccatcggcgctgcagcagaacgtgcgatgcgggtcctgcacaccacccacgagccgctgcagcggccgggtcgacgccgggtgctcaccatcgcgaatcagaagggcggggtcggtaagacgaccaccgccgtcaatatcgctgccgcgcttgctgtgcagggcctcaagacactcgtgatcgatctcgatccccagggcaacgcgagcaccgcattgggtatcaccgaccggcaatccggcacaccctcgtcctacgagatgcttatcggcgaggtttcgttgcacacggcgctacggcgcagcccgcacagcgagcggctgttctgcatcccggcgacgatcgatctggccggcgccgaaatcgaattggtgagcatggtggcgcgcgagaaccggttgcgcaccgccctggccgcactcgacaacttcgacttcgactacgttttcgtcgattgcccgccctcgctggggctgctgaccatcaacgcactcgtcgcggcaccggaggtgatgatcccgatccaatgcgagtactacgcgttggagggtgtgtcgcagcttatgcgcaacatcgagatggtgaaggcccacctcaacccccaactcgaggtcaccaccgtgatccttaccatgtatgacggccggacaaagctcgccgatcaagtagccgacgaggtccgtcagtatttcggaagcaaagtgttgcggacggtgattccacgcagcgtcaaggtttccgaagcgccgggctacagcatgaccatcatcgattacgatcccggttcgcgcggcgcgatgagttacctcgacgcgagccgcgaacttgccgagcgtgaccgaccaccatccgcgaagggacgaccatga

SEQ ID NO: 28766 - DNA, 675 bp, Mycobacterium tuberculosis
atgtctccgatcgagcccgcggcgtctgcgatcttcggaccgcggcttggccttgctcggcggtacgccgaagcgttggcgggacccggtgtggagcgggggctggtgggaccccgcgaagtcggtaggctatgggaccggcatctactgaactgcgccgtgatcggtgagctcctcgaacgcggtgaccgggtcgtggatatcggtagcggagccgggttgccgggcgtgccattggcgatagcgcggccggacctccaggtagttctcctagaaccgctactgcgccgcaccgagtctcttcgagagatggtgacagatctgggcgtggccgttgagatcgtgcgggggcgcgccgaggagtcctgggtgcaggaccaattgggcggcagcgacgctgcggtgtcacgggcggtggccgcgttggacaagttgacgaaatggagcatgccgttgatacggccgaacgggcgaatgctcgccatcaaaggcgagcgggctcacgacgaagtacgggagcaccggcgtgtgatgatcgcatcgggcgcggttgatgtcagggtggtgacatgtggcgcgaactatttgcgtccgcccgcgaccgtggtgttcgcacgacgtggaaagcagatcgcccgagggtcggcacggatggcgagtggagggacggcgtga

SEQ ID NO: 28767 - DNA, 1101 bp, Mycobacterium tuberculosis
gtgagtcttttgtttgatttcttcagtctcgacttcatctactacccggtgtcgtggatcatgtgggtttggtaccggctgttcgcgtttgtgctaggaccatccaacttcttcgcctgggcgttgtcggtgatgttcctggtcttcacgctgcgtgcgctgctgtacaagccgttcgtgcgccagattcgcaccaccaggcagatgcaggaactgcaaccacagatcaaggccttgcaaaagaaatacggcaaggatcgtcagcggatggcgctcgaaatgcaaaagctgcaacgcgagcacggcttcaaccccattctcggatgtttgccgatgctggcgcagattccggtgtttcttgggctctatcatgtgttgcgctcgtttaaccgtacgaccgggggctttggtcaaccacacttgtcggtgatcgagaaccgactgactgggaactacgtctttagcccggtcgacgtcggccacttcctagatgccaacttgttcggcgctccgatcggggcgtacatgacgcaacggtccgggttggatgcgttcgtcgatttcagtcgccctgcgttgatcgcggtgggtgtgccggtgatgatcttggccggcatcgcgacgtacttcaacagtcgcgcgtctatcgcgcggcagagcgccgaggcggctgcgaatccacagaccgcgatgatgaacaagctggcgctgtacgtatttccgctcggcgtagtcgtcggcggaccgttcctgccactggcgatcatcttgtattggttctcgaacaatatctggacgttcgggcagcagcattacgtcttcggcatgatcgaaaaggaggaggaggccaaaaagcaggaggcggtccggcgccgggcggccaacgcgccggccccgggagctaagcccaagcggagcccgaagaccgctccagcgaccaatgcggcagccccaacagaagccggggacaccgatgacggggcagagtcggacgccagcactgagcgaccagccgacacgtccaatccggccagacgcaacagcggcccgagcgcccgtacgccgcggcccggggtgcgaccgaaaaaacgcaaacgttga

SEQ ID NO: 28768 - DNA, 378 bp, Mycobacterium tuberculosis
ttgattgcaacaccgggcttatttgcggtgcttcgtgcacgcaaccgcatgaggcggtcagcggattttgaaacaacggtgaagcacgggatgcgtaccgtgcggtctgacatggtcgtttattggtggcgtgggagtggcggtgggccgcgcgtcggactgattatcgccaagtcggtggggtcggccgtggaacgccaccgcgtggcacgtcggctgcggcacgtggctgggtcgatcgtcaaagaactccacccgtccgatcatgtggtgatccgcgcgctgccgagcagccggcatgtctcctcggctcggttggagcagcaactgcgatgcggcttgcggagggctgtcgaactggcaggtagtgatcggtga

SEQ ID NO: 28769 - DNA, 144 bp, Mycobacterium tuberculosis
gtgaccaagggcaaaaggaccttccagccgaacaaccggcggcgagctcgtgttcacggtttccgcttacggatgcgtacccgcgccgggaggtcaattgtgtccagccggcgacgcaagggtcggcgcacgctcagtgcttga

SEQ ID NO: 28770 - DNA, 1797 bp, Mycobacterium tuberculosis
gtgccgccgctgctgccgccagcaccgccagtgccgccggcgccgaacagcccgccgtgccccccggcgccgccgtcggcgccgagcgtgcccgccccgccggtgccgccggcgccgaagagcaatccgttccccccggtcccgccattcgcgccaaacccgccggccccgccggccccgccgttggcgaacagcccaccggtaccaccggctccggcggtgccgccggcaccgataaagttttgggagagggcggcctggccgccggtccctgcggcaccgaggaacaagccggcgtcaccgccgcgcccgccggccccgccggtgtccaggccaaacccgccgctgccgccggtgccgccggagccgatcagcaaggcggctccgccggtcccgccggtcccgccttggcccgtcgttccgatgccgccggacccgccggtgccgccaatacctgacaggattccgccggccccgccggatccgccgtctccgccgtcggcgccggtcgctccgtggccgccgttgccgccgttgccgaacaaccacccgccggccccaccgtcggccccggtccccggagtgccgttggcgccgttgccgatcagcggtcgcccggtgagggcttgggtgggctcgttgatcgcgttgaggatttgttgctgcagggtgtgcagtggcgtgctggcgggggcgttgaatccgtctcgacctagtagctgcccgcctaagccgccggcgccggccgtgccggcgggtgcgccagtgccgccactaccaccgttaccgccattgccgatcagcacgccgcttccgccggcgccgccgttgccgccgttgccggcgttgccgacgagcccgggcgcgccgccggccccaccggttccgccggcgcccgcgaaggacccgccgccggcgccgccggcaccgcccgccccgctgagcagacccgcctttccgccggcgccgcccgccccgccggcgtcgaagcccagcccgccgacgccgccggcgccgccggagccgaacaacgtgccgccgtcgcctccgatcccaccggcaccgccgccaccgtccgggctggatccgccgctgccgccggcgccgccggcggcaccgaggctgagcatgccggcgtcgccgccggccccaccgttcccgccgacgttgattatgctcgtcccgccactaccgccggtgccgccggcgccgaacagcccgccagagccgccatccccgccggcgccgccgccaaagatgccgaatccgccgggcccaccggtgccgccggcgccgaacagcccgccgtttccgccggatccgccggccccgccggtgccggcgtcggttgccccgccggcgccaccgaccccgccgtcggcgaacagcccgccgtttccgccggccccgccggcgccgccggtggcgccgaaggcggctgcgaatccgccgggaccgccgaccccggcggccccgaacagcatgccggcggccccgccggcgccgccggcgccgccggtccccgtgctggccctcccgccggcgccgccggcgccgccgttgccgatgagcccgccggcgccgccgttgccgccggcgccgccgttgacgccggccgcgccggatcctccggcgccgccgttgccgattaaccagccgccgtccccgccattggccccggtgccgggggcgccgttggtgccgttgccgatcagcgggcgcccggtattcgccaggaagaactcgttgatcggggcgagcagcggcgacaccgcggcggcctcggcggccgcatag

SEQ ID NO: 28771 - DNA, 1305 bp, Mycobacterium tuberculosis
atgatcgctatcggcggcgtcatcggtgctggcttgttcgtcgggtctggtgtggttatccgtgcgaccggtccggcggcattcctgacctatgcgctgtgcggcgcactgatcgttctggtgatgcgcatgctgggcgagatggccgccgccaatccgtcgactggagcgttcgccgactacgcggcaaaagccctgggcggctgggcgggattctcggttggctggctgtactggtacttctgggtaatcgtcgtggggttcgaggcggttgccggcgggaaggttctaacctactggatcgatgcgccgctgtggttggcgtcgctgtgtctgatgatgatgatgaccgcgacgaacttggtctcggtgtcatccttcggtgagttcgagttctggttcgccggagtcaaggttgccaccatcgtcggcttcctggtccttggcaccgctttcgccttcgggctgctgccgggccatggcatggatttcagcaacctcagcgcgcacggtggcttctttcccgacggggtaggtgccgtcttcgctgccatcgtggtcgcgatcttctccatgactggcacggaagtagtcaccatcgccgcggctgaagcgccggaccctcaacgagcggtccaacgcgcgatgagcacggtggtggcacgcatcgtgatcttcttcgtcggctcggtcttcctgctcacggtgatcctgccgtggaactcgttggagcttggcgcctccccgtacgttgccgcgctgcggcacatgggtattgggggtgctgatcagatcatgaatgccgtcgtgcttaccgcggtgctgtcctgcttgaactcgggcctgtataccgcgtcgcggatgctgttcgtgctcgccgcccggcaggaggcgccggcccagctggtcaaagtcaaccggcgtggagtccccaccttcgcgatcatgggatcgtccgtggtgggattcctgtgcgtgatcatggcatgggtctcacccgcaacggtattcgttttcctgctcaactcgtcgggcgctgtgattttgttcgtctacctgcttatcgcgctgtcgcagatcgtgttgcgtcgccagacatctggccaaaatctgggggtacggatgtggcttttcccggggctgtcgatcgtcacggtgaccggaattgtcgccgtgctggcgcggatggcgttcgactacgccgcgcgcagccagctctggctcagcctgctgtcctgggcagtggtcgttgggtgttatttggtcaccacattggtgcgacgtccccttaatcggccttggtga

SEQ ID NO: 28772 - DNA, 1599 bp, Mycobacterium tuberculosis
atgtccaagacgcgggagcaacgcctgcgccgggttctggagacgatgacccgtcagcacgaccggctgcgagatccgcccgcgtacggctcctggctgcttgggtgggtgtcagaacgcccgctccgccgccgggtgcggattcagatcatcctgaccatcgccctcatcacagcaaacctggtagggatcggcctggctgtgctgttagaaaatgtcgcttttccgacacctagcatcgtcagcgacgcacccttgtggatcacgttcgtggccggacccgcttatacggtcatcgggatggcgttgggcagctactacgtcaaggtgcagaccttggccgcgctacggtgggcgagcgaggaacacacgccaagtcgggccgaccaacgcaacaccctgctggccccgctgcgggtggcggtcgggaccctcatcctgtgggcagtcggagcggcgttgtttaccaccctctacgggttggctaaccgcctattcatcccgcaggtcatgttctcgacactgttttgcggcgttctggtcgccaccgcctgctacatgctcaccgagttcgctctgcgcccggtggccgcccaggcactcgaggccgggctaccgccgggacggttcgcactgggaatcatcggccggaccatggtggtgtggctgctcagctcgggcgtgccgctcttcggtatcgccttgctagggatccttgagatggtgctgcagaacttcaccgacatccagttcgcatacggtgtgctgatcgtgtcgtcggcaacgctgatcggcgggttccttttgatgtggatcatgtcgtggctgacggcggcgccggtgcgagtggtgcgcgctgcgctcaagcgtgtcgagcagggggatctgcgaggggatctggtggtgttcgacggcaccgaactcggtgagctgcagcgtggtttcaacgcgatggtcaacggcctgcgcgagcgcgaacgcgtgcgcgaccttttcggccgccacgtcggacgcgaagtcgccgccgccgccgagcgtgaacgaccacagctaggcggcgaagaccgccacgccgccgtcgtcttcgtcgacatcgtcggctccacccagctggtggacaaccaacctgccgcccacgtggtcaagctcctcaaccggtttttcgcgatcgtcgtcaacgaggtcgaccgtcaccacggactgatcaacaagttcgcaggcgacgccgccctggccatcttcggagccccgaaccgcctcgaccgtcccgaagacgccgcgctggccgccgcccgggccatagccgatcggctggccaacgagatgcccgaggtccaagccggcatcggggtggcggcaggccagatcgtcgccggcaatgtcggcgccaagcaaagattcgaatacacagtggtcggcaagccggtcaaccaggcggcccgattgtgcgaactggccaaatcacaccccgcgcgattgctagcatcctcggacacactgcacgctgccagcgaaaccgagcgtgcccattggtctttgggcgagacggtgacgctgcgcggacatgagcagccgactcggctggccgtgcccacctaa

SEQ ID NO: 28773 - DNA, 3348 bp, Mycobacterium tuberculosis
gtgccccgtcgcaccgatctgcaccacgtgctggtcatcggctccgggccgatcgtcatcggccaggcgtgcgagttcgactactccgggactcaggcgtgccgggtgctgcgcgccgagggcttgcaggtcagcctggtgaactctaatccggccaccatcatgaccgacccggagttcgccgaccacacctacgtagagcccatcaccccggcgttcgtggagcgggttatcgcccaacaggccgagcggggcaacaagatcgacgccctgctggcgaccctgggtgggcagaccgcgctgaacaccgcggtcgcgctgtacgagagcggggtgctggaaaagtacggcgtggaactcatcggcgccgatttcgacgccatccagcgcggcgaggaccggcagcggttcaaggacatcgtcgccaaggccggtggcgaatccgcccggagccgagtgtgtttcaccatggccgaagtgcgtgagacggtcgccgagctcggcctgccggtggtggtgcggccgagcttcaccatgggcgggctgggttcggggatagcgtactccaccgacgaggtcgaccggatggccggcgccgggctggcggcctcgcccagcgccaacgtgctcatcgaggaatcgatttacggctggaaggaattcgaactcgagctgatgcgcgacggccacgacaatgtggtggtggtgtgctcgatcgaaaacgtcgacccgatgggtgtgcacaccggcgactcggtcaccgtcgcgccggcgatgacgttgaccgaccgggaataccagcggatgcgcgacctgggcatcgcgatcctgcgcgaggtgggtgtggacaccggcggctgcaacatccagttcgcggtcaacccgcgcgacggtcggctgatcgtcatcgagatgaacccgcgggtgtcgcgttccagtgcgttggcgtccaaggcgaccggctttccgatcgccaagatcgccgccaaactggccatcggttacaccctcgacgagatcgtcaacgacatcacaggggaaacgccggcctgtttcgaacccaccctggactacgtggtggtcaaggcgccgcggttcgcgttcgagaagttccccggtgccgatcccaccctgaccaccaccatgaaatctgtcggtgaggcaatgtcgttgggccgcaacttcgtcgaggcgctcggcaaggtgatgcgctcgctggagacgacccgcgccgggttctggacggcaccggatcccgacggcggcatcgaggaagccctgacccggctgcggaccccggccgaaggccggctctacgacatcgagctggcgttgcggctgggtgcgacggtggaacgggtggccgaggccagcggtgtcgacccgtggttcatcgcgcagatcaacgagctggtcaatctgcgcaacgaactcgtcgcggcacccgtgctgaacgccgagctgctgcggcgcgccaagcacagcggactatcggatcaccagatcgcgtcgctgagaccggaattggccggcgaggccggcgtgcggtcactgcgcgtgcgcctgggcatccacccggtatacaagacggtggacacctgcgcggcggagttcgaagcccaaaccccctaccactacagcagctacgagctcgaccccgccgccgaaacagaggtggccccgcagaccgaaaggcccaaggtgctgatcctcggttcggggcccaatcggatcggccagggtatcgagttcgactacagctgcgtacacgcggcaaccacgttgagccaggctggctttgagaccgtgatggtcaactgcaacccggagacggtgtccaccgactacgacaccgcggacaggttgtacttcgagccgttgacgttcgaggacgtcttggaggtctaccacgccgaaatggaatccggtagcggtggcccgggagtggccggcgtcatcgtgcagctcggcggccagaccccgctcgggctggcgcaccggctcgccgacgccggggtcccgatcgtgggcaccccaccggaggccatcgacctggccgaggatcgcggcgcgttcggcgacctgctgagcgccgccggactgccggcgccaaagtacggcaccgcaaccactttcgcccaggcccgccggatcgccgaggagatcggctatccggtgctggtgcggccgtcgtatgtgctcggtggtcgcggcatggagatcgtgtatgacgaagaaacgttgcagggctacatcacccgcgccactcagctatcccccgaacacccggtgctcgtcgaccgcttcctcgaggacgcggtcgagatcgacgtcgacgcgctgtgtgatggcgccgaggtctatatcggcgggatcatggagcacatcgaggaggccggcatccactccggtgactcggcctgtgcgctgccaccggtcacgttgggccgcagcgacatcgcgaaggtgcgtaaggccactgaagccattgcgcacggcatcggcgtggtggggctgctcaacgtgcagtacgcgctcaaggatgacgtgctctacgtcctggaagccaacccgagagcgagccgtaccgttccgtttgtatccaaggccacagcggtgccactcgccaaggcatgcgcccggatcatgttgggcgccaccattgcccagctgcgcgccgaaggcttgctggcggtcaccggggatggcgcccacgcggcgcgaaacgcccccatcgcggtcaaggaggccgtgttgccgtttcaccggttccggcgcgccgacggggccgccatcgactcgctactcggcccggagatgaaatcgaccggcgaggtgatgggcatcgaccgcgacttcggcagcgcgttcgccaagagccagaccgccgcctacgggtcgctgccggcccagggcacagtgttcgtgtcggtggccaaccgggacaagcggtcgctggtgtttccggtcaaacgattggccgacctgggttttcgcgtccttgccaccgaaggcaccgcagagatgttgcgccgcaacggtattccctgcgacgacgtccgcaaacatttcgagccggcgcagcccggccgccccacaatgtcggcggtggacgcgatccgagccggcgaggtcaacatggtgatcaacactccctatggcaactccggtccgcgcatcgacggctatgagatccgttcggcggcggtggccggcaacatcccgtgcatcaccacggtgcagggcgcatccgccgccgtgcaggggatagaggccgggatccgcggcgacatcggggtgcgctccctgcaggagctgcaccgggtgatcgggggcgtcgagcggtga

SEQ ID NO: 28774 - DNA, 1035 bp, Mycobacterium tuberculosis
gtgggacatctaccgcctccggccgaggtgaggcatccggtgtatgcgacccgggtgctgtgtgaggtggccaacgagcgcggggtgccgaccgctgatgtgctggcgggcacggcgatcgagccggccgacctcgacgatccggacgcggtggtcggtgcgcttgacgagatcaccgcggtgcgccggttgctggcccgattgcccgacgacgccggtatcgggatcgacgtaggcagccggttcgcgctcacccacttcgggttgttcgggtttgccgtgatgtcatgtggcacccttcgcgaactgcttaccatcgcgatgcgctatttcgcgttgaccaccatgcacgtcgacatcacgttgtttgaaaccgccgacgattgcctggtcgaactggatgccagccacttgccggccgatgtccgtggattcttcatcgagcgcgatattgccggaatcatcgcgacgacaacgagtttcgcgcttccgttagccgcgaagtatgcggatcaagtatcggccgaactggcggttgacgcggaattgttgcgcccgttgctcgagcttgtgccggtgcacgacgtcgcattcgggcgcgcgcacaaccgggtgcacttcccgcgtgccatgttcgacgagccgttgccgcaggccgaccgccatacgttggaaatgtgtattgcacaatgcgacgtgctgatgcaacgcaacgagcgacgccgtggcatcacggccttggtgcgcagcaagctgtttcgcgattccgggcttttcccaacgtttaccgacgttgctggcgaacttgacatgcatccgcggacgctgcggcgtcgacttgccgaggaaggcacttcgtttcgggccttgctgggcgaggcgcgctccaccgtggccgtcgacctgctacgcaacgtcgggctgacggtgcagcaggtgtccacccggctgggctacaccgaagtctcgacgttctcgcatgcgttcaaacgctggtatggcgttgcgcccagcgaatattcgcgccgcgggtag

SEQ ID NO: 28775 - DNA, 1122 bp, Mycobacterium tuberculosis
gtgccgtacgtccgccgaccaccaggccacgacggccgacggccggcgggcacaggcgattcacgttcgccatcgcaatacccttgcggccgcgcaggaaaagggccgacggtgagtccccagctttgccccaaggtgagcatcgtctcgaccactcacaaccaggcgggctacgcccgtcaggccttcgacagctttctcgaccagcaaaccgacttcccggtggagatcatcgtcgccgacgacgcgtcgaccgatgccaccccggcgatcatccgtgagtacgccgagcggtacccgcacgtgttccggccgatcttcaggaccgaaaacctcggcctcaatgggaacctgaccggcgccctgtcggccgctcgcggcgagtacgtcgcgttgtgcgaggcggacgactactggatcgatccgctgaagctaagcaaacaggtcgcattcctcgaccggcaccccaagacgacggtgtgcttccatcccgtccgagtgatatgggaggacggccatgccaaggactcgaagttccccccggttcgggtgcggggcaacttgagcctggatgcgttgatcttgatgaacttcatccagaccaactcggccgtgtaccgtcgcctcgagcgctacgacgacattcctgccgacgtcatgcccctggactggtatctgcacgtccggcacgcggtgcatggcgacatcgccatgttgcccgacaccatggccgtgtatcgccgccacgcccaaggcatgtggcacaaccaggtggtggacccgccaaagttctggttgacgcagggtccggggcatgcggcgacgtttgacgcgatgctcgacctgttcccgggagaccccgcgcgcgaggagctcatcgccgtcatggccgactggatccttcgccagatcgccaacgttccaggcccggaggggcgcgccgcgctgcaggaaaccatcgcgcgccatccccggatcgccatgctggcgctgcagcaccgcggggcgacacccgcgcggcggctcaagacccagtggcgcaagctcgccgccgcgacgccgagccgcagggggctcgtggatgtgtggccctcccggctccgacgcggctgtcgagcctga

SEQ ID NO: 28776 - DNA, 1074 bp, Mycobacterium tuberculosis
gtggttgacccgacagcgacggattcgcccaaggtgagtatcgtctcgatctcctacaaccaagaggagtacattcgcgaggccctggacggcttcgccgcccagaggaccgagttccccgtcgaggtgatcatcgctgacgatgcctccacggacgccaccccgaggatcataggagagtacgccgcccgctatccgcagctgtttcggccgatcctgcggcagaccaacatcggtgtccacgccaatttcaaggatgtgctgtccgccgctcgtggcgagtacctcgcactgtgcgaaggcgacgattactggaccgatccgctgaagctgtccaagcaggtaaagtacctggaccggcatccggagacgacggtgtgttttcatcctgtgcgagtgatctatgaggatggcgcaaaagactccgagttcccgccgctcagctggcgccgcgacctgagcgtcgatgccctgctcgcgcggaacttcatccaaaccaactcggtcgtgtaccgccgtcagccgagctacgacgacatcccggccaacgtcatgccgatagattggtacttgcatgtgcggcatgcggtgggcggcgagatcgccatgttgcccgagacgatggcggtctaccgtcgccacgctcacggcatttggcattccgcgtacactgaccgccgaaagttttgggagacacgaggccatgggatggccgcgacgctcgaggcgatgctcgacctagttcacggccaccgcgagcgcgaggcgatcgtcggtgaggtgtccgcctgggtgcttcgcgagatcggaaagacacccggccgacagggtcgcgccctgcttctgaagtccatcgcggaccatccgcggatgacgatgctgtcgctacaacaccggtgggcgcaaacgccctggcggcggttcaagcgccggctgtccaccgagttatcgagcttggcggcgcttgcgtacgccacccgacggcgcgcactcgaaggtcgggacggcggttatcgcgaaaccacttctccgccgaccggtaggggacgtaacgtccgcggatcacatgcctag

SEQ ID NO: 28777 - DNA, 2838 bp, Mycobacterium tuberculosis
gtgaccgccattggacgacttatccatcgctacgcgatatggatcgtcggcgtctgggcgctcgcggccatcatcgggaataactttgccccgccactcgagcaggtcatcaccgccgaggatcagccgttctcgccggctggcaccgccacttcgcgtgccgtggaacggtcagcggcggccttctcccaagcgcccggcgacaacatcggatatctcgtgctggagcgaaacggagtcctcaacgaccaggaccgggcttactacgatgcgctggtcgtggccctacgccgtgattcccgccacgtcatcgaggtggtggactggtggggaaccccggccatcgcggaggtcgcccgcagcgacgaccatcacgcggtgacagctgccctgcgctttgggggcatggtcggaacgtcgcaagccggggagtcgataaccgccgcgcgcagcatcgttacccaactgcatccccccgacggtttgcacgtattcgtcaccggtcctggcgccaccatcgtggacgagttcgcggcaatcgacagacagacccagctcattacggcaacgacaatcgtggtgttactgatcctcttgttgatcgtctaccgatccgcgatcaccgcgacggtgccgttgttgtcggtcgtcgtttccctagccgtggccaagccgatcgtttccgtccttgtcgaccgcgatttcatcgggatatccctgttttccctcggacttagcgttgcggtggttgtcggcgcgggaaccggcttcgcgatgttcctgatcgggcgttaccacgaacgacgaaggcaacatattgccccggcggcggcgctggcagacgcgtaccgcggggtggcgccggcgatcgcgggtgcgacgttcatcgtggtcacatcgctgggcgctgtgggatggctgagcctggcacggatcggtatgttcgcaacaaccggaatcctttgctcgattggcgttctcgcagtgggcctggccgcactgacgttgacgccagctctcgtcgcgctggccagccgtgccaacctcctcaaaccgccacaacacaagcgcatacagcgccaatttcggcgactcggcacacatgtggcgcgctggccggcgccgatattggtagccagcggtgtgttcgtactcatcatgatgatcgcgctccctagggtgccgatcggctgggacgaagccgcggcaaccccgtccgcggcggaatccaatcgcggttaccgggcggccgatcgccactttgccccgaaccaactgctgcccacccaggtgatgatcgagaccgaccacgacatccgcaatcccgccggtctgaccgcgatcgaacgaatcactgccgcgatcatggctattggcggtgtgcgcatggtgcagtcggcgagtcatcccaacggaatggtgtccaagcaggctgccttgacagcatcggcggggaatctcggtgatcagctcgacgaattttccgatcagctcacatccaggcaggcaacgttcaccaatctcgaagctgcggtccgcgacgtggtgtcagccctcgatctggttcaggctggcatacgacaggatggctatggacttggccaggtcagtcgggccgtccggctgatgcaacaggcgataaccaaacttcagggcagcgccggtgacgtcttcgacatattcgacccgttgcgtcgtttcgtcgcggcgatacccgagtgccgggccaaccccgtgtgttcggtcgcccaagaggtggtgcagtgggcaaacaccgtcaccgagagctgtgcgaagctggccgatgcggcagggcagctcgcgcgggggatcgctgatgtcgcctcggcgacatcgggtgtgtccgggctaccgaatgccctggacggcattggaggtcagctggcgcaggtacgagaatcggccgcaggcgttcaagagttacttaacaatgtcggcgcagcaccattgcgagagcttcccgactatttacgcgaacttgccgccgtctcccagagtgcgccgggcgtggatctctacgccgctcggcgaattctgaccgacccgaatatgcgcgcggtcttggactattttgtctcaccaaacggccatgcaacgcgtttactcgtctacggcgacgggagcgagtggggtgacgatggcgcccaacgcgctcgcgcgatcgtgactgcggtggccgaggaaaccgacgagggcacgctgcgacccaccgctgttgagctgaccggcgttggaccggctacccgtgacctgcaggatctggtgggcagtgacctgaccttgctggcggtcatcacactggccgttatcttcgcgatagccgcactgctgctgcgcagtccgcttgccgggcttgtggtcgtcggcacaatcgcgacatcgtatatctgtgcgcttggcgccagcgtagtgatttggaaacacatacttggcgataacttgcactggtcggtattgccgattgcgtttgttttgctgatatcggtgggttcggcctacaacctgctcttcgcgctgcgcatccgcgaagaaagttctgccgggccacgaaccagtgtcatccgagcgttcgcggcgaccggaatggtagtcacggccgctggaatcgtgtttggcacaacgatgttcgcgctggccgcgagtacctcgctgagcgtggcacagatcggcgttaccgttggcatggggttattgctggacgcccttgtgatacgaggctttgtcctgccggccctgatggttttgctgggccgctggctgtggtggccgcgccgatcggttagcaaccggcaggtacccgagccgtcgccggcctaa

SEQ ID NO: 28778 - DNA, 474 bp, Mycobacterium tuberculosis
gtggcgcccgggaaccaacaggtctacggtggccgttggcataggtggaatacgccggcagttgcacgaaacttccataacgtaggtgacgtgtcaggagaggccatgggggcccagggttatctgcgcaggctcacccgtcggttgacggaggacctggagcaacgcgacgtcgaagagttatccgacgaggtgctcaatgccggcgcacagcgtgcgatcgactgccagcgcggccaggaggtcacggtggttggcaccctgcgtagcgtggaaaccaatggcaagggttgctcgggtggtgttcgcgccgaattgttcgacggcagcgacaccgtcacgctggtgtggttgggtcaacgccggatacccggcatcgacacgggccgtaccctgcgggtgcgcggccggctgggcaagctggaaaatgggacgaaggctatctacaacccgcattacgaaattcagcggtga

SEQ ID NO: 28779 - DNA, 255 bp, Mycobacterium tuberculosis
atgatcaccgctgcgctcaccatctatacgacatcatggtgtggctattgccttcgactcaaaacagcgctcacggccaaccgaatcgcttacgacgaggtcgacatcgaacacaaccgtgcggccgcggagttcgtcggctcggtcaatggcggcaacagaactgttcccacggtgaagttcgccgacgggtcgacgctgactaacccgagcgcggacgaggtcaaagcgaagctggtaaagatcgcgggttaa

SEQ ID NO: 28780 - DNA, 966 bp, Mycobacterium tuberculosis
atgcgtgcagtgctgatcgtcaaccccactgcgaccgccaccacaccagccggccgcgacctgctggcgcacgccctcgaaagccgccttcagctcacggttgagcacaccaaccaccgcggtcacgggaccgaactcggacaggcggcggtagccgacggggtggacctggtcgtggtgcatggcggcgatggcacggtaagcgccgtagtcaacggcatgctggggcgccccggcacgacgccggtccgaccggtgccagccgttgcggttgtgcccggcggctcggccaacgtactagctcgcgcgctagggatttccgcggacccgatcgctgccaccaaccaactcatccagctgctcgacgactacggccgccaccagcagtggcgccgcatcgggctgatcgactgcggtgagcggtgggcggtgttcaacgccggcatgggcgtcgacgccgaggtcgtggccgcggtagaggccgaacgcgacaaaggcggcaaggttacggcgtggcgctatattcgcgctgcggtgcgcgcggtgctcgcctgcactcgtcgcgaaccggctcttacgctgcaacttcccaaccgcgatccaattaccggagtgcactttgtgttcgtgtccaactccagtccgtggacttacgcaaacaaccggccggtatggaccaatcccgactgcaggttcgagtcggggctgggagtgttcgccaccaccagcatgaaggtggtcccgaccctgagggtggttcggcagatgttcgcaaaacagcccaagttcgagttcaaccacgtcatcaacaacgacgacgtcgcgtgtctacgcgtcacctccatggggcccccgatcgccagccaattcgacggggactacctcggcgtgcgcgagacgatgacgttccgagctgttcccgacgccctcgccgtagttgccccgcccgcaagaaagcggatctga

SEQ ID NO: 28781 - DNA, 1647 bp, Mycobacterium tuberculosis
gtgctcggctatcgcgtcctcacccagctcggccatctcacccagcaccgcccagctgcggcgggtggcctcgggttggtgcgcgatccaggccagcgcctgcagcccggcccgcatggagtcggggttggcgttgtaggcgtcgtcgatcaccgtcaccccgtcgccgcgggtggtcacctgcatccgatgccgcgacaccggcggcgccgcggtcagcgcggccgcgacctgttcaacgctggccccacactccagcgcgaccgccgcggcgcacagcgcgttagtgacctggtggtcgccgcagaccccgagtcggacctcggcttgggcatcgtgggcatgcagcgtaaagcgcggcctggccaattcgtccagcgacaccggccccgcccaaacgtcaccggtgttgtcccggctgacccgcaccacccgggccgcggtcagcttggccatcgccgccaccgcggggtcatcagcgttgaggacgaccgctccggaatgcggaacagcctgcggcagttcggctttggtctgtgcgatgacctcgcgggagccgaactcacccaaatgtgcggtgccgacgttgagcacgactccgatcgacgggggcgcgatctcggcgagcgcggcgatgttgccgtgatggcgtgccgccatctccaaaatcaggtagtcggtgcgccgcgtcgcgcgcagcaccgtccacgggtgacccagctcgttgttgaacgatccgggcggggccaccacctcccccagcggggccagcacggcggccatcaggtccttggtcgacgtcttgcccgacgagccggtgatcccgatgatggtgagcccgccggccaccaactgcgcggccaccgcggtggccagcttggccagcgcggccagcaccgccgcccccgacccgtcgttgtcgtgctcgaggacgccggccaatacgttcggcgcggccactggcggaaccacgatggccggcacccccaccgggcgggcggccagcacgacggcggcgcccgcggctaccgccgacgcggcatggtcgtggccgtcggcgcgcgcccccggcagggcgaggaacagcccgcccgggccgatggcgcgcgagtcgaactcgacggtcccggtgacgcggcggtgcgcggcgtcttgcggggagatatcggccactgcgcccccgacgatctcggcgatctgcgcgacggtcagctcgatcatgcgcgccgctcgagggcctctagcgcggcagccagctccacccggtcgtcgaacgggcggacccgcccgccgccgcgttgcccggtctcgtggcctttgccggcgatgagcaccacgtcgccggggcgcgcccaggcaaccgcgtgccggatcgcgtcccgccggtctgcgatctcgacgacctgggcatcaccgccgacttcggccgccccagccaggatttcgcggcggatcgccgtgggatcttcgtcacgcgggttgtcgtcggtgacgaccaccaagtcggccagctgcgcggctatccggcccatcggggcccgcttgcccgggtcacgatcgccgccggcgccgaacaccaccgccagccggcggtccgggtgcgccaaggtggtcagcaccgaccgcagcgcttccggtttgtgcgcg

SEQ ID NO: 28782 - DNA, 1275 bp, Mycobacterium tuberculosis
atggccttctccgtccagatgccggcactcggtgagagcgtcaccgaggggacggttacccgctggctcaaacaggaaggcgacacggtcgaactcgacgagcccctcgtggaggtgtcgaccgacaaggtcgacaccgaaatcccctcgccggccgcgggtgtgctgaccaagatcatcgcccaggaggatgacacggtcgaggtcggcggcgagctcgctgtcattggcgacgccaaggatgccggcgaggccgcggccccggcacccgagaaagtccctgcggcccaacccgagtccaagccggcacccgaaccaccaccggtccaaccgacgtccggagcgcctgctggtggcgatgccaagccggtgctgatgcccgagctcggcgaatcggtgaccgaggggaccgtcattcgttggctgaagaagatcggggattcggttcaggttgacgagccactcgtggaggtgtccaccgacaaggtggacaccgagatcccgtccccggtggctggggtcttggtcagtatcagcgccgacgaggacgccacggtgcccgtcggcggcgagttggcccggatcggtgtcgctgccgacatcggcgccgcgcccgcccccaagcccgcacccaagcccgtccccgagccagcgccgacgccgaaggccgaacccgcaccatcgccgccggcggcccagccagccggtgcggccgagggcgcaccgtacgtgacgccgctggtgcgaaagctggcgtcggaaaacaacatcgacctcgccggggtgaccggcaccggagtgggtggtcgcatccgcaaacaggatgtgctggccgcggctgagcaaaagaagcgggcgaaagcaccggcgccggccgcccaggccgccgccgcgccggccccgaaagcgccgcctgcccctgcgccggcgttggcacatctacggggcaccacccagaaggccagccggattcgtcagatcaccgccaacaagacccgcgaatctttgcaggcaacggcacagctgacacaaacccatgaggtcgacatgaccaagatcgtggggctacgggcccgggccaaggcggcgttcgccgagcgtgagggcgtgaacctgaccttcctgccgttcttcgccaaggccgtgatcgatgccctcaagattcacccgaacatcaacgctagctacaacgaggacaccaaggagatcacctactacgacgccgagcacctaggattcgctgtcgacaccgagcagggcctgctctccccggtc

SEQ ID NO: 28783 - DNA, 1494 bp, Mycobacterium tuberculosis
gtgatgtctgcgcaacgtgtggttcgtacggttcgtaccgctcgggctatttccacggcactggccgtcgcgatcgtccttggcaccggggtggcgtggagcagtgtccggtcgttcgaagacggcatcttccacatgtcggcgccctcgctggggcacggcggcgacgacggcgcgatcgacattttgctggtcggcctggacagccgtaccgacgcgcacggcaacccgttgagcgccgaggaattggcgacattgcacgccggcgacgaggaagccaccaacaccgacaccatcatcctgatccgggtacccaacaacggaaagtcggcgaccgcaatctctataccgcgggactcctacgtcgcggctcccggtctgggtaagaccaagatcaacggcgtctacgggcaaaccagagagaccaagcgggccggcctggtccaagccggtgcctcgccgaccgaagcggccgccgccggcaccgaggccgggcgtgaggcgttgatcaagacggtcgccgatctgaccggcgtcaccgtcgaccactacgccgagatcgggctgctcggtttcgcgttgatcgccgacgcactcggcggcgtcgacgtctgcctcaaagagcctgtatacgaaccactttcgggtgccgattttccagccgggcggcaaaagctcaacggtccgcaagcgctcagcttcgttcgccagcggcatgatctgccccgcggcgacctggaccgggtggtacgtcagcaggcggtgatggcggcgttggcccaccgggtcatctccggacagacgctatccagccccgccacgctgaagcggttggagcaggccgtgcagcgctcggtggtgctgtcctccgggtgggacatcatggatttcgtccgccaattgcagaagctggccggcggtaacgttgccttcgccaccatcccggtgctcgacggcgccggctggagcgacgacggcatgcaaagcgtggtgcgggtggatccgcgtcaggtgcaggactgggtcgtcggcctgctgcacgagcaggaccagggcaagaccgacgagctggcctacacacccgccaagaccacggccaacgtggtcaacgacaccgatatcaacgggcttgcggcagcggtgtcaaaggtgttgagctccaaggggtttaccaccggatccgtcggcaacaacgacggcgaccacgtgcctggcagccaggtgcgggccgcaaaggccgacgacctgggcgcacagcaggtcgccaaggaactgggcgggttgccggtggtcgccgatgcgtcaatcgcgcctgggtcggtgcgggtggtgctggccaacgactacagcggtccgggctccgggctggggggtagtgatccgaacggcgtcgtatcgccggcccgcgcgttcaacctcgggtccgccgacgacacgactcccccgccgtcgccaatccttaccgccggctccgacgcgccggagtgcatcaac

SEQ ID NO: 28784 - DNA, 825 bp, Mycobacterium tuberculosis
gtggccaccgtggccgaagcgttcgatgcgacccaagccgtggcgagaatcctggccgaacatggcccattgagcgaggacgacatcgcacgacgcctgctggacagcggcgtggccgacccggacgccgtcctgcgcgcgcttcgccttgaaacggaatggccggcaaggcagttggtcgacgatcggtgggtgtggctgccgacgctgctagccgggcgggtattcacccatcggctcggcgcggacgaggcggtccacgacatgctcggcgtgaccccggacctggacccgatcaccacgctctgcgagcacgaggagtatggccggctggccgacggttcggcggcgcggatcgtgctggccggatacgacgaggagctgctcgaacgacggggcatcccggacgaggccatcgaccccggcggggcactgctgctggagccgggcacgctggcgacgttgggggccgccgcgggggatctggtcggtgtgcggctgaccgccgcagggctggtgctcgagcggatcggcacagccggtgcggacacctccgtcggcgcccggctggccgagctggtcgaccccgacgagcccgcgttcttccccgcggcggtctggacggcgtgcgtcgacgacccggcggcatttaccgagccagtggcaccgctgcgcgagatcctcgaccagcacggcctcacgcacgaagacgactggctagcacctggcggattcaatttcgacgcttggcgtttcgagaaccgatgcgaactgctggcctttcgcccgacctcgaccccaacgacgcggtcgcgctgtacacgc

SEQ ID NO: 28785 - DNA, 741 bp, Mycobacterium tuberculosis
gtgagcagtagcatcgagatcttccccgatagcgacattctggtcgcggccgcgggtaagcgcttggttggcgccatcggggccgcggtggcggccagagggcaggcgctgatcgtgctgaccgggggcggcaacgggattgcgcttctgcgctacctcagcgcccaagcacagcagattgaatggtccaaggtgcacctgttctggggcgacgaacgctacgttcccgaagacgatgacgagcgcaatctcaagcaggcccggcgggcgttgctcaatcacgtcgacattccatcgaaccaggtgcacccgatggccgccagtgatggtgacttcggcggcgatctggacgccgcggccctggcctacgaacaggtgctggccgccagtgccgcaccaggtgacccggcgccgaatttcgacgtccacctgctgggcatggggcccgagggccacattaactcgctgttcccgcacagccccgccgtcctcgagagcacccgcatggtggtggcggtcgacgactcgccgaaaccgccgccacgccgaatcaccttgaccctgccggcgattcagcgttcccgcgaggtgtggctgctggtttccgggccgggtaaggccgacgccgtggccgcggccatcggcggcgccgatccggtttcggtaccggcggccggggccgtcgggcgtcagaacacgctctggctgctggaccgcgacgccgccgccaagcttccgagt

SEQ ID NO: 28786 - DNA, 1356 bp, Mycobacterium tuberculosis
atgtctcaagcgcagccgcgccccgccgcacccaaccccaagcggaacgtcaaagcgattcggacggtgcgtttctggatggcaccgatcgccaccacgttggccctgatgtcggcgctggccgcgctctatctgggcggcatcctaaaccccatgaccaatttgcggcatttcccaatcgcgttggtgaacgaggacgccgggcccgcgggccagcagattgtcgacggtctggtttccggcttggacaagaacaagttcgacatccgagtggtttcgccggacgaggccaggcggctgctcgacaccgcggcggtgtacggctcggcgctgataccgccgaccttctcgtcgcagctacgggacttcggggcgagtgcggtgacgccaacccgcacagaccggcccgcgatcacgatctcaacgaatccgcgggcgggcacgctggcagctagcatcgccggccagacgctgacccgggcactgacggtggtcaacggcaaagtgggcgagcgacttaccgcggaggtagcggcccagaccggcggtgtggcactggccggggcggcggcggccgggctggccagtcccatcgatgtcaaatccaccgcctataacccactgcccaacggcaccggcaacgggctgtcggcgttttactacgccctcttgctgctattggcgggctttaccggcagcatcgtggtgagcaccctggtggactcgatgcttggctatgtaccagccgaattcggccccgtctatcgcttcgccgagcaggtcaacatctctcgcttccgtacgctgttggtcaagtgggcggtgatggtggtgctggcgttgctcacctcgggtgtctacctggcgatcgcccacggcctgggcatgccgattccgctcgggtggcaagtatggctctacggagtattcgcgatcatagcggtcggcgtcacgtccagctcgctgatcgcggtgctgggctcgatgggcctgttggtcagcatgttgatcttcgtcatcctcggattgccgtcggcgggcgcgaccgtcccgctggaagccgtaccagcgttcttccgctggttggctcaattcgagccgatgcaccaggtgttcctaggtgtgcggtcactgctgtatctgaacggaaacgccgacgccggcctgtcccaggccctgaccatgacgtcgatcgggctgatcatcgggctgttgctgggtggattcatcacacacctgtacgaccgcagcagcttccaccgaattccgggagcggtcgagatggcgatcgccgtggaacaccaagctcaataccaagctcgccaaagcgcacgcgaaagctcaagcgaacaaccg

SEQ ID NO: 28787 - DNA, 1154 bp, Mycobacterium tuberculosis
ctgccggccggctgccccaaccgagggtggacttgccccgggtcggccagatcaactggaaatggatacggcgttcgctgtacctcaccgcggcggtggtgatcctgttgccgatggtcaccttcacgatggcctacctgatcgtcgacgttcccaagccaggtgacatccgtaccaaccaggtctccacgatccttgccagcgacggctcggaaatcgccaaaattgttccgcccgaaggtaatcgggtcgacgtcaacctcagccaggtgccgatgcatgtgcgccaggcggtgattgcggccgaagaccgcaatttctattcgaatccgggattctcgttcaccggcttcgcgcgggcagtcaagaacaacctgttcggcggcgatctgcagggcggatcgacgattacccagcagtacgtcaagaacgcgctggtcggttccgcacagcacgggtggagcggtctgatgcgcaaggcgaaagaattggtcatcgcgacgaagatgtcgggggagtggtctaaagacgatgtgctgcaggcgtatctgaacatcatctacttcggccggggcgcctacggcatttcggcggcgtccaaggcttatttcgacaagcccgtcgagcagctgaccgttgccgaaggggcgttgttggcagcgctgattcggcggccttcgacgctggacccggcggtcgaccccgaaggggcccatgcccgctggaattgggtactcgacggcatggtggaaaccaaggctctctcgccgaatgaccgtgcggcgcaggtgtttcccgagacagtgccgcccgatctggcccgggcggagaatcagaccaaaggacccaacgggctgatcgagcggcaggtgacaagggagttgctcgagctgttcaacatcgacgagcagaccctcaacacccaggggctggtggtcaccaccacgattgatccgcaggcccaacgggcggcggagaaggcggttgcgaaatacctggacgggcaggaccccgacatgcgtgccgccgtggtttccatcgacccgcacaacggggcggtgcgtgcgtactacggtggcgacaatgccaatggctttgacttcgctcaagcgggattgcagactggatcgtcgtttaaggtgtttgctctgggg

SEQ ID NO: 28788 - DNA, 3851 bp, Mycobacterium tuberculosis
ctgcccaccaccccatggcagcacacccagcactggatcaccgccacgtcggccgcttacacaggcccgacacccacccgttgcttggcgtcggtgtcaccgaccccactakcggcacccgggtttgggaaagcgagctcgaccctgatctgctgtggctcgccgatcacgtcatcgacgatctcgttgtgctgcccggggcggcctacgctgagatcgcgctggcggccgcgaccgacaccttcgcagtcgagcaagatcagccctggatgatcagcgagctcgaccttcggcagatgctgcatgtgaccccaggcaccgtgttggtcaccacgctcaccggcgacgagcagcgatgccaggtcgaaatacgcacccgcagcgggtcttcgggatggaccacccacgccaccgccaccgttgcccgcgccgagccgttagcaccgctggatcacgaaggacagcggcgcgaggtaaccactgccgacctcgaggaccaactggatcccgacgacctgtatcagcgcctgcgcggcgccggccaacagcacggacccgcgtttcaaggcatcgtggggctggccgtcacgcaagctggcgtggcccgtgcgcaagtacggctacccgcatcggccagaacgggttcccgtgagttcatgctgcacccggtgatgatggatatcgcgttgcagacactgggagccacccggacggcgaccgatctggccggcggccaggacgcccggcagggcccatcttccaactcggccttggtggtaccggtgcgtttcgccggtgtccacgtgtacggcgatatcacccgcggggttcgcgcggtcggctctctggccgcagccggtgaccggctggtcggcgaggtagtcctgaccgacgcgaatggccaaccgctgctggtcgtcgatgaagtcgagatggcggtgctcggatccggcagtggcgcaacggaactcaccaaccgcctattcatgttggagtgggagcccgcaccgctggaaaagaccgccgaggctacgggtgccctgttgctgatcggtgaccccgccgcgggtgacccgctgctgcccgcgctgcagtcgtcgctgcgcgaccgcatcaccgacctcgagctggcatccgcggccgacgaagccacgctgcgcgcggcgatcagccgaacctcctgggacgggatcgttgtggtctgtccgccccgagcgaacgacgaatcgatgccggacgaggctcaactggagttggcacgcacacgcacgctgctggtcgccagcgtggtcgagaccgtgacgcgaatgggtgcccgcaagagcccccgactgtggatcgtcacccgtggcgctgcacagttcgacgcaggcgagtcggtcacgttggcgcagaccggcctacgtggcatcgcacgggtgctgacatttgagcattcggagttgaataccaccctcgtagatatcgaaccggacggcaccggctcgctggccgccctggccgaggagttgcttgccggttccgaggccgacgaggtcgccttgcgcgacggtcaacgctatgtcaaccggctggtgcccgcacccaccacgaccagtggtgatctcgccgccgaagctcgccaccaggtggtgaacctggacagctcgggcgcttccagggcagctgtccgactgcagatcgatcaacccggacggctggacgcactaaacgttcacgaggtgaaacggggcagaccgcaaggcgatcaagtcgaggttcgcgtcgtcgccgccggactcaacttcagcgacgtgctcaaagcgatgggcgtgtatccgggactcgacggtgccgcgccggtgatcggcggcgaatgtgtcggctacgtgacggccatcggtgacgaggttgacggcgtcgaggtcggacagcgagttatcgcattcggccctggcacattcgggacccatctggggaccatcgccgatctcgtcgtcccaattccggacacgctagccgacaacgaggcggccacgttcggcgtcgcctatctcaccgcctggcactcgctgtgcgaggtcgggcgcctatcccccggcgaacgsgtgstcatccattccgccaccggcggtgttggaatggcggcggtctcgatcgcgaagatgatcggcgcccgcatctacacgacggccggttcggacgccaaacgggaaatgctttccaggctcggtgtcgagtacgtcggcgactcgcgaagcgtggatttcgctgacgagatcctcgagctgacagacggctacggtgtggacgtcgttctcaattcgctggcgggcgaggcgattcaacgcggcgtgcagatccttgcgcccggtggccggttcatcgaactgggcaagaaggacgtctacgccgatgccagcttgggcttggccgcgctagccaagagcgcgtccttctccgtggtcgacctcgacctgaatctcaagctgcagccggcgcgctaccgccaactcctgcaacacatcctgcagcacgtggcggatggcaaactcgaggtacttcccgtcaccgcatttagcctgcacgatgcggccgacgcattccggcttatggcatccggtaaacacaccggcaagatcgtcatctcgataccccagcacggcagcatcgaggcgatcgctgccccgccaccacttcctctggtcagccgcgacggcggctacctcatcgtcggcggtatgggtggtctcggattcgtcgtcgcgcgctggctggctgagcaaggtgcgggactgattgtcctcaacggacgctcggcccccagcgacgaggtggcagccgctatcgcggagctgaacgcctccggtagccggatcgaggtgatcaccggcgacatcaccgagccagacaccgccgagcggctggtgcgggcggtcgaagacgccgggttccggctggccggggtggtgcacagcgcgatggttctcgccgacgagatcgtgttgaacatgaccgattccgccgctcggcgagtgttcgccccgaaggtcaccggcagctggcggcttcatgtggccaccgccgcgcgcgacgtcgactggtggctgaccttctcctcggccgccgcgctgctgggcactcccgggcagggcgcgtacgccgccgccaactcgtgggtcgacggcctggtcgcgcatcggcgctcggccggacttcccgctgtcgggatcaactggggcccgtgggccgacgttggacgcgcgcagttcttcaaagacctcggggtggagatgatcaacgccgagcaggggcttgccgccatgcaggcggtactcaccgccgatcgcgggcgcaccggtgtgttcagcctcgacgcgcggcagtggttccaatcgttccccgctgtggcggggtcctcgctgttcgcgaagctgcatgactcggcggcccgcaaaagtgggcagcggcgcggcgggggcgcgattcgcgctcagctagacgccctcgacgcggccgaacgcccaggccacctcgcgtccgcgatcgccgacgagatccgtgcggtgctgcgctcaggcgatcccatcgatcaccaccgaccgctggaaaccctgggactcgactcgctgatgggcctggaattgcgcaatcggctggaagcaagtctgggcatcacgttgccggtcgcgttggtgtgggcatacccgacgatcagcgatctcgcgaccgccctgtgcgaacgaatggactacgcgacacccgcggctgcgcaggagatttccgatacagaacccgaactgtccgacgaggagatggatttgctcgccgatctggttgacgccagcgagctggaagctgcgacgcgaggc

SEQ ID NO: 28789 - DNA, 964 bp, Mycobacterium tuberculosis
atcgtgttgacccgtaacccgagaatggtggggggcacggccacgcctggacagcatcacatacctggtgctcgatgatgccgcccggctgccggcgctgcagaacaacacaatcgacgccaccggcgtcggcacactggaccagctgaccatcgcggcgcgcaccaagggcatctcgatccggcgcgcccccgggcccagctggtatcacttcaccctcaacggtgcgcctgggtcgatcctcgccgacaaggcgctgcgcctggcgatcgccaagggcatcgaccgatacaccatcgccagggtcgcccaatacggcctcaccagcgacccggtgccactgaacaaccacgtcttcgtcgccggccaagacggctaccaggacaacagcggcgttgtcgcctacaacccggaacaagcgaaacgggagctggacgccctgggctggaggcgaagcggcgcgttccgggagaaggacggtcgccagctcgtcatccgcgatctgttctacgacgcacaaagcacccggcagttcgcccagatcgcccaacacaccctggcgcagatcggcgtcaaactcgaacttcaggccaagtccggcagcggtttcttcagcgactacgtcaacgtgggggctttcgacatcgcacagttcggctgggtgggcgacgcgtttccgctgtcatcgctcacccagatctacgcttcggacggggaaagcaacttcggcaagatcggtagcccgcaaatcgacgccgcgatcgagcgaacgctggcagaactcgatcccggcaaggcgagggccttggccaaccaggtcgacgagctgatctgggccgaaggattcagcctgccgcttacccagtcgcccggcaccgttgcggtccgcagcacgctggccaacttcggcgcgacgggtctggcagacctggactacaccgccatcgggttcatgcgacgctga

SEQ ID NO: 28790 - DNA, 399 bp, Mycobacterium tuberculosis
ggtacgggaatatcaacccgttgtccatcgactacgcctgtcggcctcgccttaggtcccgactcaccctgggcggactggcctggcccaggaacccttggtctttcggcgggcaaggttctcacttgccttgtcgctactcatgcctgcattctcactcccccaccctccaccaccggtcacccggtggcttcgctgaatgagggacgctcccctacccacacccaccacaaggtggatgtgccgcggcttcggcggtgtgcttgagccccgctacattatcggcgcacaatcacttgaccagtgagctattacgcactctttcaagggtggctgcttctaagccaaccttctggttgtctttgcgactgcacatcctttcccacttagcacacgctt

SEQ ID NO: 28791 - DNA, 171 bp, Mycobacterium tuberculosis; identical to SEQ ID NO: 26108

SEQ ID NO: 28792 - DNA, 1023 bp, Mycobacterium tuberculosis
atgaccgagcggaagcgaaatcttcggccagtgcgcgacgtggcaccgcctacgctgcagttccgcaccgtccacggttatcggcgggcattccggatcgccggttccgggccggcgattctgcttatccacgggataggtgacaattccaccacctggaatggggtgcacgccaagctcgcccaacgattcaccgtcatcgctccggatctactgggccacgggcaatccgacaagccgcgtgccgactattcggttgcggcttacgccaacggcatgcgggacctcctcagcgtgctcgacatcgagcgggtgaccatcgtgggccattcgctcggcggcggggtagcaatgcaattcgcctaccagttccctcagctagtcgaccgactgatcctggtcagcgcgggcggtgtcaccaaggacgtcaacatcgtcttccggttggcctcgttgcccatgggcagcgaggctatggccttgctacggttgccgctggtgctgccggcagtgcaaatcgccgggcggatcgtgggtaaggccatcggtaccaccagcttggggcacgacctgcccaatgtgctgcgcattttggacgacctgccagagccgacggcttctgcggcgttcggccgcaccctgcgggcagtggtggactggcgggggcagatggtcaccatgctggaccgatgctatttgaccgaagccatcccggtacagatcatctggggcacaaaggatgtcgtgctgccagtccgtcacgctcacatggcgcatgccgccatgccgggctcgcaattggagattttcgagggctcgggacatttcccgtttcacgacgaccctgcgcgcttcatcgacatcgtcgaacgcttcatggacaccactgagcccgccgaatacgaccaggccgcgctgcgcgcgttgcttcgccggggtggcggcgaagcaaccgtcaccggctcggcagacacccgtgttgcagtactgaacgccatcgggtccaacgaacgcagcgctacc

SEQ ID NO: 28793 - DNA, 270 bp, Mycobacterium tuberculosis
ctgcgcggttcgacgttcacggtgtcgaacttcggggcgctgggagtcgacgacggcgtgccggtgatcaaccatcccgaagcggcgatcctgggtctgggggcgatcaagccgcgcccggtggtcgtcggcggcgaggttgtcgcacggccgacgatgacgttgacttgtgtgttcgaccaccgcgttgtcgatggtgctcaggtggcccagttcatgtgtgagctgcgggatctgatcgagtcgccggagaccgcgctgttggatctg
